United States Patent Application Publication US 2007/0067865 A1 - sequence listing, part 20

SEQ ID NO: 125681 - DNA, 449 bp, Arabidopsis thaliana
ctctatcttccttatctctctccgccactctccttctctttctccgaactcttcgatggccggtctactcaaaacgccgtctttacatctcacaccaactcttcttcatgctccttctgtaccctttaagcccttttgcgtatctttcgccggaggaagaaacgttagcgtctcactctctcgccgagcttctctccggtctgtctctagcggctatcctctccgcttactaaacctcgtaccctttgcttcgggagaagctgagacgacggagacggaggtggaatcgaacgaacccgaagttcaggagacggatggtgctgttgatgtcgagaatgaaaatgccagtgctgaggagggtgaagctgctgtagtagtagcaactgttttcactttgtttgtgaattctaatttgtagtttagtttttaactatttggggttgattttt

SEQ ID NO: 125682 - DNA, 439 bp, Arabidopsis thaliana
aaattactcttcctctctagccatggccgtctgtaactgcttcctccaagctccaccactctctcgcatactcctaccggttttatctcgccgagctactactctctctgccggttatggtcggctcaaatccacggtcacgttctgctctactgtgaaccggaccagtcctctgacatcttcggtccgcgcagaagtaaagcgcgtctcgcgtaaagacgataaagtagcttcagctactgatgttcaatttgagacgcctttgaagattgttgagtatccggatcctatactacgggctaagaacaagaggattgatatttttgacgagaatttaaagaacttggttgatgctatgtttgatgttatgtacaaaacggatggcattgggctctcagcaccacaagtaggtctcaatgttcaactcatggtgttaaat

SEQ ID NO: 125683 - DNA, 465 bp, Arabidopsis thaliana
cggacgcgtgggcggacgcgtgggcgagtacattcaccggaaaatggatgccggagctgaaattgatgtggttcggccggtggaggcagattcggcggcggaaattagtccggaacaagaccacgaaggaagatcggagccttcgtcgttgaaccaaggggagattttaaaaacacttgctacggtggagaaggattcgcaggcaatcgcggagagcttttcgtctctctttgtttccctccgatcaactctttctgaggctactggtagctcggttgatcacatggcttgctttggagaggcagcgggacggcttcaggaaaatgctctagatgcagccaccaaagggaaccggtacatcaactcttgcctcagattaaacgaggaaattaaaggcgttgagaatttggcggctcggttaaagcacctgaggaaaaacgtggatgttcttgacacggctgtaaa

SEQ ID NO: 125684 - DNA, 478 bp, Arabidopsis thaliana
  unsure (1)..(478): unsure at all n locations
nnnnnnnnnnnnnnnnnnnnnnnnnnnnnnnnnnnnnnnnnnnnnnnnnnnnnnnnnnnnnnnnnnnnnnccacgcgtccgcggacgcgtgggctcatgtttggggtttccgagacgcctgtgctgaacaccatctgcagaagggacaaggtgttgctgggagggcgtttcagtctggaaatctatgcttctgtagagatgttactcggttctgcaaaaccgactacccattagtacactatgcacggatgttcaagttgacgagctgtttcgcggtctgcttaaagagcacatatacaggggatgatgagtacgttccttgaattctttcttcctccagccatcacagacaagagtgagcaagattgtctattgggttctctgcttcagacaatgaagcagcactattcgagtctcaaggttgtctctgaaactgaactctgtgaaaacaacatgtctcttgaagtcgtggaagctt

SEQ ID NO: 125685 - DNA, 1317 bp, Arabidopsis thaliana
cgataagaagaagactggaatttttttgaggaggactctgctccatcgccgcccgccctgtaacccaccggactcagtaaactagtctgtaacacaatatcttctatttcagataagatttagcttggagaagagcaagttccgaaaatggaggggcgtcgtgtatagatccaccacccacagccctgatggaagcagacaacggaggccccaattctagtcatgcatccaaacaacgtctgcgttggacgcatgagctacatgaacgcttcgttgatgccgttgctcaacttggtggccctgatagagctacacccaaaggcgttcttagagtgatgggtgtacaaggcttaactatatatcatgtcaagagtcacttacaggaatatcgacttgcaaagtatcttccagattcgtcttctgaagggaaaaaaactgataagaaagaatctggagatatgctctctgggttggacggctcgtcgggaatgcagataactgaagccctcaagttgcagatggaagttcagaaacgattgcacgagcaactagaagtgcaaagacagctgcaactacggatagaagcacaaggaaagtacttgaagaagataattgaagagcaacaacgactcagtggagtactcggcgaaccctcagccccagtaacgggcgattcagatcctgcaacccctgccccaacatctgagtctcctcttcaagacaagtcttggcaaggactgtggaccagacaaaagtctctcagttgacgagtctctctcatcttgccgggagcctttaacaccagactcagggtgtaacattgggtctccagatgagagcacaggagaggagagattatcaaagaagcctcgattggtgagaggtgcagctggttatacacctgatattgtagtgggtcacccaatactagaatcaggcttgaacacttcttaccatcagtcagaccatgtcctcgcctttgaccagccatctacatcactgcttggggccgaagaacagttggataaggtttcaggagataatctttgagttgttgagtgtaccacatgtagtgttgtttatcctaatccttattagttaggagtttcctctaataatgtgatcacaagtcgttaattctctaggcactatcacgagcatgaagaatgaatatgtctgtgttgtgctgtaatttggtagacacaaaacaaaattactcttattcccaacaaaaaaaaaaaaaaaagggcggccgctctagaggatcccagcttacgtacgcgtgcatgcgacgtcatagttctctatagtgtcccc

SEQ ID NO: 125686 - DNA, 807 bp, Arabidopsis thaliana
tgatctccaggtacataccactcacttagggaaagctcctacgcctgcaggtaccggtcccgaattcccgggtcgacccacgcgtccgcggcgaacggaaaagatgggtacttcggtgcaagtgactcctctctgcggagtttacaacgagaatcctctctcctacttagtctccattgatgggttcaacttcctcatcgactgtggttggaacgatctcttcgacacatcgctcctcgaacctctctccagggttgcttctactatagatgcagttttgctttctcatccagatacacttcacattggtgctcttccttatgctatgaagcagcttggactctccgctcctgtttatgctactgagcctgttcatagattaggtctccttacaatgtatgatcagtttttgtccaggaagcaagtatccgactttgatctgtttacactggatgacatagattctgctttccagaatgtgatcagattgacttactctcaaaattaccatctttctggaaagggagagggtattgtaattgctcctcatgttgctggacacatgctgggaggtagcatctggaggataacaaaggatggggaggatgttatatatgctgttgactacaatcatcggaaagaaaggcatttgaatggaactgttttacagtcttttgttcggcctgctgttctgataaccgatgcatatcatgctctttataccaatcaaaccgcaagacagcaaagggacaaagaatttctagataccatttcaaaacatcttgaagttggaggaaatgttctatt

SEQ ID NO: 125687 - DNA, 746 bp, Arabidopsis thaliana
atacgactcactatttggagagctggcacgcctgcaggtaccggtccggaattcccgggtcgacccacgcgtccgcccacgcgtccgaaaacattggaaaaaccctaattcctagtgttgcgaatcacttttcattgcagctttgaacttcagtctgtgaatttccaacagcaatgacaactccagcaaaaaagagactgatgtgggatttcaagagactgcagaaagatcctcctgtgggaataagtggagctccacaagataacaatatcatgcattggaatgctctcatctttggacctgaggacactccatgggatggaggtactttcaagttgactcttcacttcaccgaggattatccgaacaaacccccgattgttcggtttgtttcacggatgtttcatccaaacatttatgctgatggaagcatttgcttggatatcttgcaaaaccagtggagccccatctacgacgttgctgcagttctcacatcaattcagtctttgctctgtgacccaaaccctgactcaccagcgaacgcagaggctgcaaggttgttcagtgagaataaaagagaatataccaggaaagtaatcgagatcgtggagcagagctatgtataaatatgattcattttgttgtattgactaatgagtaattggatgttgaatagtatttattatctgccttgagtttaatttacatggatgtttaaacttcgccaatgagatttctgctatata

SEQ ID NO: 125688 - DNA, 431 bp, Arabidopsis thaliana
ccacccgtccggaaaagggaaagaaaaatctcacctttgatcctctctccctctatatatgctttatttattctccactcataatagtttcatcatctctttcggtctatgaaaaacattggaaaaaccctaattcctagtgttgcgaatcacttttcattgcagctttgaacttcagtctgtgaatttccaacagcaatgacaactccagcaaaaaaagagactgatgtgggatttcaagagactgcagaaagatcctcctgtgggaataagtggagctccacaagataacaatatcatgcattggaatgctctcatctttggacctgaggaccactccatgggatggaggtcctttcaagttgactcttcacttcaccgaggattatccgaacaaacccccgatggttcggtttgtttcacggatgttt

SEQ ID NO: 125689 - DNA, 626 bp, Arabidopsis thaliana
ggtccacacacgcgtccggaataatccataatccgcgaggttggggagttgtgggaatcgggtgtgaaagaagttacgcttttagggcaaaatgtgaacagctataacgatgattcagctgatcgtgagtcaggtgctaactgggaatacagtgagggattctcgagccggtgtaaagttaaaaacatgggtttgcgatttgctgatctcttggaccgactctctgtagagtttccagagatgcggtttaggtttacatcgcctcatcctaaagattaccctgacgagttgctgtatttgatgagagatagacataatatctgcaatctcatccatcttcctgcacaatctggtaatagcagaatactagaacaaatgcgtagaggttacaccagagaagcttatttggatcttgttaaaaagattcggagtattataccagatgtggctataaccagcgactttataactggcttctgtggagaaactgaagaagagcatcaagaaaccctaagcttggtgagagcagttggatacgatatggcgtatatgtttgcatacagcatgagagaaaagacacatgctcatcgcaactacacagacgacgttccagaggatgtgaaaca

SEQ ID NO: 125690 - DNA, 571 bp, Arabidopsis thaliana
  unsure (1)..(571): unsure at all n locations
ttccaaagganaaaggnttgnnaaaaannacccccnggncntnacctnaggggtaaaaaaacctnggttaaaacnttnaanaaggtaaaccccaaaattgancnaaacccntttaaagcattgggaaatnaagggacccgttaaaaantggaanacctcaattgaccccccgttggccccaaccgaccaactctccaccaatgaaaacgcccggaactgcggggctacacccgagccgcaacaacgcctgctcgatctccctccctctagatatctcatccagctcgtaaaccgctggatttgctccgaaatcgcagagcaaagtcttgatcgtgtgagacatacagcaagagctcttgctgtaaatcaccaccggtctctccatcaccatcttcgttatcatatccattgctattttatatggtatatgatccaacagcttcttaagtcgtttcttaaataggtctatgaatctatatttatgatctcttagtatatagatcgattttttttttgtagagatttaaggaaaagaagtactcttgattctacgtggagaataagggtattc

SEQ ID NO: 125691 - DNA, 715 bp, Arabidopsis thaliana
ttctagatcgcgagcggccgcccttttttttttttttttttgcaggtcaatatatttttatttcatagaagttcgtatcagtcgatacatatcttaaagtaagacaaccaaaaaaaaaaaagacaacacactgattattgatccgacgtggactcatcatatcaccatgccaagatcatagatgtgttaaaattattctgcgtacttaacttagtgttaagtaaactagttaaaaacatgataagtcaaacccacaatgcaccagcccgcttaagcatgggaatcaaggatccgttaagatgtagactcatgacctcgttggctccaccgaccaactctccaccaatgaaaacgcccggaactgcggggctacacccgagccgcaacaacgcctgctcgatctccctccctctagatatctcatccagctcgtaaaccgctggatttgctccgaaatcgcagagcaaagtcttgatcgtgtgagacatacagcaagagctcttgctgtaaatcaccaccggtctctccatcaccatcttcgttatcatatccattgctattttatatggtatatgatccaacagcttcttaagtcgtttcttaaataggtctatgaatctatatttatgatctcttagtatatagatcgattttttttttgtagagatttaaggaaaagaagtactcttgattctacgtggagaataagggtatt

SEQ ID NO: 125692 - DNA, 929 bp, Arabidopsis thaliana
  unsure (1)..(929): unsure at all n locations
cnnnnnnnnnnnnnnnnnnntatacgactcatatagggaaagctggtacgcctgcaggtaccggtccggaatccccgcgtcggcccacgcgtccgtacggctgcgagaagcgacagaaggggggagttggaggtgggattgtgttggccattgttgttgttattattgggcttagaggaacacaaaaagctatgagctcgacgttcttgttctctggtgttgttcctctgcgtgtgagatcggttttgactccagctaatccggctaccgatagagcttcaatggcgagttcctctggtgctaagtgggctcagaaaaccatcacgcttccaccgctacgtcgtggatgtcatcttattactccaaagatattgaaagaaataagggaagacttgtcagatttcaattgtggtcttgctcatgtcttcttacaacacacaagtgcttctctgacaatcaatgagaattatgatccagatgttcaggctgatactgagactttcttgaacaggattgttcctgaggggaattcagcgccttggaggcatactatggaaggtcctgatgacatgccagctcattatcaagtcatcaatgtttggatgtcaactcacaatcccaataacaaaaggaaaactcagcatgggaacttgccagggtatatggctctgtgaacaccgtgatgctccaacagcacgcagagttgtggtcgctctcaatggaatctagagatgtctcttcacgttagatggcttgtaacctcgtaatgttttaatagatttttacagtcttgtaatgaaatttgactttctatatgaaaccactttgtcccaaaaaaaaaaaaaaagagaaaaccaaaaagcggccgctctagaggatccaagcttacgtacgcgtgcatgcgacgtcataaaactctataggtgtcc

SEQ ID NO: 125693 - DNA, 997 bp, Arabidopsis thaliana
  unsure (1)..(997): unsure at all n locations
tatacgactcatttagggaaagctggtacgcctgcaggtaccggtccggaattcccttgtcgacccacgcgtacgctcggctgcgagaagacgacagaagggtacggctgcgagaagacgacagaagggtacggctgcgagaagacgacagaagggtacggctgcgagaagacgacagaagggtacggctgcgagaagacgacagaagggtacggttgttagaagacgacagaaggatacggctgcgagaagaccacagaagggggccattggtgttgttattattgggcttagaggaacacaaaaagctatgagctccacgttcttgttctctggtgttgttcctctgcgtgtgagatcggttttgactccagctaatccggctaccgatagagcttcaatggcgagttcctctggtgctaagtgggctcagaaaaccatcacgcttccaccgctacgtcgcgggtggcctcttattcctccaaagatattgaaggaattaggggaancctntccngtttcaattgnggtcttgcncatgccttcttaccaccncacaagtgcntctctgacaatcaatggggatttatgannccagatgttcaggctgatactgagactttcttgaaccaggattgtccctgaggggaattcagcgccttggaggcatactatggaaggtccctgatgaccatgccagctcatatcaagtcatcaatgtttggatgtcaactcacaatcccaataacaaaaggaaaactcagcatgggaacttggcagggaatatggctctgtgaacaccgtgatgctccaacagcacgcagagttgtggtcactctcaatggaatctagagatgtctcttcacgttagatggcttgtaacctcgtaatgttttaatagatttttacagtcttgtaatgaaatttgactttctatatgagaccactttgtccacattttggtgtttattgcatcagaaaaatccatatttacagc

SEQ ID NO: 125694 - DNA, 536 bp, Arabidopsis thaliana
  unsure (1)..(536): unsure at all n locations
ccccataacccgcantgttttattgagaatgngggngactccancctttatagaancattctaagccccagancaaagtaaatgngaaaatgaatggtgatgatggtgaaagtgaaagccnttattgggaggttttggttggagttggaggtgggattgtgttggccatngttgttgttattactgggcttagaggaccacaaaaagctatgagctcgacgatcttgttctctggtgttgttcctctgcgtgtgagatcggttttgactccagctaatccggctaccgatagagcttcaatggcgagttcctctggtgctaagtgggctcagaaaaccatcacgcttccaccgctacgtcgtggatgtcatcttattactccaaaggtttcatctttcgtgtgtagatgtttttgtttcaattcgaaacgattcttaattgactcaatttatgagcttttttggctgttcatttgattgggttcgtgaattcgatattgaaacagatattgaaagaaataagggaagacttgtcag

SEQ ID NO: 125695 - DNA, 553 bp, Arabidopsis thaliana
  unsure (1)..(553): unsure at all n locations
gcctgcaggtaccggnccggaattcccgggaatacccacgcgtcctaacatctccccttttagagaagagagctgtgttggtttttgaggtaaaagaagagacccaatttcgatttggaggatagagacgaagaagaagacagctccgatggctgatcctgaactagaagctattagacagaggagaatgcaagagctcatggctcgacaaggcatgcagggtaagcagggcaatcagcagaatccagagcaagagaaacagcaggaagatgctaaaagggaagctgatgaacgtaggcaaatgatgcttagtcaagtattgtcttctcaagcccgagagagaattgctcgaattgctctggtgaaacctgagaaagctagaggtgtggaggatgttattttgagggctgctcagatgggacagatagttgagaaggtttctgaggaacggcttataacactgtttggaccaaataaacagccaaactttcccagaaaaccggaagtcnacgtncccaccggggccnttggggttngccgccggtttnggngg

SEQ ID NO: 125696 - DNA, 396 bp, Arabidopsis thaliana
attgctcgaattgctctggtgaaacctgagaaagctagaggtgtggaggatgttattttgagggctgctcagatgggacagatagttgagaaggtttctgaggaacggcttataacactgttggaacaaataaacagccaaactaccaagcaaacgaaagtcacggtaagtaccaacggcgccgtggggtggacgacgattaggaaggaagaagaatattatgatgtgctttgtatatctatggagatctcactgttatgttagtgagttcacttaagatctacttaaatgtttctgttcaatatgtttattgtgagtgaatcttgattatcttccaaacacttgggatgagattaaagcaatctgaaactgaagctctacatttttatttttgac

SEQ ID NO: 125697 - DNA, 511 bp, Arabidopsis thaliana
atgatacttcagctccctacgactcacttagggaaagctgctacgcctgcaggtaccggtccggaattcccgggtcgacccacgcgtccgcccacgcgtccgatcaagcttcacctaattagtgtattcccccaaatttctcaattctcactaatggctttggtcagcttacttgaaatctccattgctttcttttgtttccttatctttcgaattttcctgatcagcaagaaaccacaccgttcatttctcacaaactggccgctcctgggcatgcttccgggtttacttaccgtgctccctcgagtttacgactttataaccgaggttcttgaggacggcaacttaaactatcttttcataggcccttttttagggggcatcgacatgttgttcaccgttgatcctgctaatatccatcacatcatgagctcaaactttgcgaattacccgaaaggaaccgaattcaagaagttatttgacgttttgggagatgggattttcaacgcgg

SEQ ID NO: 125698 - DNA, 580 bp, Arabidopsis thaliana
cgaaaaccctaaaagcgaaaaggaggcgaaaatggtgcagcgtcttgtttaccggtcgcgacacagctacgccaccaaatcgaaccagcaccgtatcgtcaagactccaggaggtaaattggtgtatcaaaccacaaagaagagagctagtggccccaaatgtcctgttactggcaagcgtattcaaggaatccctcacttgaggccctctgagtacaagaggtcaagattatcaagaaacaggaggactgtaaaccgagcatacggtggagtcttgtctggttctgcagtcagggaaaggatcattcgggcattccttgtcgaagagcaaaagattgtgaagaaagtgttgaaactccaaaaggctaaggagaaagtagcccccaaggcttaagcttttatgttttattcttctctgtttttggagttttgggaatatggctatgttcaagtgataggacttggtgcagtcatgtgaggacatctatgttactcggccaatttttaaactttgtattctgttatcagttcttaactttttcgacaattctcgtctcctcagttttgggattgttggatt

SEQ ID NO: 125699 - DNA, 644 bp, Arabidopsis thaliana
gttcaacacttttggtgggaacccggtttgttcagctggtggacttgcggttctaaacgttattgataaggagaaacgccaagaacattgtgctgaagttggttcacaccttatacaacgtttgaaagatgtgcagaaaagacatgatatcattggagacgtgagaggaagagggttaatggttgggattgagcttgtgagtgaccggaaagacaagacaccagccaaggctgaaacatctgtcttgtttgagcaacttagagaacttggcattctcgtcggaaaaggaggacttcatgggaacgttttcaggataaagccaccaatgtgtttcactaaagatgatgcagatttcttggtagatgcattggactattccatctccaggttgtgaacaaggatgaaacaaagccaacgagagtttttaaccatatgaaccgttttaatgtttccgcgtctttgtaacgaaaaccaagccaagtctcatctcctttgatttcagaataaataaataaaatttatttatttctcagtgttgctatgacataatccaaatacattagacaagcccaattatttttgttttctaaaaaaaaaaaaaaccaaggggcaaactctagaggatccaagcttacgtaggcgtg

SEQ ID NO: 125700 - DNA, 384 bp, Arabidopsis thaliana
atcggattcattgggtacagagaagcaagacctaagaagaggaagctgcagcagcagcagaacttgttcaccagtcgctatcttcttctcaaaacgagaacaatgtcttcaatgaaatccgtctcggctttggacaatgtagtggtgaagtcaccaaacgatcggaggttatacagagtgattgaattggagaatggattgtgtgctctgctcattcacgatccagatatttaccccgaaggctctgttccggatcaaattgatgaagatgacgaggacggtgaagaagaagatagtgacgggagctctgaagatgatgatgatgatgatgaagatgatgaggaagatggggaaggagatgaagaagatgaggatgaggatgaa

SEQ ID NO: 125701 - DNA, 583 bp, Arabidopsis thaliana
cgactcactatatgggaaagctgggtacgcctgcaggtcccggcccggatttcccgggtcgaccaacgcgtccgccaacgcgtccgcccacgcgtccgcccacgcgtccgtacggctgcaagaggacacagaagggctttttagacaaaactagtggcagactgaaaaatgaacgcagcgcttgcaacaaccaccgccacaactcccgtactccgccgtgagacgcctcttcttcattattgttctctcacaacaaaatcgccggtttaccaaatcaacagagttagattcggatcttgcgtgcaaacagtcagcaagaaattcttgaaaatctcggcgagctctcagagcgcttcagcggcggtcaatgtcacggcggatgcttcgattccgaaagagatgaaggcgtgggtgtatagtgactacggcggagttgatgttctgaggctggagagtaacattgttgtgccggagattaaagaagatcaggttttgattaaagttgttgcggcggctcttaatcccgtcgatgctaagagacggcaagggaaatttaaagccactgattcgcctctcccgactg

SEQ ID NO: 125702 - DNA, 1183 bp, Arabidopsis thaliana
  unsure (1)..(1183): unsure at all n locations
nnnnnnnnnnnnnnnnnnnnnnnnnnnnnnnnnnnnnnnnnnnnnnnnnnnnnnnnnnnnnnnnnnnccacgcgtccggggaatttcacacttgttgttaagccaccaaaaacaggaggttattctactgcagtcgttgattttagtagtccggaagaagcaaatgaagcatttgaaaatgttgaaggagacgtagctaaggatatatcgggtttgccacaaaaaaaggctgtgttgaagctgagttctggattagcagttagtttattcgttcgtaaaatggttcaagatgattctccgtgtgaaatctctacctccgagagagctcgtgcagaggagaacaatgtgagttctaagagacagaagacggaagatgaaactgaggagaccaaagaagcaactgtaaaccaaagagaggctgataagacaaagcttttccttcataaaatcccacacgatgttccatctcaagagttacatggagttcttaacggggatttcacactcgatgttaagccaccaaaaagaaaaggaggttactacaatgcagtcgttgattttaatagtccagaagaagcaaatgaagcatttgaaaatgtggaaggagacgtagttaaggataagacgggtttgccacaaaaaatggttgtattcaagctgagttctggatcaggagttagtttatatgttcgtaaaatggttcatgatgattctccgggtgaaatctctacaaccaagagagctccgacagaggagagccatatgagttctaagagacagaagacagaagatgaatctgaggagaccaaagaagcaaatgcaaagcaaagagaggctgataagacaaagctcctccttcataaaatccctctcaatgtcccgtctcaagagttaaaagtagttattaccgggcagttcacacttgaagttatgccacccaaaagaaaaggacgttattacaatgcagttgttacttttaatagtccagaagaagcaaataaagcatttgaaaaagttaaaggagaagcagttaaggagaaaggtggtttggcacaaaaaatggttgcgtttaagctgagttcaggatcaggagcttgtttatacgttcgtaaaatggttcaagatgaatctgaggagaccaaagaggcaaatgcaaaccattgtgaggatgatcatttaaaag

SEQ ID NO: 125703 - DNA, 699 bp, Arabidopsis thaliana
tagggaacagctggtcgcctgcaggtaccggtccggaattcccgggtcgacccacgcgtccggagaaacgaacagttttgggtgattggaggtgtttcagctcatctctttgctctcttccaaggtctcctaaaggttttagccggtgttgagacaaacttcacagttacatctaaagcagcagatgatggtgaattctctgagctttacatcttcaaatggacatcactcttgatccctccaaccacactactcatcataaacgtaatcggagtcattgtgggaatatctgatgcgatcagtaacggatatgactcgtggggtcctcttttcggaagattgttctttgccttttgggtcatcctccatctatatcctttccttaaaggtctgcttgggaaacaagacagaatgcctacaatcattcttggctggtcgatccttctcgcctctatccttacgctttttttggggacaaatcaatccgtttgtggcgagaggcggtcctattctcgagattatggggcttggactgcctttgattgacctcaagagttgatatgatacgtaacaaatttttcacagaggtaataaagaggaaagggtccctcacacatttgttcgttactggggtaacaacccttgtagatggacaccaaagaaaagaaggattaaatatttaatggttttctcaaaaaa

SEQ ID NO: 125704 - DNA, 912 bp, Arabidopsis thaliana
ggaagagatttgcagcaacagagcgttataaaaaggcgaagcaagagggaagacaacagataacaaattgtgaagaatgggaagcgaaggaagatcgattgcgaggaagccaaggtttttgtgtctccatggatttcgtacgagcggagagataatgaagatacagcttcataaatggcctaaatctgtaattgatagactcgatctcgtgtttctcgatgcaccttttccttgtcaaggcaaatctgatgtcgaaggcatctttgatcctccttattacgagtggtttcaattcaacaaggaattcaccgagtatacgaatttcgagaaatgtttggagtacctggaggatcgtatgatcaagcttggtcctttcgatggtctcattgggttttcccagggtgcaattttgtctgggggtttaccaggactgcaagctaagggaattgcatttcagaaagtaccaaagattaagtttgttataatcattggaggagctaagctcaaatccgccaaattggccgagaatgcatattcgtcttccttggaaactctctccctccactttttaggagagactgattttctgaaaccttacggaactcagctgatagaatcgtacaagaatccggtggttgtccatcatcccaaaggccatactgtcccgaggcttgatgagaaaagcttggagaaagttaccgcatttatcgataccttagagcatctggtgatggaggaagacaagaatggtgaagaaaatactagtaagccaacaaaatagataagcttaaaatgttatgtataacgaataattctttggataataatcgtgcaatgactgtaaataaatctggcaatgtttgcgaaaaaacaattattacaacacaaacaataatagacgattctttcgtt

SEQ ID NO: 125705 - DNA, 522 bp, Arabidopsis thaliana
aggtcacatacgactcactatttggaaagctggcacgcctgcaggtaccggtccggaattcccgggtcgacccacgcgtccgcccacgcgtccgctcccgcccttggaaaacaggatccaagtggggttgaattatggaggatgagacgagatcaacgtcatcactttccgatatagctattagtattatcgacgaaggtcctctttctccattaccgacaacgtagtgaaagatgtgttgtatctcatatcaaacgcaacttacagctcatcggggaaaccactgattcttttggaatcagctgggtaggcgtcctgctgcatcttcagaatccctgatagcctcgcagaggtgaatccctaagcctattagccccaagttgtttccattggtccttatcattacggagaaaatcacctcccaatgattcagcagcacaagttccggtttctggagcttttcctagacagggcaacaaagaaaggaatggacgaaaacgtcttgtatgccgcagtaggtgc

SEQ ID NO: 125706 - DNA, 626 bp, Arabidopsis thaliana
  unsure (1)..(626): unsure at all n locations
actctctctctggttcatctacagagttaataatcattaagcgaagaagatccctagaaagattgatcagagaaagtctcagctgaagcacgtttttggaaaacccagatttgacgggtactaagaagctgtggaggatctatatttgaaagaagagaacaaggatgcgtaggtggatctgttgtggggataaaaaaggagattcagatttatcatatgaagaggtgcatttgaaaagtccatggcaaaattctgaggcaaatcacaagaagcaaaaaccacaagctgttgtaaagcctgaggcgcagaaagaagctcttcccatcgaagttcctcccttgtctgtggatgaggttaaagaaaagactgacaattttggntctaagtctctgattggtgagggttcttatggaagggtatattatgcaactctaaatgntgggnaagcagttgctttgaaggaacctcgatgttgcaccctgaagctgaaaccaaacaccggggtttccttaaancagggtttccatgggtttcaaggctaaaaacatgnggctnntgattcacctggttngntatngtgttnntggaaacccccgggttcntgnttaatangtttcaacaatngg

SEQ ID NO: 125707 - DNA, 599 bp, Arabidopsis thaliana
  unsure (1)..(599): unsure at all n locations
nnnnnnnnnnnnnnnnnnnnnnnnnnnnnnnnnnnnnnnnnnnnnnnnnnnnnnnnnnnnnnnnnnnnccacgcgtccgcggacgcgtgggcggacgcgtgggcggcgatggttacatcgctcaggctgaggccaaacttctccgcagccacgtcaccctcctcctcttcttccgccggaaatgtcaagtaccgacccgccgtaattctcccgggtttagggaataatacaggagactacaagaagctggaggtaacattgggtgaatacggtgttcctgctgtggttgcagctgtatcaaggcttgattggtttagaaatgcagccggtttggttgatccagcctactggcgtggcacgctccgccctcgtcctgttcttgattggtacttgaatagaattgatgaatgcagtccgtgaagccaatgagctagctcaaggtcaaggattgtgtttgattggacactcagctggaggatggcttgctcgagtttacatggaagaatacggaaactctgatatctccttgttggtgacacttgggacgcctaacttaccaccaccgagaggacttcccggggttattgatcaaacaaaag

SEQ ID NO: 125708 - DNA, 406 bp, Arabidopsis thaliana
caaagtagaggatttaacaatggcgtctctttctctcagttctgctcatttctcttcaacttcttcttcatctcgctcctctatatccacttcatcgctttctccgtcgtcaacttctctccctctcttacaatcaccgatccgccgccgttaccgctccctccgccgccgtctctccttctccgtcattccccgtcggacttctcgctccttctccacttccaattctcagattaggtgttcgataaatgagccgttgaaggtgatgatttcgggtgcaccggcttcaggaaaaggcactcaatgtgagctcattgttcacaagtttggtttggtgcacatatcaacaggggatctattgagagcagaggtgtcatctgggacagatattggaaagagagcaaaa

SEQ ID NO: 125709 - DNA, 713 bp, Arabidopsis thaliana
  unsure (1)..(713): unsure at all n locations
cacgcgtccgacaaaatcgagtcttatgcaccaagcttgagttatgctccagtgggagcaagaatcccagatagtgaaatcattgtggaaccaaagaaacaagagttgatttccaagttgaaaacaggaaaaacctttcttaggaaccaagaaccagagaaagcttatacagagttcaagatagctttggaacttgcccagagtctcaaagaccccaccgaagaaaagaaggctgcaagaggcctaggcgcctcgctgcagcgccaagggaagtatagggaagccatacagtatcactccatggttctagccatctcaaagagggaaagtgaagattctggaatcactgaagcatatggagctattgcagactgttataccgagctgggagatctcgagaaagctggaaaggttctatgatacgtacattgctcggttagagactgactgatccttccgcaatgttttttttctttgttgtctgtttatggttcatgtaaaatcacatagaatggatatccaaatccccttttattgaatgtaattcgcttgtctttcaatcccatggaaatacatactaaatcatccaactgcnnnnnnnnnnnnnnnnnnnnnnnnnnnnnnnnnnnnnnnnnnnnnnnnnnnnnnnnnnnnnnnnnnnnnnnnnnnnnnnnnnnnnnnnnnnnnnnnnnnnnnnnnnnnnnnnnnnnnnn

SEQ ID NO: 125710 - DNA, 403 bp, Arabidopsis thaliana
cccacgcgtcagcttcttcttcttcttcttcaatggcgttgatacatggttcggttcctggtacgtctgcggttcgattggttttttcaacctcagcgtcaccgtcgagattttgtctcaatgttccggtggtgaagcagggttggaagaattcgtgccggagaagggttttaagagcaatggtgcaggaaacagttcaaggatctcctttggtttacgccagagaaatggagcgcctttctgctaaggaatcgctacttctcgctttgaaggatgctggaggctttgaggctttagttacagggaaaacaactaatatgcaaaggatcgatgttaatgagaggattacgagtctagagcggcttaatccaactccgagaccaaccacgtctccttgtttcga

SEQ ID NO: 125711 - DNA, 525 bp, Arabidopsis thaliana
  unsure (1)..(525): unsure at all n locations
nnnnnnnnnnnnnnnnnnnnnnnnnnnnnnnnnnnnnnnnnnnnnnnnnnnnnnnnnnnnnnnnnnnnnnccacgcgtccgatggtcagctttgatcttctaaattgtttcatctttaccctcatattcctcatctcaactctctttctctttgttttattctataagaaaccaaacgatggatttgatgtacctccaagccctccttctcttcccatcattggtcatcttcatcttctcctctttgcttcaatccacaagtgttttcaaaaaatctcatccaaatacggaccttttctccatcttcgcattttccatgtccccattgttcttgtatcctctgcctcaacggcttacgatatcttcaagacaaacgacattaatgtctcttatcgtggtgatgttgcaatcgatgaatgcattgtgtttggttcttttggatatttccgagctccatgtgaagattactggaaattcatgagaaagctcatcatggccagggcactcggaccccaagcgctagag

SEQ ID NO: 125712 - DNA, 799 bp, Arabidopsis thaliana
  unsure (1)..(799): unsure at all n locations
nnnnnnnnnnnnnnnnnnnnnnnnnnnnnnnnnnnnnnnnnnnnnnnnnnnnnnnnnnnnnnnnnnnnnnnnnnnnnccacgcgtccgggcgaacgaagcggcgattgcaccatgagagccaagtggaagaagaagcgtatgaggagactaaagaggaagcgccgaaagatgagacagcgatccaagtagtccattccataggacgtgtctcaaaatttctatcttatgtaatacctttctagtttcttgacttttaagcagcttcttgaatcagttttgaaccttttgtgttttttgcattttagtcttgaacaatcatctcagtctgtattttgaatttggttcactcctatatccactagatgcagttctggcaaaacagagatttggtttttgaatcttttaacagttaatctannnnaaaaaaaaaaaanaananaaaaaaaaaaaaaaaaaanaaaaaaaaaanaaaaaaaaaaaaaaaanaaaaaaanaaaaaaaaaaaaaaaaaaanaaaaaaaagggggggccgtttttaaggatccaagtttaactaccgcgggctgggaaagataaatttttttattgggggcccctaattaaatttctggggcgggtttttaaacgggnggggggggaaaaccctggggtgtacccatttattggcttgggaaaaacccccttttcgcaggggggtgaaaaaggaaagggcccgcaacatcccccttcccaaagtttgccaccttaatgggaaatgggaccccctcttacggggccattaacggggggtgggggggg

SEQ ID NO: 125713 - DNA, 638 bp, Arabidopsis thaliana
  unsure (1)..(638): unsure at all n locations
nnnnnnnnnnnnnnnnnnnnnnnnnnnnnnnnnnnnnnnnnnnnnnnnnnnnnnnnnnnnnnnnnnnccacgcgtccgaatttgcaacagatatgttgctgactgctgtaaactctgagacaaatctctcacagactgcatcaactgcagaaggaataaaaatggaggcaaaaagccagataactttgacaactgagtctctagggtctggaaactccgacattccctctcagcaggatctacaaacttctcgtgaagtttcagttatatcaatttctgaagctcagagactgatttctctgttctttgctttgtggaaaaagaaacctagtctccttcgacttgtctttgaagtttatgggagagctccaaaaatggtaaaccaggcttttcatcgacatatacctatcctaatacgagaattaggttcatcttatacggaactactccaaataatatccgcccctcctaagggaagggaaaatttattgacatatgtgtggcaatattgacacaaaaatgggcccttcttggatttgatggctactggaaacatcttattgaaacaaagctaaggaggttcaattcttatcccattgtttttcactcactaaaaaaaggtttgccatttttctccc

SEQ ID NO: 125714 - DNA, 912 bp, Arabidopsis thaliana
  unsure (1)..(912): unsure at all n locations
aaaacttaaaaatatctcgtcacatatcttcatcgacaaaaaatttactgaaagcgaaaaaaataatggcagctttggcatcaaacccccaaatgctaactagacaagctcacggtaacaagaaggaacaattgtggaggaaagagagtttaaatttggagaagaagtgtgggttttgtgtgagcgtttacagtaatgaaaagcttgggaggtcacatatggagaaagagtggagactaaaagccttttggtcaaacatagctcagcctacgactttggagatggaacccattaacaacgttgaagaactcgatgctgttctctctcacgcacgccaagtctctcagcctatcatcatcgaatggatggcttcttggtgtcgaaaatgtatttacttgaagcctaagttggagaaattagcggcagaatataataacccgagcaaagttttacctatgtggatgtaaacaaggtccctcaaaccttggtgaaacgggggaaccatttcgaaaatgcccacttttcaggtatgggttctttccttggaatacatgcaactttattgttttgagtttcttccggtgcatttgacaatagggggtttgtgaaaagagtaaatgtccataataatgagagaaatgagtggtgaatgcagttatggaaggaagatgagatgaaagaggaggtgtttggaggtctcnaaggatggcttgtcatcaaagaagttagagaattgttcaccaaatttgtctaattctctcattttttttcatttccaaccctttttttcttttaaaaaaattaatatgtacagtcagttttcttattttctttctttatacaatttccaacttaaaaaaaaaaaaaaaaaaaaagggcgaacgctctagaggatcccagcttacggacgcg

SEQ ID NO: 125715 - DNA, 669 bp, Arabidopsis thaliana
ctagatcatagatcgcgagcggccgctcgcgatctagacccacgcgtccgcccacgcgtccgcccacgcgtccgaaaaaataatggcagctttggcatcaaacccccaaatgctaactagacaagctcacggtaacaagaaggaacaattgtggaggaaagagagtttaaatttggagaagaagtgtgggttttgtgtgagcgtttacagtaatgaaaagcttgggaggtcacatatggagaaagagtggagactaaaagccttttggtcaaacatagctcagcctacgactttggagatggaacccattaacaacgttgaagaactcgatgctgttctctctcacgcacgccaactctctcagcctatcatcatcgaatggtaaacacaccaaaatcatatcttatccaatctccacaatccaaattagatttggttctctataggaaagctagtccagagcatggtcaacacttacggaaaaattaggttaactaaaaaatcatacaaaaatgcgttcaagttttttttttatcccggctccgattggtttgttgaactctcttttgttataatgatggatatcaaaggagttcaatattttttgtagttttcttgctaggttatatttttctcgcaagtcgcaagatcattttgccggatttttac

SEQ ID NO: 125716 - DNA, 519 bp, Arabidopsis thaliana
  unsure (1)..(519): unsure at all n locations
aaccgggggccgggcaagtcgaaagatcattttgccggatttttactttatttttgacaactcaaccacacaccaatcaaagcctttatatatgtttggttatgaagaattgtgagaaatatttgggcaggatggcttcttggtgtcgaaaatgtatttacttgaagcctaagttggagaaattagcggcagaatataataaccggtaagctaacaaaagaatcaacaatttacatggatgttattgcaaaggttgattatattgtgaacaaaaatgatttttcttacaacagagcaaagttttactatgtggatgtaaacaaggtccctcaaaccttggtgaaaccgtggaaacatttcggtaaaatgcttaaacataattttgtccttcttttctgatgtgggatgtgccaaatctgnaccaattacttccatattcgtgtgtatgcagaaatgccnactatcngggatgctnccttcaccaatcaccancggatttgggtcctggacgcattgntc

SEQ ID NO: 125717 - DNA, 776 bp, Arabidopsis thaliana
  unsure (1)..(776): unsure at all n locations
nnnnnnnnnnnnnnnnnnnnnnnnnnnnnnnnnnnnnnnnnnnnnnnnnnnnnnnnnnnnnnnnnnnnccacgcgtccgctagaggctatcaaaagaaaggattcaaggatcgattagacgaagaggttaatgttattctcaaagtagaagacactttgaatttggtgtctgctttgaatgaggaggttgagagtccgtgttttgaggaagattgtgtacaagtaattgaagtggaagaagaaaatcatgaagttgttgtggggagctgttttttgggaaatggagatggagactcagtgttggcatcagagacaatagattctcatgactctagtgtatggaaggtctactgggattcgttctatggacgacgttatttttacaattttaagacacaagagtcaaaatgggagccgccacttgggatggagcatctagcttatagcgatgaaagccacaacttgagtgaattggtcatagagaagcatcatgatgacttgtctggaactgtgcttggcgatgatgttccctttgacaagctgacatcttggtggagtttgtcaaagtcacttgaagcagacccacagaggaagttacagtttgattgtacataccaagaacttcctggggaatcaatctttggatttactagtctggggagagggaaccgtgcatattgtgcaattccgtagaaggctaagaaaagtctagagatctcggccaaaagaattcttatttctacccggactgaatgaaaggggtcctgaaatattct

SEQ ID NO: 125718 - DNA, 443 bp, Arabidopsis thaliana
aaaccacgataaacgtcaaactttttctcattctctctctaaagctaaaatctttttcacactcttcttcatgttcaagcaatgggaaacctctgttctttgtttactccgccaaaacccgtgaagaaaagaaaacccatcacaaaaagacaatcttctatcggagcttcttcttccgggtcgggtcttaatagtaaccgttggaacaaccgggtcagatcatcttcttctagaagagacaacaagttcgaagatgctttgattcaagaacatgctcttgctgctgctgctgttttgttccgacagcaaaacggtggtggaggatcgttgccgtttgatcggtcggcttcacaacgttatcaaggttcttgttcgaagaagaaccagttgcctcgaagctcgagttcgaggtcaaggtcttctacagatcctctgttacaacc

SEQ ID NO: 125719 - DNA, 410 bp, Arabidopsis thaliana
tacgactcactattgggagagctggcacgcctgcaggtaccggtccggaattcccgggtcgtacccacgcgtccggctttgcaaaaaatccagagcgatctttttttgaagtaaccattgaaccctaattttcttctctttcgatctcaccaatcttcgatttcgtgtttagattcctcaatcttggtacctcggagctcaaaaaaccctagagaaaccccatatttggttggcaggggaatggcttctgaacatatatcagggggtggagcttcaaagaccaagaaacattagtggagctcaagccagaaccgacccaaaccaatgggagtttctagaccggaacgatccggtcctcttggatcttcttcgaactcggttgggtcggaagaccatcattacatggtgga

SEQ ID NO: 125720 - DNA, 682 bp, Arabidopsis thaliana
  unsure (1)..(682): unsure at all n locations
nnnnnnnnnnnnnnnnnnnnnnnnnnnnnnnnnnnnnnnnnnnnnnnnnnnnnnnnnnnnnnnnnnnnnnnnnnnnnnnnnnnnnnnnnnnnnnncggccgcggattttggaagcggaaaggagaagagcgaatgcgagattgactcgggtgtttggtgctgctagttctgtgcggagtcaaaaggaagctgagagaaggaaaatgaaggaccgtttagaagagcggcttcaaagggcaaagaagctgaaagcgcaatatatgaggcgaaggagaggtatggatagttgttcatcttcaagatcagaaacaatgcgaaagaaccaagtgcatcttgttaggatgttagtaagatgctggaggagatttgctaaatacaagaaatctacttttgtcgtggctagagcatatcatgagttggggatcaatgaaaaatccattgagtcagtaccatttgagcagtttgccattcaaatgaactcagtttctgtaattcagacggtcaaagcattgcttgatcgcttggagatccgactcactctatctaaggcatccaatgtggagaacattaatcatcttcttaagcacatctttccgcctgttcgaagagggaaatcacccagtcccatgagtaaaggcgagcaaaattcacccaattccaagatgggatatcaaaaacttat

SEQ ID NO: 125721 - DNA, 461 bp, Arabidopsis thaliana
gcgtttcttcaccaaccctacacgaactctgatagatagaaaccttctccttcttctgcttcttttatcatcggagaattcgaatcttcttttcctctttttgagattctctaattatccttttggaagagtttcgtgtgagagagaagcgtaatgggctgctttggttgttgtggtggtggtgaggatttccgtagagtttctgaaactggaccaaagccagtgcataacactggaggttacaatggaggtcaccatcaaagggcagatccacccaaaaaccttccagtcattcagatgcagcctatctctgttgcggccattccagctgatgaattgagggatataacggataactatggttcaaagtccttgattggtgagggttcatatggaagagtcttttatggtattcttaaaagcgagaaagcagctgccattaagaaactggattctagtat

SEQ ID NO: 125722 - DNA, 337 bp, Arabidopsis thaliana
cggacgcgtgggttacgatcctcaataccacatagtcagaaatattaaaagaagctaagagatcaacaacaatggctgttggttcgatgaatgtcgaagaaggcactaaagcttttcctgcgaagctgacaggtcaagtctttctttgctgtgtcattgctgctgttggtggtctcatgtttggttacgacatcggaatctcaggaggtgtaacgagtatggacactttcttgttagattttttcccacacgtgtacgagaagaaacacagagtacacgaaaacaactactgcaaattcgatgaccagctcttgcagttgttcacttcctcactcta

SEQ ID NO: 125723 - DNA, 601 bp, Arabidopsis thaliana
  unsure (1)..(601): unsure at all n locations
ccaatttcccggaagaaacccggtccaccgggaanaaccncaaaaattccccgcaacgggttnaaccccgnccgaaattcggtancnaaatggcnaacggatggcccncnaaaaaccccgggntttatgattntnaaatnatccttccccgtangggcctaccaaaaatccccccaaataacccgtgnaagtaataaccactctctagataaactttgccttcccnatttctctctctccgncngccagcagataagccatcgccgattgatcgtcagcttcgaaagcgggtcggtctttaagttcccgggtcaagactttacccgcttcttctcggatcttcccttttgggcccataggagcccaagcgtcaagaagatcaagcgaccactgtgagttcctgagcaagaaacttcccgtgttgagaccaatccaattcttctggtcataaaccatctcgttccaaccatgcatcaccaagttgtaatctttgtacctctcccatggaagctcgaacaccatgtccgtgaacatggcatcactatccatccaccatagaaactcaatctcaagatgtgacaagagtaacttcctaatcaac

SEQ ID NO: 125724 - DNA, 528 bp, Arabidopsis thaliana
  unsure (1)..(528): unsure at all n locations
nnnnnnnnnnnnnnnnnnnnnnnnnnnnnnnnnnnnnnnnnnnnnnnnnnnnnnnnnnnnnnnnnnnnccacgcgtccggtttcagtgctttgtatttggccctaaaaaatctggaaagtctgcactcctcgattctttcttaggaaggaaattttcaaacagctataaggcaacaatgggtgaacgatatgcagcaaatgtcattgatcagcctgggggttctaagaaaaccctcatattgcgggaaataccagaggacagagttaaaaagtttctgacaaacaaggaatcgttggcagcatgtgatgttgctgtggttgtctatgacagttcggacgtatactcatggagaaaggcgagggaaatactgatggaggtagcaaggaggggagaagagagaggttacgggaccccttgtcttctggttgcggccaaagatgatttggatccatatccaatgtcagtgcaagagtctgatagggtttgcatggaattggggatagacatccctgtgtcattaagcatga

SEQ ID NO: 125725 - DNA, 562 bp, Arabidopsis thaliana
agacaaaacaattttgagtctctctattctctattctctctcctctccgcctctctttctctctctctctatctccgtcgtcgcaagagtgcatcatctttaacgccgggaccttcccgctgctctcttctaccaattctctcttagatcttctcatgcgtcttcttcttatatcttaatccttcgtcgtacaagctcgccggattgagttttcgtcttccatggctattcctctcgggaagctcaccatcctcatcggtgcaggtcttgttgggtcagtacttgctaaagaagggagtttaccagatgtctcgagttttgtctccggtgctcttaagatggtatttaggcagctgaagcaagaagaacctgccaaatcagccagcaagccccgcaatgatacactaatggcccaggttaacagtcttaggcatgaattgagcttgctttcttcaaacagacctatcactattgttaccacagcaggatcaggtggtaaaaagtatggttacatcattataattggggtgataggctacggatatgtatggtggaagggctg

SEQ ID NO: 125726 - DNA, 942 bp, Arabidopsis thaliana
  unsure (1)..(942): unsure at all n locations
nnnnnnnnnnnnnnnnnnnnnnnnnnnnnnnnnatgatttnnnnnnnnnnnnnnnnnnnnnnnnnnnnnnnnnnnccacgcgtccgcattttcttttcttaatccaaaaatttacaaatccttaatctttctcttcttcctaaaaacagctttgagctttctctcagataaccacattttacctaacaatggctacaatcatctcctgctccgctctttcctcgatccgagcatcttccgaatcggatccagcccgtaagaaacctgtttcgtcggtttcatggtgggctcctctttttggcatgtcatcggaacctgattacgtcaacaaaaccgtgaatctggaatcagatctggataaagctgaaaagaggtctctgcgatgttgtctcacggaggagaaggctaagcagctgcggaggaaaaccgccgaagcttctacattccacgacgttatgtaccattctgcgatcgcgtcgcgactcgcgtctgacgttcgggtcaagaagtaactggatcgggtcacggatccagaaataatcaataattcgtcgaacttaaaatgtctctcttttatgggatgaagaataactttttgtttacgatgatactcaagaaccgctttattgtgcggcgtcgttttctgtttgtacggtctggatcgtgtatgatgttgctttattgtgaaccgttggatcattagttagtttagctttttatttgttgtcagttgttaatgctttttttttttttcctcagttgttaatgctaactgttggatcggtagatatgttcaacacgtataaagattaaaatgttagtatacaaatataattacgattgcnnnnnnnnnnnnnnnnnnnnnnnnnnnnnnnnnnnnnnnnnnnnnnnnnnnnnnnnnnnnnnnnnnnnnnnnnnnnnnnnnnnnnnnnnnnnnnnnnn

SEQ ID NO: 125727 - DNA, 791 bp, Arabidopsis thaliana
  unsure (1)..(791): unsure at all n locations
tctatacgactcacttagggaaagctggtacgcctgcaggtaccggtccggaattcccgggtcgacccacgcgtccgcttcgtcttctttctcagttctgttgtcaaattagggttttcgtttcaggggaaagagagagagagagagatgtggtttctgtgtgtcgtctatcacaggctattagacttcagaaagccagaagtggaagctttagctgaactcttcggagaagagattgcagagaatgagtctctccaatggcgtctacctgaaaatcaccataacgatactccattccatttcgttcaactttcatctgaagaaatcgctcgtaacattgctaaacgaagcatattggtgaaaggaatgtatgagctttggggtgaaggaacttgctatgaagagcttaaagactcgattcaaagctaccctgattctcgaaagcttccatttctcacttctgattcaacttttaaaatctctgttgaaccttttggaaaggctttaacttttgacgagcaaaaagatcgaatccagtcgtttacttatataccatttgaggggcggggtaacttgaagaacccagatcataacttttttcctatggaaatggttgaatctgaagagaacaagggacttcaacctattctacagagaaggatatttttgggaggaagggggggctccccngcangaccctttacaccacctccagtggactccgccctccctgtggcaccgtcttggtagccgatggggtgcctacggcggtcagccgaaccgcctccgaa

SEQ ID NO: 125728 - DNA, 539 bp, Arabidopsis thaliana
  unsure (1)..(539): unsure at all n locations
acgcgcnnnnnnnnnnnnnnnnnnnnnnnnnnnnnnnnnnnnnnnnnnnnnnnnnnnnnnnnnnnnnnnnnnnnnnnccacgcgtccgcggacgcgtgggttcttctcctaccgaaaccctcataaaccctcctctctccctttctctccagattacaatttccatgacgattcttcgatctcgcgaaatcccatctgtctcacccaggccactccctaaagaatccgacactgagccgtcgactcccgctcgtacactagagcccgaacttcaccgctcgccggatgagaccgctcctgaattgggtcttgttgatgaacccactcacactacccggagacgtagtcttcgtcttgcacaccaatttgacggcgatgattgtgtcactgagaaagaggttagtgtggatgaaaagtttctgagtttgcgttcagggaagagagctgctaagagaggtgtcgattatggaattgaaattgagtctagcaagtttgattccgatttaaagttaggagaaagggcgaggaaaacaaagagg

SEQ ID NO: 125729 - DNA, 458 bp, Arabidopsis thaliana
cggacgcgtggcgccgaaaccctaaatctcgacctcaaaccctgaaccatggctgaaggactcgtgttgaaaggcacaatgtgtgcccacactgatatggtcaccgccattgctacaccggtcgataactccgacgtgattgtaacttcgtcgcgtgacaaatcaatcatcctctggaaactcacaaaggaagacaagtcatacggtgttgctcagcggaggatgactggtcactctcacttcgttcaagacgttgttctctcctccgatggacaattcgctctctccggatcttgggacggtgagcttcgtctctgggatctcgctaccggagaatctactcgtcgtttcgttggtcacacgaaagatgttctctctgttgctttctctaccgataaccgtcagatcgtctctgcttctcgggatcgtacgattaaagcttggaacacgcttggtga

SEQ ID NO: 125730 - DNA, 455 bp, Arabidopsis thaliana
agttttctttttcttaatcacagattcttcttttttatttttaatccatagaacaaaaaaaatataacctttaaattttctctcatttcttcatcttcctctccacaaaacccattttaatggcggacgttagaaaccctacaaaaaatcatcatggtcatcatcatcttcatgctctcttgatcccatatccatttcaagggcatgtaaacccatttgtacacttagccatcaagctcgcgtcacaggggatcaccgtcactttcgtcaacactcattacatccaccaccagatcacaaacggctccgatggagatattttcgctggagttaggtcagagtctggccttgacataaggtacgcgacggtttccgatggtttaccggtcggatttgaccggtcgttgaaccatgacacgtaccaatcgtcgctgttgcacgtgttctatgcgcat

SEQ ID NO: 125731 - DNA, 461 bp, Arabidopsis thaliana
tcgttacggagaaggagaaggagagagatccaccaccaccacatcaagagattgaagagactactccgttgctcgaaaattctcaaccggaaagtgaattgagatcgacgaccgcggcggcgaaggttcctgaggtggagattcatctgtataagtgtggaaaaggtccgatcgatgtgttcaagtcaaatctcggcggttatgagcaggatcagctcgaggttcgatctattcttgagaaatatggcttgaaagcaatcttcgctttcaacgttgagaaaggtcgtgctgttccgatcagatttcaccctaggaatggtcggtctgtgttgccttatagggatggtgccgtcatttacatcgacggtgaacctcaggattccctgctcaaacccatcaccagaatcattctcgggagttgtgattgttacgctcttaataacatttctattgaaagaccc

SEQ ID NO: 125732 - DNA, 512 bp, Arabidopsis thaliana
ggctgctccccctgcaggtcccggcccggatttcccgggtctgacccacgcgtccgcggccgcttggccagtttcgtacccaaagaaaaacgcaaatcccaaattttccggaaatggaggaatattggaatcttatgttgaaagcgagagagattcttgttagtgaaagccatgaagaagtagcgatggccatcgatcatctctttaagcgtcaggactccgaagagtataaaacatcgcgtgcgctgtacgacatctgcgtttcttgtaacccaggttgcttaaccctaaagcttcttaaagtctatcaatcttcttccagtggcattctcagactccgatcaatctctcaactctcgtgagaccctcacctatctgaaaaatcaaatcgttttttccaaattctctctcgactctctctatgaaatcaaaccccttttgattttatgccttacattgcaagaacccaagaatcttgcttcagatccttaggaaaaacgggcttttggaac

SEQ ID NO: 125733 - DNA, 503 bp, Arabidopsis thaliana
cggtcgcgtggggtccttttacttcctttttcagattctaagcaaacaaattgtgtcactaagcagccatcatggctagagtgatcctgtggtttcttgtttcctcgtatctttgtctcatcggtcatatgattgccgaggctgcaagagaaggtgcctccatgaggaaggaagcacactccagtgggattggaagagaaagtaagctcatgaggaatgaaaaacactccactgagattggaagagaaagtgcgtccatgaggaataaagcacgctcgagtgagattggaagagagagtaagctcatgaggaatgaagcacactccagtgagattggaaagagtatccgacacgtaaccggatttaagggtgaactcacagcatggtggctacggcggtggaggcccgggatatggtggtggtggatacggtccaggtggcggcggaggtggtggtgttgtaatcggttggtggatttggtggaggaccgagtatagttcagg

SEQ ID NO: 125734 - DNA, 376 bp, Arabidopsis thaliana
ttcgatctgagtcaggatcaagtaatgcagatgaagtgttggttagcctaactggggatggggaggtagattctgttcaagatcttcaagcgcaggttctgtggttgaaggctgaactctgcaagttgcttgaggagaaacgatcagctctacttagagctgaagaattggagattgctctcatggagatagtaaaggaagacaatcggcgtcaattgagtgccaaggtcgaacagttagagcaagaaatggccgaagttcagagactcctctctgataagcaggaacaagaaggtgcaatgctacaggtcttgatgcgggtggagcaagaacagaaggtaacagaagatgcacgaatatttgctgagcaggatgc

SEQ ID NO: 125735 - DNA, 457 bp, Arabidopsis thaliana
acctggacccctgcaggtaccggtccggaattcccgggtcgacccacgcgtccgatttcaatgacgtcatcatcttcttcatcaaaatccaaattctcaagtccactctcagaaaaaagctgactttctccaccaatcactatgacttcctctcgccggcttcttcttcctctcggagcatcgctcactagaggaagattttcttccgatcaaatccgaaataggatttctaagaaacttccgtggattccccaccgtaacttcgtcggaacccggccttaaccaatctggaagcgaaatatgccgtagcggtgccagaatgttcaacagtggaggacgagaacaccaagatccgtcatgaatttcgatttagcgaaacagaagtttcttaaatcccctggacctattaataggttgcccaaaaataaatccctcaagggatatatgggaaataaaa

SEQ ID NO: 125736 - DNA, 416 bp, Arabidopsis thaliana
cccacgcgtccgcttcttcttcctctcggagcatcgctcactgtaaatctctttctatctctctcatttctatttattcgcgatcggtggtgatgatgaaaatgatgatcgagttcgttgtaattacagagaggaagattttcttccgatcaaatccgaaatggatttctaagaaacttccgtggattcgccaccgtaacttcgtcggaaccggccttagccaatctggaagcgaaatatgccgtagcgttgccagaatgttcaacagtagaggacgagatcacgaggatccgtcatgaattcgagttagcgaaacagaggtttcttaatatccctgaagctattaatagtatgccgaagatgaatcctcaagggatatatgtgaataagaatctgagattggataatatacaagt

SEQ ID NO: 125737 - DNA, 814 bp, Arabidopsis thaliana
  unsure (1)..(814): unsure at all n locations
atgannnnnnnnnnnnnnnnnnnnnnnnnnnnnnnnnnnnnnnnnnnnnnnnnntgcactggcccgtctgcaagtaccggtcctttgtcttctccgcctcctccgatctcactccgatctctctacgattcattcttctatggcttccattgctacttctgcttctacttctctccaagctcgtcctcgtcaactggtgattggggctaaacaagttaaaagctttagctatggaagcagaagcaatctttcttttaatcttcgccagcttcctacccgcttgactgtttactgcgctgcaaaacctgagacagtggacaaggtgtgtgcagttgtcagaaagcaactctcactcaaagaggctgacgaaattaccgctgccaccaaatttgctgcacttggtgctgattcccttgatacggtggagatagttatgggattagaggaagagtttgggattgaaatggcggaggagaaagcacagtctatcgccacagttgagcaagcagctgcactcattgaggagctcttgtttgaaaaggccaagtagaaaatcctttactacattagcaaaaacgaaaaaaaccaaaacccaaaccactatcttcttattgtttggttagctagagagcaattgtgtccgttgagattttatgctattttcggataattattacaaggcttgtattttaatatttactttcgtctgaaacattttactttcacctttaaaatattagtactttgctgtcaaactctcttacgaaacttatgtaatatcatttcctaaataaagatgtttttccctnnnnnn

SEQ ID NO: 125738 - DNA, 630 bp, Arabidopsis thaliana
  unsure (1)..(630): unsure at all n locations
gntnactttggtntcttncncagncgccccgnactgggatgggctaccagttaaanctttgctttggaancagaacaatcttcttttaaacttcgccagctncnnccccggcttgcctgtttactncgctgcaaaccntgagccagtggacaaggtgtgtncagttgccagaaagcaactctcacttcaaagaggctgacgaaattacccctcccaccaaattttgcctccccttggctgctgatccccttgatccggtggagattgtgatgggacctaggggaagagtccgggattgaaatggcggaggagaaagccacagtctatcgcccacagttgagccaagcagctgcgctcattgaggagctcttgttggaaaaggccaagtagaatatctttattacattagcaaaaacgaaaaaaatcaaaacccaaaccactatcttattgtttcgttagctagagagcaattgtgtctgttgaaagattttatgttattttggggaaattattacaaggcttgtatctgacttttatctttcttctaaaacattttactttcagccttcatcaaactctcttacgaaacttatgtagtctcatttcctaaataaagatgtttttcccttt

SEQ ID NO: 125739 - DNA, 795 bp, Arabidopsis thaliana
  unsure (1)..(795): unsure at all n locations
gcatctgccaaagcacccaactccacctgacttgtctgtgtctgttgcgttcactttcattggaatctcagattttttatttttttgtttgttttggttgttgcgagtttgtgactataaaacctctcccacttggttcttcactctcactgtttctcatctcttcggcttctccgcctccttcaatctcactccgatctctctacgattcattcgttctatggcttccattgctgcttctgcttctatttcccttcaagctcgtcctcgccaactggcgatcgcggctagtcaagttaaaagctttagcaatggaagaagaagcagtctttcttttaatctccgccagcttcctacccgcttgactgtttcctgcgctgcaaaacctgagacagtggacaaggtgtgtgcagttgtcggaaagcaactctcacttaaagaggctgacgaaattacngctgccaccaaatttgctgcacttggtgctgatncccttgatacggtggagattgtgatgggactagaggaagagttcgggattgaaatggcggaggagaaagcacagtcaatcgccacagttgagcaagcagctgcgctcattgaggagctcttgtttgaaaaggncaagtagaatatctttattacatttagcaaaaacggaaaaatccaaanccaaccactatcttattggttcgttanctaangcaatttngcctgttaaanttttangtatttggggaattttcaaggtgaccgnctttacntccccaaanattcttcgcctnacaaccctgc

SEQ ID NO: 125740 - DNA, 656 bp, Arabidopsis thaliana
  unsure (1)..(656): unsure at all n locations
nnnnnnnnnnnnnnnnnnnnnnnnnnnnnnnnnnnnnnnnnnnnnnnnnnnnnnnnnnnnnnnnnnnnnnnnnnnccacgcgtccgcggacgcgtgggctcgaagacagcagaaccgtcagccttagaaatgggtaataccaaagtaattgcagctgtttatggtccaagagagattcaaaacaagagccagcaaaagaagaacgaccatgcagtggtgttgtgtgagtatagtatggctcagtttagtactggtgatcgtagaagacagaaattcgacaggcgatcaacagagctatctcttgtcatccgtcagacaatggaagcttgcatattaaccgaattgatgcctcactctcagatcgatattttccttcagggtctacaagctgatggaggaacaagatcagcttgtatcaatgccgcgactctagctctagcagatgctggaattccaatgcgtgatctccctgtttcctgtagggctggatattaaaacaggactcctcttcttgatctgaactatgttgaaaaccgggctggaagaactgatggaccccgcggtttccacctaaataaacaaagtgcccctcttaaaaggatgccaagttaccgagggaacatttgagacagggttggctttgcttttgaaggtgg

SEQ ID NO: 125741 - DNA, 702 bp, Arabidopsis thaliana
  unsure (1)..(702): unsure at all n locations
ctttatgttgtcgacactctttcagttctctcgacgccgtccatcgccctccgtcatatcgccgccgctaaagtactggcagagagttcacaacaatggagtacgtaaaccctgaaggtcttcgattagatggtcgccgattcaacgagatgaggcaaatcgtagctgaagttggagttgtttctaaggctgacggttctgctgtcttcgagatgggtaataccaaagtaattgcagctgtttatggtccaagagagattcaaaacaagagccagcaaaagaagaacgaccatgcagtggtgttgtgtgagtatagtatggctcagtttagtactggtgatcgtagaagacagaaattcgacaggcgatcaacagagctatctcttgtcatccgtcagacaatggaagcttgcatattaaccgaattgatgcctcactctcagatcgatattttccttcaggttctacaagctgatggaggaacaagatcagcttgtatcaatgccgcgactctagctctagcagatgctggaattccaatgcgtgatctcgctgtttcctgtagtgctgggatatttaaacagtactcctctttcttgatctgaanctatnttgaagncaagtncttgnaggagcttgnttnnaacccgcnggnattnttncccaaanttnggccaaangggtcacnccccttnaaaatgg

SEQ ID NO: 125742 - DNA, 846 bp, Arabidopsis thaliana
accaggggaaagcaaaaatagtgaagcagagccgcaaaaacacttttcccaaaatcaacgaagatagattcagatcggaagcgaaagaacgattcggtctcctccacagatcgaacatcgaaggagaagaaagaccatcatcacaacaagcatcgaaagaagagcaagatggcgtcgagagaccaagttaaggcatcgcacattttgattaagcatcaaggttctcggaggaaagcgtcgtggaaggatccagaagggaagattattctgactaccactagagaagccgccgttgagcagcttaaatcgatccgtgaagatattgtctccggcaaggcgaatttcgaagaagtggcgactcgtgtttctgactgtagctctgctaaacgcggcggtgatcttggttcctttggtagaggtcaaatgcagaaaccatttgaggaagcaacttacgcactcaaggttggagatataagcgacattgtcgatacagacagtggagtccacatcattaagagaacagcttgaccttatctgatctgatagaaaatgtattgaaggtgcctgcttcgtttcccttctcttcttgaccagaagaacatagaagaagaagaataagaagaatttaattcaaggttattgttattgtggttttgattctgaatctgtctacgaatttgatacaactcaaacatatgataaaatcagacaagctatctcatttcttcttaaaggcttcataagcactccctgtcgtagacagtgacttgtataatcacatttcagtatctttgtcatggtcttactgcaacattctggcatcttgtgtgttgtaaaattgctctt

SEQ ID NO: 125743 - DNA, 353 bp, Arabidopsis thaliana
aaggaccaaaacgcagcgttttcttccggagatcagtcggtcggaaagcggctacctttttgtctgcctagagaatttgttcgtttctttcttttactctcttcagacaaaacccacgagatacagaaaaagaggacaagagagaatcgtccatggaagaagacactggtatcgacgaagctaagacatacacggtggagaagagcgagaaagtggagccggagaaggacggactgagtcaattcagagacgaggaagaatcacttggtgcggatatggaagatttacatgatgagactgtgcgagaaaccctaggcaaggatcaggttcaaggtgttcgagaaaattcctct

SEQ ID NO: 125744 - DNA, 617 bp, Arabidopsis thaliana
  unsure (1)..(617): unsure at all n locations
aaccatgagtttactcatgccaatatcacgttagcgcaagcagagctcggttataaacctgcggttgatcttgagacgggtttgaaaaagtttgtgaaatggtatatgggtttttacactggctcgaagaagaagagttcttggtgagctctgtctctctgcttaagtcatggtctctgtttccccttgttgagcttggagttcgctctaggttaagcttttgaaaccgagcacttgcattgccaggaaaaatcacttacgtatctgcattgtttctgtgttgctagattttgcttcatttatttgttagtagattttgagcaatgtacagcttcatcacttagatgtttcaattgtcgaaactcaattgtcttttccatcatgtcggaggaataaagtagcttggattttgatgcatatactctgtagtaattcaatctattgtcccttgtttcttgtgaattcaaacatatatttattcttattctgccccnnnnnnnnnnnnnnnnnnnnnnnnnnnnnnnnnnnnnnnnnnnnnnnnnnnnnnnnnnnnnnnnnnnnnnnnnnnnnnnnnnnnnnnnnnnnnnnnnnnnnnnnnnnnnnnnnnnnnnnnnnnn

SEQ ID NO: 125745 - DNA, 406 bp, Arabidopsis thaliana
acccacacgttctggcacctaatagaaatacacctgaccaactgtcttatcactcgatttttcaagagacaatgcgttggaaggttcaggttgttgacgggggactttcagatatctacaacaacagtgttaatctacatgatcagcacgttaagttctctttggaccatagtacgggattcactatcgattgccgctcgtgctgagaagaaaagtggctatcttgcaattggttttggtaccgaaatgacaaacagttatgcttatattcggttggtttgatacatatggaacagggcatgtaaatacttactggatcgatggagaatccgcttccactgtgcatcctacaaccgaaaatatgacatacgtgagatgcaaatccgaagagggaatcatcacactg

SEQ ID NO: 125746 - DNA, 635 bp, Arabidopsis thaliana
gggctcctcacaacatcaatctcacaggaaggaaagaaagaaagaaagacgagcccttttttctttctaaaaatagaaatatgtctctaaaagccattcatgtctcggaagtgccaagcctcgaccacttccctgagaacccgtcgctcatttgctcctctcgcaaagcgaataacaagtttgtggtggttggccatagaggacacggcatgaacatgtcgcagttgccggatctaaggttctctgctctcaaggagaactccatcctctcctttaatgccgcttcaaaattccctctcgactttatcgaattcgatgttcaggtcaccagagatggctgcccaatcatattccacgacgacttcatctactccgaggaacagggagtggtgtacgagaagagggtcacggaggtttgcttgtcggagttcatgtcctacgggccacagagggatacaggctagacaggaaagcctttgctgagaaagtcaaaggaagggaagatccataagtggagcgtcgcaaccgacgactctttctgtactctccaagagcgcttttgagaaagtagagaatccaaacctcggtttcaacatcgaactcaagcttgacgacaacgtcttctattcctccga

SEQ ID NO: 125747 - DNA, 536 bp, Arabidopsis thaliana
  unsure (1)..(536): unsure at all n locations
nnnnnnnnnnnnnnnnnnnnnnnnnnnnnnnnnnnnnnnnnnnnnnnnnnnnnnnnnnnnnnnccacgcgtccggatatgtggaagattgggcagagaggagttccctatttccagagactcattgctgcgccgttcacgaccttgcggtccttgccaacttctttggtcgagacagggcagaaccgtgtcattgatgcttcgttaactctcatccgtgaaagggcaaaactcaaaggagagttagtgcgactcataggaggagcaaaagctacaacagctcttcttggagtaccacttggtcacaactcttcttttcttgaaggcccagccttggctcctcctcatgtaagggaagctatttggtgtggtagtacaaactccaccactgaagaagggaaggagctaaaagatccacgtgttctaagtgatgttggtgatattccggtacaagagattagagaaatgggggttgatgatgatagacttatgaaagtagtaagtgaatctgtgaagctggtgatggaagaggaacct

SEQ ID NO: 125748 - DNA, 839 bp, Arabidopsis thaliana
  unsure (1)..(839): unsure at all n locations
nnnnnnnnnnnnnnnnnnnnnnnnnnnnnnnnnnnnnnnnnnnnnnnnnnnnnnnnnnnnnnnnnnnnnnnnnnnngccacgcgtccgacactctcaaattggctcatccattccaagcacgctccttcgatcttcctcttggtacgctcgtttctaattaaacatgtctaattcaaaggacgagaaatcacaagatgcagctgatagaatcaaggctgcaacactcgacgtgctgctaaaggtctaagccgtacacaagcggagagagcagcgggctgcagcagcgaagaaacgttaaacgctttatggccaagaaagaaagaagggtccgagtaagatgggcaggaggaaaagagaattaaagaggcagatgtattttgaatgagtactgagaaagctgtcaggcttgggtgaaaggaaagataaaacaatgtcagcttcagcccgtgggaagcagttgcttcgggggcttcacagtgtcaaaaatgttcccaagcgtggcattggacttatgagggtaagaatgaaggggttatatttcgagggcctcagaaacctagcacgttaaaaacctaaactgagaacaacgcctttgtgatgatcttgatgggggggaggatatgatgaaaaaaaaaggcctgatccactaatgggaaagcaaaagttgaaaccatctataaaaagaagcgaagctagggcaaggctgttctaaagggataggaacctttggttaaacacaagggggttattggagagagattaaaaacgtcatgcggctaaaggcaagggggggagaaaagcgcaaaaacaaaaaccacaccagaaaaaggcaaaggca

SEQ ID NO: 125749 - DNA, 876 bp, Arabidopsis thaliana
  unsure (1)..(876): unsure at all n locations
acaagaacgcgatgatgtcagctctggtgtatgacgtggcagaagacagatgggctttcttgccggatatgggccgtgagcgagacgaatgcacagctattttccacgctggcaaattccatgtcatcggtggttactccacggaggaacaagggcaatttagtaaaactgctgaatcgttcgacgtcaccacatggcggtggagtccacaaggagaagagtttctctcttcggagatgactatgtggcctccgatttgtgctgccggtgaaaacggagatttatatgcttgttgtcgccgtgatctgatgatgatgaaagatgacacgtggtataaagttgggaatctacctgctgacgtgtgcaatgtatcttacgtggcgataaggaggtctggaaacctggttgtgatcggttcggctcggtacggcgaaccaagtgtagggtataattgggatatgagcaattctcgatggttaaaactggaaacacatgataaatatgaaggccacgttcaagctggttgcttcttggagatataaaaaaactttagaaaaggttccgaatcttttgtacgtcgtccttgcgaaatgacggtaaatttggtcggttgattttgtcaagtgtgactgtataaatattatattgttatagataaatttgttagcttgattgtaaaaaaattattgtcgagtgattttatagtttttaaacttatttttgaagttgttgtgtgatgttactaaagttagcgttagattttatacttaaaaaatttaatgttagtcctaaaaaaaaaaaaaaagnnnnnnnnnnnnnnnnnnnnnnnnnnnnnnnnnnnnnnnnnnnnnnnnnnnnnnnnnnnnnnnnnnnaac

SEQ ID NO: 125750 - DNA, 530 bp, Arabidopsis thaliana
  unsure (1)..(530): unsure at all n locations
nnnnnnnnnnnnnnnnnnnnnnnnnnnnnnnnnnnnnnnnnnnnnnnnnnnnnnnnnnnnnnnnnnnnnnnnnnnnnnnnnnnccacgcgtgcgattactactcacacgaagcaaagaatcacccaaaccaatccaaatgatcaagacagtacacagagatcgaaacacaaaaccaaaccaatgtctctgcaaaagtttaagcttctcgcaactcattgcagcaccgtcgcagagagtccgacacgtagtccagtcatccacctccgccgtcgtaaaacgctgcgtttgttactcactcgatcatcagaccgatggagattaccggagatccaaaacaacgtagatgaatcgaagaaaacggataagagaggtaagatccgatctagccggaagcttggagatctttttgtttcgtcgccaccgtttgaggaaagtggcggtggcggcggcggagataaggggaccaagatggaggtggagatggagagggatgtaccggttaacggcgttagaataacgcaggttttgg

SEQ ID NO: 125751 - DNA, 519 bp, Arabidopsis thaliana
  unsure (1)..(519): unsure at all n locations
nnnnnnnnnnnnnnnnnnnnnnnnnnnnnnnnnnnnnnnnnnnnnnnnnnnnnnnnnnnnnnnnnnnnnnnnnnnnnnnnnnnccacgcgtccgcccacgcgtccgtgttcatgttgggtcaagtagaagactgcctgcatctgttggtggaaagtaatcgaatacctgaagccgctctgatggcgagatcgtaccttccaagcaaggtctccgaaatagtggcattgtggagaaacgatttgaccaagataagtccaaaggctgctgaatctctggctgatcccgaagagtatcccaatctctttgaggagtggcaagtcgccctgtcccttgaaaatagagctgcagagacgaggggcgtccatcctcctgctggggattattgtagtcatgcagacagagatcatacaactttagtggatgcttttagaattatgcaaatagaggaagagggtcgacttgagcaaggggatgttctcgacgaggttggggaagagggggaagaggaaaggaaagga

SEQ ID NO: 125752 - DNA, 881 bp, Arabidopsis thaliana
  unsure (1)..(881): unsure at all n locations
atacgactcacttagggaaagctggtacgcctgcaggtaccggtccggaattcccgggtcgacccacgcgtccccgaatcttgataatgtaaattcacaacaaatctgtttaaaaacaaccaatcaaaacccaacattgcttctcaacaaaaaagcaaagcaaaagattttgcgagagaaaaaaaagaaaatggatttgttcaagatccttcttcttgtgttcttcgtgaacataagtttctgcttcgctgcagatccatattctttctataacttcgaagtctcttacattactgcttctcctcttggtgtccctcaacaggtcattgctataaatggaaagtttcctggtcctacaatcaatgttacaaccaatgaaaatctggttgttaatgtcagaaacaagttagacgagggacttcttcttcattggaatggaatccaacagagacgtgtgtcatggcaagatggagttttaggaaccaattgtccaatcccaccaaagtggaattggacttatgagtttcaagttaaagaccaaattggtagtttcttctactttccatctctacatttccagagagcttctggtggttttggctcctttgttgtcaatcctagagctattattccagtccctttctctactccagacggtgatattaccgttaccattggtgattggtacataaggaaccacacggntttnaggaagggctttgggatgatggtaaagatctttggaatgcctgatgggagntctcaattaatgggaaaaggacccttacccggtanaaatggccacggntttttttnctgnttgggncccgntttnggnancaattcacagnccatnccngggaaaacctttttnggctnng

SEQ ID NO: 125753 - DNA, 784 bp, Arabidopsis thaliana
  unsure (1)..(784): unsure at all n locations
caannnnnnnnnnnnnnnnnnnnnnnnnnnnnnnnnnnnnnnnnnnnnnnnnnnnnnnnnnnnnntcgacccacgcgtgcgcccacgcgtccgcttttgtctaaaaatggcgatgctaggtttttacgtaacgttcattttctttcttgtatgcctatttacttatttcttcctccaaaagaaacctcaaggtcagcctattctcaagaactggccgttcctcaggatgcttccaggaatgctccaccaaatccctcgtatctacgactggaccgtcgaggtgcttgaggcgaccaatctaactttttatttcaaagggccatggcttagtggaacggacatgttgttcaccgccgatccaaggaatattcatcacatactaagctcaaactttgggaattaccctaaaggacctgagttcaagaagatctttgatgttttgggagaaggaatcttaaccgttgattttgagttgtgggaggagatgaggaagtcaaatcacgccctattccacaatcaagatttcatcgagctctcagtaagtagcaataaaagtaagttaaaagaaggtcttgttccttttcttgataatgctgctcagaaaaacattatcatagaattacaagatgtgttccagagattcatgtttgatacttcttcaattttgatgactggttacgatccaatgtcactatccatcgaaatgctggaagttgagttcggtgaagctgcggatattggcgaagaagcaatctattatagacatttcaaaccggtgatcttg

SEQ ID NO: 125754 - DNA, 475 bp, Arabidopsis thaliana
tacgactcactatttggaaagctggcacgcctgcaggtaccggtccggaattcccgggtcgacccacgcgtccgatttgctacttcggcttcgccttgagggtctcctcctcagctttttggtccccggattgctcatggccgtccccgggttcttctcttccatggcgcttctccggcattgtcctgtatcgaacacagaggacggaggaggaagcttcttccatgtcgctcctcgccgaacttttcgtcctcacctcctcaacactagttctgggtgtggatttcttaagtgttatagtgactatattacaagaaaatacctgcggaggaataggactcaagctatagcagagtatttgggttcagcttcagatcctaagaagccaactgggaagtcaagttatcatccttcagaagatatcagagcatatgtgccagagaagaatcctggagattctaggctttcacctcct

SEQ ID NO: 125755 - DNA, 562 bp, Arabidopsis thaliana
  unsure (1)..(562): unsure at all n locations
atgattcttccagctctcacnnnnnnnnnnnnnnnnnnnnnnnnnnnnnnnnnnnnnnnnnnnnnnnnnnnnnnnnnnnnnnnnccacgcgtccggcagtaatgaagagcaatgatgaagaaagagagggagacgaggagagtggttttgatccagagaagcaccttgacgcttacttgcctgttcgagtcaacgagcagagagttagcaacttgttgcagtcactgcttgtggcaggtgcagtgttggctatgccggccattaagctcataccgacttccattctatggggatactttgcttacatggccatcgacagcctcccgggaaatcaattcttcgaacgcttaacgcttctcttcgttccaacaagccggagattcaaggtcttggagggagcacacgcgtcgttcgtggagaaagttccttacaagtcaatggctgcgttcacactgttgcagatattctactttgggctgtgctatggggtgacgtggattccggtggctgaatcatgtttccggttcctttcttcctcttaatagctatcagacagtacatt

SEQ ID NO: 125756 - DNA, 671 bp, Arabidopsis thaliana
cgcgtcagcccacgcgtccgcgaaaagaaaaaggttcctttttttgactttgtatccgtagatcatcttcttcttcttcttccagagttttatccttatccgttccatcaaattctctctctaagcaaagatgaataaaggaagcatctttaagatggacaacgatttcgaaaagagaaaagctgaagctggaaggatcagggagaaataccctgatcgaattcctgtgattgtggaaaaggctgagaaaagtgaagtcccaaatatagacaagaagaagtaccttgtgccatcagacctaacagttggtcaatttgtgtatgtgattcggaagagaatcaaactaagtgcagagaaagctatcttcattttcgtagacaatgttcttcctccaacaggagagctaatgtcaagcgtttacgaggataagaaagacgaagatggcttcctttacatcacttacagtggcgagaacacattcggtgcttcttcaatctaatctctgacctctgagaatccgccacgttttaatgcttcttcccaactttcaatttgtgtgtatagtttgttctcaatatttatcatttctcaaataattgtgattactatcttcttttcacttgttaaaatgtacatagactaatcttataatattatcttcctttggtatt

SEQ ID NO: 125757 - DNA, 352 bp, Arabidopsis thaliana
  unsure (1)..(352): unsure at all n locations
ctgttacatactctgttttgatttctctagatttagaattcatttttttccccgaaaagacgcggaatttcgatttgggtgttgaaaacaaaattagggttttgtgtctcaatttctttgattgtgtatattctcagaagcaaagatgaataaaggaagcatctttaagatggacaacgatttcgaaaagaggaaagctgaagctggaaggatcagggagaaatacccctgatccgaattccngtgattgtgggaaaggctgaggaaaaggtgaagtccccaaatattaggcaaggaggagctncccttgtgccatcaaggcccttacagtttggccaatttgtggantttg

SEQ ID NO: 125758 - DNA, 881 bp, Arabidopsis thaliana
  unsure (1)..(881): unsure at all n locations
aggtctacatacgactcactattgnggaaagctggtacgcctgcaggtaccggtccggaattcccgggtcgacccacgcgtccgggtgtctcggtgattaggagtggtgagagcatggagaatgcgttacgagcatgttgcaaaggtatcaagatcgggaagatcctaattcacagagaaggtgacaatggtcaacagcttgtttatgacaaattgccaaatgatatctcagagaggcatgtcctattgttggatcctattctcgggacaggaaactcagcggttgaagctatcaacctccttataagcaagggccgtcctgagggaaacatcctatttctaaaccttatctcagcacctcaaggtgttcatgtggtctgcaaaaaattcccaagaataaagatagtgacatctgaaatcgataatgggttaaacgaagagtttcgtgttattcctggtatgggggagtttggggacagatattttggcacagacgatgactaggccactgtgttcctgcagcattagttgtcccatccatgtcctgcatagcagtttactgatgcattcaccatcctattctctacaacggctacacaaactatcaaaggaatcacctttaactttgttggttttcccatttaaaccccctcaaggtgttgggaacagttttgtttacttataaatgcccaagtgaggggttgatcgatcccgggacttgggattcggtgtaccatatataattacccttggaactcttgataattcatctacaactcttgtgtaccatatataaatatccttggaacccgtgatactccataagcataatacatttggcttcgnnnnnnnnnnnnnnnnnnnnnnnnnnnnnnnnnnnn

SEQ ID NO: 125759 - DNA, 652 bp, Arabidopsis thaliana
aaaaaatattgttatatatttttggataaattttggttgatcggatggggttcctacacaagctgtgggatgaaacggtggccggaccgacgccggaaccaaattgggttcctttccgggaaaatttgagaaagcacgattatccaccgtccgatcttctggtggttctctctcaaggaccaagtcaccagaagcatcatggttaccaaggggaataacaatgttcgtggtctccgtaaattgaaaatccatccggattctccaacctgttcaagcagcaaccctgggacacctttaaccctggacaccatgctatgctttgggaccattcactgccggtaaaattcccttcctctggcgaagacgatgcagcaagtctaactacttatgaatggattgtgataaacggttggaccgttgacagccgagagagaaaatcttacggggtttttgtgtaaatataaataacctacccatgtaattatgtaaatatttcctgataaggtcagtattaaatgtaatgtctcttgaaatcaaatgtaccctattacagggtcttgaaaatattatttgaaccctgcccatttcctctaaaaaaagaaaaaaacaaaagggcgcccgctctagaggatccaagcttacgtacgcgtgc

SEQ ID NO: 125760 - DNA, 444 bp, Arabidopsis thaliana
gtaaaataaaaacccgaaataatttgaaaaaatattgttatatatttttggataaatttttgttgatcggatggggttcctacacaagctgtgggatgaaacggtggccggaccgacgccggacaatggtctcgggaaattgagaaagcacgattcattatccaccgtccgatcttctcctccttctctctcaagcgaccaagtcaccagaagcatcatggttaccaaggggaataacaatgttcgtggtctccgtaaattgaaaatggatccggattctccaacctgttcaagcagcaaccctgggacacctttaacccctgggacaccatgctatgctttgggaccattcactgccggcaaaatcccttcctctggcgaagacgatgcagcaagtctaactacttatgaatggattgtgataaacgcgttggaccgttgaac

SEQ ID NO: 125761 - DNA, 524 bp, Arabidopsis thaliana
  unsure (1)..(524): unsure at all n locations
nnnnnnnnnnnnnnnnnnnnnnnnnnnnnnnnnnnnnnnnnnnnnnnnnnnnnnnnnnnnnnnnnnnnnnnnccacgcgtccgatcggctctggttgtcccaagtataaaggctaatcaacaacttgcaaggactttgcaagacaaagaggaacaggcacgtccatcagctctggttttaccaagtactaaagctaatcaaaaccttgtttctgccggtactcttggagaaactcttgatgcaactggtaaatggggaaaaaatctggataacgatgatcatgtggaggaaatgaaacaagaggttgagaaagtgagatctgcaaaacttgtcaggaagttggaaaggaaacttgctttcgctgagaaaaagctgctgaaagctgaacgggctttagctaaggtggaggaatctctgaagccagcagagcagagaacagaccttgagggcataacagaagaagagagatttatgttccaaaagctcggattgaagatgaaagctttcttacttcttgatcgaag

SEQ ID NO: 125762 - DNA, 1000 bp, Arabidopsis thaliana
  unsure (1)..(1000): unsure at all n locations
nnnnnnnnnnnnnnnnnnnnnnnnnnnnnnnnnnnnnnnnnnnnnnnnnnnnnnnnnnnnnnnnnnnnnnnnnnnnnnnnnnccacgcgtccgcctttgtcaatctccgaaatcccttgctccctcttcaccaattcctcagatttagaccaagcttctcttcgaagaaatccttaacctaaccatgagtcatcttcctcttctccattttactctcgttgcaaaccctagccgccgtcaaagcaagcgagacatgtacccactcgatactcatggtccagacaaagatccgtcttagtttgaaagatgccagcgccctcatgttcctctgattcttcctcatcttactcctattccttcagatctataatcaatcaatgtattttcttattttattcaatcgatttatcatctcttttgttggtaaattgatgtctgtgttacagatcaaatgttgtgaactaattagcctaatgattcgattgattttggtgaacccgaggatcgtacaagtatgtagctatggaggaagatggagtctaatgtcatgagattcctgtagacaataaccttcgattggccgtcctaaacgtctcgacaacctcttaggttaaggctttactctgcacctatcaagaaaatcgtgtataaaattaaggaacttggcaagaggatcaacgatttatgtggtgttatgctcgtcttcatggaagggctgtgaactgttaattgtgaactgcaaagaagaagaagaagaagtgtggtcatcgcaaccatgattttttagaagccaaagaagattccaatcatgtttgctttgtattttgttttcctcttgagagatagtttattccttgtttcattgaatttttatgtaaaacatttatatcaataaaaagatttcgatttctaaaaaaaaaacaaaagnnnnnnnnnnnnnnnnnnnnnnnnnnnnnnnnnnnnnnnnnnnnnnnnnnnnnnnnnnnnnnnnnnnnnnnnn

SEQ ID NO: 125763 - DNA, 1022 bp, Arabidopsis thaliana
  unsure (1)..(1022): unsure at all n locations
accacgcgtccgcaaaacgttactcttctctctcattctctttcgcttctcgatagcttctcaaatcatggttcagcaaatatgggagacgttgaaggaaacaatcacagcttacactggactttctccagctgcgtttttcaccgtacttgctctcgctttcgccgtttaccaagtcgtctccggtttcttcgtttctcctgaagttcaccgacctcgttctttggaggttcagcctcaatcggagcctcttccaccgccggttcagctcggagaaatcactgaggaggagcttaagctttatgatggctccgattctaaaaagccccttcttatggcgatcaagggccagatctatgatgtttctcagagcaggatgttttatggaccaggtgggccatatgctctgtttgcagggaaagatgcaagccgagctctggcaaagatgtcatttgaggaccaagacttgactggagacatctcaggtctcggtgcatttgagctagaggcgttacaagactgggagtacaagttcatgagcaagtatgtcatagtcggaaccattcaaaagaaggatgtagaaggcaaagaaagttcagaaccttccgaagcaaagactgcctctgcggaaggtctttctacaaacactggagaagaagcttcagcaattacccatgatgaaacttctagaagcacaggcgagaaaatcgcgccaaccacggagaagaaagatgttgcanctgacgatgatgacctgcaaaggagtaaagtcaatgtaatgatattttttgtttctttttncccnttannnnnnnnnnaaaaatataactattagttgtgtattgcncnnnnnnaatggtgactttgtgtgtactttttggatcttgtataatgacatctaattctggttatggaagcttcaaaatacattaaaaaacccaaaaaagggcggccgctctagaggatccaagcttacgtacgcgtgcatgcgacgtcaaagtcttctatagggcacctaatca

SEQ ID NO: 125764 - DNA, 376 bp, Arabidopsis thaliana
cacgcgtaagcaaatatctctcagattgttgggagtccgaatcgttgttcgagtttttatcagggaagatgcaaggaggtggtggtagagatccttttggtggtggttttgggggtccttttggtggttttggaggtggctcttttggtggttttggaagaggttcctttggtggatttggtggccctaatggtcctccgagtctcatgtctaattttttcggaggaagagatccatttgacgaccctttcttcactcagccttttggtggtggcatgtttcaatccaacttctttggtcccagcatgaatccttttgcagaaatgcatcgtctgccacagggttttattgagaataatcagcctccaggaccgag

SEQ ID NO: 125765 - DNA, 560 bp, Arabidopsis thaliana
tacagcaatccggcgggccgcgcgggggcgggggagtatcgccggcaactaaacgactcatatagggaaagccggtacgcctgcaggtaccggtccggaattcccgggtcgacccacgcgtacgcggacgcgtgggcggacgcgtgggcggacgcgtgggatatggtctcaagacaactccagctgagatcaaggaaggtttcaagagagttttttctgccccttggcctggggagttacgttaccagggccctaaatgcatggtgtttggaagaccgggctggaagcttgtctgtttccgaagctacatggttggtctgaataatgactactttcgaaggacgcctacccatattaatgcagaatggcgagggcatgggcttctccccagtagggagcttattgagacaatggctccctacttgaaagatggctggagttaagaatggcttgttgtggcttaatttccgatacccaggctaacacaggcctattgaagcgcatcttaatgtgaatagaatatgtgccggctgcctggccgatgtgtgtcccccagacgg

SEQ ID NO: 125766 - DNA, 913 bp, Arabidopsis thaliana
gtcgaaacctgttcatgaaacctacgcttccttgggccttcttcttctggggcttggagcaccggcaagccaatcaagagagcttatgatggattgttgcttgatgctggaggaactcttttgcaattgtcgaaacctgttcatgaaacctacgcggccgggcgcctgggatatggtctcaagacaactccagctgagatcaaggaaggtttcaagagagttttttctgccccttggcctgagaagttacgttaccaggtccctaaatgcatggagatggaagaccattctggaagcttgttgtttcggaagctactggttgttctgataatgactacttcgaagacgtctaccaatattatgcgaatggcgaggcatggcatctcccagaaggagcttatgagacaatgtcactactgaaagatgctggagttaagatggctgttgtgtctaatttcgataccaggctaagaaagctattgaaggatcttaatgtcatagatatgttcgatgctgtgattgtatccgcagaagtcggatacgagaagcctgatgaacgaatcttcaaatctgcgttagaacaaatcagcgtagatgtaaacagagcagtgcatgtcggagatgatgaaggagctgataaaggcggagcaaacgccatcggtattgcttgttggttgtggggagaagatgtgcagacattttcggacatacaaaagcggatcttggtttcagaactctaagcttcaaagattttgttctgcaatatttttcagaccctgtacacacttactcaatcaacactgtaatctgtctctttaaaaatttaattaataatgaaaaagctgcaaaaaaaaaaaccaagggcggccgctctataggatccaagcttacgtacgcgtgcatgtcacgtcat

SEQ ID NO: 125767 - DNA, 924 bp, Arabidopsis thaliana
  unsure (1)..(924): unsure at all n locations
atgannnnnnnnnnnnnnnnnnnnnnnnnnnnnnnnnnnnnnnnnnnnnnnnnnaccaaataattctctcgtttctaaacaaactagtggtgagtgaatctcctctggtgagtaatggaagtgagtatgtctttgaatgcgttaactcggcttcctctgaagaacacaggaagattcgaagaggttggtttagcgagacactctctgtttagctcaagaacggcatgccgagagacggcggtacagcagcggcggatggtttttgtggtggaggctaagggaaagaaaggtatggcggcgcgtcagtatcaacgtacacctcctcctatgcctaagattgaagacgatggaaacccaagattcgttatcttcattcgtatggccaatgtgtatctttggtatcctctgagtataatagctggtggtactactgctaagatcatggttgctgcaaaagataacctcttggggaagtatatctacaaagacaccattgcaagaaacattgccgctgttatttacagagatgagaaagagattcaaaagacagcaattaagcagcatcgtgtcttgcgtacagccaccgagtttcgatatggctacaaacttgtagaaaacggaaacatgagagctgcacttagtacttcagatgttattgagctcccaacccaggaccagcttaaaacagtgttcgacaaagttaaagactactttggggatgcaaaagagtcattcggaaagctatcatcgctggacccggggagtgccggaaaaaccttgtggaaacctcgggttgggaaagnccaaggccttnggnttgacccatttgncacttgggttgggttgntttttggtgnntnaacccgtttcgggttggnctnccnnagggncccttggtttttncggggctccccnttttttggt

SEQ ID NO: 125768 - DNA, 779 bp, Arabidopsis thaliana
  unsure (1)..(779): unsure at all n locations
gtctttgaatgcgttaactcggcttcctctgaagaacacaggaagattcgaagaggttggttgagcgagacactctctgattagctgaagaacggcatgccgagagacggcggtacagcagcggcggatggattctgagggggaagacgacgcaaagagacgtcacctgaacctaacagataacataccaagcctgtcatgtgggattcagatatgccaccacctcgcacaagaaaagccaggaatgattcgcctgcaccggaacctgaagctaaatatctgagtgaagatctatctcctcctcgtaggagacatgttcattctccatcgcgtgaatctagcagaaagcgttcagattctgttgagttggacgatgatttatctccgcctcgtaggaaaagagatttacatggttcacctgtctcagatgtaaaaaagaagagcaatgatctatctcctccacggagaagaagatatcattctccatcacctgaaccagctagaaggtcttcaaaatcttttggctcgaatgctgatttatctccacccggccggaatataaatatgaaggattctcaagactcagatctttcgcctcaaagaaaagccgcagatttgcgacggtccttcctgaaaatgtgtccagggagttccaatttttgatcagctcttcccccaaggtggcccacgcagagggttcatcacctcctcaaatttaggaagggcgcaacggaangnccggttttnttanttggaaaanncattggacggtnatttnt

SEQ ID NO: 125769 - DNA, 434 bp, Arabidopsis thaliana
  unsure (1)..(434): unsure at all n locations
cccgggttcnatatggctcaacttttggaanccggaaccntggggctgcntttagttcttcagatgtattgggctccccaacccagncccacttaaaccagttgttcgacaaagttaaagacttctttggggatgcaaaagagtcattcgggaaagctatcttcgctgaacccggggagtgacgaaaaaactgaagaaacctcggatgagaaagccaaggcctgaggctgaacaattgacccttggttggttgattttgatgtctcaaccgtctcggtatgggctgcagaaggtcactggatatgacgagactaccgctattttgtgcacattttctctatacatctctcacagaaacagcttctgttaaatctcttgtaacacataacttattgtgtattgtagatttgttgtaagaaagagcctttggttac

SEQ ID NO: 125770 - DNA, 389 bp, Arabidopsis thaliana
aaaccgtgaagacacacaatctaatatttctcctccacgtagacaaaggactcgtaatgactcgccctctcctgagcctgggcctagacggtcggttgcggatagagttgatacagatatgtcaccaccacgacggagaaaacgtcacaattcgccttcacctgaacctaacagaaaacataccaagcctgttagtttggattcagatatgtcaccacctcgcaaaagaaaagccaggaatgattcgccttcaccagaacctgaagctaaatatctgagtgaagatctatctcctcctcgtaggagacatgttcattctccatcgcgtgaatctagcagaaagcgttcagattctgttgagttggacgatgatttatctccgcctcgca

SEQ ID NO: 125771 - DNA, 729 bp, Arabidopsis thaliana
  unsure (1)..(729): unsure at all n locations
cgggnnnnnncctacgactcactatggggaacagctggtacgcctgcaggtaccggtccggatttcccgggtcgacccacgcgtccgcacagattgatacaattcactcctttctttctgttttttcctttccctttctctcatctctctctttagctacttcctcctcccataaaccctctaccaagtaaactctcagctccaccattaacacatctcggtctcaattccgagctctgtattccaatcctttgttgcatttactttctgggtttttgtttattttgattttcttccatttgggtacccacccaaagagtaaagtttcaagctttcgtggtacttgctatgctttccctcacaaaaccctaatttcatatccttatccaattccatgttttgctctgctcaactctctgtttctacttctgaatcgtcgttttccttcatataaccaaaccaattctgttgaatcatcttggcacattcattggtttgagaaggaacagaaaaagttctgatcttggccctattcgcacatcaatggacgataatagatctactcatagctcaatgttcggggacctatcaacagaagaggtgcacaaggaagatcattctcacaggcatcattggtctattcatggcggttctggtcggccttatcccncatctatacgccaaactctactgggggagaatagatcagctccaacagcgacagcacca

SEQ ID NO: 125772 - DNA, 486 bp, Arabidopsis thaliana
  unsure (1)..(486): unsure at all n locations
aattttagtatgtctcaattgggtcagtcaaagtctccgtttttccaactcttcaagaggaagaaacaaggctctgctggttttgccgatagtatgttgaagcttgttaggactttgcctaaggttttgaagtacttacctagtgacaaggctcaagatgctcgtctctacatcttgagtttacagttttggcttggaggctctcctgataatcttcagaattttgttaagatgatttctggatcttatgttccggctttgaaaggtgtcaaaatcgagtattcggatccggttttgttcttggatactggaatttggcatccacttgctccaaccatgtacgatgatgtgaaggagtactggaactggtatgacactagaagggacaccaatgactcactcaagaggaaagatgcaacggttgtcgggtttagtcttgcanaggagtcacattngtgactnggntgattgataggtcacttatgt

SEQ ID NO: 125773 - DNA, 765 bp, Arabidopsis thaliana
  unsure (1)..(765): unsure at all n locations
nnnnnnnnnnnnnnnnnnnnnnnnnnnnnnnnnnnnnnnnnnnnnnnnnnnnnnnnnnnnnnnnccacgcgtccgcggacgcgtgggggtatggctgtgattggtatcgccatcctctattctacattttatgtgtgggtgggcgtgggttcaccaggctcaatgaatgttactgacctacctcttcttcttgtcggatatggttttggtgcttcgtttgttgccttatttgctcagttgggtggtggaatatatactaagggagctgatgttggggcagatctcgttgggaaagttgagcagggaattcccgaggatgatcctcgaaatcctgctgttattgctgatttggttggagacaatgtgggggactgtgctgctagaggtgctgatttatttgaaagtatagctgcagaaatcatcagtgcaatgatactaggtggaacaatggctaagaagtgcaaaattgaagatccatcaggctttatcctttttcctctagttgttcattcttttgacttgattatatcctcaattggtattctatcaatcaagggaacacgtgatgctagtgtgaaatctccggtagaggatccaatggctgtacttcagaaaggatattctctgacaattatattagctggtataacatttgggcgcgtcgtacttcgctggctgctttacactgaacaagctccatctgcatggttcaatttcgccctatgtgggttggttggcatcatcacagcctatatctttgtctgg

SEQ ID NO: 125774 - DNA, 334 bp, Arabidopsis thaliana
  unsure (1)..(334): unsure at all n locations
aaagaattacgctaagttaccaataagaaaggacacgcttgaggttaagaacataccaaatgaggcatctcgagccactacaacaacacatggaaactactacaaagtatctgacctcccaatgaccacaggaccagccagcggctttgcatgggctgtgaaaagacggaaagatcctgataatatctctactcttacctactatcaacccagctcgaagagtcaattgagtggaacaagtgttgcatttgcaaagaacacttttggtttgaacctgaaaccagacaatgactcagtttgggaggttcanggaaacaactatgatgatgttatc

SEQ ID NO: 125775 - DNA, 527 bp, Arabidopsis thaliana
  unsure (1)..(527): unsure at all n locations
atgannnnnccagctctaatacgacctaccttagggaaagctggtacgcctgcaggtaccggtccggaattcccgggtcgacccacgcgtccgattgaatccttctcaaaactgggagattccatatattttcaagaagatggtgcaactccagctctttatgtcacccaatatatatcaagctcacttgattggaaatctgctggtctttcaatatctcagaaagttaatcctgttgtgtcgtgggatccgtacatgcgtgtgacattcactctttcttcttccaaagtgggagtggcgaaggagtcgactttgaatctaagaattcctgtttggactaactctataggtgccaaagtatctttgaatgggcgacccttaaacgtaccaacttcaggtaatttcctatcaatcaaacagaaatggaaatctggtgatcaagtaaccatggagctaccaatgagtatcagaaccgaagctataaaagatgatcggccagagtacgcatctcttcaagccatactctt

SEQ ID NO: 125776 - DNA, 530 bp, Arabidopsis thaliana
agggaaggtggtccccctgcaggtaccggtcccgaattcccgggtcgaccccagccttccaagaagcgatgttcctggtggattggttctatggagttctggcaactctgggactatggcagaaagaagcgaagattctgtttctaggtctcgacaacgccggcaaaaccaccttgcttcacatgttaaaggacgagagactggtccagcatcagccgacacagcatccgacatcggaagagcttagtatcggcaaaatcaagttcaaagccttcgatttgggaggtcatcagattgctcgtagagtctggaaggactattacgctaaggttgatgcagtggtatacctagttgatgcatatgacaaagagaggtttgcagaatcaaagaaagagcttgacgctcttctctctgatgaatccctagcaaatgtccctttcctcatccttggaaacaaaatccacattccgtacgctgcatcagaagacgagctgcgttatcatctaggcctcaccagtttcaccactggg

SEQ ID NO: 125777 - DNA, 521 bp, Arabidopsis thaliana
  unsure (1)..(521): unsure at all n locations
atgannnnnnnnnnnnnnntacgactcactatttggaaagctggtacgcctgcaggtaccggtccggaattcccgggtcgacccacgcgtccgggtcaagtgcctggatggttatggatgctccctgttttgaactacgtgaatctttccaacaacactttcatcggtttcgaaagatcaacgaaacttggactcacctctatccaagaaccaccagctatgaggcaattgttttgctccaacaacaatttcacgggaaacattccatctttcatatgtgagttgccttatctcagcactctcgatttttctaacaacaaattcaatggttcaattcctacttgtatgggaaatattcagtctccatatcttcaagctctaaatcttcgacataattcggatgagtggacttcgtccagagaatatatctgagagtgtaatttgtcttgacgtcggccataaccaactagtgggaaagcttccaagatcgctaaggcatatctgttcccttggacttcgga

SEQ ID NO: 125778 - DNA, 1024 bp, Arabidopsis thaliana
  unsure (1)..(1024): unsure at all n locations
gcgcnnnnnnnnnnnnnnnnnnnnnnnnnnnnnnnnnnnnnnnnnnnnnnnnnnnnnnnnnnnnnnnnnnnnnnnccacgcgtccggagcttgaatccgaggtacaagtgcgaacacctgtggaagaagaaccgattcaagagattgagaccatagttgatttaggaaatccagacaaagtatttgtgagagatcttcttgtggcttctggtttgtatgaaggcgcatcagatatatcattgtctagatgggatccattagcaaagcttataaaaaagtctgttcttgaagaaacaaaagagaatctcaagataagaagcactcagaatcaagaagacgacgacacaggagagactactataagtgaagaaaatcacaacatactgtttgatcttctgaatgaagtacttacggtggtgcttggaccattgacaaagtcaggtttcaagaacaaacttttgagttcatctgtgtctgaatcaacgactatacgaggtaaatttctgttagaatcaacatggaagatcatgtcggagtatttatattctcagccagagagacctttttgttcattggatgggatcattggttgggacatggataggtttccatggagtgctttgattggtgaagaagttaatgtgttggggaaagaagttgaaggtatgatcatggcagatcttgttgaggaacttgttaaggatctaagaagacaaatatgttaagaacttaagataagagttaagatgttgaagcagatctgattggttttggtttggtgaatatgaatggtttttagtgtgtttctgtaaataggtttttttttatggggtgtttttcttgaagaagggagttttcatggtaactgtatatgttttcttacagtataaggaagctagattcttctgatattttcctaatactaaaaagagtttctaaaagaaaaaaaaaacaaaaagggcgaccgctctagaggatccaagcttacgtacgcgtgnnnnnnnnnnnnnnnnnnnnnnnnncg

SEQ ID NO: 125779 - DNA, 654 bp, Arabidopsis thaliana
  unsure (1)..(654): unsure at all n locations
nnnnnnnnnnnnnnnnnnnnnnnnnnnnnnnnnnnnnnnnnnnnnnnnnnnnnnnnnnnnnnnnnnnnnnnnnnnccacgcgtccgcccacgcgtacgtacactttttattgcagtaactctggctctcgctctctcctcttttcacaagaggccagagagtgatacagattccaccaccacgtccactatagcgcgtctcaatacgccctagctaactacgcctgctcacgtctcccaatgcacactgtcccaccacctgcccccattaccccacctcctgctcccatcgctcccccgcctcctgaacatgaccaccacgaccacgaccctgaccatgaccacgaccaccaccacgacgatgaccacgatgacgaatgatgaccatgaccacgatgatgacgcaccatcacgaccatgacgatgatcacgaccaggaccacgatgacgcgtgaccgcgaccgtgaccgcgaccgctaccggaaccgggaccgcgagcatagaccgngctcagatgaccatgaccatcaccttgaccatgacattgatcccaatgaccacaatctcgaccttaatcatgacgccgaccaacacaacagtggcgactacagccacgatcaaaacacgcggttaaaccaccggcaccagcagcggg

SEQ ID NO: 125780 - DNA, 451 bp, Arabidopsis thaliana
ggctcgaccacgcgtcaggaaaacgacagaagggggagaagaagaagttgaaaaaattgtaaagtcagtctctccgactcttccttccttccgtgttcaccattgctacacgttctccacgaactttccgatgcccagtcgtcggagacatagctacaccgtcggatctcctgcaaccacatcttccaattacagtaacactactttcaccgatcgttccttcccgacaacccctgcccgtacatccaccgacacaaccacctccatcgctcgtcgcatctccggtatcttcatcaactgcttcactcctcccgattccgtttcctccaactacatcgacaattcaaagtcctcttccgacaataatatccgtagtagacgtagctcaacaggaagtagtagtgtacagaggagttatggaaatgcaaacgaaacagagcttacaggattc

SEQ ID NO: 125781 - DNA, 524 bp, Arabidopsis thaliana
aatacgactcacttagggaaagccggtacgcctgcaggtaccggtccggaattcccggttcgacccacgcgtccgcccacgcgtccggtgtttacgaaagttcttgaaatttgaagagatctcacagatgagaagtgctataggaagaagattctcaaaccctaatggcttcaccattgcatccttagtcaaacaaactccatttctcacccaatccacatctcatttctcctcttcctccgactcctccggccgtggtcgtggacgcggttccggtgaagatggaggatttcccgccgctggaagaggacaattcggtgtaaatcgtgaaccggtggttcctggacgtgaaccgtcatctgccggaggttatggtcatggtcgtggtcgtccgatccaatctgattcgatttctcctgcgtttacgtcatttgtcaaatcagattctcctagtattggccgtggaagaggacccgttggatcagacaccgtttcacctttcgctgctgaacctcctcgccaat

SEQ ID NO: 125782 - DNA, 546 bp, Arabidopsis thaliana
  unsure (1)..(546): unsure at all n locations
tacgactcactatttggagagctggcacgcctgcaggtaccggtccggaattcccgggtcgacccacgcgtccggcaattcggtggtcagcatggtggggttccaacttttggaatggctcttccaggttatttccaaccagaacatggtaccggaaatcctgagatgacatgggctgccaattttggctggccctggagcattagggggttcatattggccacctttatactgtccttgatgggtcttaccaagcagacaaaccaggggtaccttcctctgccggatcgtccagccaagagaacagttccaataatcctaatgatgaagagcccatggagagacctgaggttacgaacaatgggaattctcaacggtcaaatagcaaccccaaacaagcagccctcgtagatacttcggagatgagcctttaagcaggtggagtaaagaagagtggaaaggaaagaaggtcatctaatttgactaagttggagtgaaaggaagaaggtgagagaaaaaaaactccttanngaacagcaggccctt

SEQ ID NO: 125783 - DNA, 786 bp, Arabidopsis thaliana
  unsure (1)..(786): unsure at all n locations
tcttacgctatgccataaatggcgtatcgtgcgtgccttcggatactccgctggagcttgcggatcatttcaaaataaaagatgtttttaaagttggaaccatccctgacaagccgagaagaggaggaggaataaggctagacacagcagtgatgggagcacaccacaatgcttttcttgagatcatctttcaaaaccgcgagaagatcgtccaaagttaccacctcgatggatacaacttttgggttgttgggatcaataaaggaatatggtcacgtgcgagcagacgagagtataacctcaaggatgctatatctcgctccactactcaagtatatccaaaatcttggacagctgtatatgtggcattggacaatgtggggatgtggaatctaaggagccagttctgggcgagacaatacttaggtcaacaattctaccttcgagttcattctccaaatcactctcccaaagatgaataccctttgccaaagaatgctttgttgtgtggtcgggcctccaacaaaaacatgtccatcatcactccttagatcctgttggcatgacataaaatatgagactttgtcttccgcacaatccaacacaaagcgcttcaaaatagcttccctctttgcactagtagcgtttaatacttcagccatatatatttgtacatctttgtaaaaaaaaaaaaaaagnnnnnnnnnnnnnnnnnnnnnnnnnnnnnnnnnnnnnnnnnnnnnnnnnnnnnnnnnnnnnnnnnnnnnnnnnnagcaatccgcaagc

SEQ ID NO: 125784 - DNA, 748 bp, Arabidopsis thaliana
  unsure (1)..(748): unsure at all n locations
cgcgnnnnnnnnnnnnnnnnnnnnnnnnnnnnnnnnnnnnnnnnnnnnnnnnnnnnnnnnnnnnnnnnnnnnnnnccacgcgtccgcccacgcgtccggtttttttttatattattcaaattccgcctccaaaatcctctctttctgcgatttctatcacttcacgcgcattgagagcgagagagagagagacccaagcaagagctcaaattagggttatttttccgatttgagagatccattaacaatggcgtggtcgtcggaaacgccgtcgtattgcggctggaatgagcgacatgtgaagaacacgaaagaaaagatggaggttcattattatctcgagaggaaagatggaattgcagatctagctgttattgggaggttgaagaattctaaacgcatgtcttttagatacgctttgaagaagaatcgctctgtcttgaaaaagcttaattctaaagatgatgttgcgccttggctcgattctattgtttctggtgagatacctcatgtagcagatgtaccagctactgttatgactgaaaaagatgctggagggttcaatatgagcacttttatgaataggaaatttcaggagcctattcagcagatcanaacgttctcttggatggggttttcttggacttgcaggaaacggcgtaagcattatcagtcttatctccggatggggtcagatatctgggaatgatttgtgatgtttagcggacaacatagagacttgtgctaa

SEQ ID NO: 125785 - DNA, 456 bp, Arabidopsis thaliana
ccgtgcttccgtggtgtatgttgaagatgcctgaagaaagattcaccaaactcatatcaacactaaaacctcatcacacttcttcactcggtgaatctttcttcaggcctcttcataacagaaaaaaaaaatgatgtcttacgttgctaacttggtcatcaagagttttgaccgtgcttccgtggtgtatgttgaagatgtggtggatagctctcgagcgacatgtgttgagaatggtggtgatgacgatgacagtggctatgattatgctcctgctgcgtgattgtctcctattagtataatgtaatttagaagaaaaaaagagagagagagagatgataagataatttagatattagttagaccatttatgtactagattgtgtctcgagttttcttgtcaatgagcaaacatggtttcctagtgtcttagtccttaaccacaatcactttttt

SEQ ID NO: 125786 - DNA, 507 bp, Arabidopsis thaliana
  unsure (1)..(507): unsure at all n locations
nnnnnnnnnnnnnnnnnnnnnnnnnnnnnnnnnnnnnnnnnnnnnnnnnnnnnnnnnnnnnnnnnnnnnnnnnnnnnnnnnnccacgcgtccgcaacatttgaagctcatcatacttcttgtggctttctctttacacctcttcattgctttcatatctctactttcattcatatccaacaaaaaatatcaatgatgtcttttgtcgcaaacttggccatcaagagatttgaccatgcttccaccgtgtatgttgaagatgtggtagatagttctcgagtggcatatagtgagaatggtggtgatgacgatgacagtggctatgattatgctcctgctgcgtgattgtttcctattagtatatgattgtaatttaggaggaaacaaaaagacagagatgataaggtaatttagatatctagctaggccatgtatgtactaaatagtttggtgagtcttcttatagatgaacaaacatggtttccatagatgtttacttgtggattga

SEQ ID NO: 125787 - DNA, 609 bp, Arabidopsis thaliana
cttgaagattttatgaagatggtggaacacgatgcgtcttcgaaggctggaactccgcatttccgtaaccgtaccaacaagtgggaggatggttcagtgtcagagatatcaggcgtggttgatccagacaggaccagtttcatatcagatgggacgtcaacgcctctgtcgactgcaagagctcatgttaggtctcactctgatgatgatctggaggaggaaatgtcgcccaggcattcaggagatcaatcagaagaatactgcaaagaggtacaatgcattgagatggaagaatcgaccagagacattaataacgacagtgaagaaaggacagacgcagaaacacttttgggacacaatgcagaggcaaacggtgaaacaggtagtgctcaacacaggatcccgtcaagtgttagaagtgtcaggaggaggaagagttggagccgtggagataccatgacaggcacaagcactcctcctgatgccctggagacagactaccgtggaagaccggagggtcatggatttgcgtttcctgatttggagtttggttctggtgggaaattgttgaggaacgattcaatgacttctcgtggaagtgattcaact

SEQ ID NO: 125788 - DNA, 522 bp, Arabidopsis thaliana
  unsure (1)..(522): unsure at all n locations
cnnnnnnnnnnnnnnnnnnnnnnnnnnnnnnnnnnnnnnnnnnnnnnnnnnnnnnnnnnnnnnnnnnnnnnnccacgcgtccggtttgtatgggatgtgaggagtccctatcaaaacacgtcaatggttggaatttgtttccaaatttcaaatcgggaagagtagtaactcaacatcttgtatgcattcagatattaagtctttcttgttcaaagaggaaaactgaaacaacagtatttgtttgatgaaatcgatggtgaagaagttgaagcagagtctgagatctggatcgttagagaaaaggaaggaaaaggaaaaagacattcaggaagaaaagtggttcttagaccacggaagcatcttcttgaaagaacttattgctgattgtaacggtaaatccattcctatacgtaacttttcttctgaccagatcttgaaagctacaagtaacttcggttcccaggtgttttgtaccgcagaggggttttatgtatggtacaaaggtatcatagaagatagatc

SEQ ID NO: 125789 - DNA, 698 bp, Arabidopsis thaliana
  unsure (1)..(698): unsure at all n locations
cccttcccccatattcgattgagcnngcgagttcacgttagntccgnttgaaaccngacngaatctatcgtcagacggatcagaccggtgaaattcgactccgatcaggattncaaatcggaaatccatgccggctttgttttacgctggtccagtcacatcaacatctccgccgccgagtgaagtccctttaccggctttcttcgctaataaaaccgtcgccggattcaaaccgaccgatgcaaccaacgatctgatcaaaatcctgcgattagatatcgcatgattcatttctttctccgatcatccaaatccgtcttaaaccggtccgatctcgcattctctccgatcatggggattgaaaagagtgtcttcgttatgaaacgttttcgaattcttctcttattttttcaaggggaagatcgaagaagtaatcttcttaaacaagtcttagttttgcttgtagctaggatcaatgtgtagtatatgtgaataagcttttcgcagttctttgtctatttctaggttctttttgaataaatctaaatggcttgtaagttgtaacgtaagtggtatcgatgcaatttgattagttgggaacaaaaaaaaaaaaaaaagnnnnnnnnnnnnnnnnnnnnnnnnnnnnnnnnnnnnnnnnnnnnnnnnnnnnnnnnnnnnnnnnnnnnnnnnnnnnnnnc

SEQ ID NO: 125790 - DNA, 539 bp, Arabidopsis thaliana
  unsure (1)..(539): unsure at all n locations
ctcaaaggaccctttttttacaattatacccttctccttcccagttctctcattatcctcctaacatttcttctctagatctgagaaatcaccatgggagtcgctgttcttcatcctcatgattctataatcaatcatttctccacaaacacgtcccctcctctccgtcataaaaaaccgatcaccaatcgccgtcgccggagtccgtcaagtcaccaatcccagatctctcatcctcctccgtctcctcataaccacaccaatcatgtacgaattctgaagcgtggcgaagatatcaacgttaagataccgattgaaaaaccagatctggaatctaatcgtcagatcgggtcagatccggtggaaatttcgccctccgttcaggattttcaaattggggaatcccgggnggggtttgttttacgggggggcccgggcaaatnaaaatttccgggcgccgggggggagggccctttaccgggttttttgggtaaaaaaaccggggggggtttaaacccgcccggggaacaanggttttt

SEQ ID NO: 125791 - DNA, 467 bp, Arabidopsis thaliana
tctcaaaggaccctttttttacaattatacccttctccttcccagttctctcatggtccgccgaacattcctgctggagagctgagaaatcaccatgggagtcgctgttcttcatcctcatgattctataatcaatcatttctccacaaacacgtcccctcctctcccgcataaaaaaccgatcaccaatcgccgtcgccggagtccgtcaagtcaccaatcccagatctctcatcctcctccgtctcctcataaccacaccattcatgtacgaattctgaagcgtggcgaagatatcaacgttaagataccgattgaaaaaccagatctgaaatctaatcgtcagatcggatcagatccgatgaaaatttcgccctccgatcagaatttcaaatcggaaatccatgccggcttggttttacgctggtccagtcacatcaacatctccgccgccgagtgaagtccct

SEQ ID NO: 125792 - DNA, 485 bp, Arabidopsis thaliana
aatacgactcactttagggaaagctcgtacgcctgcaggtaccggtccggaattcccgggtcgacccacgcgtccgggaagaaatagatgataaagtgattaatttggatgaagatgaacctctgtctccaatggtagtagaggaagcatgtgaacttcctgaagggttaccagaagatatttactacccatcaagtgatcaaagtgatgggcgagaccttgttcaagtatctcttaaagatctgaaatgcctttcacctggggaatatcttacatcgccagttataaatttctacatcaggtacgtgcaacatcacgtgttttcagctgataagactgctgctaattgtcatttcttcaatacgtttttctacaagaagctcacagaagctgtttcatacaagggtaatgacagggttctttttttttaaattccaggggggggggaaagggtttaatctttttggaaatttttttttttttcc

SEQ ID NO: 125793 - DNA, 509 bp, Arabidopsis thaliana
  unsure (1)..(509): unsure at all n locations
nnnnnnnnnnnnnnnnnnnnnnnnnnnnnnnnnnnnnnnnnnnnnnnnnnnnnnnnnnnnnnnnnnnnnnnnnnnnnnnnnnnccacgcgtccgcacttttattcaaagaaaatacttaactttcttttcactaaagctattcgaaaatgtcaagcaactcccagaacattagcttccaagctggccaggccaagggccaaactcaggagaaggctagcaccatgatggacaaggctagcaatgctgcccaatctgccaaggagtctctcaaagagaccggccagcagattaaggagaaggcacaaggagctaccgaatcagtgaagaacgccaccggcatgaacaaatgaatacaataatcatatgattcattatgttattttttttacgaataaaaacaataattcattttttgaaacctaaagattaggttcaacggtttgattattcagactgttgtttctttctttcttaatattattacttcttctcttggatttttgtttct

SEQ ID NO: 125794 - DNA, 624 bp, Arabidopsis thaliana
  unsure (1)..(624): unsure at all n locations
tcgtctcacgcgtccgattgaagagaagctctaaagattctttgtctctttctctgtcgcattgatttgtaaaaaagtgtggcagagagaaaccatggctatggcggaaatggcaacgaagtcttcactatctgcaaaactcactcttccttcttcttctactaagaagacactgagtctgagacaagtctctgtttcacttccaacatcaacttcaatctctctgttatctctctttgcatctcctcctcatgaagctaaagctgctgtttccattcccaaggaccaaatcgtctcctctctcactgaagtggagaaaacaatcaaccaagttcaagaaactggttctagtgtatttgatgcaacgcagcgtgtgttccaagtagtaggagatgctcttaaaccagctttggacactgctttacccattgcaaagcaagctggtgaagagctatgaagcttgcttctccctgctttctctgaagnttcaaagnaagctcaaggaggaattcaagngctctcgggttttnatcctggnccggttttaatcctgcaaaggcagtaccagttnngngaaaaagggcccaagggttagagggtttaancggtttnttnttgccangg

SEQ ID NO: 125795 - DNA, 686 bp, Arabidopsis thaliana
tcaaacttcacctctgctttcttcttctcgagtgaaacagacagccaaatcaagatttgacggtgagccaaattccatggcactgtttcaggagaagctttcatcactttcctcaagttattcgtcaattcattctcttccgaggattctcgtgtccaagcctcgtaatagaattgccgtgacaaagtcccgttcgatttgcagagcttcgtggcaagagctcgccggagtgttggttttctcggcgattccattcactgcggttaaagcaattgcaaatagctcaataggagtttctctacggcggagattagaagagaaaaagaaggaagccgtagagaattcttcaagattcaagtctaaagctcaggaagctagaaacgacagcaagtggtatggaaaagaacgtccccgttggtttggtccaatcccatatgattatcctccataccttacaggagaacttccaggggattatggtttcgacattgcaggacttggcaaagatcgtttgacctttgataagtatttcaactttgaaatacttcatgctcgttgggccatgcttgcagcattgggtgctctaatcccggaagtatttgatctcactggaactttccattttgctgaacccgaatggtggcgagtcgggtactccaagcttcagggagagacattggagtacc

SEQ ID NO: 125796 - DNA, 1165 bp, Arabidopsis thaliana
  unsure (1)..(1165): unsure at all n locations
ctacgactcactatanggaaagctggcacgcctgcaggtaccggtccggaattcccgggtcgacccacgcgtccgctccgatgacacaaaacgaggaagattatttgacattttaagtaagaacagctagctttgccatctccctaaaggcaataaatctcggatccactttcacgatattttgatattttttctatttataatctttctgggttttgagtcttttgaaggctgaattgctctgaaatctcaattgtataatcatctcctgggtcgtcgttatcgtgatcatctagaagaaagcatgactacactagatttgaccagagccgagcttgctcttattgttctctatttgaacaaagctgaggctagagataagatatgcagagctatccaatatggttccaaatttttgagcggtggccaacctggtactgctcaaactgtcgacaaaaacaccagcttggcgagaaaagttttccgtcttttcaagtttgtcaatgattttcacggtcttatcagccccgtgcctaaagggactccacttcctcttgtcttactcgggaagtcgaagaatgcgctcttgtctacctttttgtttcttgatcaaatcgtctggcttggtagatccggcatatacaagaacaaagaacgaactgaattgcttggacgtatatcacttttctgctggctgggatcatccgtttgtacaagtgcagtcgagattggtgagcttggaaggctctcttcatctatgaagaagatggaaaaggaactcaaagctgatgatgagctgtatcgtgctaagcttcagaaatcaaacgacagaactctagctttgattaaatcaagcatggacattattgtagccattggtctccttcagttagctccaaagacgattagtcctcgtgtcactggtgctttcgggtttgccaccgcacttatctcttgttatcagttgcttccatcgcgccccaagttgaagacaccttgaagaaggaataagcttgttctctagtactttcagaataattgtttcatattcatcagtaagcctattgtgttcaggtattctaaggagtctatgttcctcctttgaatgaatttgctgctcttataacgcgtttgcaagaataatgataagttttagaataagatt

SEQ ID NO: 125797 - DNA, 397 bp, Arabidopsis thaliana
ttcgttttcccacgcgtccgcccacgcgtccgcagggtacacatcacctaaaagtaaaaatagacaaaagagaccttgtcctcacgcctctctctttttcccggcaacaactaacaacaacacttctttacctttctctctaaggcaaaacccttctcttatgtgaccactcctccatgcatccctcctccgccgccgtctccggcgaactcacaaaaccaccaacagctccactccaaccacttgttgacctaataacaaacgtcctctccctcctcctcctctcttccctcaccgtccggtccttcatcggacggtggcaaatcctccgattcaaactcttcacactaaactcatctctctcttccttatccgaatcacctcactggtcacaaaa

SEQ ID NO: 125798 - DNA, 535 bp, Arabidopsis thaliana
  unsure (1)..(535): unsure at all n locations
ccnnnnnnnnatacgactcatttagggagggctggtgcgcctgcaggtaccgggccggaattcccgggtcgacccacgcgtccgcgacggtttaccggccgtatctctatgccgtgaccgctgcagctcactcgaagatacgctccggcgaagctacgccttagccgacgctcactcagcttatctcctttctctgaacaccgtcggtccagctctccatagattcttccaacatgccgtcgagtctccgccggatgttgaatccgaagctgacgaatcaccggagacgtattctccggaatcctgttcctcggctcactcggttaccagttctgattccgatttgcctcccaagttcgattcggattgtgaggaaggtgaaggtacgaattgcgatctcttaagcggttcaaaacctgaatctctaaatcttaatcatgactcgttctactcccggagatacgaatccggcaccataacgccgnctcctccaccgncggctccgagtaattacgcttgggattttatcaatttc

SEQ ID NO: 125799 - DNA, 606 bp, Arabidopsis thaliana
ctctatacgactcctatagggacagctggtacgcctgcaggtaccggtccggaattcccgggtcgacccacgcgtccggtttttctctgtactattttgttttgtgtttagggtttctgaatttggttttctcccttttcttcaatcaatctttgtcgtctcttccgatctgctcaatcacactactagccgttgttttcccgccactttctagcttcaacacgattcgccgcgtatccgaattcctataatcgtctttggatctgctttttgaaatttgaaattttgaaagtttttggtcggagaagtaatggcggaagcgatgaattcgtcggagaagaaagatgagagctcggaggagaagggaggtgagcttttgttctgtggtgctacggcttgggatatcattggaaaacgaaaaggtgcgatggaaggtaacttggtctctcctactcggctaaggccactcgtcggcgttaacattcgattcgtcgccactggttgcgcttcgtttcattgtgtggcattggacgttgaagggtcgttgttacacttggggacgtaatgagaaaggtcaattaggtcatggtgatatgattcaacgtg

SEQ ID NO: 125800 - DNA, 531 bp, Arabidopsis thaliana
  unsure (1)..(531): unsure at all n locations
nnnnnnnnnnnnnnnnnnnnnnnnnnnnnnnnnnnnnnnnnnnnnnnnnnnnnnnnnnnnnnnnnnnnnnccacgcgtccggtctccgacaacgcatcatttctctccttctcctctgttgaaattttcgtggatcgcttgtttctcagttatattcaatctggtgaaaaaaaaacaaaaagcttcaagctcagagacgaagatcctctgtttctgaggacttgcttatcagattcttgtttcctaaaccaaccgatttgaaccaaacggtctattccggttattgcctcttgaagtcaatcacagaatgtcatgttagctttaggttatgccaaggaaatcgctcaaagatttctcagaaatccaaaatggacctctagattcttcttgcttcactatcaatcctctaattactccagttatgtaaagtcaagaccttttctacaagttcaatgtaaatcagcttcttttgatgtttcacaagctcagagatggaatctatttgcgtatgatggtttgtttagtagacgt

SEQ ID NO: 125801 - DNA, 670 bp, Arabidopsis thaliana
  unsure (1)..(670): unsure at all n locations
nnnnnnnnnnnnnnnnnnnnnnnnnnnnnnnnnnnnnnnnnnnnnnnnnnnnnnnnnnnnnnnnnnnccacgcgtccgggttaagtgaggtgacagtattgttaagatccaaattcagaagttatatgcaagcgcttgtggagaaacttgcagaaaatacgaggatacaaagtcacatgaagctaaagaccatcatccacgacttaagggaaaccacagcggaaccggatgttagaaacagaatgacgtcattgaaggatttgctagacaaaaccatcgatcatctacacggcgtgttcttaccagaatgtgtttggagccattctgcagaggaatctgggaccgaaggggacatgatgcgcttcgtctttgggaagacaggaaagaatattgggacttggcataaaggcccaagaattcccactttctgtttgggatgaaatctttgccgccacaatgcacagctggcttggaaaccggttcggagacccgagcacttgggagccccaagaaccgagatggaacccaaggcctatgctttgcaagatttttaccggataccaaggagggggggttcccctacttatccccgaagttggggaccgggggaaaacccgggccttggttggatcattggggaggagggcactgcccaattttttttttttac

SEQ ID NO: 125802 - DNA, 751 bp, Arabidopsis thaliana
cttggaattcatatattcctgttggagaaaacaaaaattttggggaacgggttaatgaggggggccggtttgtaaaaaaccaaattaaaaagtttatttcagcgcttgtggagaaacttgcggaaaatactaggatacaaaatcacatgaagctaaagaccatcatccacgacttatgggaaaccacaccggaaccggatgttagaaacagaatgacgtcattgaaggattttctagacaaaaccatcgatcatctacacggtgttttcttaccagatgtgtttgtagcaatctgcagaagaatctgggaccgaatgggacaggatgtgcttcgtcttttggaagacaggaaagaataatgtgacttggcataaaggcccaagaatcgcagtttctgttttggatgaaatctttgcgacacaaatgcaaagcttgcttggaaacggtttgaagcccgagcacttggagccaccaagatcgatgatggaactcaggtctatgctatgcaaagattctacggattacagagaagggggatacaactactagtaccagagattgtgagccggtgaagaatctggttcttgtttggttcattggtatggtatggccattgccaagtttctattctttgaaccaagcaaatgtagttaaaagaaggcgcgggggtaaacagagagtttaactgtacttgtatgttataaaaaaaggttgaaaaaaatacaagaaaagagactctcgcatttttctc

SEQ ID NO: 125803 - DNA, 614 bp, Arabidopsis thaliana
cgcctgcaggtccggccggaatcccgggtctcccacgcgtcgccacgcgtcgaaagtctaatattatcacttacaaataccattttaatcatgaccgttgattcagctctgcgatctccgatgatgcactcaccgtccactaaggacgtgaaggctctaaggttcattgaggagatgacacgtaacgtcgatttcgttcagaagaaagtgattagagagatacttagtcgtaactcggacactgagtacctgaaacggtttggtctcaagggattcactgaccgtaaaacatttaagaccaaagttccggtggttatctacgatgatcttaaaccggagattcaacgtattgccaatggtgaccggtcaatgatcttgtcttcttaccccatcacagagttcctcacaagctctgggacatcagctggtgaaaggaagttgatgccaaccattgatgaagacatggaccgacgtcagcttttatacagtcttctcatgcctgtgatgaatctctacgtgcccggattagacaaaggcaaggctctatattttttgttcgtgaagacggaatcgaagactcccggtggattaccagcacgtccggtgctcacgaa

SEQ ID NO: 125804 - DNA, 528 bp, Arabidopsis thaliana
  unsure (1)..(528): unsure at all n locations
ctctatacgactcacttagggaaagctggtacgcctgcaggtaccggtccggaattcccgggtcgacccacggcgtncgtctcaataaacaaacactaacaatggtggtcgaagaagattcacgtctcataaatctccaacacaagtacaacccgacaatgcccgaggtggtggaggagctgaagagaatttgggacataagttttccggtggccgccatgagcatattaaactacctaaagaacatgacatccgtcgtgtgtatgggacgactcggtagccttgagctcgcaggaggagccttagccatcggtttcaccaacatcaccggttactccgtcctctctggtttagccaccggtatggaaccattatgtggtcaagccatcggttctaaaaacccttcactcgcttccttaaccctcaagcgaaccatcttcctccttctcttagcttctcttcccatatcactcctttggctaaacctcgcgcctctaatgctgatgctccgccaacaacatgatatca

SEQ ID NO: 125805 - DNA, 1046 bp, Arabidopsis thaliana
  unsure (1)..(1046): unsure at all n locations
atgatacttcagctctctacgactcactattgggaaagctggtccgcctgcaggtaccggtccggaattcccgggtcgacccacgcgtccggaaagtagaagaagcgtgtggattggacatgggcttaaagacacacaaattctttctacgaattttgttaatttttgttatatttccttcttcactattccgcttagagcacaacaccacgatgacgaccaaggccatggagagaggatttaagctgattctgggttctcaatccatggcgagaaagaggattttggctgaaatgggatatgattacactatcgtgactgcagacattgatgagaaagctattaggacagagaagcctgaagatttggttgtggctcttgctgaagccaaggcaaatgagattatatcgaaattgggaggtgagagccagtttgcaaaagatcctcaaccaactcttttgattactgcagacactgttgttgtgtacaaaggtgttattagagaaaaaccaaccactaaagaagaagctcgtgaatttatcaaaggctattccggttcacacggaggagttgtgggatctgttcttgttagaaacttgaaaactggagttaaaaaaggaggatgggccaaagctgaggtttatttccatgagataccagaacaagtcattgacggtcttattgatgatgcaataacttataaggttgctggaggtttaacactggagcatcccctcatttcaccctttatcgattctgtggtgggaggggttgatacagtcatgggacttcctaaagaactcacagaaaaattcataaacgatgtgttgttgtagctcaagtccctttttgattatgtaggaatacttttgaatctctctaatcaatcatttattttgtaatttggtaaaacacagatttatcgtatcatgtttttaagtagtgatgatgttttcagaaaaaaaaaaaaaaaagnnnnnnnnnnnnnnnnnnnnnnnnnnnnnnnnnnnnnnnnnnnnnnnnnnnnnnnnnnnnnnnnnnnnnnn

SEQ ID NO: 125806 - DNA, 712 bp, Arabidopsis thaliana
ttcagctctctacgactcactatttggaaagctggcacgcctgcaggtaccggtccggaattcccgggtcgacccacgcgtccgcggacgcgtgggcgtcactcgtcacatgagaggaacaacaagaaaagtcaaaacgttgaagctttctcgaataacgccttctttagtttacagtctctcgttgcgggtcttatcttcttcttcttcttccctctttcgtctgctctatattatgaccagattcaaaattgcgtagcgtactaattcaatatagagagaagttagatcaaaagaagaacacgaaactctgactgtgtctctctttctcttcgtgtgtttctatatttatatataaaaagacaagatctctggtctggaattagaagaatcttatttggggttttttcttaggattaagctctaatggcagatcaagtaaaagagcggactttagaggagacctctacgtgggcagttgctgttgtttgctttgtcttactctttatttcgattgtcctcgaacattctattcacaaaattggaacctggtttaaaaagaagcacaagcaggctctttttgaagctcttgaaaaggtcaaagcagagcttatgctgttgggattcatatcactactactcacaattggacaaacaccaatctcaaatatctgcatctcccagaaagttgcgtcaacaatgcacccttgca

SEQ ID NO: 125807 - DNA, 502 bp, Arabidopsis thaliana
  unsure (1)..(502): unsure at all n locations
atgannnnnnnnnnnnnnnatacgactcatttagggaaagctcgtacgcctgcaggtaccggtccggaattcccgggtcgacccacgcgtccgcccagatgctggagcacatagtaaagaggagatggaagctgaaacagaacaggatccaatgaacctagctgatccagacagttgtttctgtgagtttcaaggtgttcatatacaccacaaagtgttagatccacatacactctctgatgatgtttcaaacacaagccctcatgctcaagaaacaccaaaaaccaagtttccgatgattctattgcacggtttcggcgcttctgtgttctcctggaacagagttatgaagccattagctcgtctcgttagttcaaaagttcttgcctttgatagaccagcatttggtttgacttctcggatttttcacccgtttagtggtgctaccaatgatgcaaaaccattgaatccctactccatggtggtttccgggctcacttac

SEQ ID NO: 125808 - DNA, 600 bp, Arabidopsis thaliana
cattcgtcgaatccattgcttagggagagaagagtatattgctgagagcttcgctgctctgttctgcggcctcaatcactttcacaccaagtcaactattcaatcccaatagttcccatcgtttcccaagattcgaactatctcgtcctgtctcggctttgtctcgtaccaaatgtcacttgagtctcctgagagctcgtgggaaatccagcttcctcactcgcagcaccgctactgatgaagctgttgaaactagtagtaacagtggattggatttggttgaggttggattcttgtctggtgttcatggccttcaaggcgagatttgcataaaaccaaacactgattttcctgatttacgtttctctaagcctggtagaagatggttaaaacaacaattgttgggacaagataagattgatgaggttgaattagtcgaaggaagacctcatcctgcgcagaagagttggattcttaagtttcgagggttggacgatgttgatcaggtgagacaactcgttggtgcaactctgcttgctgaggacgatgatcgtcctgagcttgatgaaggagaattttaccttcgagatcttgtaggca

SEQ ID NO: 125809 - DNA, 541 bp, Arabidopsis thaliana
aagtatgtagagaaatgcaagtttcctaaagatggttctcctgcaaagtctctgagatacgtaggaagtatggtagctgatgttcatcgtacactactttatggaggaatcttcttgtacccggctgacaagaaaagccccaatggaaaattgcgtgtcttgtatgaagttttcccgatgtcgtttttgatggagcaagccggaggtcaggcctttacgggaaagaaaaaggcgctagaccttgtcccggagaagatccatgagcgttctccgatatttcttggtagctacgatgatgtagaagagattaaagctctctatgctgaggaggaaaagaagaactaagcttctcattcttcttttattctcttactgtctctgtctctcttatttctatatacagtatcttcttctgatgagaagaacaatataactcatttaccaaaggaagatctttcttttgcctaaaaataaaaaaaaaaaaacccaaaaagcggccgctctagaggatcccagcttacggacgcgtgcatgcgacgtc

SEQ ID NO: 125810 - DNA, 400 bp, Arabidopsis thaliana
  unsure (1)..(400): unsure at all n locations
aggagatggaagcttgatgatagtatgtatctagttgctaggtgtgagttacagagcactgttgatttgaataaccagagatcgtttttaactttgaatnctcttaacgagtttgatcctaagtactctggtgttgattggagacagaagcttgagactcagagaggtgcggttttagctaatgagttgaagaacaatggtaataagttagctaaatggtctgcgcaggctctcttggctaatgcggatatgatgaagattgggtttgtttcgacggttcatcctcgtgatcattttaaccatgttatattatcggttttggggtataagccnnaangatttcgctgggcagtcaatctgaacactaacaatntgttggggaattgtgaagtcgnttgtt

SEQ ID NO: 125811 - DNA, 841 bp, Arabidopsis thaliana
  unsure (1)..(841): unsure at all n locations
gcgcacnnnnnnnnnnnnnnnnnnnnnnnnnnnnnnnnnnnnnnnnnnnnnnnnnnnnnnnnnnnnnnnnnnnnnccacgcgtccgcgtaaatctgggtctccgttttggatgttgtttcatatgtgtcctgtttttgggaaagatgatggtaaagtcaccaattttgtggcggttcaggtcccgatttcgggacgagaacatcatcggaagaagttgagaaatgtcggagatttgtcgtcggatacttctccgacatttggttcttgtcgaagagaggtttgttttggtaatttcgtgtgtcaggatcgagctttaccagtggaatgtgatgatgatgaacaaggattagaggattgggaacagtgtgaagcgagtgagtccgagaagctgaaagctacggaagctattaacaatgtgttatctatcttagtgcattacagcgagttgagtggtagattagtctgcggaaagcggtactgcttgcgaggagtagattgtctaagctcgtcgttagttatttctctcggtagaataaacaaagtttcgtattaaccaatccatgcttaccagacatgcctatcatttatgcgagtgatgcctttntgacactgacccggtacaagagacaggaagtgttgggacaaaactgtagatttctgagggggggtgatactgattccctcatactatacgaggtagagattgcgtgttacttggtattagtatatggcatgatggatattgggaatgtttaatttgttagatgaggaatgctcttaaaggacaatcttcccagtgcaatactaatttccgtacagaaagataaaactcttttggat

SEQ ID NO: 125812 - DNA, 741 bp, Arabidopsis thaliana
  unsure (1)..(741): unsure at all n locations
nnnnnnnnnnnnnnnnnnnnnnnnnnnnnnnnnnnnnnnnnnnnnnnnncctcatcattcttcttcgtccgcgcgtccgctttttggaaaacgaaagcgggatttagcgtatagcagcttccaccgtttcgccgaatttcatcgagcttcaagtgaacatgagtaaaccaatggaagaggataccaacggaaagactgaggaggaggagttcaacactggaccactctctgttttgatgatgagtgttaagaataacactcaggtgttgatcaattgccgtaacaacaggaaactccttggccgagttagggcttttgacaggcactgcaacatggttcttgaaaatgtcagagaaatgtggactgaggttccgaaaaccggaaaaggaaagaagaaagctcttcctgttaacagagatcgattcatcagcaagatgttcctgcgtggagactcagtcattatcgtcctcaggaaccccaagtgaaagaagctcttcttatgataattctcgcttcttcttgtcaaatcctatttgttgcatcaacagtgagaacatgttttgattatgagccttaaatctactagggtggccttgtatttttcacttggcttctatctttgccttgaaccgcagccagggaactttgtaatttcaaaagagaattcttctttttttaaagaaaacaccgaaaaaagacgggaatgtaacaaaaacagaaatatcaataacaaaaaaaaca

SEQ ID NO: 125813 - DNA, 595 bp, Arabidopsis thaliana
gatcgagtcgtcgttcttcttcttcctctgagagagagatctgcggaaaacgaaagcgagatttatcaggttcggtgattctttgtggagaagaagctcgcgataagtcaacatgagcaagccaatggaagaggataccaatggcaagactgaggaagaggaattcaacaccgggccactctctgttcttatgatgagcgtcaagaataacactcaggttttaatcaattgccggaacaacaggaaacttcttgggcgagtgagggcgtttgacagacactgcaacatggttcttgaaaatgtcagagagatgtggactgaggttccgaaaactgggaaaggcaagaagaaagcacttccggtgaacagagatcggttcataagcaagatgtttctacgtggagactcggtcattatcgtcctcaggaatccaaaatgagaggaagagagacttagagacatgttccttgtttgttgtgctaaaactgataaattcttgtaggtagtagcatcttttaaagttattcgtctcattttcgtttatgtccgaattgacaagatcttttaaagatcttttaaagacatgttccttgtt

SEQ ID NO: 125814 - DNA, 535 bp, Arabidopsis thaliana
  unsure (1)..(535): unsure at all n locations
nnnnnnnnnnnnnnnnnnnnnnnnnnnnnnnnnnnnnnnnnnnnnnnnnnnnnnnnnnnnnnnnnnnnnnnnnnnnnnnnnnnccacgcgtccgcggacgcgtgggtcgtgatccgccgctaaatcaaaccagcgagagagatagatccaacgtgaagaagaaatcggtaacgatgacgcttagggagaaaatgccgacgagtcctaaatcgcctctgagaagacgacgttcgagctggaccggttcatggttaaaccatcagacgacgtacgtttaagcaagcagtctccgccgttattcaagctcaatcaccaagatccaggtgtaaatccctatcttctgatttctccgacgtcgatcgaactctttcgttgtcagattctcttcttctcaagatccttgagaagcttcctgaatctcagaacgaagatgttttactcgagtgtaaacggcgggtgagtgttcagggacggcgtttacggagtatgaaggtttttgattgggactatttattgtctgggaggcttgtttaga

SEQ ID NO: 125815 - DNA, 574 bp, Arabidopsis thaliana
cgacgatttcgtggaggttcgcgtcttcgacctctcttctctccattcctcgaacaccaaaaagtgcctttatcttcgccatgaccttctcttcttcttcttcttcttcttcttcttcttcttctgtggaaaaccctaacaaggacgattcctcctcttcgcttgaattggtcctcaagtaccacaaccagacgaagcactccttgaacggttacgcgagaggtcctcgtggtctcgactgggccaatcagcctaatcccttccgccggtacctctctgctcctcttcttcctctccaacaccccaatcacgacatcgacgacgactccgactctcctctctactctactctattcgactcgcttcctccgcccaaacccatctctcttcctacaatctctcaccttttctaccattctctcgctctctccgcctggaagaccaccggatcctccacgtggcccctccgcgtcaaccccagcagcggtaacttgcatcccaccgaggcctatctcattgctcctcccatcccttccctctcccaatccgctttcgtctcccactatgctcccaa

SEQ ID NO: 125816 - DNA, 836 bp, Arabidopsis thaliana
  unsure (1)..(836): unsure at all n locations
ggggcggccgcgcgtacgaaaaaatctgagctccgaccaaaaattggggaacgacgatggcgacgactcttcagaaactctcctctcaaatccaccgactctctccattcaccagatctctaatcgttcgcacatccgcaacgtctgctccttctccgtctctgggatcgaagaaagtctctgaccgaatcgtcaagctttctgcgatcgatcccgatggatacaagcaggacatcattggactctctggccagactctccttcgtgcgctcactcacactggtctgatagatccagcatcgcatagattggatgacatcgaggcttgctcagcggagtgcgaggttcagatcgcagaggaatggctcgagaagctcccgccgcgtacttacgatgaggagtatgtgctgaagcgtagctctagatcccgtatcttgaacaagcactcgcgtcttggttgccaagttgtgttaacgcaggagcttcaaggtatggtcgtcgctgtccctgaagctaagccttgggatattccgtaagtttttgttcttgaggatctcataaatgttgggttcgttctcaatttggctaataaaattcgctttggaaatttcggtactctgaagataactccatttgaatctgtaattttcgtttgcttacatttaaattttgtaatgtggtaaagaactctgcttgtttaaacgattccctgcttcaagtatgggtgaatgttgttttcttgatttcaaaaaaaaaaaaaaaaaaaaagnnnnnnnnnnnnnnnnnnnnnnnnnnnnnnnnnnnnnnnnnnnnnnnnnnnnnnnnnnnnnnnnnnn

SEQ ID NO: 125817 - DNA, 665 bp, Arabidopsis thaliana
  unsure (1)..(665): unsure at all n locations
nnnnnnnnnnnnnnnnnnnnnnnnnnnnnnnnnnnnnnnnnnnnnnnnnnnnnnnnnnnnnnnnccacgcgtccgcccacgcgtacgcgacgatggcgacgactcttcagaaactctcctctcaaatccaccgactctctccattcaccagatctctaatcgttcgcacatccgcaacgtctgctccttctccgtctctgggatcgaagaaagtctctgaccgaatcgtcaagctttctgcgatcgatcccgatggatacaagcaggacatcattggactctctggccagactctccttcgtgcgctcactcacactggtctgatagatccagcatcgcatagattggatgacatcgaggcttgctcagcggagtgcgaggttcagatccgcagaggaatggctcgagaagctcccgccgcggtacttacgatgaggagtattgtgcttgaagcgtactctctagatcccgtatcttgaaccaagaactcgggtctttcggttccaaagttgtgttaacggaggggcttaaagggatggccgnggttgtccctaagntaagccttnggntttncnnaagttttngnccttnnggcttaaaaatgtnggncggccaaattggtaaaaaatcgnttgaattnggccttaagaanccnttnantnggc

SEQ ID NO: 125818 - DNA, 539 bp, Arabidopsis thaliana
tccaattacatattagggaaggctgcacccctggcaggacccggcccgaatttccggggtcaacccacccgtccgcggccccttggaaaatttggaatcttttggtttattggttgcgctctctccattttttaatggaccgggccacctgaaatgagttaagttcgacttatatagaagctatgttctgcaaatccacatggatgatttcaccatttggttattttggatgaggtggatccatcaggacacactttaagacttataatggtgggactggatctgactttctttttgggcactgaccatttatgctgacaattttgtatggatccaatatcatttatggtgtcagatggtgggggtttttctatctctgatgggggttatatgggtggcttctttcttcaaaattttcttccgagctacatctatctccagagccactattcttgatgatgggaagaaaaatgtgatgtttgttatcgcacatcctgatgatgagtcaatgttcttttctccacaataaactacttcat

SEQ ID NO: 125819 - DNA, 557 bp, Arabidopsis thaliana
  unsure (1)..(557): unsure at all n locations
ctagtcatctaatatggggtttatgcggaattatatcggtgatttctacaatactcttctatcatacttgcattctctgaaccatatataggcttgatcttcattttgtaccacttttcaggaacatgtgaatgcagtcgactttgactacatggagtatgcaagtcaaaggttcgagcagtattggttagcacagccgaggctccttgcagcttccgaacacttagtcaatttctatggtcccaacccaagatgagtattttgacggtgttaaagaggtatatgctcacaaaaaggtgcctgattacgatggtatttcccagcttcaaagaataagaagatgtagcgttttctgttttaccctttttacgaggcaaaatgtaatggtcagtagtttataatcagcagttgaagttgtttcagataaaatgtagttctctcctatttaaatcgtttttatttgtggatacaaaaaaaaaaaaaaagnnnnnnnnnnnnnnnnnnnnnnnnnnnnnnnnnnnnnnnnnnnnnnnnnnnnnnnnnnnnnnnnnnnnnnn

SEQ ID NO: 125820 - DNA, 653 bp, Arabidopsis thaliana
  unsure (1)..(653): unsure at all n locations
acggacgcgtgggtgggaacatcatgatggatgaagagaccaaagcaataaccatcattgattatgaatattcatgctataatcctgtggcttatgacattgccaatcacttctgtgagatggctgccgattaccacactgaaacacctcacatcatggattatagtaaataccctggtgtggaggagcgacaaagatttctgaaaacatatatgagttattcagatgaatgaaaccccagcgatactatggtcaaaaacctccttggaggcgttgagaaatatacacttgctagtcatctaatttggggtttatggggaattatatcggaacatgtgaatgaaatcgactttgactacatggagtatgcaagacaaaggttcgagcngtattggttaacaaagccgaggctccttgcagcttccgaacacaagtaaatttctatggacccaacccaagaagagtattttgacggtgttaaagaggtatatacacacaaaaaggtgcctgattacaatggtatttcccagcttcaaaaaataagaaaatgtaacgttttctgttttaccctttttacgaggcaaaatgtaatggtcagtagtttataatcaacagttgaagttgtttcagataaaatgtagttctcacaaatt

SEQ ID NO: 125821 - DNA, 516 bp, Arabidopsis thaliana
cggacgccggtcaaaattgagacttctctctgtagagtaaagtagtgaggaacatagaatgatcgccgacgacgatgagaagtggcttgccgccgcaatcgccgccgttaagcaaaatgctttctatatgcagcgcgctatcgactccaacaatctcaaagacgctctaaagttttctgctcaaatgctcagcgagcttcgtacttccaagctttctcctcataaatactatgaactctatatgcgagtttttaatgaattggggactttggagatattcttcaaggaagagacgggacgtggttgctccatcgcagagctctacgagttagttcagcatgccggtaacattttgccaagattgtatcttttatgtaccataggatctgtatatatcaaatccaaggatgttactgctacggatatacttaaggatcttgttgaaatgtgtcgagctgttcaacatcccttgcgtggtcttttcttgagaagttatcttgctcaagttactaggga

SEQ ID NO: 125822 - DNA, 497 bp, Arabidopsis thaliana
  unsure (1)..(497): unsure at all n locations
nnnnnnnnnnnnnnnnnnnnnnnnnnnnnnnnnnnnnnnnnnnnnnnnnnnnnnnnnnnnnnnccaagcgtccgggactgctgttcttgcacttggatttgtcttatactctgatccagagcagactccccgtattgtatcccttctttccgagtcgtacaatccacatgtccgctatggcgcagctcttgcagttggcatctcttgtgcaggcactggtctgagtgaggcgatatctttgttggagccacttacatcagatgttgtagactttgttcgtcaaggtgctctgattgccatggccatggtgatggtccaaattagtgaagcaagcgattctcgcgttggagcatttaggcgtcaacttgagaagataatacttgacaagcatgaagatacaatgagcaagatgggagcaattttggcttcaggtattcttgatgctggtggaaggaatgtnacgntaagactnctgtctaaggcaaaacatgtccaag

SEQ ID NO: 125823 - DNA, 511 bp, Arabidopsis thaliana
  unsure (1)..(511): unsure at all n locations
nnnnnnnnnnnnnnnnnnnnnnnnnnnnnnnnnnnnnnnnnnnnnnnnnnnnnnnnnnnnnnnnnnnnnnnnnccacgcgtccgcatcccagaaatttccgattgcactttcacatctccctctctcttacaactctctatccgtagtttcagtttcgtcctagaatttcttttcttgtctgttccagatgaaattgtgagttctccgagttatatgcatccgttagaatcaaagcggtaatcaaaagcagaatttagaggattgaaaaagatggttttggggtgtttccctttgaaaagcaagaagaaacgtggctctgtttctatgaagcggttggatcttgaagaaagcaagccaactgctttacctgagccaccaaagattccaagtcgtaatttacaatcagctcctccgagtttcagaactcgtgtgaagccaattcaatctaaccacgtgggacccgaaagtgaatagccaaccagattatgtctgctcggcaagctccccggg

SEQ ID NO: 125824 - DNA, 467 bp, Arabidopsis thaliana
acgtcgttggttcttcgatctccgatttgcagatttaagcgataatacgagatcccaaggggctcacaagcctttctacgcttaatctgtaactatgccgctcagactcgagatcaagagaaaattagcgcaaaggtctgagagagttaaatctgtggatcttcatcctacagaaccatggattcttgcaagtttgtattctggaaccttgtgtatttggaactaccagacgcaggtgatggcaaaatcctttgaggtgactgaattaccagttcggtcagccaagtttgtagcacgaaagcaatgggttgtcgcaggagctgatgagatgtatatccgtgtatacaattacaacaccatggacaaggttaaagtgtttgaggctcattcagactacattaggtgtgtggctgttcatccaacccttccatatgtgctgtcatcttctgatgatatgctcataaagc

SEQ ID NO: 125825 - DNA, 584 bp, Arabidopsis thaliana
  unsure (1)..(584): unsure at all n locations
nnnnnnnnnnnnnnnnnnnnnnnnnnnnnnnnnnnnnnnnnnnnnnnnnnnnnnnnnnnnnnnnnnnnccacgcgtccgtctctctctttcattcactacataaaaagcttcgagctcccatcactatataccctccaaagatgcaattttcaagaaactcaatccttaggcaactaagccgaaaagaaggttggagatcggcttctaaaaggtggacttccggagatagctcaacagccttcaacgacgacacaagtggtggtggttactcatcaatggagggtctttatggagtttactccggtggagacacggcggcgagaagtaagagagtgatggttgtagttgatgaaagttcgaggtctaagcatgctatgatgtgggctttgactcatttgactaacaaaggagatttagtgactcttcttcatgttgtgtctcctgatgatgaagctactccttctttggctcaatctcttggttctcttttgcaagccttgtaaacccgaggtggatggggaggcattggtgattcaaggacccaagctagcaacagtggtaagccaagtaaagaaacttgaag

SEQ ID NO: 125826 - DNA, 607 bp, Arabidopsis thaliana
aacttatctagggtttgtaccagaagagctgggagatttcaattgggaaatgctgaaactagggtttcggttagcgattggcattcaacatcatcgcctcttccgtattccatgggcgaagagacactctgtacctagaatcttgtgttctgagcagcgggattactgttcatcaggtctgacaaagtatgttcctaagaagtctcggaagattactgaagatttgacatctcagcaatttgatgttactagagtggatcatagtgtgttgggatttcaagttaagggtaacagcaaagaggctagagatggctcatttttggatctgcaagaggaaaatgatactggaagttacacgaatgtgtcttgtgatgactctgatgaaggttttatgagtttggacaagggtatagatgctagtagattggatcatagtgtattggggtctaaagtgaaggctaacatcaaagagactggagaggatactgattttcatctgcgggataaaaatgatgctgatatgtactctgatgtttcttgtgatgactctaatgatgaaagcagcaacgaagttagatctacaggctataagtcgacgagacaacac

SEQ ID NO: 125827 - DNA, 513 bp, Arabidopsis thaliana
ggaaggcgtgccccccggcaggacaccggcccggatttccggggcgacccacaccgtcgcgggtccgtgtggctaaggtccctgcagagattccgaaatcgctacttccaatttctccagaaactttctttctcggcaaaattcccggaaaaagccactcgatcagcagatggtcaggaaggaagatgtggatttctattgcggattttcaaggaaagagcttcagagtttatgcaagaagtataatttgcctgccaatagatcaagttccgatatggctgaatcattggcttcttacttcgagaaaaataatttgaacccggtaagttttggggtccctgggaatcaagatagttcagcgacaacttctagagcaccagcgattagaacatggagtgtgaagagagattcttatggtcacaaattggatgcacctagagaggattatgttcaaggcgcagtggctagagaaccaggcattatccttgggaataatacaccgtatcaggaaag

SEQ ID NO: 125828 - DNA, 455 bp, Arabidopsis thaliana
  unsure (1)..(455): unsure at all n locations
nnnnnnnnnnnnnnnnnnnnnnnnnnnnnnnnnnnnnnnnnnnnnnnnnnnnnnnnnnnnnnnnnnnnnnnnnnnnnnnnnnnccacgcgtccggccggatctgccggagagaaaaatgacgacgagtattcacatcacagctctcgacggaatcgtcaacgtgaactcactcttcacactcgccgtattcatcggattagcttggaaccctaccgatccagacaacagcctcgtaaccgaccctaattgcgtccccacagctcgtatggctgagaatctcgtcgccttccatgtgtactctttcgcatcattcctattctcaagtctcatcgctctaggtctcaaacaagcaatgaggctcaacatagcttcttcgtttcacatctctactcgaatcgatcctgtggtttactatgtgaacaagacggctcttagatttgggatggttacatcc

SEQ ID NO: 125829 - DNA, 670 bp, Arabidopsis thaliana
  unsure (1)..(670): unsure at all n locations
cgcgcnnnnnnnnnnnnnnnnnnnnnnnnnnnnnnnnnnnnnnnnnnnnnnnnnnnnnnnnnnnnnnnnnnnnnnnccacgcgtccgagaaaactccatggatgatacacaagttaaagctctagaagagaagctgaagagtcagctaagtcagcttgaactcgagcaagcggtgttcgagagaatggtttacaagaataagaaccagcatcggagatgctcttattttcaataccttctcaaggtgagaagagaattgagacttttacgaacagcaaacatggagggtatgttgagaccttgctttcatgttatatctgggagaataagtaaacagaaaatccatgttttggagagcttgaagttgaaaaaatctgatactgggaaaccaaatatcttggaacggcttcttggagctcttcgtttactctcacagatgactgaacccatcttaaaggcagctagtgggatatctactctactagctcgttcattcttcataggattttctgtgacatttntggcgctgcttgcacgtctccgagtattggtccacaaatattacttgacgctgtttcagttttcaattcggtgacatctacatcactgaagaaacagtctgtcaagatagcacaggacggggttgaggttttccgcgagttctatccaa

SEQ ID NO: 125830 - DNA, 744 bp, Arabidopsis thaliana
  unsure (1)..(744): unsure at all n locations
ctcacnnnnnnnnnnnnnnnnnnnnnnnnnnnnnnnnnnnnnnnnnnnnnnnnnnnnnnnnnnnnnnnnnccacgcgtccgcccacgcgtccgttctcatctccagagattatggacactaaactagagagctacaagggaattggcgactcaaactgtgctctctctcttctgtcaaatccacatcaaccacatgacaacaacaacaacaacaacaacaacaacaacatcaacaacaatacatggcgagcttcttcaggttttggcccgatgacggttacaatggctcaaccaccacctgcacctagccagcatcagtatctgaacccgccttgggtattcaaggacaatgataatgatatgtctcctgttttgaatttaggtcgatacaccgagccagataattgtcagataagtagtggcacggcaatgggtgagttcgagttatctgatcaccatcatcaaagtaggagacagtacatggaagatgagaacaccagggcttatgactcttcttctccacagaacagctggtctctctgacttgtctttgcatcagagaatcttcttacaatgaacgattgggcaatatcttatccttgtgatcaattgatagttgtgtgatatgctagcaataaaccagacaattgtggccagataatggcttttgattttgatttgttgttttatctccatgaaaatccaagttatgagatccnnnnnnnnnnnnnnnnnnnnnnnnnn

SEQ ID NO: 125831 - DNA, 660 bp, Arabidopsis thaliana
  unsure (1)..(660): unsure at all n locations
nnnnnnnnnnnnnnnnnnnnnnnnnnnnnnnnnnnnnnnnnnnnnnnnnnnnnnnnnnnnnnnnnnnnccacgcgtccggcagaatctgttaatgaaaaactcaaacaagagtttgatcaggcacaagaaaaatctttgcaatcatcatcagagagtgaactactagcagagacaaacaaccaactcaagatcaaaattcaagagcttgaggggttaataggttctggttctgtcgagaaagaaactgcattgaaaaggttagaagaggcaatcgaaaggtttaatcagaaagaaacagaatctagtgacttggttgaaaagttaaaaacacatgaaaaccaaatcgaggagtacaaaaagctggctcatgaagcatcaggagttgcggacactagaaaagttgagcttgaagacgcgctatcaaagttgaagaatcttgaatctactattgaagagctcggggccaaatgccaggggcttgagaaagaaagtggggatttggccgaggtgaatttgaagttgaatctggaactagccaatcatggatctgaggccaacgagttgcagacaaagctctctgccttggaggccgagaaggagcaaacagccaatgagcttgaggcttcaaagacaaccatagaagatctaacaaagcagct

SEQ ID NO: 125832 - DNA, 790 bp, Arabidopsis thaliana
tcgttttttatcaacaaaaaaaaaaaaaaaacatacaaaagaaaaaaagatttgtgttaagaacttaattgaaacattacaatggcaaagaattcttatgcactgtctgggttaattgtggccctagtcatcgcattggtatgcaacattgatgacgctgcagcgagagacgtgaagctagtgaagctccgcgatgtaaaacccgaaactttgaacaagttgaaaggagaaaaagaaagtgaactcatgcaagcagaggagaaaaacaatcttctaaaggaaattgagaaggcaaagaaattgctcggagaattgaaaacgttaaagaagcaatcaactggtgatatgaaaagcgaattgaaatctttggtgaaatctgaatcgttacttaatgaaatttcagattctctgaagaatggaacgtacaaccatattaaagcaaacatttttgttgaaaaagaatcatttttctacagagcatggaaggagaatgcctataattcggtggttccggagaaggagaaagagtatatgtctaccataaaacgcattgtcaagttggtgaagaaaacttagaagaagaatcggttacttcatgatatttaattagtaacctttaaattaacaaaaagatatgatattcaaacgcatgtctatctatataatgtctacgcatgtatcaacggttttattgtgtaacaaatattttgtaattagtatgctttcttctagcatgtccaaattgtatttggtcgaaaatactaaaaataaattgtttcgatattttgtc

SEQ ID NO: 125833 - DNA, 730 bp, Arabidopsis thaliana
  unsure (1)..(730): unsure at all n locations
atgatctccnnnnnnnnnnnnnnnnnnnnnnnnnnnnnnnnnnnnnnnnnnnnnnnnnnnnnnnnnnnnnnnnnnnnnnccacgcgtccggatgaaccaaaccgtcattgaaggaatgggagaacttcatctcgagattatcgttgacagacttaaaagagagttcaaggtggaggctaacgttggtgcaccgcaagtcaactaccgtgagagtatctccaaaatagctgaagtgaaatacacacacaagaagcaatcaggtggacaaggtcagtttgctgatattacagtccggtttgagccattggaagcagggtcaggatacgaattcaagagtgagatcaaaggaggagctgtgccaagagagtatattcctggtgtcatgaaaggacttgaggagtgtatgagcaccggtgtgcttgctggtttcccggttgttgatgtccgtgcttgtctagttgacggatcttaccatgacgtagactcaagcgtgctagctttccagcttgctgcaagaggagctttccgtgaagggatgaggaaagcgggtccgagaatgcttgaacctatcatgagagttgaagttgttacaccaggaagaaatcttnggtgatgccattgggnatcttaaacncccgaaaaggccaatttaaaaccntcggganaaaccccggggggnccaaggggggnnnccccnggggccccttgggnaaaatttnncnnnccnggg

SEQ ID NO: 125834 - DNA, 1438 bp, Arabidopsis thaliana
  unsure (1)..(1438): unsure at all n locations
nnnnnnnnnnnnnnnnnnnnnnnnnnnnnnnnnnnnnnnnnnnnnnnnnnnnnnnnnnnnnnnnnnnncccacgcgtccgcgaggacacttagagacaaagagcagctcgtcagctcacccgtctgaagtatctcgccagccggcccgtctcaagcagctcgtcagatcacccgtctgaagcatctcgtcagccggtccgtctcaagtagctcatcagctcgcccgtctcaagcagctcgtcagctcacccgtccgaagtatctcgccagccggcccgttaaattttcccgatggagattcttccgattccggcggagagtttcaaggtaggattcatcggagctggtaaaatggcggagagtatagctagaggtgtggttgcttccggtgtgcttcctcctaatcgtatatgcaccgccgttcactcaaatctcaatcgccgtgatgtcttcgaatcctttggcgtcaatgtcttctccactagcgaagaagttgttaaagaaagcgatgttgtcatattctctgtgaaacctcaagttgttaagaaggctgtcacagaattaaagtcgaagctttcaaagaataagattctggtttctgttgcagctggaatcaagttgaatgatttacaggaatggtctggtcaagatcgattcataagggtgatgcctaatacacctgccgctgttggtgaggcagcttcagttatgagccttggcacaggagcaacggaagaggatggagcaattgttgctatgttgtttggcgcggtggggaagatattgaaagctgatgagaaaatgtttgatgctgtcactggtctcagtggaagtggaccagcatacatatttttagcaattgaagctttagccgatggaggagtagctgctggtttaccccgagagcttgcattgagtttagcttcacagaccgttcttggagctgcaacgatggttagcaaaactgggaagcatccaggtgtgttgaaagatgatgttacctcacctggcggcactacaatagccggagttcatgaactagagaaaggctctttccgggcaacacttatgaatgcagttgttgctgcagctaaacgaagccgcgagctctcacagagctaaatgatacatatgtagttgctgctattgtttcacctcacagattaatcaaaataagggttatgggccttatggcattgcttgtttttaggcgagagttttatcccacttgtcttcgatggtagaggtgaagattatttatctagactatgatgtattagttcagacagaactcagatacttttctataattcttaatctaataaaaatcactttcagttttaaaaaaaaaaaaagaaaaaaaaaaagnnnnnnnnnnnnnnnnnnnnnnnnnnnnnnnnnnnnnnnnnnnnnnnnnnnnnnnnnnnnnnnnnnnnnn

SEQ ID NO: 125835 - DNA, 565 bp, Arabidopsis thaliana
  unsure (1)..(565): unsure at all n locations
tcgatagacgatgagggagatatgatgcttgtcggtgatgacccatggcctgagttctgcaacatggtgaagagaatattcatatggtcgaaagaggaagtgaagaaaatgacgcctgggaaccaactccggatgctgttaagggaagttgaaacaacactaacaacaacttccaaaacagataatcattccaactaatttttattctattctctatcagtcttcgtctccttcttatttgctttgtctttcggaattatcttgtttgtgtctgtgttttgttgcgcatggcttaaacaagaaactacatcccctgaggcaaaaaaaatggctcgtttttttggagcctcttatggagaaagggggtttatggggagagggttttctacttttaaaataggcttttggaagtttctttttcttctaggaacttgtgtgtaagagaaacaaatatgtaacgcccagaaagnnnnnnnnnnnnnnnnnnaannnaagnnnnnnnnnnnnnnnnnnnnnnnnnnnnnnnnnnnnnnnnnnnnnnnnnnnnnnnnnnnnnnnnnnnnnn

SEQ ID NO: 125836 - DNA, 832 bp, Arabidopsis thaliana
  unsure (1)..(832): unsure at all n locations
tcctggacgcgtgggccgattccgatcgacaaatagggtttagaatccacacacccaaatcggaaggcgaagaaaatggaaggatgggatccgaacacgaagtcgacgttaacgcgaataccgcttctgacgacaaaggcgggtccaagagacggcgcggcatggacgcagaggctgaaagaggagtacaagtctctgattgcgtatacccaaatgaacaagtccaacgacaatgactggttccgtatctccgcttccaatcctgagggcacgcgttggactggcaagtgttggtatgttcacaaccttctcaaatacgaattcgatctccagttcgatatcccgattacctatccagccactgctcctgagcttgagctgcctgagattgacggcaagactcaaaagatgtatcgaggtgggaagatatgtttgactgtgcatttcaagcctctatgggccaaaaactgtcctcggtttggtatagcacatgcactttgtttggggctcgctccgtggttagctgcagagattccaattcttgtggactccggcgcgattaagcacaaagatgacgcagccacatctgcggaatcttaaatctatgtaacctttctatcaatctcagaaatgttgaggtgtttatcagtaatagctgaactcagaaatgactgaggtggatgcgtctaccctataaatacacttacatgaaacccaataaagatttaagctattgcaatgttttaaaaaaaaaaaaaaaaaggacggccgctctagaggatccaagcttacgtacgcgtgcatgcgacgtcatngtcttctantagtgtca

SEQ ID NO: 125837 - DNA, 758 bp, Arabidopsis thaliana
  unsure (1)..(758): unsure at all n locations
tgcttgtcccgaaagtcgcagagcgagctacaagaagaagcgaaacacacccagaagaagaagaagaacaacaacgaagtaaacaatggagtctgagaaaaagatagctcatgagatcggtggtgtcaaaaacgacgctcttcgatttggtcttcacggcgttaagagcaacatcatcggatctcacccactcgaatcgtcatacgaatctgaaaagaaatcgaaagaggcgttgaagaggacggtcattgcgcatgcctacgggactgcacttccgttgaagatggatatggataggcaaattctctcaaggtttcagagacctcctggaccaattccgtcgtcgatgctcggtttagaagtctacacgggagctgtggatgactttggttttgaggattacttgaatgatcctcgtgattccgagacattcaagccggtagacttccaccacgggatggaagttcgtcttggcatctcaaagggaccgatttacccaagtttcatgtaacccttcatgggtggttttttttatcggttgtttttggatcatgactcatcgtgtatgaacttatttcaaccttagacttgtattctctcttgagttaagtttgaaatcagatgaaacaatgatgaatatgattgaacaatcaattctagtaaaaaaaaaaaaaaaaaaaaagnnnnnnnnnnnnnnnnnnnnnnnnnnnnnnnnnnnnnnnnnnnnnnnnnnnnnnnnnnnnnnnnnnnnnnnnnnn

SEQ ID NO: 125838 - DNA, 425 bp, Arabidopsis thaliana
  unsure (1)..(425): unsure at all n locations
ctctgccgaaatccataaatctcttcctctctctctttcttatttaatcgtcacttgaccgccggtaagaaactcgagagtttgaatcgttttttaaccctcgccggtgattattgactggaaaacaccaaacgaatcgaagcagttagtttacaggtagagcagtgacagctgagcaaaaaaaaaggcggcggaaaaaaaaagtagtagtagttgatgatgatgaagatggtgaaacagattcgtatagggttttctaatcggcggtgttcgctgttcgtgaactctttattggagtaagtaaaaagcgccagagagagagatattgtgtatttggcttatttgggtctgtttttggattgggaaaagtggcngtttccgtttncggcggnttccctnttnttccggnnttntncttatttccc

SEQ ID NO: 125839 - DNA, 460 bp, Arabidopsis thaliana
ggcatccattgattctctccaattccattctctctgcaatctccagtcgtcgattggaagagccaagctccagaatccttcaagtttggttattttcagacggagacccgtaaatctgaattgggttcaattcgaaactaaaggaagtttcgtgtgtaaagcgattggtgattcctcgactccagatgaagatattcagaacactcaaagtgatgataatgttgttgttgttactgctacgactcagagtgacattccccatgattccgagtattcaatttcgaggtttcgaagtatggttaccacactccctcctgttgtcttcctgatgaagaagtgctcagtgaacagcatttggattggggtctgcatcacggctactgttttggtcgctgcgattagggcttatgtagtcagaaagtcaagagataatcagcgtgctggctctgttgctgatctt

SEQ ID NO: 125840 - DNA, 650 bp, Arabidopsis thaliana
  unsure (1)..(650): unsure at all n locations
ctnnnnnnnnnnnnnnnnnnnnnnnnnnnnnnnnnnnnnnnnnnnnnnnnnnnnnnnnnnnnnnnnccacgcgtccgaagggcttatcgctttgacgagagctagggttctaatcaagtcagacgaagagatattgactgccgccgatgaagttcccaccattgatctcctccgtaagatcggtttctccgaaacgattcttgatcggttcttccgaccattcttcggcggaattttcttcgacagagacctcgagacgacctcgaagctcttcgatttcgttttccggtgtcttgctctcggagaaaacacacttccagccatgggaatcggagaaatctcgaaccagttggcagcgaagttacccgctaagtccgtcttgttgaacacaagggtcgcttctattgagtatccaaatggatcgggttccggatccacctagcgtgaggctccaagacggagcgttttgaaggcagagctaggtgtcataatcgccgtcgagcaaccggaagtgaataagcttctcgatgggatcagagaccccggtataacaaaacccgctcggaggcactatttggctttacttcacaggcggaaccgaacccaatcccggtacaggacccggttttatttctaaacgggtcaaattc

SEQ ID NO: 125841 - DNA, 386 bp, Arabidopsis thaliana
caatggtggattggtctacactaccgaaggatcttttagacctaatttcaaaatctctagaatcttccttcgatctcatccaattccgttccgtttgttcgtcatggcgatccgccgccgagccgaaaagtcctcttccaacacatcatctcccgatcctccccgattacggggggagtcacgtccctgattccgccgttggtttccgtctctcgcagcggagtatcttacttatcaagcctcatgaaccgtgtatcgaagcggattcgtttggatggttgatcaaagtcgaggaagatcataatgttcctcctaaggtgactcatttagatccgtgatgtgatacaagaaactcaattcctgagaatttcactcgtgttctcgat

SEQ ID NO: 125842 - DNA, 540 bp, Arabidopsis thaliana
  unsure (1)..(540): unsure at all n locations
cgttttgggaactctcgtgggacgtgatggagccaatctgtttctatgtcacgtccgtgtactttatggctggttacgcgtttttcctcaggacatcgaaagagccttcttttgaagggttttaccaaagcaggttcgaggcgaaacagagaaagttgatgaatgagtatgagtttgatctggagaggtataatgaactgaacaagctgttttgctctaagccttcggatcatgtttccaagattcttggagctatcaagagttaagattttgattaggggaacaattgcttagattcaatgttgttgtcacaactggtgtctgattttacctaactagagaattctaccccaatgaaaagtaagaaaaaaacgaatgggtactactctcaaatttttcagttttcgnnnnnnnnnnnnnnnnnnnnnnnnnnnnnnnnnnnnnnnnnnnnnnnnnnnnnnnnnnnnnnnnnnnnnnnnnnnnnnnnnnnnnnnnnnnnnnnnnnnnnnnnnnnnnnnnnnnnnnnnnnnnnnnnnnnnn

SEQ ID NO: 125843 - DNA, 768 bp, Arabidopsis thaliana
  unsure (1)..(768): unsure at all n locations
atctcctctttttaagaatcttgttttgaatctttatgaaagctttgctcgttaaaaaatcaacaaactcgttgactctgcaaaaccctcatgtgctaagtttcaagtttatgttcttttgagctcaatggcggatagatatgagaaccaacctcctgagaagcttcaggggaagtatcaagcaatggttgtttgctgtattcttggaattggatctctcgtttcttggaacagtatgctcactatagcagattactactacaaagtttttccggattatcatcctccacgcgtccgcacacttgtataccaaccgtttgcgcttggaacaatcttgattctcgcataccacgaatcgaaaatcaatactcgaaaacgtaacctcattggttacattctattcacaatatccacattcttgctcatagttttggatttggcaacaaaaggacgtggtggaatcggtccttatatcggtttatgcgctgttgttgcttcttttggcctcgcggatgctacagttcaaggaggaatgatcggtgatttatcattgatgtgccctgaactagttcagtcattcatgggaggtttggctgtatctggtgcgctaacatcagcacttcggctaataactaaagcagcctttgagaaaaacatacgacggtccacgaaagggagcaatgatngntcttagctatctccacatgcatagaggtactctgggggtttctatatgctaatgtgttccccgaacttccgattggtaag

SEQ ID NO: 125844 - DNA, 947 bp, Arabidopsis thaliana
  unsure (1)..(947): unsure at all n locations
nnnnnnnnnnnnnnnnnnnnnnnnnnnnnnnnnnnnnnnnnnnnnnnnnnnnnnnnnnnnnnnnnnnnngtattgcagcgctccacgcgtgcggaagaagaaagatgccaggagcaattgtggaggaagagaaatctcagattgaatccatcaaagagcaattgaaactcgagaaggaagatgatgttgttgtggaggatgtgaaagacggagaggaagaagacgatgatgaagacgatgaggacgtcgaagttgaaggggaaggtggaaatgagaatgcaaagcaaagtagaagcgagaagaaaagtcgcaaagctgttctaaagcttggcatgaaacctgtctcagatgtcagcagagtgacaatcaaaagagccaagaatgtgttatttgtcatctcgaagccagatgtttacaagagtcccaatgcagagacttacgtcatttttggagaggccaaggtcgacgatttgagctctcagctacagactcaagctgctcagaggtttaagatgcctgatgtgacatccatgctacctaaacgccggttttgaagttaccatggctcccctaccaaaggaaaaaaccgaaaccgatgtttatgacactggtgttgaagccaaagacattgatcttgtcatgacccaagcaggtgtctccaaggccaaaaccgtcagtgctctaaaggctaatgatggggaaatcgtttcagcccctatggaaccccctacataaagttgagtagtagagccccctaaattgggcttttgcttcattgcttcttgtctcagccaccattttctttgaacattattaattatgtctccccttgccccnnnnnnnnnnnnnnnnnnnnnnnnnnnnnnnnnnnnnnnnnnnnnnnnnnnnnnnnnnnnnnnnnnnnnnnnnnnnnnnnnnnnnnnnnnnnnnnnnnnnnnnnnnnnnnn

SEQ ID NO: 125845 - DNA, 472 bp, Arabidopsis thaliana
  unsure (1)..(472): unsure at all n locations
gatactccaggtcacnnnnnnnnnnnnnnnnnnnnnnnnnnnnnnnnnnnnnnnnnnnnnnnnnnnnnnnnnnnnnnnnccacgcgtccggcaaatctcagagatgaggatggtgcaaaacgagtattctttggcggagaacgctttttagaaggaatttctggccaagcatatatcacgggtcagagaacagcactaaacagtccacttgggcttgaagtccagttgcacattccagaagctggttgtccacccttaagtgaaccacgggtgcgtgctcttctccgctttctaactggaatggacctatgcctaaaccgaggagatgtggatcccaaatctcagcactctgctgaagcacctggaccttctcttggctccgctcttgtggatcatggatttctttgcattaaagatgctgaattccaactggaactgctgatgcaatcactccttttttctcgggcctgtg

SEQ ID NO: 125846 - DNA, 634 bp, Arabidopsis thaliana
ttctatacaactcacttagggaaagctggcacgcctgcaggtaccggtccggaattcccgggtcgacccacgcgtccggtcggacttgaaaccagtttcggtaccggaatttagaaactccgttcaaatccggagccaatctctaaaggataaagcttccaactttatccattaattggagaaaattctcagagagactgaagtcgacaaagtcagagggtttcgttttttggcttctgggttttttatttcaagtgttcaatttccgaattaggtaagaaagttaggttttgagatctgtgcgaattgtgagagatgtccacgccgttgaaggtgtggcaacgttggtctacaccgacgaaagcgacaaatccagattcgaatggctctagtcatggaaccggtttagacatggtgaccccagtttcgggtcgggttagtgagatccagttcgatgacccaagaatattgcctgagaaaatttcagagcttgaaaaagagcttttcgaatatcaacatagtatgggtcttcttctgattgagaaaaaggagtggagttcccagtatgaagcgcttcaacaggcttttgaagaggtgaatgagtgtctaaagcaggaacgtaatgcgcatctga

SEQ ID NO: 125847 - DNA, 966 bp, Arabidopsis thaliana
ccccaatttggatggccgtctgcaggtaaccgtaccggaattcccgggtcgacctacgcgtccgcagttgagaagtacaaaatacgagaatcaaataagtgcatgcaagcctgaggatgatgttggtgggcagccgattgtgccgtgtggtctaattgcttggagtctttttaacgacacatacgcgttatcaagaaacaatgtaagcctagctgtgaacaaaaaaggcattgcatggaagagtgacaaggaacacaagtttgggaacaaggtcttccccaagaattttcaaaaggggaatatcacaggtggtgctactttagatccaagaataccgcttagtgaacaagaagatctcattgtgtggatgagaaccgcagcattgccaacatttagaaaactttacggaaagatagagtctgacctcgagatgggtgacaccatacacgttaagctgaacaacaactacaacacgtacagcttcaatggaaagaagaagcttgttttgtcaaccactagttggctgggtgggaagaacgatttccttggcattgcttacctgacagttggcgggatctgtttcattttggccctcgcatttaccatcatgtaccttgtgaaacccaggcgtcttggagatccgtcctacttgtcatggaatagaaatcctggaggtcggtaacaagcttggaaagggagagagagagctctaatctgcgtgtgtaaatcttatccatccatgtacacatacaatgtaatttttgcttacatactatgtaatccttgcttgcaaaatggtttcttcggtgagagcttaaatcccacataatactttgttgttgttgttccaaaccagtctaatatattacttttgtccccaaaaaaaaaaaaaaaacagaagggcgaccgctctagaggatccaagcttacgtacgcgtgcaggcgacgtcataactcttctatagt

SEQ ID NO: 125848 - DNA, 776 bp, Arabidopsis thaliana
cttgttcttcttcttcctcttcattttactttctcttcccgatttctctctgtccgattcaccttttcctccgatctcggtctccttagattccggaataatcccctcaaggcttggcttagtaatcgtcgttttctccgccatgagttccaatacggcgtcgtccagcgcgggggcagccggatcgggagattcttccgccgctaggaagaattcaaagcgacccaagtattcgaagttcacacagcacgagcttccagcttgcaagccaattctaacccctggttgggtcatttcgacatttttgatagtcagtgttatctttattccccttggagttatctcccttttcgcttcccaggatgttgtggagatcgttgatcggtatgatactgagtgcattccggcacctgctaggactaacaaggttgcatatatccaaggagatggagataaagtttgtaaccgggatcttaaagtgacaaagcgcatgaagcaacctatctatgtttattaccaacttgagaatttctaccagaaatcaccgaaggtttgtaaaaagtcgaagtgattcacagttgagaagtacaaaatacgggaatcaaataagtgcatgcaagcctgacggatgatgttggtgggcagccgattgtgcccgtgttgggctaattgctttgggggcctttttaacggcacaatacgctgttattcaaggaaacaatgtaagcctagctgtgaacaaaaaaggcattgcatggaagagtgacaaggaacac

SEQ ID NO: 125849 - DNA, 392 bp, Arabidopsis thaliana
ttgtttgtaatcagcagcgatcgagattttcgccgctgaaatctggagactgattattacaaacttgttcgtcgtgttcttcatcggagagacactagatcggaaaatttaacctcgatttgattgccgttgccgtaacatttgactgttgttttgtggtggggaattctagggttcttgtttgatgaagaagaactgaagtgaaaatgaccattaaaatctcccatgagatgattgtgtccgttcattcttcgaaatcggacaacggaatcgaatgatcgtcatattctgtaagagagaaggttagatcttcaccgaatctggaactcgagatccatcgttttgttcgattttctattctttcgcacaaggattggtctgagaagaacaag

SEQ ID NO: 125850 - DNA, 610 bp, Arabidopsis thaliana
  unsure (1)..(610): unsure at all n locations
tcgttaatagcacatattcatatcctacaagacattcaaaccatgaaatcatcccatgcatatctcgtctgcatactgttgctctctctattttctctacatcaatgtgtgaggttagaaagatcgaacaaaatcgatatgtctgtatgcgtccatgaaatttgcggtggtgttttcgacggaggctgttattgctgtcccaaaacgccagctctttgctgggcagacatacaattctgcaccacctattgtcaatctcaaacttaaaaccttaaataaactgatctggagctatagttgttccattttaaacctacacctattgtcatttatgtttgcatctgtttgtcaacaagaatactcctaaacgtcttgaggtttaacgaaagtactcctaaacctcttgaggtttaaagatctttttaaagcatgttgaggtggaatcgtaccccttatgtatttccttagtttccaagtaatatcccataatatttgttttgatgtttttctgttgtagaatcggggaatctcataaattcagcccttttgagacatgttttaaccnnnnnnnnnnnnnnnnnnnnnnnnnnnnnnnnnnnnnnnnnnnnnn

SEQ ID NO: 125851 - DNA, 395 bp, Arabidopsis thaliana
tctgatattgttctgaagatctatcgttttgagcttcgttaaccgtgatacagacgacggtatggaactattgaacatgttctgcctcaaggtcagcgtcagtagttcgacaagactaccttgcaacattttaaaagattcttgagctctttgatgtcaccactcaacgtaccgccaataacattcctgcttaaatcaagacgctgaagatttgtcaaggagaacaattcatgaggaattgagccgttaaatctattacaacacatgtcaagagaaatcaagctggtcaagttcacaaacgcatatccaggaatctctccttgtatgttgttaaatgagacatcaagcccaacaagagagtttatacgcagaatcggtctcaaaatgcttgaact

SEQ ID NO: 125852 - DNA, 804 bp, Arabidopsis thaliana
ctactaccattcactatagggcaagctggtacgcctgcaggtaccggtccggaattcccgggtggacccacgcgtccgcaagagtttacctttacaattgagagaggagtcagcacaccaagttgtgtcagtgttaactatgatgatttcgttaatgacgtggaagcgggtgacatgcttcttgttgatggtggtatgatgtcgtttatggtgaagtcaaagaccaaagactctgtcaaatgtgaagttgttgatggtggagaacttaagtcaaggagacacctgaatgtccgaggaaagagtgcaactttaccttcaatcactgagaaggactgggaggatattaaatttggagtggagaacaaagttgacttttatgcagtttcctttgtcaaagatgctcaagttgtacacgagttgaagaaataccttcaaaatagtggtgctgatatacacgtgatagtgaaaattgagagtgcagactccatacctaacttgcactccattatcacagcatcagatggggcaatggttgcaagaggtgatcttggtgcagagcttccaattgaagaagtccccattcttcaggaggagatcattaacctgtgccgtagtatgggaaaagctgttattgttgcgactaacatgcttgagagtatgatagttcatccaactccaacccgggcagaggtctcagacattgctatcgctgttagagaaggtgctgatgcggtaatgctttcaggagaaactgctcacggaaagttcccattgaaagctgctggagtgatgcacactgttgca

SEQ ID NO: 125853 - DNA, 791 bp, Arabidopsis thaliana
  unsure (1)..(791): unsure at all n locations
aagctggtacgcttgcaggtaccggtccgaattcccgggtcgacccacgcgtccgaaaacacaattaaaaattattatgaagaggaacggcgagacgaaacggcggaggaacgtggcggaggaggcagagcagggagaggatccggcgatgtgggagaatcttgaccggaatttcagacaagtgcaatcagttttagacagaaacagatcactgattcaacaagtcaacgacaatcaccaatcgagaatggctgataacatgtcgaagaacgttgctttgattcaagaactcaacggaaacatttccaaggttgttaacatgtattctgatctcaatactagtttctcgtcgggctttcacggtgggaagaacggtcacgatggtggtggtgctgccggaactagagcttaatgaaccggaatcaaattgtttcttcttagttggaccggccggtttgagaattttgaatctgtccggttcaagctatgatataaagtaaatgtttagtttttgtattgcaatgatgattgtcgttagaataatccgtgggagcaaacccatctctattggggttattttagttatggttttgagtctttttcaatgtgtctctactgcaatctctctaatgattataataataattgatacagtattagattaaaaaaaaaaaaaaagaggtnnnnnnnnnnnnnnnnnnnnnnnnnnnnnnnnnnnnnnnnnnnnnnnnnnnnnnnnnnnnnnnnnngaaatgccaaccaannnnnnnnnnnnnnnnnnnaagtatcat

SEQ ID NO: 125854 - DNA, 669 bp, Arabidopsis thaliana
ttaggtcaactatagaagagtctatgacgtcgcatgcacgcgtacgtaagctcggaattcggctcgagattaaaaattatgtatgaagaggaacggcgagacgaaacggcggaggaacgtggcggaggaggcagagcagggagaggatccggcgatgtgggagaatcttgaccggaatttcagacaagtgcaatcagttttagacagaaacagatcactgattcaacaagtcaacgacaatcaccaatcgagaatggctgttaacatgtcgaagaacgttgctttgattcaagaactcaacggaaacatttccaaggttgttaacatgtattctgatctcaatactagtttctcgtcgggctttcacggtgggaagaacggtcacgatggtggtggtgctgccggaactagagcttaatgaaccggaatcaaattgtttcttcttagttggaccggccggtttgagaattttgaatctgtccggttcaagctatgatataaagtaaatgtttagtttttgtattgcaatgatgaatgttgttagaataatccgtgggagcaaacccatatctattggggttattttccccccggttttgagtattatgccctccctgtatacagcaatttctataatgtttaaaaaaaaagttgattcagtattagatt

SEQ ID NO: 125855 - DNA, 587 bp, Arabidopsis thaliana
  unsure (1)..(587): unsure at all n locations
atgatactccagctctcnnnnnnnnnnnnnnnnnnnnnnnnnnnnnnnnnnnnnnnnnagatttccgatacaatattagatatataaataacacaaagtgaactcctaatcagggttcattttataaatttattatttagttattgcggataaagaacaataataatatggggatgtctaaaagtatcaaggttatcttatctcttgctctcgtagtgttcttggcccttgctgcaaccaaggttgaggccacaagatacataacttatcctgctatcgatcgtggagatcatgctgtacattgtgacaaagcccaccctaacacctgcaagaagaaagaagcaaatccttaccagagaggatgcgagaagatcaatcgttgccgtggtggataggtggaaaacagtgaattaaccaacccacccaagagcataaaatatacatcaatacattatctatatacacacttttgacatcctcatattcatttttaatgatattatttttagtctattattggctttgtaattgattgtaatcagaatgttatgatcaatcatatatataaatacttcagttattatccg

SEQ ID NO: 125856 - DNA, 509 bp, Arabidopsis thaliana
  unsure (1)..(509): unsure at all n locations
tattgtatctcttgctctcatattattntggccctgcagcaaccaaggttaagcccacaagatacataagttatcgtggtatgaatcatggagatcatgctatacattgtgacaaagcccaccctaacacctgcaagaagcaagtagcaaatccttacaggagaggatgcggaacaatcgaacgttgccgtcgtgatacaggtagaaaatgaatcaaccaacccacccaagagcataaaatattgcatcaacacctttggttaagaatgtgttaacatgtttctcattggaataccttcgttatctgtatacacacttcacatcctcatattcatttgttaatgagattgttttggctttgtaattgattgtaattatattatgttatgatcaatcatatttaaatatattatatccaataaaaaaaaaaaaaaagnnnnnnnnnnnnnnnnnnnnnnnnnnnnnnnnnnnnnnnnnnnnnnnnnnnnnnnnnnnnnnnnnnnnnnnnn

SEQ ID NO: 125857 - DNA, 473 bp, Arabidopsis thaliana
  unsure (1)..(473): unsure at all n locations
aatgagcaaaaatgactctttcataaccaatctttcttcttcttcttcttcttcttctggctctttccttatctctccatctctgtggagagacacaaaacttccaaaaaggaacattctttcagttctttacttaatctttcacaatgctaaatcattagccgttgataaagtcttaatctttgattcattcaaacgcgtttttgtttagtaatgtcgtcgcgtttttctttgacggtggtgtgtttgattgctctgttaccgtttgttgttggtatacggttgattccggcgaggatcacgagtgtcggtgatggcggcggcggaggaggtaataatgggtttagtaaacttggtccgtttatggaagctccggagtatagaaacggcaaggagtgtgtatcttcatcagtgaacagagagaacctcgngtcgtcttcttctagttctaatgaaccttcgcttgttcacat

SEQ ID NO: 125858 - DNA, 717 bp, Arabidopsis thaliana
  unsure (1)..(717): unsure at all n locations
cccacttcaaatgtcactgcagaatcactggtgttagtggtggtgggttacatagtaagagctctctgctactagtagaagaagaagaagaagattgattataaagacttaagatggctgcggcgcattttagtaaggagagggtcttcagagggtttctggtttggttctgcttttggggactgatgtctctaacatgcgctgggagactcagtgtttcaaggcagaattttgaagtgcacaaacacttgaatcgattgaataaaccagccgttaagagcattcagagtccagatggtgacataatagactgtgttcacatatcgaagcaaccagcttttgatcaccctttcctcaaagatcacaagattcagatgggacctagttacactccagaatcgctgtttggtgagagcaaagtgtctgagaaaccaaaagagagtgtcaatcctattacacagttatggcaccagaacggagtttgttctgaagggacaataccagtgaggaggacaaagaaagaggatgtcttgagggcgagttctgttaaacggtatggtaagaagaagcacctttctgttcctctgcctcgatctgctgatcctgatctcattaaccaaagtggtcatcagcacgctatagcttatgtggaaggaggcaagttttacggggcaaaggcgacaataaatgtatgggaacccanagtgcaaagctcta

SEQ ID NO: 125859 - DNA, 976 bp, Arabidopsis thaliana
  unsure (1)..(976): unsure at all n locations
ccggaatttccgggtcgacccacgcgtccgctcagggttattgctgagcatttatcagatgaagaagcttctggtttaagagaagggttccaaatgatggacacacgcccaagagggaagattaacatcgacgagcttaaaatcgggttgcagaaacttggtcatgccattccgcaagatgatttacaaattttgatggatgctggagacatcgatagacatggatatttggactgtgacgagtttattgccatatcggtacacctaaggaaaatgggcaatgacgagcatctcaagaaagcgtttgcgttctttgatcaaaacaataacggatatatcgaaatagaggagttaagggaagccttgtctgacgaacttggtacaagtgaagaagttgttgatgccattatccgcgatgttgacaccgacaaggatggaagaataagttacgaagagtttgtaacgatgatgaaaacaggaacagattggagaaaagcttcgagacagtactcgagagaacggtttaacagtatcagtctcaaactgatgcaagatgcgtcgttgcaggtcaatggtgatacaagatgagagaggcttaatctgtgtcactcaccagtctggaagattgaatcaaagggatgcaaatctttcttaatttcttaatttttatcttcttgggttgctttttttttatgacaccacgattaaagctttttaggcatataaagttgtaagagttgtgtgtttgatatcctggctaatgagcgagctgagtatggggatcaagagagaaaaaccgtgttggcctttggctgtgtgtagatattttgtataatcttgtgttgataaaagataatatcatcaatttttcttgtgatcaaaaaaaaaaaaaaaagnnnnnnnnnnnnnnnnnnnnnnnnnnnnnnnnnnnnnnnnnnnnnnnnnnnnnnnnnnnnnnnnnnnnnnnnnnnncatt

SEQ ID NO: 125860 - DNA, 987 bp, Arabidopsis thaliana
  unsure (1)..(987): unsure at all n locations
nnccggcgagaggagagagagactattttattagggnctccgntcaaatttcccgcagtgttctctnctgattctctggctagaaatacgaacttcttcttcttcgtccaagcttttgaatcgaaaatcgatggcggatcagagttctaagccgttgcagtttttcgtgagactactcgacggaaaatcattaaccctaagtttctcctctccgttagcttatggcgagcagatcaagcagcggatcttcgagcaaacgaagatcccgacgcatctacagagattgataagcggaggataccaaatctccgatggatccgcgatttctcagcctgacgccaccgtgaatcttgtcctttcactccgtggaggtaaaggaggattcggatcgttacttcgtggtgggggtatgaaagctgggcagaagaagacgaacaacttcgatgcttgtagggatatgagtggacggagattgaggcatgtaaacgcagagaataggcttcaggagtggaaggatggtgaagaagggaggaaccttgagaaaaaggctcttgagtatctgaagaagcaatccaataaagtgaaacaaggtgttggaaatggcgctacgcagaagtatgttaataagtataaggaagaatctgataagtgtattttggctgttgatttggctttgaatgaatctttcaagaatgggaagagaaaagcgaagattggtgctgaatctaagaagaagaagcgtctcaaaatatggaaggggaagagagctgttgaagatagtgacagtaatgatagcgacgacgaggaagatgagaaatctgttgttctaaacaatggtggtcatgatggtgattcatctggtaaatcttcatgcaatagtggttcagaggaagagaacgacgctgtaatgcaccgcagtttcgatgtggttaaggaagtgatcaccggtgttcaagggattattgaagaggagatgaatgatttacc

SEQ ID NO: 125861 - DNA, 1007 bp, Arabidopsis thaliana
  unsure (1)..(1007): unsure at all n locations
gcctcacagacatgcgggagtgtttattgcttagggtaaagaagatgctcttgtcactaagaatttggttcctggtgaagctgtttacaatgagaagagaatctctgttcagaatgaagatggaactaaggttgaatacagagtttggaatccgtttagatctaagttagctgctgcaattcttggtggtgtcgacaacatttggatcaaacctggtgccaaagttctttacttgggtgctgcttctgggaccactgtctctcatgtttctgacctcgttggccctgagggatgtgtttatgctgttgagttttctcatagaagtggtagagatttggtgaacatggccaagaagagaactaacgttattccaatcattgaagatgctagacatccggctaagtacagaatgctcgtgggcatggttgatgtcatattctctgatgttgctcagccagatcaggcaagaatcttggccctgaatgcctcatttttcctcaaaactggtggacactttgttatctcaatcaaggccaactgtatcgactctacagttgcagcagaagcagtcttccagagcgaggtgaagaagctgcaacaagagcagtttaagccagcagaacaggtgactctcgagccgtttgagcgtgaccatgcctgtgttgttggtggttaccgcatgccgaagaaacaaaagaccccagcctcatagaggaactgtggacagtagtgcctgtgtattaagacttatttactgggttttgtttttatctccttgcttgttgtattaagctagagatggataatgcttttatgtctcatttggaaaattttatcctcgttttagaactaatatatattgatgcaacattttcgtccnnnnnnnnnnnnnnnnnnnnnnnnnnnnnnnnnnnnnnnnnnnnnnnnnnnnnnnnnnnnnnnnnnnnnnnnnnnnnnnnnnnnnnnnnnnnnnnnnnnnnnnnnnnnnnnnnnnnnnnnnnnnnnnn

SEQ ID NO: 125862 - DNA, 517 bp, Arabidopsis thaliana
ggtctctcagtctactttatccgatcggcgccggcgagattcaagggtaaagaagaagatgagtggtgaagttgttttagctgctagagtttatcgtgaccttctcaaagcagtggtgaaacatgttggtaaagaagatcacaagtctcatttcttagactttgttaagcaagaatttcgaaagaatgcaaactcagagaaaataaaccttgctcgaaattacacatatcttctcaatagcattcactctcacaaggatctgctgttctcatacaacattgcggttgatagaactgaagaaatgaaacgagtgcttaataaatctgcagccagtgtagggcttcgtcttcctgaagtttacgagccttgatcatgcattcattcctctttgtctttccgggggatgagtcgttatgatttcttcatttctgtggacaggtctttggttaatttttgattatatgagatagtagatgaagccagagagctcttttcctttaagcttttaagtattgac

SEQ ID NO: 125863 - DNA, 584 bp, Arabidopsis thaliana
ggcattgaatgagtctcttcaagatttacttgatggtattcaggaggatttctatgctgttgttgactgggcatataaaatagaccccctacggtgtatttcaatgcatggtataactgaacgttatctatctggtcagaaagctggtgctgcaggatttgttcgccttttgcttggagatctggagtccagagtttctatgcaattcagccgttttgtggatgaagcttgtcaccaaattgaaagaaatgaacgtaatgtaagacagatgggtgtcttgccatatattccaagatttgcagcacttgctactcgtatggaacaatacatacaacggcaatctagagatttggttgatcaggcatacacaaaatttgtgagcataatgtttgtgaccctcgagaaaattgcccaacaagatcctaaatatgcagatattctcctgttagaaaactatgctgcttttcagaatagcctgtatgacctggctaatgttgtgccgactttagccaagttttatcaccaggcaagtgaagcatatgaacaagcttgtacgcgccacattagcatgataatttactatc

SEQ ID NO: 125864 - DNA, 577 bp, Arabidopsis thaliana
tacgactcactatttggagagctggcacgcctgcaggtaccggtccggaattcccgggtcgacccacgcgtccgctctttctcttcttctccatccttcttctctcggcgcgcgcttcatccccaccaccttcgaattcgtgccctttgagggaagctgctaggatgggtgtgaagcaggctctaaggagcattgatgcgtttccaagagcagaggatcatttgcttcagaagacacaatctggcgctgttgtatctattgttggacttcttataatggctactttgttcttacacgagctgagttattatcttaacacacttacagtgcaccagatgtcagtggacttaaagcgtggagaaactcttccaattcatgtaaatatgacgtttccatctttaccttgtgatgtactgagcgtagatgctatcgacatgtcagggaagcatgaagtggatcttgatacaaacatttggaagctccgtctcaacagtcatggtcatatcataggcacagaatatatatctgatcttgttgaaaaggggcatgagcatggccactcacctcacaagcatga

SEQ ID NO: 125865 - DNA, 542 bp, Arabidopsis thaliana
tacgactcactatagggaaagctggtccgcctgcaggtaccggtccggaattcccgggtcgacccacgcgtccgctctgtttctttcttctccaacaaatcaccaaaaatggagagattcaatttctttaatctgatgatcatagctttatgtttatcatccttcgttcacagtctcgagatgggagaaacatgtagttcgaccagcgaatgcgacgccggattgagctgtcaaagttgtccggcgaatggaaataccggctctacttgtacccggatccaacctcttaacccgacttcaaaggtgaatggtttgccgtttaacaagtactcgtggctaacaacacacaattcgtacgcaatcacgggggcaaattcggcaactggttcattccttgtctctccaaagaatcaagaggactccatcaccaatcagcttaagaatggtgtgagaggtataatgctagatacatatgattttcaaaccgataatatggttgtgtcatttccactggagggacttgctttaccttcacagccttt

SEQ ID NO: 125866 - DNA, 453 bp, Arabidopsis thaliana
gagaaacctccgataagcttatcggacaacttgagaagtcgacgccgccatggataggcctttgcaacctccttcttctcactcaattgctccctccaaattccattcacgaccatctcccttattactccaccgtctccactcaacgaatcttagtacttttccctcctctcgccgtctcgagtcacgccgaatcagctccatttcctgcttcttccgtcagaatccatcgccggatacatctccaggattgaatcagagtagtaatttcttgattgcttcttctcaaaccgatgcgtcgaaacctaatccaggatttatccaacggatcgtgagcagttttgagcaacgcaagaccatatcggcaggaatggttatattagtctctgctatagctgcgcttttgcttaatcccattcttgtgccgcctgctttcgctagctttcaaacggc

SEQ ID NO: 125867 - DNA, 375 bp, Arabidopsis thaliana
ggttgagactgaacctgaagaagcactttctggatttgctgaggttgttcagatggaacctgagaaagctgactggggtttcaaagctcttaagcagactgtgaagatctattatcgtctaggtaaatacaaagaaatgatggaagcctatacagagatgcttacatatatcaagtcagcagtcaccaggaattacagcgaaaaatgtataaacaatatcatggatttcgtctctggatctgctagccagaacactggcctgctgcaagagttctatcagaccactttgaaagcccttgaagaggctaagaatgagagactctggttcaagacaaatcttaaactctgcaacatctggtttgacattggtgaata

SEQ ID NO: 125868 - DNA, 925 bp, Arabidopsis thaliana
  unsure (1)..(925): unsure at all n locations
tgaagaaggaaaaggtctcgcctttactgagtaaaaaacaaaccgctccaaagtcattgcatatctgtatgaatctggatccacgctgcttccgatcctactgctcttccaagcactagaaaatcattgatcatggagcgaatgggagataaagacattgtcaaacgtgcattcaaatcatttcaaaagagtttcgacttcaagtcttctgtcgacgggctaaacacagcagtaaagcagaatcctgcaaagccaacaattattccgtcagtagctactcgtcagaaggaaaatggcaggcctacaaaagcaagtagcatggagaagagaagtggtactaccgcctatcgttctccatctcatggactcaaaagcaatgaaaccgctgagaaacaacaaaaggagatttccaagtctggtgcaagacctttagagaagacacgcttgcagaagaacccaaaggcaggagtgattgatgccaaaacgcggagggactctcttaatccgaaagcaaaacctgtgcagggttctcttccaatgcggaccgtatcgaaaagctctttagacaaagtgttatgatagttatatccatccggtattaatctgatcttctggcaaagatcgccaccaatgttgttccatcagtcttggggtatagagccaatgatcttgtattcttgttgttatatagaaaagtctctagttaccagtatttagtcgtggaaggagtaataagagtaataagagatagttatattttacagtttcctatgtatgtgtatagaacccaatgataatgttgttctgataatagaagtggattgattcaatccnnnnnnnnnnnnnnnnnnnnnnnnnnnnnnnnnnnnnnnnnnnnnnnnnnnnnnnnnnnnnnnnnnnnnnnnnnnnnnnnnnnnnnnnnnnn

SEQ ID NO: 125869 - DNA, 541 bp, Arabidopsis thaliana
  unsure (1)..(541): unsure at all n locations
nnnnnnnnnnnnnnnnnnnnnnnnnnnnnnnnnnnnnnnnnnnnnnnnnnnnnnnnnnnnnnnnnnnnnnnnnnnnnnnnnnccacgcgtccgtccacgcgtccagaaacatttaggcgttctgtcacttatcttcgtcatttgtattcttgtagccgtgttcaaccacaagaatcggaggaattatcaacggacaccaccgtctcctcctggctgtcctatcatcggaaacttgcatcaactcggagaattaccacatcaatctctatggaaactctccaaaaagtatggccctgtgatgcttttaaagcttggaagagtaccaacagtcatagtttcttcctctgaaacagcaaaacaagctttgaaaatccatgacctccattgttgtagtcgtgccaggctttgcaggggcaagagagctctcttacaactatctagacattgctttttctccttatgatgattattggaaagaagtaaggaagctcgctgggcaagaacttttcagtaggcaacaagttcactctatacaaccgat

SEQ ID NO: 125870 - DNA, 927 bp, Arabidopsis thaliana
  unsure (1)..(927): unsure at all n locations
nnnnnnnnnnnnnnnnnnnnnnnnnnnnnnnnnnnnnnnnnnnnnnnnnnnnnnnnnnnnnnnnnnnnnnnnnnnnnccacgcgtccgcacagattgtttctcaacacacttcaaggaactttatgaagtctaaaaaggcaaacaagaagtttgatttcaaagttttcacagagacattgcctagtaaactcgaaggtaactcatacatacccgttgagctttatggggtgactaaagacaagacagactatggatggtacacaacaagcttcaaggttcacaagaatcacttacctaccaagaaaggagttaagacttttgtgaggattgctagtcttggacccgcgttgcacgcttggcttaacggagaataccttggaagtggacatggaagccacgaaaagaagagttttgttttccaaaacaggttacactaaaagcaggagagaatcatcttgtaatgccttggtgttctcacaggatttccagacaggggatcttacatggagcatagattcaccggtgcctcgtggtatttccatcttaggataggacttctgagacacttgatctcactgagagcaacaatggggaaacaagatcggtttgaaggggaaaacttggaatcacactgaggaagtttaaagaagggcgattggaaaaattcaccggaaatcaccagaactcatggtgcacaaatacttgatgcccaaaaacgtagcccacacgattccttcgtggatgggaaaggttatttgggtaacgaaaaggcgtgaaatttggaatcgtcttttccttagggaactcacaatgggttccttcctaattttttaaccaaaaaacttttttttttagaaaccatggaaccgttatgatttcctgtaaaaaactttttttctggaaaacctcatgttaacgtaaaaaaa

SEQ ID NO: 125871 - DNA, 762 bp, Arabidopsis thaliana
  unsure (1)..(762): unsure at all n locations
nnnnnnnnnnnnnnnnnnnnnnnnnnnnnnnnnnnnnnnnnnnnnnnnnnnnnnnnnnnnnnnnnnnnnnnnnnnnnnnnnnnccacgcgtccgcttggaagtggacatggaagccacgaagagaagagttttgttttccaaaaacaggttacactaaaagcaggagagaatcatcttgtaatgcttggtgttctcacaggattcccagacagtggatcttacatggagcatagatacaccggtcctcgtggtatttccatcttaggattgacttctggaacacttgatctcactgagagcagcaaatggggaaacaagatcggtatggaaggttgaaaaacttggaatccacactgaggtaaggtttaaagtaaggtcgaatggaaaaaattcacccggaaaagcaccaggacttacatggtaccagacatactttgatgcaccagagagcgtaagcgcagcaacgattcgcatgcatggaatgggaaaagggttgatttgggtgaacggagaaggcgttggaagatattggcaatcgttcttgtctccattaggtcaacctacacaaatagagtatcacatccttagatctttcttaaagcccaagaagaaccttcttgttatctttgaggaagagcctaatgtgaagcctgagcttatggactttgccatcgttaacagagacactgtttgttcttacgttggagaaaaccacactccaagtgttagacactggactaggaagaaagatcaagttcaag

SEQ ID NO: 125872 - DNA, 432 bp, Arabidopsis thaliana
aggacgcgtgggttcttcgtctctttttctttgctctgccaaaaatggcgagtctactcgattcgttgacaaccagagggttcttcaccatgccctcaatttctaggatttattctcctctagcttcttcaacttcattgacttcttcaccatcttcctcttcttcgattatcccatccttgtcagttctctcttacactcaccaacacccgcattcctctcgcttccctttccttgttgcagcaactctggatggttcctctgctgaggaagagctagatttcgaggaattcgaccaatatgctgaagataacttcgcagatgattattcggatgacgaagacgactccatcgatatctccgttcttgagaaagaagcgagagatatcgtgagagattatgctaccactctgtctcgcgagctcaaaatcg

SEQ ID NO: 125873 - DNA, 690 bp, Arabidopsis thaliana
  unsure (1)..(690): unsure at all n locations
tctatacgattcatatagggaaagctggtacgcctgcaggtaccggtccggaattcccgggtcgacccacgcgtccgcacaattccatggctttcgcttcaaaattcgctcgttctaaaactattctctcttttctccggccttgtcgtcagctccactcgacgcccaagtcaaccggtgacgtgaccgtactttctccggtgaagggacgccggagacttccaacttgctggtcgagctctctgttcccattggcgatagctgcctccgccacttctttcgcttacctgaatctgtcgaatccttctatcagtgaatcatcatcggctttggattcaagagatataactgttggtggaaaagatagcactgaagctgttgttaaaggagaatacaaacaagtccctaaggagcttatttctcaattgaaaactatcctcgaggataacttgacaactgactacgatgagaggtacttccatgggaagccccagaacagttttcacaaggcagtcaacattcctgatgtcgttgtttccctaggtccgaagaagaagtctccaagattcttaaatcctgcaatgaatataaggttcctattggaccctatggtggggcaacatcgatcgagggtcatacccttgctccaaaaggangtgtgggcattgacctgtcattaatgaagaaggg

SEQ ID NO: 125874 - DNA, 421 bp, Arabidopsis thaliana
  unsure (1)..(421): unsure at all n locations
tggagaactctctgcaattcctggagaaatcgaccatcatcatcttagctttgattctctctgtgtttcttcactttcaatttctgttttggtttatcgataagagaaagtaaaattcgtctgtgggggtttaagcttttttggggtgagagatgggtcaaacttttcgcaagcttttcgataccttcttcggcaaccaggagatgagggtcgttatgctgggtctggatgcggctggcaaaacaacgatactatacaagctccacataggagaagttctgtctactgttcccacaatcggtttcaatgttgggaaagttcagtacaagaatgtcatcttcacagtttggggatgttggaggccangagaagnttcaggcccttttggaggattacttcaataataccgatggggcttata

SEQ ID NO: 125875 - DNA, 592 bp, Arabidopsis thaliana
  unsure (1)..(592): unsure at all n locations
taaaagttcaattatctcgagcgttcttatacctctccagggtctttagatagtgcccactggctcattagcattctacagtctgcacacttatcacttctttcgaaatctctctctatccctctcaaaaatgaagctctctgtgcgttttatctccgctgctcttctcttgttcatggtattcattgccacagggatgggtccagtcaccgtggaggcacgcacgtgtgagtcaaagagccataggttcaagggtccatgtgtgagcacacacaactgtgcaaacgtgtgccacaacgaaggcttcggcggaggtaaatgccgtggattccgtcgtcgttgctactgcacaagacactgctgatccatccattctcatgactcaaatcttcgatccatcgtcagtgtgttacttctttcttatctaaatcttccgtacggtaccatgtcgtaccgtacatgagtgttttctcgaataaggcagttgggtttgtgtgtttcccggttttaatggnaatggttaaaccaatttaaatggcttttaaaatantngggtttttgggggcttcaaccttaaaaggttttttanttt

SEQ ID NO: 125876 - DNA, 502 bp, Arabidopsis thaliana
cttatcacttctttcgaaatctctctctatccctctcaaaaatgaagctctctgtgcgttttatctccgctgctcttctcttgttcatggtattcattgccacagggatgggtccagtcaccgtggaggcacgcacgtgtgagtcaaaaagccataggttcaagggtccatgtgtgagcacacacaactgtgcaaacgtgtgccacaacgaaggcttcggcggaggtaaatgccgtggattccgtcgtcgttgctactgcacaagacactgctgatccatccattctcatgactcaaatcttcgatccatcgtcagtgtgttacttctttcttatctaaatcttccgtacggtaccatgtcgtaccgtacatgagtgttttctcgaataagtcattggtttgtgtgtttccggttttaatgtaatgtctacaccaattaatggcttttaatatattgtcattatggatctcaatctaaaagtttttaataaccggagtctgc

SEQ ID NO: 125877 - DNA, 721 bp, Arabidopsis thaliana
  unsure (1)..(721): unsure at all n locations
gggaaaccacccgcnccgtaattcccggggcgacccacgcgtccgagcctatgcacatcgcatctttgtcgaagaactcggtgcgcatgaaagcgcattattgaactgcactcccaaggaggactttggaggagggcatccggatcccaatttgacctatgctaaggagcttgtggcacgaatgggattaggtaaatccgacactggaggtgaacctccagagtttggcgccgctgctgatggtgatgcagaccgtaacatgatccttggtaaaaggttctttgtaactccttcggattcagttgccataattgctgcaaatgctattggtgccatcccgtacttcagctctggtttgaaaggtgttgcaaggagcatgccaacctcagctgctcttgatgtcgttgcaaaaagcttgaatttgaagttctttgaggttccaacaggctggaagttttttggtaatctgatggatgctgggatgtgttctgtttgtggagaagaaagttttggaactggctcggatcatatccgttagaatagacggaatttgggcagtttttgcatgggtgtctatacttgctcaccagaacaaaggaaatattgacggtaacgctaaactggtgtaagttgaagacattgtccggcagcatttgggctacctaccggtcggcaatttttacacttcgttaccaactatgaagaatggagaacccagggt

SEQ ID NO: 125878 - DNA, 651 bp, Arabidopsis thaliana
  unsure (1)..(651): unsure at all n locations
cgccnnnnnnnnnnnnnnnnnnnnnnnnnnnnnnnnnnnnnnnnnnnnnnnnnnnnnnnnnnnnnnnaccggaccacgcgtccgcccacgcgtccggtcgaagtttttgattctgcagatgactatgttaaactaatgaagtcaatcttcgactttgaatccatcaagaaattgctatcttatccaaaatttactttctgctatgatgcattgcatggagtggctggagcatatgcacatcgcatctttgtcgaagaactaggtgcaccagaaagttcgttgttgaactgcgtacccaaggaggactttggagggggccacccggatcccaatcttacctatgctaacgagctcgtggcacgcatgggattgagtaaaactgatgatgctggtggcgagcctccatagtttggcgccgctgctgatggtgatgcagaccgaaacatgatcctcggtaaaaggtttttcgtaactccttcggattcagttgctataattgctgcaaatgctggtggggccataccatacttcagctctggtttaaaaagggttgctaggagcatgccgacctcaactgcacttgatgtcgttgcaaaaacttggggtttgaagtctttgaaggtccaacaggctggaaattctttggaatct

SEQ ID NO: 125879 - DNA, 1059 bp, Arabidopsis thaliana
  unsure (1)..(1059): unsure at all n locations
accactcatattggggaagctggtacccctggcgggaccggtcccgaattcccgggtcgacccaagcccgcggcaaatcacagaacaccaatcggaataatcacacaagaacaaaacttgttaatcaggagaagacgacagagagagagaaggagagagatcttccatggcggattcggaagcagataagccactgagaaaaatctcagccgctttcaaaaaactagcaatcatcgtgaattcaccgaatccggaagttcctgtaacgcaattctctcacgcttgctctctggtctcgcctctctttggttgccttggaatagcttttaagtttgcggaaatggactatgttgccaaggttgatgatcttgtgagggcgtcgagttcgatatcgacattagtggtaatgatggacaaagatattgaggcagattgtgtaaggaaagctggtagtcatacgagaaaccttttgagggttaagcgtggtcttgacatggtcaaagttctctttgaacagatcatagcttccgaggaggataactccttgaaggatccagcaactaagtcttatgctcaagtgtttgctccccaccatggatgggctatacggaaagctgtttctcttgggatgtatgctcttcccacaagggctcacctacttaatatgctcaaagaggatgaggcggcggctaagatacatatgcaaagctatgtcaattcatcggcaccattaatcacgtatcttgataatctattcctctccaagcaactcggtattgattggtgaagagcctgaaaaaaaggcataactattgttactctttaggcaaaataacctatgttctcacatcaagctatgtaatgtcataacaaccagcggcggaattacattgggattaattgagtatgtccttaatctgtcgttttacctcttcttttaataaacacagtttttctccnnnnnnnnnnnnnnnnnnnnnnnnnnnnnnnnnnnnnnnnnnnnnnnnnnnnnnnnnnnnnnnnnnnnnnnnnnnnnnnnnnnnnnnnnnnnnnnnnnnn

SEQ ID NO: 125880 - DNA, 420 bp, Arabidopsis thaliana
attcagtgagtgtcagagctgtctctataggcaaagagacgataactggggaccatatgttcttctttttccagatgaagacgaagccttttagtccacgaagaagacaatgtcttctaagtggtggaacattttcctttcttcgtctttaaatctttctgattgcctcttaaattttctgggtccatggcaagtttgcaccttggaggtgcttcgttgatcaatgaggtcgtttttggctcctccttgattggtttcagaagtaaacggtttaaacgagcttcagagagatgtacgttttgtgttcaacaaatgtcagagaatgaacagagaactaaacacgaactggctcgttctgctaaaagaagcgagtctttgagacgtattttaaagcaatatggagtatctgtagaaaaccct

SEQ ID NO: 125881 - DNA, 902 bp, Arabidopsis thaliana
cacacgcgtccgcccacgcgtccgcccacgcgtccgctctctctctctctcttcttataagataagagctacaaagcttcccttcgttttactacatccatgattctgaattccacacacactgagagagatagagggacacattaaaagctaattcaacttttctgcaatggctgagaaggagaagaagaagcatttacatgagtttcttgaagatgaccaagagccttttcatcttaaccattacatcggcaaccttcgttctcagatgggttgctccgatatgcgtgtcaagaagcgaaagtccgataacgtcgccacgtttcctcctggtttgttctcctgcgagaactcttgtttcttcgcagctcataaatctcctgacccgagaaagtctccactctttgagctccggtcgccgggaaagaagaagatacgtgacggtcgagttttccttcagataccggcgagaaccgccgcaattctcttggacgcagcggcgaggattcagaagcagcagtcagagaaggctaagaccaataaagctcggaccagaggaaacgggtttggtatgttcgggtctgtcttgaagctgctgacataccgtataacaaaaccgcgtttggataacgctgatggaaacgcagtttcgttggaacgcgggtcggaaccgacgagtagtagccggagagagcgtatcgtggagattagtgataaatgcttttgtgaaagcccttttcattttgttctccaaacaactccttcttcctccggtcaccagactcctcactttacatcgacggccacttctccggcgcgacgcagtactgagggttgtctcaatctccggtttttattttattttatcaaaagtctaaattatggacaattatgtactctaa

SEQ ID NO: 125882 - DNA, 561 bp, Arabidopsis thaliana
tatacgactttatatagggaacgctggtacgcctgcaggtaccggtccggaattcccgggtcgacccacgcgtccgaaaaaagaaaaaagtatgtctcttcttccccatctcatcctctacctaacacttttgacggtggttgttactggagaaactctccgaccaagattctacagcgagacatgccctgaagctgaatccatagtaagaagagaaatgaagaaagcaatgatcaaagaagcaagaagcgtcgcttccgtcatgcgtttccaatttcacgactgtttcgtcaatggatgtgacgcatctctgttgcttgacgacacaccaaacatgccttggtgaaaaactatcactttccaacatcgattcactaagatctttcgaagtcgttgacgacattaaagaagctctagagaaagcttgtccagctactggttcttgtgcccatatcgttatcatggccgctcgggacgccgttgctcttggaagtaaaaatcaaattcccccggttaagggaaactccggtttggaattttgggcttttgaaaaaccagacc

SEQ ID NO: 125883 - DNA, 786 bp, Arabidopsis thaliana
  unsure (1)..(786): unsure at all n locations
tacgactcactatanggagagctggcacgcctgcaggtaccggtccggaattcccgggtcgacccacgcgtccgcccacgcgtccgggagatttctcgtcaagcaacaaagaccaaagctcataaagaaattgaggagcagcataagaaagccttagaggaggatccttctgctttttcatatgatgaagtttatgatgatatgaaacagaaagctgttcttcctcgaatgcaagatcgtgaagaacgcaagccaaggtatatacagaatttgatgaaacaggcagaacgtagagagaaagaacatgagatagtttatgagagaaagcttgcgaaagagagggagaaagacgaacatcttttttcggataaagaaaagtttgttactggcgcttataaaaggaaacttgaggaacaaaagaaatggctggcagaagaaagattgcgtgaacctcgtgaggaaagagatgatgtttctaagaagaaagatttgagtgatttctacttcaacattggaaaaaatgtcgcttttggagctcgagaagtcgaagctaaagaggcagagaagctcgaggaacaaagaaaggcagagaatctcgtagaacaaagaaaggcagagaagctcgaggagctgagaaaagaagtaccagggtagagaagaaacaaaaatcaccggagaatgaaggatctcctgactcgggagaaattgggatcaaggtcgtagcaaaaggtttggaagccccctagaaagccagaggccaagccagtttttcttgaaaaaaggaag

SEQ ID NO: 125884 - DNA, 646 bp, Arabidopsis thaliana
  unsure (1)..(646): unsure at all n locations
tcaaccctcataagagggagcaaagcctgctagctccaccgcggtggggactcgctgtatacactacgtggctcccgcgggctgcaggaattcgcggccgcgaaatctacctatttcatgcttgggtttgattagtgtttttccagaatctgggacttcgcaggaattgcgctaattttcaatcgattttgcagaagtttgttgctcctggaatagaaatcgaagatgaagaagtacggattgcaaatcagagctccttcccagaaaaaacaatcatcatctcgacctccacttcgacccgcttcaatatttgatgaagaagaagatcacgacgtcgagaaggagatttctcgtcaagcaacaaaggccaaagctcataaagaaattgaggagcagcataagaaagccttagaggaggatccttctgctttttcatatgattgaggtttatgatgatatgaaacagaaagctgttcttcctcggatgcaagttcgtgaaggccgcacgccaaggtttttccagaatttgttgaacaggcanaccgtggggggaaggcntngngtggttttggggaaactttcgnaanggggggaaaccggccnntttttncgggnanagnaaagttttncttncnctttaaaatta

SEQ ID NO: 125885 - DNA, 442 bp, Arabidopsis thaliana
accacgcgtccggcagcattgagctcgtctctctacatttccccaaagaaaccttcatgtccacaacaatctcaatccacattcttatccacgaaacctaccaccatcaaaaccaatctccatagccatcctctcttcactgtagctgatcagacagtaaccctccagatgaaagagaagatcctctgtctcgagctaatgggaattgactcaggaaaagccctttctctcaacccatgtctctgctcagccccccttgactccatccaatccgtcctccatttccttcaatcaaaaggaatctacccaaatgacctcccaagaatcttggggttgtgtcctaagatcctcacttccgacgtcagaacagaactgtaccctgttttcatgttcctgtcgaatgatctccatgtccctgagaatgcgttcagaagagtgatca

SEQ ID NO: 125886 - DNA, 332 bp, Arabidopsis thaliana
gcgtccgcacacgcgtccgcccacgcgtccgcttttctctccgaacaaagaacacaaccaaaacaaaaatctatgttagatatgtcggaatctgtactcacggcgatgtatagttggttcactccgacagttctcttcgtcttcctcaaccttatgattggtaccatcgccattagctcatctttctcttccaaatccaacgacccaaatcaaactcagatccaacgctctccttccatgattcatcgtctcaaatccataaacttctcttcgttcacttctccagacaagtctcatctcgagtttcctccttcaacacctgaaagacaaca

SEQ ID NO: 125887 - DNA, 567 bp, Arabidopsis thaliana
aaaagatgttgccataactcaacgaaccatcaaagacatcaagagacggtctctttctctctctgtctctagtctctactctcgaacgggctaagctcagatcattacaagattcgcttttgtgctgaacttggtcccattcattagttatttgcttaaagacaacatttttatatgcttccgttagctaaatccatcactccccccttcaatcatttccctgctctgctggccccagaaacagcttgctaggattcactacgacgtcgtttcgggttcgtctccagctgtggataatggctattctctgaaattgattctagtcactattttgttactggggattttctcagcataccaaagcaggatttattttttctggggatttctgagattggtagaaaatgttcagcttttcaaagaggcgcatgagactgggcagagttaagaaggtacagctctcggattctgttcaaggatataagagtcctttacgagtgaccaaacgcgctgatagctctagtaatgaagctgctgttgctgcaactatttattctgatgaacttg

SEQ ID NO: 125888 - DNA, 504 bp, Arabidopsis thaliana
  unsure (1)..(504): unsure at all n locations
nnnnnnnnnnnnnnnnnnnnnnnnnnnnnnnnnnnnnnnnnnnnnnnnnnnnnnnnnnnnnnnccacgcgtccgcggacatctgtatgactacaagggttttggtgttgaagattcagatgctgagtctcctagagatatccattgttcagtcgagagtacagacttttccgctagagtgaaaaaacatattgaagaacctattaaagatatagaagtttctagcgtttcacctactgaaaactgttatcaatcagggagagaggctataccctcagttactcccagtactcctctcacggcccttagatacacaacatcagctgagaaacctgcaagtaaaactactggctcatcaacagtaaattcgaagcgttcttcgtcctggggaagaggcaacggcaagaaaacacctgctaaaggatcatttgattcctcaggaaatgacgagcttcttatacagaggctcgagcacatgaaagatgaactgcgacaacgaatcgct

SEQ ID NO: 125889 - DNA, 841 bp, Arabidopsis thaliana
acacatacggttttcacgacttgactcaagcctcgacgaccaaaatttttctttctacaaatactttgacttaagagttgcagaaatatcaagttaaaaaataaaacagaaggagaaatggcaataagttttagaactctagctcttttgaccctctcggtgttactaatttccatatctctcggcgtcgtcacagcaacagagtcgcagaggaatgaaggggaggtgcttacaatgtacgagcaatggcttgtagagaatgggaagaactataacggtcttggagagaaggagagacggttcaagatcttcaaagacaacttgaagcgcatcgaagaacacaattcagatccaaaccggagttatgaacgcgggttgaacaagttttcggatctaacggctgatgagtttcaagctagttacttaggtgggaagatggaaaagaaaagcctatcagatgtagcggagaggtatcagtacaaagaaggagatgttttacctgatgaagttgattggagggagagaggagcagttgttccaagagtcaaaagacaaggagagtgtggaagttgttgggcgtttgccgcgactggagcggtggaaggtataaaccagatcacaaccggagaattagtatctttatcggaacaagaactcattgactgcgatagagggaacgacaactttggatgtgctggtggtggagcagtatgggcctttgagttcattaaggagaacggtggtattgtatccgatgaagtttatggttataccggtgaagatactgccgcatgcaaggccattgagatgaaaaccactcgggttgttaccattaatggtc

SEQ ID NO: 125890 - DNA, 665 bp, Arabidopsis thaliana
  unsure (1)..(665): unsure at all n locations
tctatacgactcacttagggaaagctggtacgcctgcaggtaccggtccggaattcccgggtcgacccacgcgtccggtgatacatcactcgatctcagagctgaacagagtttggagtagacgactataatttctgtttctattgagagctatggcactacgatcagtaagcaggaggctcgggagcagaattttgaatcaacgttcctttgttgcttcgcttcactctcatgccacaagtttcgggtttcaagaagtaaaggaagaagagaaaagcaaattggttggtaatgtattcaccaatgtagcttcgagttatgatattatgaatgatgtgatgagtggtggtttgcataggctatggaaggaaagactcgttgggaagctaagtccatttgcagggatgaagcatcttgatgtggccggaggaacaggtgatgttgcttttaggatctatgatggctgttacagtggcaaacgaagagcattgcagaaagttgatgaggcttctcttgaggaaactcagatatacgtatgtgacattaatcctaacatgtaaacggtgggaaacaacgagctgctgagaagaggctaaaagataacaagtcactcgtatgggtcgaaggaaatgcaaggccttgagttcnatgaccattcaatggat

SEQ ID NO: 125891 - DNA, 643 bp, Arabidopsis thaliana
  unsure (1)..(643): unsure at all n locations
tgcnnnnnnnnnnnnnnnnnnnnnnncactatagggaaagctggtacgcctgcaggtaccggtccggaattccgtttgttctcttgagtggaagaaagttgcagccactaaatcagatccgacaatgccgaagcaaatccatgagatcaaggacttccttttgacggcgagaaggaaggatgcaaggtctgtgaagatcaagagaagcaaggacattgtgaagttcaaggtcaggtgctcaaggtacctctacacactatgtgtcttcgaccaagagaaggccgataagttgaagcagtctcttcctccaggtttgagtgtgcaagacctttgaagatcttatgaaatcaggatctatcatggttttatatacccttgtcttagatgattttgttttttccctttctgctgtcttttgaatgactatgattcagacttccgttgagtttctttcttataacttcaagactaaattatgagttggatttgtatttttttttgctatcaacttggttagtaatatatatggccccaacagtttggagtttaaaaaaaaaaaaaaaaaagggcggccgctctagaggatccaagcttacgtacgcgtgcatgcgacgtcatagcnnnnnnnnnnnncagctcaatc

SEQ ID NO: 125892 - DNA, 521 bp, Arabidopsis thaliana
  unsure (1)..(521): unsure at all n locations
nnnnnnnnnnnnnnnnnnnnnnnnnnnnnnnnnnnnnnnnnnnnnnnnnnnnnnnnnnnnnnnnnnnnnnccacgcgtccgaagaatctgagcacaaaagcattgctggcagagataagagagatctctgaaaagaagcgaggcgaagatgatgcacttcttgctcttgcggctggaaatagacgaactatttcttccaatatgagttttgattatccggatcctgatcttcacgaagatctgtatcagctgatcaagtattcatgtggagaaatgtgttcaacagaacagttagataaggtaatgaaggtatggacagaatttttggaaccaatatttggtgttccttctcgccctcaaggtgccgaagaccgagaagatgctgtcaagtctacaaaccatgaccgagaagaccaagaagatgctgtcagtcctcaaaatggagctagtattgccaactctatgcggtcaaatggccctcgaaaagtcaatgaaagtaatcaagtgcggcaagctagtga

SEQ ID NO: 125893 - DNA, 578 bp, Arabidopsis thaliana
  unsure (1)..(578): unsure at all n locations
agaagacggacgtgtttgatctaccttaccggatggctagaggtcaaatagaagaaagtttgcgtactaagatggcttccataaaggaaagcatggtccagttacaagatgcacctaaaagagcatctgttacatctgaagcaacagagagagagcttgaactcgaagctcagcttgtcgaggcaagaagcataatccaagaacaggagtccataatgtcgaaacatctcccaaaatcagagcagcgaagggaatctgtagcttcgttggcagctgagggagtatgaaaatgtctaggagctcaaaatcagtggatccaagttgctaaaagagacttgtcgcaaaatgtagtcgtagtactgtattcactaccaccaaaactctccttggatatctaagtgatgtatattcaacttttagttgtgacaaatcagagatcttttatccttttggggnnnnnnnnnnnnnnnnnnnnnnnnnnnnnnnnnnnnnnnnnnnnnnnnnnnnnnnnnnnnnnnnnnnnnnnnnnnnnnnnnnnnnnnnnnnnnnnnnnnnnnnnnnnnnnnnnnnnnnnnnnn

SEQ ID NO: 125894 - DNA, 513 bp, Arabidopsis thaliana
ccttcttcaacctctcctccgcacattgcgtcatcaccatctgatccttcaatcctcgtgctgtttttgatccatctgaagcgcttccttgttttgaatctgtttaactgtccaagtttctaatgatggcggagactgagcgatgagtggacgatgatcgagaattgatgacccgtgaaggtggcattgggactaactctccgtgcgtggcaaccacttctcctgttgagactattgacgctcctgtaatgggagctcattcgtggcctgcactcgccgacgctgcccatcaaccgcgtcctaagaatcctccggcgcctgcacctgctccgccgtctaaaaacattccgacgtctatcccaatccctactccgggcgtaactggtcaagcgaaatctaagggtggtggaaaggctaatcctggacacaagaatccatctggccgtcattcaaaaccaggtccgaggagcaaccagaatggtcctcctcctcctccttatctcgtgcatgctg

SEQ ID NO: 125895 - DNA, 774 bp, Arabidopsis thaliana
caaaagtctggagctccaccgcggtggcggccgctctagaactagtggatcccccgggctgcatttttctcggccgccaacgacctcaccgattcttctcgtaaccctttctccaccttccgactcgtaaacttccctaatccatcaagaaccggtcttcacgttgtctctgccgccaaaaaaccttccacacagaccggtcgtttcgacagcaagaagcgtcggactctcgttcctacaacgactaaggaacagcaggaagagggaaacgaaggttttgacggcgagaacccgccgtctcagatcgttatcaacgacgaagatggagatagaacggtggtgaatactcgattcagaggtgatccgaaagatgcgccgaaatttgccattaaggatcttcctggacttgaaccagatccttttgaaggtgagaagtgggatggtctaggtttcttcgttcagtacttgtgggctttcggaatccttttcgcgctaatctctggtggacttgcggcggggacgtataacgaaggtgcgacggatttcaaggagacgccagtatattaagaggcgattcaatctcgtgaccttcttgatgaagccgagagttcaaaactctgaagatgtgtttgaggtccaacccaacagaaagggggctccctaatttggaaataggttccagttcaagtggttttagaggaaaagaaattttaaaagaaccgggaaaccttttcttggctatttgggggggtgggtttttaaaaaaaaagcccc

SEQ ID NO: 125896 - DNA, 566 bp, Arabidopsis thaliana
  unsure (1)..(566): unsure at all n locations
ggcttcgcttccctctctcacatatccacacaacaaaggaaatggctctcaccgtgagcagcggtggcggaggagctagaatccgctgcaacgacctcaccgattcttctcgtaaccctttctccaccttccgactcgtaaacttccctaatccatcaagaaccggtcttcacgttgtctctgccgccaaaaaaccttccacacagaccggtcgtttcgacagcaagaagcgtcggactctcgttcctacaacgactaaggaacagcaggaagagggaaacgaaggttttgacggcgagaacccgccgtctcagatcgttatcaacgacgaagatggagatagaacggtggtgaatactcgattcagaggtgatccgaaagatgcgccgaaatttgccattaaaggatcttcctgggccttgaaccagatccttttgaaggtgagaagtggggtggtttagggttctttcgttcagaacttttggggttttgggatcccttttggggataatctctggtggnctttnggcggggaccgnntnacgaaggtcnncgggttnaaagga

SEQ ID NO: 125897 - DNA, 416 bp, Arabidopsis thaliana
  unsure (1)..(416): unsure at all n locations
aaattttcgagtttatcgatttagtctcattgattttattgtttgtttatatatatgtattgataatgtgtgtgtatgtntncatgactataggtatgtcttcttgtctgctgcaaccattccatacattggtttgctattcatttgcttgtgcaacgatgttccagtcccgagttatcggctaggagctgagggacggtttgggatctacctagctacaatggttgtcatttattgcatatcctacagcatcgaggactttgatgtgatgatggaagtgtcatttctggtgattatgtctataataggagcggttacaaatcgttcaactttcattctcctgccgaggatttaaattccagccgaaccacattcatactatttctagggacgatgtctgctattctgggttgtgt

SEQ ID NO: 125898 - DNA, 886 bp, Arabidopsis thaliana
  unsure (1)..(886): unsure at all n locations
nnnnnnnnnnnnnnnnnnnnnnnnnnnnnnnnnnnnnnnnnnnnnnnnnnnnnnnnnnnnnnnnnnnnnccacgcgtccgatcaaagccaagtctcctgagcagtttaattacttataggaattgggagaagctggcctactatcctcggcggccaagcacattggacagttggacttgttgctatattgatttctttctgtggtataattgcctcagacacgtttgcttttcttggtggcaaggcatttggtagaactcctcttattagcattagtccaaagaagacatgggaaggagcttttgcaggacttgttggttgtatttccattaccattttactctccaaatcgttgtcctggcctcaatctcttgtcagcaccatagcttttgggagttcttaacttcttcggatcggtctttggtgacttaactgagtcaatgatcaaacgtgatgccgggtgtcaaagactccggctcactcatccctggacacggggggatattggaccgaagtgataagtactttttgactggcgcgataggctacccgctggggagactttgtgggggcggacggtgtcggtgcggggcacggcggggccggcgtagccgacaccgccgggccggttgagccgcgcgtcatctcggcgccccgccgctccgctcgcgggggcgagcgagagcggcggtcgggctgccgcgggcgcgcgctactctaccggctggccgacccccacggccccctgcgcgcgccgagggcgcacggagccgtcggtcgggcggccgctcggcggggggaccccgcggcgcggggccggcgtctggctgggactcgggggtcgtaggcggcgacatgggtcggccggccgcgaggggcggggcgc

SEQ ID NO: 125899 - DNA, 622 bp, Arabidopsis thaliana
  unsure (1)..(622): unsure at all n locations
nnnnnnnnnnnnnnnnnnnnnnnnnnnnnnnnnnnnnnnnnnnnnnnnnnnnnnnnnnnnnnnnnnnnnncccgcgcgtgcgtctttgtggtggttttctgctgtcttcttctccgtcgaacttctccgaccacttcgtatagagagagagagtgacgaagagtttacggaatcgaatccaataatgagtactgcgtcggcttttagttcaatccaaggatgctggttcaagggcgaaaggaaaattcgtgtagcggataagcgagccaagaggcttactttgggatcccatgtggcttcgccatcttcaatgagcttcagagtttcagctagtagttctgttaaacctgaaaaggatattaggattggtcttcttggtgcaagtggctacactggtgctgagatcgttaggcttcttgcaaatcatccgcatttccaggtcactttgatgactgctgatagaaaagctggccagtcaatggaaagcggtttccccacctgagagctaaaaaatacctactttggtttcggaaaaggtgcagattttttaacggggatgctggatctggctgttacctaacggacaccttaggaatcttaaggactgctactgcttaaaatc

SEQ ID NO: 125900 - DNA, 534 bp, Arabidopsis thaliana
  unsure (1)..(534): unsure at all n locations
attagaacgaaaccctaattggtcgacgaaatgaaagggattgcgaggcttgtaacttctctatcgcgaatcggaggtcgcaaggtcgtttctggaacaagtactgtgacttcttcttcgtcttcctctcttctgctatctcgtcgctcgcttttcatctctgccaccaatttacttaattcccggaccaaggattctgctcttccctcgttgaattcttctttacttgctcagaaatggaatttcctcggagggcagagaaggacaatgtttatccaaacccaatcaactccaaatccttcttctctcatgttttatcctggcaaaccagtcatggaaagttggaagtgctgattttcctaatgttcgttctgctctgggttcgccattaggccaaatcttattactccatttnatgggcgtaggtnggagttttcttttgggtcagnattttgtcactgaanctaagtcanntgatggtntnannggggtattnccaaggcntaagtatttccagcanncatggtttntnat

SEQ ID NO: 125901 - DNA, 471 bp, Arabidopsis thaliana
  unsure (1)..(471): unsure at all n locations
ccnnnnnnnnnnnnnnnnnnnnnnnnnnnnnnnnnnnnnnnnnnnnnnnnnnnnnnnnnnnnnnnnnnnnnnnccacgcgtccggatcatgtgaatccatcgactggtaaagaaagaaagattgctgctttttagatttagattcgagaatgtatggaagatctggtcttgacaggtttaagaagtcccaaacttcggaacccttctctgtatcagcaaatcctcctccggtggtacaacaacatctgtctccggaggcattgtcggggcaaaaaactcagattggagctggtcaatcaaactggcatccccctgattgggcgattgagcctcgtgccggtgtctactctctggaagttgtgaaagacggccagatccttgatcggattcatctagatagacgaaggcatatcttcgggagacaacatcagacttgtgattttgtccttgatcatcagtccgtttcccgcc

SEQ ID NO: 125902 - DNA, 635 bp, Arabidopsis thaliana
  unsure (1)..(635): unsure at all n locations
nnnnnnnnnnnnnnnnnnnnnnnnnnnnnnnnnnnnnnnnnnnnnnnnnnnnnnnnnnnnnnnnnnnnccacgcgtccgctccaatctggcaaataaatctcactctctcaatcaaaaacacacatcaaaatcaaaaccttctcttcttcttcttcttgcgagttgcaccgaaacactcaacaaaaccaaatcatccaaattgggtaaaacaaaagaaactaacaagaagaagatcgaattcaagaagaagagatggagaatggagcaacgacgacgagcacaattaccatcaaagggattctgagtttgctaatggaaagcatcacaacagaggaagatgaaggaggaaagagagtaatatctctgggaatgggagacccaacactctactcgtgttttcgtacaacacaagtctctcttcaagctgtttctgattctcttctctccaacaagttccatggttactctcctaccgtcggtcttccccaagctcgaagggcaatagcagagtatctatcgcgtgatcttccatacaaactttcacaggatgatgtgtttatcacatcgggttgcacgcaagcgatcgatgtagcattgtcgatgttagctcgtcccagggctaatatacttcttc

SEQ ID NO: 125903 - DNA, 552 bp, Arabidopsis thaliana
  unsure (1)..(552): unsure at all n locations
gccgtttctagggctcttttggtgtccctctacctctcgcgcttgaatcctgtaatcgctaacacagttcgtcaaatttcaggttttttgggctcgtaggctttttctgtatctctcagcatttttcaatttcataaaacatggcggagatacagtcaaatggaagggcatatgagtcattattggaaaaggttctttcaatgaacattctttcttctgactattttaaagagctctatggtttaaagacttatcatgaggtaattgatgaaatctacaaccaagttaattcatgtggagccgtggatgggtggggattgccgtggtccttcaacagcgtattgtcttctctacaaattctttaccatgaaacttacagtgaagcagatgcatggactgttaaaagcacacaggattctcccttataataggagcggggttggnttcccnananttaaaganatgtttcagnttcaaaanncggttgtgggcaatgggnttgacccncccntttnaagngtnatnagggggntttccccgggncaaattggc

SEQ ID NO: 125904 - DNA, 729 bp, Arabidopsis thaliana
  unsure (1)..(729): unsure at all n locations
attctttattcctgggttgtagctggtttaatggttctgtagacatttgataatgaagtctctcacttcattttgtttgggtgatgtaaaatgttgtcagtggattttaggtgaggcttaatctcatggattattcttttgaaatcccctcaggtgaatcagtgaaaattgagaaagtgatgttcaacttcttatctcttaatccttcatttgctctgtcacacattgaagcctattttcggttgcagtttgttaagttttcatgggaagcgttgtctttggagtgttctgaagttgactttaatcctgaaagaagaaggatatgcttttactgaagttatcatgggaagcactttttgtggagtttacaggagtgtctatgccgttgcagtattcgaggatcgctttgatctgccagtcgttccttgttacctttttcgcttttgcagttctttcttacttgccttgcttttctctcgttcatgtattacttgatgcaagtcttgaaactttcccgatattggaccaaactctttttcattcatgccttttaggactactaagtatgaactcctctgatgtagaaggttcgatatgtgctaatcagtctactggtaatcctagttaaaaaaaaaaaaaaaaaaaaaaaaccccaagnnnnnnnnnnnnnnnnnnnnnnnnnnnnnnnnnnnnnnnnnnnnnnnnnnnnnnnnnnnnnnnngtgcacct

SEQ ID NO: 125905 - DNA, 594 bp, Arabidopsis thaliana
cccacgcgtccgcccacgcgtccgcccacgcgtccgcccacgcgtccgagaagagcaagcagcggcgcagaagttgaacacaagtgaagctcacaatggcgaggattaaggttcacgaattgagggagaagtcgaagagcgatcttcaaaaccagctgaaggaactcaaagctgagctcgctctcctccgtgtcgctaaagtcaccggaggtgctccaaacaagctctctaaaatcaaggtcgtgcgtaaatccatagctcaggttttgacagtgtcttctcagaagcagaagtctgctctaagagaagcatacaagaacaagaagttgcttcctcttgatctccgtcccaagaagacccgtgctattcgtagacgcctcaccaaacaccaggcctcgttgaagacagagcgtgagaagaagaaggagatgtatttcccaataaggaagtacgctatcaaagtttaagttttagctgctagaaacactggttcaactttttggtttgatggaaactctgtcttggtcttcaactgtgggtaaggtcgtaaacagtttcaaatactttggatttttggcttttccgtgtgcacac

SEQ ID NO: 125906 - DNA, 462 bp, Arabidopsis thaliana
ggcaaaaaacaaagaaaccaaagtctctttagtttcttcaaccaccacaacactcttcgtttagacaacaaaaaatgataatgagaagaagtctaagtctgagaagcatcacgatgatgatattaatggctgttttggtctggtcagtgactctagagacctgcattgccagaagaggaagacattggagacatagccaccgaagctcttctgacttgtctgattccttgtcaaacaagaaaccgaagagccatgggaacagtcaccaccacagttctcacaacaacaaccatcaccacaagtctaaacctaaaccgaaaccaaagctgaaaacgccgccaaaagctcacgacaataactctccggtggtttcagggccaccaaaagtccaaccaccgcctcttccgccttaaaagggatctcaagttttcaatgtgatggattttggagccaagggtgatg

SEQ ID NO: 125907 - DNA, 418 bp, Arabidopsis thaliana
gtcttatcttttcctctccttactctccatcaatggcttctcttatctctttttctttgctcccaaaaccaaaagccgtaagaagttcaatttcagctcctcagacacagacaataaatactgaaaagcttgaagataaattcggacgaaaaggcataaaattctcggaatcaaacaacattcctatggtagagcttaaggtcagaaatggaagttcattaaaactgagtctatcagatgctcatgtactttcatataagccaaaggtatactggaaagacgagggattcgaggaagtcctttacacagttgatggtgatgagagcagaggtggggttggtgttgttatcgtaaacggggaagaacctaaaggtgggtcttcagtaatttcacgatgttattggagtgtcaaggatac

SEQ ID NO: 125908 - DNA, 372 bp, Arabidopsis thaliana
tcgttaatatccaagctgatgatgtgacaaaggcggcagcccaaataagaaggaaaagcgagccttctccaagccccttgcgaaaggaaataacatctgcgcaggccgcccataatactttaaaagaagctaaagacttgaaacatacagctgaccgtctcaagaattctgtatcaaaccttgagcacattgagctctacttccaagcttgccttaagtttcttcacggtgcttttcttttggagatgagtagcaaccagagtgctagacaaggagaaacaatggtccaatctatgaagatttatagtagcactgcgaatctttgcggattttgtgcccatgagtatgaagaagtctaaagatatgggagct

SEQ ID NO: 125909 - DNA, 555 bp, Arabidopsis thaliana
  unsure (1)..(555): unsure at all n locations
ccccgggctgcccactgggtccgggtgttttnnccttttggagaggaaaccaagccaatgtaatacganattcccctacacaggtnacttcaagaaccttcttggatgtncgaaagagaaagatggttacttgaagnggtttnctggaaatgtagcttcgggaagtgctgctggagcaacaacttccttgtttctgtaccatttggattatgcgcggacccgtttaggcactgatgcaaaggaatgtcctgttaatggcaagagacagtttaaagggatgatcgatgtgtatcgtaaaactttgtcaagtgacggtattaaaggtctttaccgtggatttggtgtgtcaatagtgggaatcactctttaccgaggaatgtattttgggatgtacgacaccatcaaacccattgtgttagtcggttccttagagggaaacttcttggctagttttctattgggttggagtattactacctctgcaggcgtcattgcttacccttttgacacacttangaggagaatgatgcttacatcaggacaacctgttaaata

SEQ ID NO: 125910 - DNA, 426 bp, Arabidopsis thaliana
ataacataaaaaggtttggctctacggcctttgagaggcgatttttttaggtctagccaccaccaaacttttcttctcaaatttctgacgttacctttctgattatctggtgcccttggccggagtcagagagggtgtgtctgtttgtcttttatttgcttttcctttgttttgggtcttctctggctcctcctatggcggattaaagacgagattctagatggttgtgcttcgattggaaggttggttccgttctagtgatggtgtcgcttggttctccgtgggtggttggtgtttttgtcggagcccgtgtggttcttcactgttacggcagttgtttttggagatggaggtttggtttcttcatcttatacatacctgatctagtggaagctatgtagtctcgattctgtcttaagctaatat

SEQ ID NO: 125911 - DNA, 457 bp, Arabidopsis thaliana
cctggcgggaccgggcccgaatttccgggtcgtcccaagccgtcggtgggttggctataatcttcaactctccttcactaaaccctgtcacaactcaagcgaccttcctttcttcgaatcggattcgttcctctcctcgcgttttcagtggatttcacagcctccgacgtcgcggcttccggcgattctctcaaaatgttatccccgaccggtttaatagcttctcatgtaattgcttatccgccgtatccaccagcactatcgattacgagttcacggatggtggcaaagaggtggaattaagattgaggttaaagacaggtgagatactttctccaaaggatatatctgttgacgcagatggaacatcgttagccgttaaagaaaagcggaatggattgctgattacacttctagagactaaccatctctttgagaagattatgccctctgaaac

SEQ ID NO: 125912 - DNA, 724 bp, Arabidopsis thaliana
  unsure (1)..(724): unsure at all n locations
atacgactcactttagggaaagctcgtacgcctgcaggtaccggtccggaattcccgggtcgacccacgggtacgggggatttcatcaacaattggacaagaatactgaaactgcagatgcatggttgcggtttggatggtccgataccttccagtatttctagcttaacaagcttgaccgacctgagaattagcgacttaggaggcaaaccgtcttccttccccccactgaagaatttggaatctatcaagacgctgatactgagaaaatgcaaaataattggcccaattccaaaatatattggggacttgaagaagctcaaaacacttgacctcagttttaatctcctaagtggtgagattccttcatcgtttgaaaatatgaagaaagccgatttcatttatttgacaggaaacaaattgacaggaggggttccaaactactttgtcgaaagaaataaaaatgtagatgtttcttttaataacttcaccgatgaaagttcaattcctagccatgactgtaaccgagttacttcaaatttggtggaaagcttcgccttggggaacaaatcacacaagggttcaacctgttttcttcaacgatgccttgtgttcatcctaaggggtatcatttatataaattggtacataaattgccgggnggagggtgaaggtaaaagtgggtnaagggattaccatatcaggctgntgacgggccccaagg

SEQ ID NO: 125913 - DNA, 428 bp, Arabidopsis thaliana
attccctttggttctcaaggcatgcaccagagccgcgtgtcgcaagcttgggattgatcttcacccccttgtggtcaaatgtgggtttaatcacgatgtggccgctatgacgagcctgctctctatctactctggatccgggcgtttgaatgatgcccacaaactgttcgacgaaattcctgacagaagcgttgttacttggacggctttgtttagtgggtatactacttcaggaagacacagggaagccattgatttgtttaagaagatggtggagatgggtgtgaaacccgatagctactttattgttcaggttttatctgcttgtgttcatgtaggggatctcgacagtggggagtggatagttaagtacatggaagagatggagatgcagaagaattcctttgtgcggacaacacttgtcaatc

SEQ ID NO: 125914 - DNA, 460 bp, Arabidopsis thaliana
  unsure (1)..(460): unsure at all n locations
cggctctaatcgactcacttagggagagctggtgcgcctgcaggtaccggtccggaattcccgggtcgaccccgggtgcgggtaatccaatccagacaagaaaccggcgttgttttgtctgatcacataacacatttcagtttatagatctgcagaatttgttttttgtatttttgttctgttttcttttgattttcttcttcatcctgtaaaacctagaattttgtttcttcaaccaaaaatgaacagagaagtctctgagagaattcatattttgttcttcccctccatggctcaaggccacatgattccaattttggacatggccaagcttttctcgaggagaggagccaagtcaacccttctcacaaccccaatcaacgctaagatcttcgagaaacctattgaagcattcaaaaatcaaaaccctgatctcganatcggaatcaagatcttcaat

SEQ ID NO: 125915 - DNA, 528 bp, Arabidopsis thaliana
atacaactcaaatagggaagagctggcacgcctgcaggtaccggtccggaattcccgggtcgacccacgcgtccgcccacgcgtccggacgaaaccgagagaaacaatgggagacgctgcgatccgtaccgtcgtcgaagccattcactcatctccgacgcaggccgtcgtctatctttgcggcggtgcctctctggctttaggttggttgatgtcggttcctggagcgtcgaacacgcttctcgagtccgtggttccttattcgagagtatctatggttcaattactcggcagggttccgagccaacactgtagccaagcattggccaaggagatggccttgttagcctacaatcgggcgcttaagctctctaaaccaggatatccggttctcggtgtcgggtttacgggatcattggtaacttctcgtcctaagcgtggagatcacaggttctttttgtctatgagagcatccgaccggattttgaatcttcaggcactctaactaagacttacggagccgagaag

SEQ ID NO: 125916 - DNA, 530 bp, Arabidopsis thaliana
  unsure (1)..(530): unsure at all n locations
gccccnacgcctgcaggnaccggncctttatncccggggggcccgcgcgtccgtacggctgcgagaagacaacagaagggtacggctgcgagaagacgacagaagggtacggctgcgagatgacgacagaagggtacggctgcgagaagacgacagaaggggacggctgcgagccctcctctgaagggggttcttcgtcgttatcaattcggagatgattccgtttcctctgttaccaacgccgattgaaaccaactacagagcttgcaccattccttatagattcccttccgataatcccaagaaagccactcctactgaaatctcctggatcaacgtcttcgccaattccattccttctttcaagaaacgtgcagagagcgataccagtgttccagatgctcctgctagagctaaaatttttgaacaaagatatgcggggattcttggaggcgggaaaaaagaccccagaagaatggggggccacccaatggggtattcccggccgaggtggggggctttactcaaaa

SEQ ID NO: 125917 - DNA, 703 bp, Arabidopsis thaliana
ccgaatttcttgggaaaaacaccctcacaagcaaagaaaatggagagcgattcagagatggttccgtttcctcaactaccgatgccaatagaaaacaactacagagcttgcacaattccttacagatttccttctgatgatcccaagaaagccactccaaatgaaatctcgtggatcaacgtcttcgccaattccattccttctttcaagaaacgtgcagagagcgatatcactgttccagatgctcctgctagagctgaaaaatttgcagaaagatatgctgggattcttgaagacttgaagaaagatccagagagtcatggcggaccaccagatggcattcttctatgccgacttcgtgagcaagtactcagagagttaggatttacgggacatattcaagaaagttaaggatgaggagactgcaaaggctatatcactatttcctcaaagtgtcagtctgagtgatgctattgaagaagacggaaaacgggtagagaatttggtgagagggatatttgctggaaacatcattgatcttgggtctgcacaccttgcttgaagtttttttcaagggatgggtatggtctttcttgggctaagctcgcaaaaaactttggtttccaccggacccattggggttcaatttggaattgcaacctctggggataaaaaacctattccccaaaagcccccatctaat

SEQ ID NO: 125918 - DNA, 515 bp, Arabidopsis thaliana
  unsure (1)..(515): unsure at all n locations
nnnnnnnnnnnnnnnnnnnnnnnnnnnnnnnnnnnnnnnnnnnnnnnnnnnnnnnnnnnnnnnnnnnnnnnnnnnnnnnnnnnccacgcgtgcgcccacgcgtacgaaagaaacggcaaaaatttatgctgaaatctttttttcttccttattctcctctttcgcttgatttcgccgtccgattatctctatcgccgataaatatccggcgtcactcagtagatcttgaagctgttgctttcttgctttgctcttcgcgcaagattctctttctctgttttcattgaggattcgaagttgatcgctatttgattcgattggttttgagttttcgatcctcgacggatggagattttgaagtgaatcggaggagcgaataagagaaagtgagagatggatgatagagaaggctcgttcgtagctgttaggcggatttctcagggtctcgaacgaggaagcgtttacaattcatcatctgctgaggctgtgcctggatcagcaacttggttaggcct

SEQ ID NO: 125919 - DNA, 631 bp, Arabidopsis thaliana
ttcttcatcatccggtgatccggatgatttcttcaaccatataaccaccgagaagaaaccttcttcaaactcaccttcccctttcattcaaacatgcgttggggtgtatcaaatgcaaagtggggatcgagcctcaaactcgggaatacaatgaaccacaatgtggaatgattggatgaagggcgtgcgaaacttagaccttctttagtttccttaagccttccccaagatcgcctggaaaagagagcaatgatgattttttctgatgatgatgacgaaaacaacaatgagattggtgtagagctcgatctcgaatcagtaatgtctgacacttttgtctctgtcgggaaataccgagtcagatcgggttcatccactatactaagtgctgtcatcgaaaagcacggagacattgctcaaaactgtaagctggaatcggattcaatgcgatcacgttacctcgagtgtttatgctcactgatgcaggaacttaggtcaaccccggtagggcagttgagcaaagtcaaggtcaaagagatgcttgcggttctcaaagacttggagtctgtgaacattgaagtaccttggctacgttctgttcttgaagagtttgcgcagtctcaagaagatg

SEQ ID NO: 125920 - DNA, 873 bp, Arabidopsis thaliana
  unsure (1)..(873): unsure at all n locations
accnnnnnnnnnnnnnnnnnnnnnnnnnnnnnnnnnnnnnnnnnnnnnnnnnnnnnnnnnnnnnnnnnnnnnnnnnnnnnnnccacgcgtccgcccacgcgtccgacttgattgtacttaaagatgtaatcaacaaagtttataaaaattcttggttacacaagcctatacttgtcgctcctggagggttctatgaacaacaatggtacaccaaacttcttgaaatttccggtcctagtgttgtcgacgttgtgactcatcatatatacaatcttggttcaggaaatgatcccgcgctggtgaagaagataatggatccgagttatttaagccaggtatcaaaaacattcaaggacgtgaaccagacgattcaagaacatggaccgtgggcttctccttgggttggagaatctggtggagcttacaatagtggtggccgtcatgtttctgacacattcatagatagcttctgggatctagatcagcttggaatgtcagcgagacacaacactaaagtttactgcagacagactttgggttggagggttttacggcttgctcgaaaagggaacgtttgttccaaatcctgattactatagcgcgcttgtttggatcgtttataggaaaagggggttcttgcggggcagaaagaagggaccgcacagctaccggtttacgcacacttggtcaaaggaaaagccggcggaaatttctaccgagtaatcaacgcacaatcgggatttacggttatggccacgatgcaacacggcgcgtggcggggggacgggggcgaaaatgggcgctcgagcgtctcgagaccacactgcgtcgaacagagcgaggcgcggagacctgtccgccaacagcgtagcg

SEQ ID NO: 125921 - DNA, 623 bp, Arabidopsis thaliana
ctactacgactttctatagggaacgctggtacgcctgcaggtaccggtccggatttcccgggtcgacccacgcgtccgctgcgttttcgtggagcatcttcttcaacaatggctgcttctccgatctgatcatatcctgatttgaattttgctatctctcatgcctcgaactcgttttgtcgacgtagcatcctagtgactgaggaagaagaagaagatgagcttctttatcctctccgtcgtcgttttcgtttctctcgctttcttctctcttccgcattccgttgattcatctgtttccgcttcacaggatcctctcagactcatattaggttcaccgaattttggaacatggaaaggtggaatctcattagcaccaggacctgaatctgatgatggtgtctctgattacctcctcttagcagctcatagaaccaagagacctgacattcttagagcttttaagccttaccctgggggctggaacatcacccaatatcactattgggcttctggtggattaacaggtgctccctggttcatactagctggtatctggctcttggcttttggctctcttcttggtggttatcattgcttcaaatggagaatatgtgataaag

SEQ ID NO: 125922 - DNA, 578 bp, Arabidopsis thaliana
  unsure (1)..(578): unsure at all n locations
aatngggttacgttnccctnncggctaccngccnttnncggcggccttanaacccnacggnttcggccnaacgttcccatgggcattcctcaaatggtaaagactgaggtagtgaaaagcaatggacaggcattggttgaggcgtatgagtccccagcacatagcagcgttgctcataggtactatttacccagtggccaagtttcactttgagctctcaccgatgcaggttctcataacggaaaactccaagtccttctcacatttcatcaccaacgtatgcgccattattggtggtgtcttcacggtggccggaatcttggattctattctccatcactccatgacactcatgaaaaagatagaacttggtaaaaacttctgaagctccctaagggttttatttcgttttcctctgtaacgagtcagaaatttttgccctagttataccagacgtcacttaaataattcggttatatatattcacaaactgttatccttttgaacatatataagtattacaaaaaggggcgnccgctctagaggatccaagcttacgtacgcgtgcatgcgacgtc

SEQ ID NO: 125923 - DNA, 574 bp, Arabidopsis thaliana
  unsure (1)..(574): unsure at all n locations
gaagaaagaaagatctctcggtgggggtcattcaacattgtaagatcttcgacttggcaaaattgtttcactttcgctctaaaaacttcatcttcactttctctcctcctccatggcggacggtggggctgaacctccagctccaccatcatcgataaacgccggtgaatttctcttgtctattttgcacggaagtccttcgccgtcgtcacaaggtcctcagcatcatcagtcattcgctctcgatccagccatcgcagccattggtcctaccgtcaataatccttttcctccgtcgaattggcaatctaacggtcatcgacccagtaatcataacccnccttcttggccactcgccttttcacctcctcataatctttcccccaatttcttaggggttcctcaatttccggctagcnntttcacgaggaccaattcgacggtaatcaaagagtatctccagaagatgctatagattaggggtcctggaacaanaatccgngatcagtcaagggnaggaaagagnagagagtacgcgngaataganatggagttgtttnggttttcnggnaag

SEQ ID NO: 125924 - DNA, 755 bp, Arabidopsis thaliana
cccacgcgtccggtttcgcctctcaaaacattttcaattcccgccaattttcttctccgagaatacccccaaccttctagaaaccctaatttggtttaatttcattctccactactttctctgaaaccaaactcgagatctctcccccaatcatgcctgcgatacaatccccatcggggaagatcttgcagcttgagatggagaatttcaaatcttacaagggtcatcaattggttggtcctttcaaggatttcactgctattattggtcccaacggttctggcaaatctaacctaatggacgctattagcttcgtcctcggcgttcgtaccggtcaacttcgtggttctcagcttaaggatcttatctacgcttttgatgatcgtgacaaggaacagagaggtcgtaaagcttttgttcgactcgtttatcagatggacgatggagtagagcttcgtttcactcgttctattactagcgctggtgggagtgagtaccgtattgataatagggttgtgaatttggatgagtacaatgggaagctacgatctcttgggatacttgttaaggctcgtaatttcttggtctttcagggtgatgttgaatctattgcttcgaagaatccaaaagaacttactggactcctcgaggagatttctggttccgaggagcttaagaaagagtatgaaggactagaagaaaagaaggccagcgctgaagaaaaagcagctcttatataccagaagaagaaaaca

SEQ ID NO: 125925 - DNA, 539 bp, Arabidopsis thaliana
tacgactcactatttggaaagctggcacgcctgcaggtaccggtccggaattcccgggtcgacccacgcgtccgcggacgcgtgggcggacgcgtgggtgagccgatggctatgggaaaagataagaagaaggtgtgggagaagctgttgaacgcgagagttgtgtacctcggtgaggcggagcaagtgcctaccaaagacgacaaagagcttgaactcgaaatcgttagaaacctgaggaagagatgcgttgagagcgagcgtcaaatctctgtagcactggaagcattccctctcgatttgcaggatcagcttaatcaatacatggataagaggatggacggagagacattgaagtcttatgtgacacattggcctgctcaacggtggcaagaatatgagcctcttttaagttattgccgcgataactctggtagactaattgcttgtggcactcctctcaagggtttaagaactggtcaagcagaaggtatccgtggtctttcaaaatctgagcgtaaatatacacttcccctgtt

SEQ ID NO: 125926 - DNA, 562 bp, Arabidopsis thaliana
  unsure (1)..(562): unsure at all n locations
atttactggagaagagatggtgggatcagaggttttggaggaatgtggagaaaaaaataagcaagaaagagtcaaagaagcgagccgctaaactggagaagttgctccgtaaacaggaacgagaagaagccacatcatcatctctttctctggaggaggaggatgaatcgtgttccagcaactacggtgacgtgactactaacgagttgcagtcggctgttgagggaaaagagctcactgatgtgagcaacttggttgaagagattgtggggtcagaggtttcgatcagaggtcgactgcacaagaatcgcttagtcggtaccaaattgtttgtgatcttgagggaaagtggattcacggttcaatgcgtggtggaggagaccagagttggtgcaaacatgattaaatttgtcaagcagctgagtcgtgaatctgttgttgagcttatcggtgtcgtctctcaccctaagaagcctctcacaggnaccacccagcaggttgaaatacatgtnagaaaaatgtactgcctcagcagatccttgccaaatttaccacttgttgt

SEQ ID NO: 125927 - DNA, 529 bp, Arabidopsis thaliana
  unsure (1)..(529): unsure at all n locations
nnnnnnnnnnnnnnnnnnnnnnnnnnnnnnnnnnnnnnnnnnnnnnnnnnnnnnnnnnnnnnnnnnnnnnnnnnnnnnnnnnnccacgcgtccggccgtctctttttctccacccgcgagaagataatgagagtttcgccggcggcaacactctcagtctctttgactactccactacctataactttaaccaaagctcgtttctccggcgaaccattgcgactcaaacaatatgttttgagtaatcagatttgctcccgaccaaaacatctcctctcagagtttaaacccaccagaagatggaccttctcctgcaaatgccgtaacagaggaagaaatggttacgcgaaattcgatgacgaaggagaagatttcattgttgttaacttctatcggtttgtatcaatcggagatcctgaggctgagattgagaagcacctctcattcttaaaggatttgaatatacgaggtcgaatatatctcaaatgaacaagaatcaacgcgcagtacagtggaccatctaaagatg

SEQ ID NO: 125928 - DNA, 477 bp, Arabidopsis thaliana
ctttatcacttcagtctctgtttttagctctgtgatttgagtttttattttgcggtggcgttgtatggctatggcctttcctctttcttatactccgacgattactgttaaaccagtaacgtactctcggagatcgaactttgtagttttctcgtcgagttctaatggacgagatcctttagaggagaattcagtacctaatggtgtgaaaagcttggagaagcttcaagaagagaagcgtcgtgctgagttatctgctaggattgcttctggagctttcactgtacggaaatctagttttccatctacagtgaagaatggtttatctaagattggaataccaagcaatgttcttgatttcatgtttgattggactggttctgaccaagactaccccaaggttcctgaggctaaaggctcgattcaggcggtccggaacgaagctttcttcatccctttgtatgagcttttccttac

SEQ ID NO: 125929 - DNA, 535 bp, Arabidopsis thaliana
  unsure (1)..(535): unsure at all n locations
cnnnnnnnnnnnnnnnnnnnnnnnnnnnnnnnnnnnnnnnnnnnnnnnnnnnnnnnnagctcacaccacgcgtccgcacaattctccgaacatgcgtttgctttctttattctctaataaacctagtaaactcttcttcttcgttactactatataatatagcggagagttttggaaccagagagaggttttacgtttttcttattttatttctctccatggggattctttgggattcgtttctcttgttacttgtgtcaacgtttgctctgttcttagttaggatcctgttattcaaaactggattgatttacatggtcaagttatggcgtaggaagatcatcgactggtttcatgtttaccaattctacaaagtcccagaattcaacgacaacgttcaagagaatcatctctaccaaaaagtctacatgtatctaaattccttaagctcgatcgagaattctgatttcacgaacctcttcaccgggaaaagtccaacgaaatcatcctncggttagatcggaaccagtcgttg

SEQ ID NO: 125930 - DNA, 694 bp, Arabidopsis thaliana
  unsure (1)..(694): unsure at all n locations
agggaccnggcctgnantncctgggcngcccactgtgccggatttttagacaaagttactctctttctttctcatgttcttttcggacagaacaaaactccctaatccaaatgtcaattcctttggtctctctctgaataatcatctctcttcaaaccctattcaattttaactatcgatcttcggctaagtctccaatggcggcggcgtttgcctctcttcccacatttagtgtcgtcaattcctccagatttcccagaagaagaatcggtttttcttgctccaaaaagcccctcgaagttcgttgttcttccggcaatactcgttacactaagcagagaggggcatttacatcactgaaagaatgtgcgatttcattagctttatcggttggtttaatggtttcagtaccttcgattgctttgcctcccaatgctcacgcagtggcgaatccagtgattccagatgtttcagtgttgatctccggtcctccgattaaagatccggaagctttactaagatatgcattgcctattgacaacaaagccatcagggaagtgcagaagcctcttgaggatatcactgatagcctcaagattgctggcgttaaggctctagattctgttgaacggaatgtgaggcaggcaagttgaacatttgcagcagggaaaagtataattgtggcaggttttgc

SEQ ID NO: 125931 - DNA, 466 bp, Arabidopsis thaliana
ctcttcttcttcttcctcttcctctctactgtgattttctcttcatatttctctctctctctcgctgctatagttggtgaagtttctatctttatctctcttaagatctctttctctcttgggttatctgactctaaccagaattgtgtcgatttcaaggatggatgatactacgtataagccaaagaacattctcattactggagctgctggatttattgcttctcatgttgccaacagattaatccgtaactatcctgattacaagatcgttgttcttgacaagcttgattactgctcagatctgaagaatcttgatccttctttttcttcaccaaatgtcaaggttgtcaaacgagatatcgcgcgtgatgatctcgctaactaccttctcatcactgaaaacattgctacgacaatgcattttgctgctcaaactcatgttgataactcttttggtaatagc

SEQ ID NO: 125932 - DNA, 756 bp, Arabidopsis thaliana
  unsure (1)..(756): unsure at all n locations
nnnnnnnnnnnnnnnnnnnnnnnnnnnnnnnnnnnnnnnnnnnnnnnnnnnnnnnnnnnnnnnncacgccacgcgtccgctcgagagagagaaagagaaaacaaaaaacaactgagaaagaaggaagaagaagaagaagattagtgcttagtctttttgcaattcacacacacatcgaaagagggattataaagtttccaactttttctttcaattcccagaatttcgatcttcaaattttgaaggaagaaaaaaaccaagagcaagagttgaggaatcgaatcccaagaatcgaggtgtgagaagcagtatcagtcactagatgcatgacatttgaaagttggagtggaacttgttcttagcgcgtattgaactgtctggtcgcttgtacataaagcttgtaactaaaaatatctggtctgaggggtaagctaaaggggagagaaatggagactgccaaagcttggctgagtaagttaaaatctaaagacagggtgaaatcttcgaaaaagaaggaagccacaagtaatgtaaaggaaggaccgaaaacagctggaggtgaagaagcactttcaatataactaaagagaaggctgctgctgcaaaactgtatattgaaaaccattacaaaatgcaaatgcagagtctgccggaaagaaaggagcgacgcaaaatgctagagaaaaaattagctgctgcgaaagtctctgaggaagaacaaataacttgctaaagggtttggagatgaaggaactg

SEQ ID NO: 125933 - DNA, 666 bp, Arabidopsis thaliana
  unsure (1)..(666): unsure at all n locations
nnnntctatacgacttacttagggaaagctggtacgcctgcaggtaccggtccggaattcccgggaaaaacgtaagcaaaaaaaaataaaacagagcaaaatggccgtagttttacgtggaggcatcaccggaggatttcttcaccatcgtcgtgacgcttcatccgtcatcacaagaagaatctcatccgtcaaagccgcaggaggaggcatcaacccaacggtggctgttgaacgtgccacgtggctacctggactaaaccctcctccttatcttgatggaaatttagctggagattacgggtttgacccactcgggttaggagaggatccggaaagcttgaagtggtatgttcaagcagagcttgttcactctcgtttcgctatgctcggtgttgcaggaatactcttcactgatctccttcggaccacaagggattcgtaatttaccggtttggtatgaagctggagctgtgaaatttgattttgctagtacaaaaactctcatagttggacaagttcctacttatggggttggttgaaactaaaaggtatatggattttggctctcccgggatcccaacccaaagaaaggtgccgttttcctttgaccttgaaagcncacttcgagggggcccggacctggatttcccgggaggaccgttt

SEQ ID NO: 125934 - DNA, 502 bp, Arabidopsis thaliana
  unsure (1)..(502): unsure at all n locations
nnnnnnnnnnnnnnnnnnnnnnnnnnnnnnnnnnnnnnnnnnnnnnnnnnnnnnnnnnnnnnnnnnnnnnnnnccacgcgtccgctcacttccctcattggacctctctaactctcctctcttaccttctcctgtttaaattcttctcctttctttccacaatttctgtctaaccaattccaacaccaaaaaattccatttcttgacgatgaaacgaagccatcaagaaacgtctgtagaagaagaagctccttcaatggtggagaagttagaaaatggttgtggtggtggtggagacgataacatggacgagtttcttgctgttttgggttacaaggttcgatcttcagacatggcagatgttgcacagaagcttgaacagcttgaaatggtcttgtccaatgatattgcctcttctagtaatgccttcaatgacaccgttcattacaatccttctgatctctccggttgggctcagagcatgctctcggatcttaattac

SEQ ID NO: 125935 - DNA, 1104 bp, Arabidopsis thaliana
  unsure (1)..(1104): unsure at all n locations
tacgcctgcaggtaccggtccggaattcccgggtcgacccacgcgtccgagtgattggcggagatagagagatagggtttgtggctagagttaaggaagtttatggtttgattcaagagaaaggtgtgttttgggcttttgatcaaatgattgaaatgggagatttgccttatgaggagatcataaagcttcagaattcgaaaaggagaagcttcaaagctatcgagttagggagtgccacgcgtccgagagttttaggtcaagtgattgatactttgggtttagctcctgtgcatttggttcttcatgattcagctttagggttagcttcgaattgggtttctgagaattggcaaagtgttcgaagtgtaactcttattgactctagtattagtccagctttgccgttgtgggttttgaatgtaccggggattcgagagattttgttagcgttctcgattggctttgagaagctagtgagctcccggtgctcaaaggagatgactttatcggatattgaagctcatacgatactttcgagggcaagaaacgggatagaagccggtaatcctccgcaccacccataaaagcatgnctatctcgttgcccccggggcaaactcaaaaaaaacgactcgccttcccactccacccgacagagcgccccgggcccggctcangaaacgcgccgccgcaatcgcactctgcgcctcccccccctccagatacgcacccggccgcggcgctccggccaccgcgcggcgctcccgggcgcggcggggcgcccccgcccgccgcacgcgcggcccccggcgcgcctccgcgctcgcgcgccccggagggcgccgcgtcaccgcctcgcagcgcgcgccgccgccccggcgcccctgcgcgcccgcgccccgcccgccgcccggccgcgccgcggccgcgcgcgcccgctccgcagcccagcgcgcgcgcgatcgacgcgtggccgcgccccccggcggctccgcccccgcccgcccgccgcgccgcgcgggcagcacggccggctacgccggcgccgccactgcatgggaggtctccgcgcgccgcgcgcaccgcccgcgcgcgggccccg

SEQ ID NO: 125936 - DNA, 581 bp, Arabidopsis thaliana
  unsure (1)..(581): unsure at all n locations
agtgattggtggagatagagagatagggtttgtggctagagttaaggaagtttatggtttgattcaagagaaaggtgtgttttgggcttttnatcagatgattgaaactggagatttgccttatgaggagatcataaagcttcagaattcgaaaaggagaagcttcaaagctatcgagttagggagtgaagaaactnctagagttttaggtcaagtgattgatactttgggtttagctcctgtgcatttggttcttcatgattcagctttagggttagcttcgaattgggtttctgagaattggcaaagtgttcgaagtgtaactcttattgactctagtattagtccagctttgccgttgtgggttttgaatgtaccggggattcgagagattttgttagcgttttcgtttggttttgagaagctagtgagcttccggtgctcaaaggagatgactttatcggatattgatgctcataggatacttttgaagggaagaaatgggagagaagctgttgttgcttcgttaaacaagttaaaccatagctttgacattgcacaatggggtaattcagatggga

SEQ ID NO: 125937 - DNA, 661 bp, Arabidopsis thaliana
ccccctcgaggtcgacggtatcgataagcttgatatcgaattcgcggccgcgcaaaaccctactgcgatttatcgactactaggagaagaagaagaagaagacgatgcggagattcggggctgggaacagatccgtttccaagctcgtactcaccatttgtgtagctatcctgttcataccatctctatcgtatggagcttcacaagggaaccggaagacggcgaagtcttctgtgttttccttgttcaatcttagggataaaagcagattttggagcgagtctgtttttcgtactgattttgatgatttggagtcttccgttcactcgaattctggtgtgctgaattacactaagtcaggaaatattgcgagttacttagagcttatggaagtcgattctgtctatcttccagtgccagttaattttatcttcatagggtttgaaggaaaagggaaccaagacttcaaactccgtcccgaggaacttgagcgttggtttaataaacttgatcacatgtttgaacatacacgagttccacaaatcaaagaagttctcaatcccttttaccagattaacattgaagaggaggtgcagcaccatcttcctttcatcagtcgcggtgaactacaacttttctgtgcatgctattcaaaagggac

SEQ ID NO: 125938 - DNA, 628 bp, Arabidopsis thaliana
  unsure (1)..(628): unsure at all n locations
nnnnnnnnnnnnnnnnnnnnnnnnnnnnnnnnnttaggtacacactatagaagagttatgacgtcgcctgcacgcgtacgtaagctcggaattggagtttggattagccacttcgagttttctgggtactcaactaatcccggccactctgtttagcaaacgagctcgagctttgtctctcaccgtcacagcgaccggtggcagcagaaacaataaggtttacacgaggcttgattcttgtctagtgattcctcctcctcctaaattcaagaaaccgcgtgctattgttaaattcttgggaggtgccttcgtcggagctgttcctgaactcacttacagttaccttaaggagctactggcaaaggaagggtatttgatagtatctgtgccgtacaatgttacatttgatcatgaacaagctgctaagcaagtttatgagaggtttaattcatgcttggacacgattgtctcatctggaattccaaattcaaacttgaagcctggagatttagctgaccttcctcttttctcagttggtcacagtaatggtgcactgctccaagttttgaccggaagttattttgctgagaagataccaaaggttaatgccattatttcattcaataac

SEQ ID NO: 125939 - DNA, 873 bp, Arabidopsis thaliana
  unsure (1)..(873): unsure at all n locations
aattcggttcaggcacgcgtcccagaatctctaaagtttcaatttttttgttctgttctttttatttttttaaagaatggcttcaatttctgcaactttgccttcgccattgttactcacacagagaaaatccaatctcacatcgattcaaaaactcccattttctctaactcgaggtacgaatgatctttctccattatctcttactcgaaaccctagcagcatcagtctgatggtgaaagctagtggagaaagctcagattcatcgactgatctcgacgttgttagtacgattcagaatgtttgggataagtctgaagataggttaggtcttattggtttgggttttgctggtattgtagctctttgggcatcattgaatctcatcacggcaatcgacaaattgcccgttatctcgagcggattcgaactagttggtatcttgttctccacgtggttcacatatcgatatctcttgttcaaaccggacagacaggagctttcgaaaattgtcaagaaatcagtagcggatatacttggccagtgaaccttgtgtgtgtgataatacttcatctttggaagatgatttgtttgcaagtttgtaaaattacatgacagggtggttgttgtttctagtccaataatgtcatgcatttgaaacctgtaaatactttattgttggtttttggttgtgagcaaaatcaatcttttctaatttcaaagattctcttttatgtttaaaaaaaaaaaaaaaaaaaaaaanaaaggnnnnnnnnnnnnnnnnnnnnnnnnnnnnnnnnnnnnnnnnnnnnnnnnnnnnnnnnnnnnnnnnnnnnnnnnnnnnnnnnnnnnnnnnngtagcttggagttcat

SEQ ID NO: 125940 - DNA, 549 bp, Arabidopsis thaliana
taggtgcactatagaagagctatgacgtcgcatcgcacgcgtacgtaagctcggaattcggctcgagcggctcgagcggctcgagcggctcgagatttttttaaagaatggcttcaatttctgcaactttgccttcgccattgttactcacacagagaaaatccaatctcacatcgattcaaaaactcccattttctctaactcgaggtacgaatgatctttctccattatctcttactcgagaccctagcagcatcagtctgatggtgaaagctagtggagaaagctcagattcatcgactgatctcgacgttgttagtacgattcagaatgtttgggataagtctgaagataggttaggtcttattggtttgggttttgctggtattgtagctctttgggcatcattgaatctcatcacggccatcgacaaattgcccgttatctcgagcggattcgaactagttggtatcttgttctccacgtgggtcacatatcgatatctcttgttcaaacccgacagacaggagcttttagaaaattgtcaag

SEQ ID NO: 125941 - DNA, 647 bp, Arabidopsis thaliana
  unsure (1)..(647): unsure at all n locations
tacgactcactattaggaaagctggcacgcctgcaggtaccggtccggaattcccgggtcgacccacgcgtccgacactataaactcaaacacatctatcggcaagtcttaacacacgaagatttccaaaatggctaaggccgaagggctttttcttcttgggttagtagttatttcaagtttagttatgttaaccgagagccgactcgcaagaaaagacttggggattgacctaggtgggattggaatcggtttgggcgttggattggggattggtcttggcggcgggtcgggctccggtgctggtgcaggttctggatcaggttcaggttccagatcatcatctagctccagctcatcatcaagttcgagttctagtggttcgggtggttcagctggttcatctgccggttcatttgctggctctagagctggatcaggatctggtaactaaattataataattacttttcgacttaaagtgtgaaacaataagtatgttttatgtttttgggtcgtcgtagttaaatatccgtatgtacggaatggaatgaataatttggtacccgtaaggtatgttttgtttgaagcgagtggtgtgtacctagcttactctccctaaaaaaaaaanannnnnnnnntnngna

SEQ ID NO: 125942 - DNA, 1258 bp, Arabidopsis thaliana
  unsure (1)..(1258): unsure at all n locations
atgtttnnnnnnnnnnnnnnnnnnnnnnnnnnnnnnnnnnnnnnnnnnnnnnnnnnnnnnnnnnnnnnnnnnnnnnnnnnnnccacgcgtccgcattcactgatctctaaccaatcccacacacactaccacaaacaatggccaccgtcgctaacttcttagccaaaccaatctccaccgtagtcccacggccatcctccgccgttgcttcgacctcctccttcgtattctttaaccataaaactaatcctctgttccggaggaaaaacctcccgaaaagattattctccgccgtgaaaataaaggctggagcggcgtctccgggaaaggtgggtacaccaccggcgaatgacgagaaggtacaaaagattcacagcggagaggaattcgacgtagcgttgaaaaatgcgaagagcaaactcgtggttgcagagtttgctacgagtaagagtgatcagagtaataagatatatccgtttatggtggaactgagcaggacctgtaacgacgtcgttttcttgctcgtcatgggtgatgaatctgacaagaccagagaactctgtcggagagagaagattgagaaagttcctcactttagcttttataagagcatggagaaatacacgaggaagaaggtattgaaccggaccagttaatgggagacgttctatactacggagacaaccactctgcggtggtgcagctgcacggccgacctgacgtggaaaagctgatcgacgagaatcgcactggaggcaagctgatcgtgcttgacgttggtctaaaacattgtggtccttgcgttaaagtgtatccgaccgtgctgaaactgtcccggtcaatgtccgagacagtcgtattcgctagaatgaacggtgacgagaacgatagttgtatggagtttctcaaggacatgaatgttatcgaagttccaactttcttgttcattagagacggcgagattcgtggccgttatgttggttccggtaaaggagaactcattggagagattcttcggtactcaggcgttcgtgtcacttattaatttgtatcaaaactttaattttattacatctcacttcaaaaaagaatgagtttttggtctttgtctgtaccatccgaaaccggttgatatgaaagaaaaaaaactcaaaataagtgtgattaaaaaaaaaaaaaaaaaaaaaaaaaaanagcggccgctctagaggatccaagcttacgtacgcgtgcaggcgacgtcataatcttctatagt

SEQ ID NO: 125943 - DNA, 723 bp, Arabidopsis thaliana
  unsure (1)..(723): unsure at all n locations
nnnnntacgactcaccttagggaaagcacgtacgcctgcaggtaccggtccggaattcccggtttcgacccacgcgtccgtccggctgcgagaagacgacagaaggatacggctgcgagaagacgacagaagggtgatgaatctgacaagaccagagaactctgtcggagagagaagattgagaaagttcctcactttagcttttataagagcatggagaaaatacacgaggaagaaggtattgaaccggaccagttaatgggagacgttctatactacggagacaaccactctgcggtggtgcagctgcacggccgacctgacgtggaaaagctgatcgacgagaatcgcactggaggcaagctgatcgtgcttgacgttggtctaaaacattgtggtccttgccgttaaagtgtatccgaccgtgctgaaactgtcccggtcaatgtccgagacagtcgtattcgctagaatggaacggtgacgagaacgatagttgtatcggggtttctcaagggccatgaatttttattcggaaggttccaacttttcttnggtccaattagnanncgggcgganattncgtggcccgtaattnttggntcccggnaaaggggnncctcatttggggnaaantttttcnggacctaagggggttncgggccactttttaaatttgnttnnaaactttnaattttttttnaatccccctttaaaaaagat

SEQ ID NO: 125944 - DNA, 838 bp, Arabidopsis thaliana
tctttctcctgaaccatggcggcggcaacaacaacaacaacaacatcttcttcgatctccttctccaccaaaccatctccttcctcctccaaatcaccattaccaatctccagattctccctcccattctccctaaaccccaacaaatcatcctcctcctcccgccgccgcggtatcaaatccagctctccctcctccatctccgccgtgctcaacacaaccaccaatgtcacaaccactccctctccaaccaaacctaccaaacccgaaacattcatctcccgattcgctccagatcaaccccgcaaaggcgctgatatcctcgtcgaagctttagaacgtcaaggcgtagaaaccgtattcgcttaccctggaggtgcatcaatggagattcaccaagccttaacccgctcttcctcaatccgtaacgtccttcctcgtcacgaacaaggaggtgtattcgcagcagaaggatacgctcgatcctcaggtaaaccaggtatctgtatagccacttcaggtcccggagctacaaatctcgttagcggattagccgatgcgttgttagatagtgttcctcttgtagcaatcacaggacaagtccctcgtcgtatgattggtacagatgcgtttcaagagactccgattgttgaggtaacgcgttcgattacgaagcataactatcttgtgatggatgttgaagatatccctaggattattgaggaagctttctttttagctacttctggtagacctggacctgttttggttgatgttcctaaagatattcaacaacagcttgcgattcctaattgggaacaagctatgagattacctg

SEQ ID NO: 125945 - DNA, 632 bp, Arabidopsis thaliana
atttactactactagtttgacaaacataaacacatttcccttattaacatttcttgttaaccacacaaagttaataagtaacccaagtttatacagttttaaaacattctctctatctccctccggctaggctgtagctgttcgccatgggagacgcagagagcacctccaaaactagcttgctgctcccggtggaaagagttgaaaacgtgacatggagagatctgcgagatggattattcaccgcagaactcaagaggcttatctgctttgccgctcctatggcggctgttgttatcgctcagttcatgttgcagatcatctcaatggtgatggttggtcacctcggaaatctctccctcgctagtgcctctctcgcctcctccttctgcaacgtcaccggcttcagcttcatcgtaggattgtcatgtgccttagatactttgagtggtcaagcttatggagctaagctatatcggaaagtaggagttcagacttacacagcaatgttctgtcttgcattagtgtggctccctctctctctcatttggttcaacatggaaaagcttcttttgatccttggccaagacccttctattgctcacgaagcccggaaatatgccacctggctt

SEQ ID NO: 125946 - DNA, 410 bp, Arabidopsis thaliana
cggacgcgtgggcggacgcgtgggcggacgcgtgttctttcaaactctctctcacaagccatgcaaggcgcggagagaaccaccggtgatccgttagacagaattgagaaagtgacatggagagatctgcaagacggatctttcaccgcagaactcaagaggcttatctgctttgcggctcctatggctgccgtggttatcattcagttcatgatacagataatctcaatggtgatggtgggtcacctcggtagactctccctcgctagcgcttccttcgcagtctccttctgtatacgtcactggcttcagctgcagtataggattgtcatgtgccttagatactttgagtggtcttgcttatggagctatgctatatcggaaactaggtgttcaagcttacacagcta

SEQ ID NO: 125947 - DNA, 722 bp, Arabidopsis thaliana
  unsure (1)..(722): unsure at all n locations
gcctgcaggtaccggtctcggattcccgggtcgacccacgcgtccgaagggactcgacttgggatccgacctgcaccggttgttgcatctttctctgcacgtggtcctaatccagagacgccggagattcttaaaccggatgtaatcgcacctggtttgaatattctagctgcttggcctgaccggattggtccatctggtgttacttctgataaccggagaactgagttcaacattttatcaggcacttcgatggcgtgccctcatgtttctggtctagctgctttgcttaaggcggctcatccggattggagccccgcggcgataagatcagcattgatgaccacggcttacacggttgataacagcggtgagccgatgatggatgagtccactggcaatacgtcttcggttacggattatggttcgggtcatgttcacccaaccagagctatggatccgggactagtctacgatataacatcttatgattatatcaacttcttgtgtaattctaactacactggaaccaacattgtgacgataacccgtcgccaagcggactgcgacggtgcgaggcgagcgggacacgtcgggaatttgaactacccgtcgttctctgtcgtgtttcagcagtatggagagagtaaaatgtcgacacatttcattaggactgtgacaaatgtangcgattcggattcggtttacgagattaagattag

SEQ ID NO: 125948 - DNA, 712 bp, Arabidopsis thaliana
cgccgttgccgacggtgtcgatgtcatctctctctccgttggaggcgtcgtggttccttattacctagacgctatcgctattggagcttttggagctattgacagaggcatattcgtctctgcttccgccggtaacggaggtcccggtgctttaacggtgacaaatgttgctccgtggatgacaacagtcggagctggaacaatcgatagggattttccggccaatgtgaaactcggtaacgggaagatgatttctggtgttagtgtatacggtggaccgggtctggatccgggtcgaatgtacccgcttgtttacggtggtagtttactaggctgcgatggttactcatcgtctctgtgtcttgaacgctcgttggatccgaatttagtgaagggaaagatcgttctttgtgatagaggaatcaattctagagcaaccaaaggtgagatcgtacggaaaaatggaggcttggggatgattatagcgaatggtgtgtttgacggtgaaggtttagtagctgattgccacgtgttaccggcgacatctgttggtgcttctggaggagatgagattcgtaggtatatctctgaatcatccaaatctcgttcatcgaaacatccaacggctacgattgttttcaaaggtacccgacttgggatccgacctgcaccggttgttgcatctttctctgctcgtggtcctaatccagag

SEQ ID NO: 125949 - DNA, 636 bp, Arabidopsis thaliana
tataggaaaagttggtacgcctgcaggttccggtccggaaattccagggtcgacccacgcgtccgtcgagtctcgatctcctctctcaatctcagtcttcagcttccaattgactttcaacatggcagatgatgaagttgttgatccaaagaagtaccttgaggaatcttgcaaaccaaaatgtgtgaagccacttctcgaatatcaggcatgtgtcaagagaatccaaggtgatgattctggccacaagcattgcactggccagtattttgactactggcaatgcattgacaaatgtgttgcaccaaagctgtttgcgaaactaaaatgaaaagaggtgaagctggagactctattgtcttgagtttgctacatgtggtttaaaattgatgtataaaatgcagtggatgttgaacttttttttactgcaaaccagattgccaaatggctctgcttcttggttttgtttccatcgcaagtttgcgcttactacatttttttgctacttgagtaattgcatggcctaataacaagatatgttgtgccgaaaaaaaaaaaaaaaaaaaaagaaaaaaaaaagggggccgcccgctctagaggatccaagcttacgtacgcgtgcatgcgacgtcatag

SEQ ID NO: 125950 - DNA, 752 bp, Arabidopsis thaliana
  unsure (1)..(752): unsure at all n locations
ccttatcttctacgcccgcttcttcagactgggcggccgggtccttcctctatttcttcttcttcttcttcggctcttcttcttctgctatcacttcctcctcttcgtcattagtatctccaccctgctgtagctttttatttttcttcttcttcttcttcggctcttcttctgctaccgcttcgtcctctccatcattaatatctccacgctacttatttttctccttcttcttcttcttcggttcttcggcaattaacgcattgttctctttggcatcaacccccccgtgcggttcttcttccttgcttcttcgagtctcgatctcctctctcaatctcagtcttcagcttccaattgactttcaacatggcagatgatgaagttgttgatccaaagaagtaccttgaggaatcttgcaaccaaaatgtgtgaagccacttctcgaatatcaggcatgtgtcaagagaatccaaggtgatgattctggccacaagcattgcactggccagtattttgactactgggcatgcattgacaaatgtgttgcaccanagctgtttgcgaaactaaaatgaaaagaggtgaagctggagactctattgtcttgagtttgctacatgtggtttaaaattgatgtataaaatgcaggggatgttgacctttttttactgcaaaccagattgcccaatggctctgcttcttaggttttgttttcatcggcaggtttgcgcttactacatttttttgct

SEQ ID NO: 125951 - DNA, 843 bp, Arabidopsis thaliana
  unsure (1)..(843): unsure at all n locations
acgcgcnnnnnnnnnnnnnnnnnnnnnnnnnnnnnnnnnnnnnnnnnnnnnnnnnnnnnnnnnnnnnnnnnnnnnnnccacgcgtccgctcattacggctgcgagttttgaagagctaagttcagctccaatcagttacatttctaggttagctaaatacagaaacgtcatcaaagaaggacttgaagcttctgagagagttcacatcgcgcaggtacgagcaaaaatgctcaaagaagttgccacggagaagcaaaccgccgtggacactcatttcgcaaccgctaaaaagcttgctcaagaaggagacgcgttgttcgttaaaatcttcgcaatcaagaaactgttggcgaaacttgaagcagagaaagaatctgttgatggaaagtttaaggagactgtgaaagaactttctcatcttctggctgatgcttctgaggcttacgaagagtatcatgggcgcggtgaggaaggcgaaagacgagcangcggctgaggaatttgcgaaagaggcgacgcaaagtgcagagatcatttgggttaagttcttagctctctttagagaacattggagattttggtgggggtagagcaatccaggagctcttgcgggccctggcaagatgggggggggagcggcccgcccgcggcgccgcggggcgccgggcgcgcgcggccgtcgggcgcgccggccgcgccgncggcggggcggcgggagggcgggggcgcgccgggggcgggaggcgggcgggcgagagcgcggcagggcggggctcccgcgcgcggggggggacggggccctcgcggcgcgcgagggtcgcgtcgcgcgctgcgggggggggt

SEQ ID NO: 125952 - DNA, 424 bp, Arabidopsis thaliana
  unsure (1)..(424): unsure at all n locations
aaactgttggcgaaacttgaagcagagaaagaatctgttgatggaaagtttaaggagactgtgaaaganctttctcatcttctggcngatgcttctnaggcttacgaagagtatcatggcgcggtgaggaaggcgaaagacgagcaagcggctgaggaatttncgaaagaggcgacgcaaagtgcagagatcatttgggttaagtttcttagttctctttagagaccaattgagattcttggttgtgttaagagcaaatctagagctcttgttggttcttgttatgtattttgtgatgatgttctgtttcagagtttgtgtgttggttgtatcaggagaaagaggctgggagatagagagaaacagagtctctgcgaaaactaaccctgtttttccagatatctaaataataagctttttgnat

SEQ ID NO: 125953 - DNA, 955 bp, Arabidopsis thaliana
tgatactccagctctctacgactcacatatatggaaagctggcacgcctgcaggtaccggtccggaattcccgggtcgacccacgcgtgcgggaaaaactaaaattactagagaaaacaagaatggctgcgaatctaaggaacaatgcgttcttgtcttctctcatgtttcttctcttgatcggttcatcatacgcaatcacaagttcagaaatgagcacaatctgtgacaaaaccttaaatccatctttctgtcttaagttcctcaatacgaaattcgcatcgcctaatcttcaagccttggcaaaaaccacacttgattctacacaagcgagagctacacaaacgttaaagaaactccaatctattatcgatggaggagtcgaccctcgatctaagttagcttacaggtcatgcgtagatgaatacgagagcgcgattggaaacctcgaggaagcttttgagcatttagcttcaggagatggtatggggatgaacatgaaagtttctgctgcattggatggagctgatacatgtttagatgatgtgaagagattgagatcagtagattcttcggttgtgaataacagtaaaacaattaagaatctttgtggtattgctcttgttatctctaacatgttaccacgtaattaatttgaaaatcttcatcatgtgtttgctctgattaattgtaattgtttgcaagaagacaaactaaattaatatacttctattataatgaagctttagtttgataatatccaacgtaacccatgccaatacaaaaaggcttcaaaaaatgtaatgattgataattaagtaattttgtttttgtagtattgtatgaaatattgtttaaatctttcaaagaaaaaaaaaaaaaaaggacggccgctctagaggatccaagcttacgtacgcgtgcatgcgacgtcaaagctcttctataagtcccc

SEQ ID NO: 125954 - DNA, 1176 bp, Arabidopsis thaliana
  unsure (1)..(1176): unsure at all n locations
cttatatccttcttaattctacaaaatatatccttctattccaccaccctttaccccattacacccacccattctactactctaccctcttatctacatctcctccattcttacttactcccttcccccaccacatacaaaatgaatttgcgttcgctgtaccgctccggaattcccggctcgaccttctctctctagatcttttagagagaggaagtttctgatgctcaaacttggctccgacaatagccagcttttttagtggtgttggttggcttccttctggcgtcgttagctcctttagcaacgtcggctagcttttctccgacatcggtggtttctttagcaccgttggtcggcttcgttcttcaaatttagtttttgcctttcaaccttgttcgattctattttgcttcggttttaattggttttgatttctctttctcttcatttcgatctaaatttgtaatttttcgatcctcccttctttaaggggcttaatttgttcttcaagcttattgagttttcattttaaaagatcaaatttttagttacggattgaagtttaatttagtgtcttttgtttgatttgatgaaattagagctgttgtttgtctttcttgttgccgatgcttgttgaatcgtttgggtttatgttgtttttcctttaaatggcagaagtcgaagtcgatagtttgtgagctatttctttcttgaaggttttaaattttacagtcattgtcacagaagatttgtcaattgtctcatcggatttgtagctgcttccgatttggcgtttacagcaattccggtgaacgaaagttttttgtggttatgattctccacctgcgacattctgcaactcatcatcttctgtttccacgtgtcctctttaccgtgtctctagtgccatgtgggctttgacttattagcacattagctttctcttcttcagaaggtggtctttgggcttttgtccgtttatggcctgttatatggctttgtaaaatatggcttgttaaaaggctttgtaatataaataataaaacagttgtgacaaaaaaaaaaataaataagggcggccnnnnnnnnnnnnnnnnnnnnnnnnnnnnnnnnnnnnnnnnnnnnnnnnnnnnnnnnnnnnnnnnnnnnnnnnnnnnnnnnnnnnggcagctg

SEQ ID NO: 125955 - DNA, 617 bp, Arabidopsis thaliana
  unsure (1)..(617): unsure at all n locations
atgttttaggtgcactatagaagactatgacgtcgcatgcacgcgtacgtaagctcggaattcggctcgagaggactttctgtgtcttctctctctagatcttttagagagaggaagtttctgatgctcaaacttggctccgacaatagccagcttttttagtggtgttggttggcttccttctggcgtcgttagctcctttagcaacgtcggctagcttttctccgacatcggtggtttcttgggcaccgttggtcggcttccttcttcaaatttagtttttgcctttcaaccttgttcgattctattttgcttcggttttaattggttttgatttctctttctcttcatttcgatctaaatttgtaatttttcgatcctcccttctttaagggggcttaatttgttcttcaagcttattgagttttcattttaaaaggtcaattttttaggtacggattgaagtttaatttagggccttttggtttgatttaatgaaattagggctgtngttngcttnctgtgccgntncttttgaancggttngggtaaggtggnttcccntaaatgcagagccgagcggnggttnangcattcttcttaaggttaaatnnctc

SEQ ID NO: 125956 - DNA, 651 bp, Arabidopsis thaliana
atgatcttttagtttttttttgtttcccccaaatctcactttttctcacttgctctccatctcaaatttcacacaaccgagtaaaccctagaatctccgcttctcattcaattggtttcatcactggtcttaatcattgctagggtttactcggttacctttatcatcatcaattgatccttgttcataattcatcctcttttctttctgtctttggcataaagtttcaatttttcttcttcttctctttctcactcaatcatggcgtatcagcctgttccgggttctgggtttcactacttgaactctcctttcggtgatacaactttcacaaaggtgttcgtcggtggtcttgcttgggaaactcaaagtgaaactcttcgccagcatttcgaacagtacggtgaaatccttgaagctgttgtcattgctgataagaacactggtcgatccaaaggatatggctttgtgacattccgagatccagaagctgctaggagagcttgtgctgaccctacgccgattatagacggtagacgtgcaaactgtaatcttgcttcccttgggagacctcggcctccattgccctatgcagtgatacctaacatgcctggacgcttaagacctgcttccccgtacattggaaatgtg

SEQ ID NO: 125957 - DNA, 563 bp, Arabidopsis thaliana
  unsure (1)..(563): unsure at all n locations
nnnnnnnnnnnnnnnnnnnnnnnnnnnnnnnnnnnnnnnnnnnnnnnnnnnnnnnnnnnnnnnnnnnnnnnnnnnnnnnnnnccacgcgtgcgcgcaaacgattcgattgtgatttcggggaaagaagtagatgacaagatcgtgctggttttactcagcttggtaacggttttggcattggtatatacagatgtgggcgaaaacgttctggtttcgctgatcattggtttgctcatcgtcggagctcacggcgcttttcgtaataccgatgatttgtttcttgatgaagaaagtgctcgccgtggtggcctggtgtctgccggttctggtaaccggccaccgtcgagttataccccaatttgagtaaaccggtttggagaattactcgtaatttcttgggtttttgattgaagaagctaagggaatcaatttagggctttgtattttggatttcccaaagattcttgtatttatattttggcgtgtgtgtttcattttgtttgaatgtatacaaattttgggaaaaaacaaattggtgttatggtattttatagaattgccc

SEQ ID NO: 125958 - DNA, 550 bp, Arabidopsis thaliana
tcagctctaatacgactcactataggaagctggtacgcctgcaggtaccggtccggaattcccgggtcgacccacgcgtcataagagagtctaaacactgtggtagaaaaaaatatagacttttagatatgtgtagtaaaataacattagtgttaactttattttccagttatttcatatcaacagatgctgtgaatggatcatttcctgcgcttttggcttttggagattcaattctcgatactggcaacaacaattttctcctgacttttatgaaaggaaatatctggccatatggaaggagtttcagcatgagaagggcgacaggaagatttggaaatggaagagttttctctgatatagttgctgaaggtttagggatcaagaagattttaccagcttatcgtaagttgttcaattctccaagtgaccttagaactggtgtttgcttcgcatcaggtggtgcaggagttgaccctgttacatccaaattgctgagagttttaacgccaaaggatcaagtaaacgatttcaaagggtacataagaaa

SEQ ID NO: 125959 - DNA, 593 bp, Arabidopsis thaliana
  unsure (1)..(593): unsure at all n locations
tctccatcatgagatcggtggtaaagaccaagagtgtagagtttatgcccttctttttgtcactctttgtcttcctctgtgggacttcgtggttcgtctatggtctaatcggtcgtgacccctttgttgcaatcccaaatgggtttggatgtgcattagggaccctgccattgatactatacttcatctactgtgggaacaaaggagagaaatctgcagatgctcagaaagatgagaagtcagtggagatgaaagatgattagaagaacccgaatgtggtttatggaaagccagaccttccagtttaaaagagcttttgaggatgatttggttatgtgatttcgtattaactctgcttaactagaggtttccttttcgtttcgttggaatgtaaaaaaaatgatgctgaaaaatggaacggttcctagtttcggtctgataccctagtgattgatgaagaatgacgatgccctttgtggnnnnnnnnnnnnnnnnnnnnnnnnnnnnnnnnnnnnnnnnnnnnnnnnnnnnnnnnnnnnnnnnnnnnnnnnnnnnnnnnnnnnnnnnnnnnnnnnnnnnnnnnnnnnnnnnnn

SEQ ID NO: 125960 - DNA, 750 bp, Arabidopsis thaliana
cttcttttgattttatctatccgccatgaacgagaaagccaacgtctctaaggagcttaatgcccgccatagaaagattcttgaagggcttcttaaacatccagagaacagagaatgtgctgactgcaaaacaaaaggtccaagatgggctagtgttaatttaggtatctttatctgcatgcaatgttctgggattcacaggagtctcggggtacacatatcgaaggttcgatctgccactctggacacatggctccccgagcaggttgcatttatacagtcaatgggaaatgataaagcaaatagttactgggaagcagagctacccccaaactatgatagagttggaattgagaattttatacgtgcaaagtatgaagagaagagatgggtttctagaggggaaaaggctagatcacctcctagagtcgagcaggaacggcggaaatctgtggagagaagtgggccgggatatgagcatggacatagtagtagtcctgtaaatttgtttgaggagaggaaaactattccagcatctagaacaagaaataatgttgctgcaacgagaataaatcttcccgtgcctccccaaggacccagtcaggttataaagccacagcagaaaatggagtctgcagctactccagtagagagggagaaacaagcagtaaatgttgcaccagcatcagatccttcaaaggtggattttgctactgatctgtttaacatgctatcaatggatgattcgac

SEQ ID NO: 125961 - DNA, 607 bp, Arabidopsis thaliana
cttcgttaatggacaccttgggcaagttaagattggtgacctgggcttagctgcaattcttcgtggatcacagaatgcgcacagcgtcataggaacgcctgaatttatggcaccagagctatatgaagaagattacaacgagcttgtagacatttattcgtttggtatgtgtgtcctagagatgcttaccggtgagtatccttatagtgaatgcaccaaccctgcccaaatatacaagaaagttacatcggggaagttgcctgactcattccatctaatccaacacacggaggcccaacgttttgttggtaaatgcttggaaactgtgtcaagaagattgcctgcaaaggagctcttagcggacccattccttgccgcaactgatgagagagatttggcgcctctttttagattgccgcaacaattggcaatccagaatttggctgcaaatggaacggtggtagagcatctgccgtcaacgactgatccaactagaacaacagatatgtcaataacaggaaagatgaactcagaagaccacaccatcttccttcaagtacagattctagatggcgatggtcacatgaggaacattcagttcccgttc

SEQ ID NO: 125962 - DNA, 872 bp, Arabidopsis thaliana
  unsure (1)..(872): unsure at all n locations
atgatatnnnnnnnnnnnnnnnnnnnnnnnnnnnnnnnnnnnnnnnnnnnnnnnnnnnnnnnnnnnnnnnnnnnnnnnnnnnccacgcgtccgcccacgcgtccgcggacgcgtgggtttacatctgacgactagaaaagtaggtagattatgaatctttctgggtttgtagtgagtttataggaaattcctttgtctagtgttccaaaatttgagtagatcttgaacaactttgcaaatcttgttgatcgatatgtttgggaattgaaaatttactagattttgaatttctgaggttttgtgtaagcagttgaatgaagcagtaggtggttgagtcatgtttggtctgtgatgtcctgtcacacgcatcacatgaaccttggctttggatttaacggccgttgttagtattaggctaattattaacatggcttttgttcattgtagttaattttcacagagtaaagagattttgatacattggacccaaagtgcaattttcaaaaatgtttcgctggaagaattcttctcaaaccgaacaagagcagaaagaggcagctctcagagaggcaaagatgaaagagcttaagactctcataggtcagctttctggaaggaattcactgtattgttcagatgcatgtctgaagagatatctggaagctaggaattggaatgtaggcaaagccaagaagatgctcgaggagacgctcaaatggagatcgagttttaaacccgaggaaatccgatggaatgaagtttcaggtgaaggtgagactggtaaggtttacaaagctggattccatgacaggcatggaagaacggttcttatactgagacccggcttgcagaacacaaaatcggtggagaac

SEQ ID NO: 125963 - DNA, 745 bp, Arabidopsis thaliana
  unsure (1)..(745): unsure at all n locations
gcggtaccggtttgngattcccgggtcgacccacgcgtccgtgcatgtcacttaacaccgagcagttgcagaatctatgtgataaaatgggaaacaaagaaggactagaattggcaaaggtgatcaaagatggatgcaacagtagtagaaatgatgaagccgaatctaaagaaaaagaaagtaagaagaccaacggtggcacagagcctacaacccgagtttcacagttagatagtagcactcagaagaaacaaccatggagcaaggaagagattgatatgctgagaaaaggaatgataaaatatccaaaggggacatcgcggagatgggaagttatttcagagtacattggtacaggaagatctgtagaggaaattctgaaagcaactaaaacagttctcctgcaaaaaccagattcagctaaagcattcgattctttcctcgagaagaggaaaccctctgcttcaatcacatcccctctctccacaagagaggagctcggagaatctctacccacaatgacgaccacaacaaatgcaaagccctctaaagagactgttggggggaaaagcttgagcagtcaaagctcagacaacaatggtgaagtaggtggaaggttcaaacgcagatagttgggtcgactgtgcaaagaaaaaagcttttggttccaagccttttaaaagaacttttccccgaaaggagacacaagccccaaagatgggggagtagaagtaagccttgcaag

SEQ ID NO: 125964 - DNA, 639 bp, Arabidopsis thaliana
  unsure (1)..(639): unsure at all n locations
aagaggaaaccctctgcttcaatcacatcccctctctccacaagagaggagctcggagaatctctacccacaatgacgaccacaacaaatgcaaagccctctaaagagactgttgtggggaaaagctcgagcagtcaaagctcagacaacaatggtgaagtaggtggaagttcagacgcagatagttggtcgactgtgcaagaaagagctttggttcaagctttaaagacattcccgaaagagacaagccaaagatgggagagagtagctgcagctgtccctggtaaaacgatgaaccaatgcaagaagaagtttgcagagcttaaggaaatcattagaaacaagaaaaccggagtatgaggtaaaatcatttcggagtcccatgagaattttgggttttaatcctcttggggcaccgttactttgcgagaagcaagacctaaaacttttttattatttgtaatgattcatttccctttgatgtctctatatattgagagtgctggaagccactattatggagtatgttgtttttacataatcttatgtaaaaaaaaaaaaaaaaaaaagggcgcgccgctctagaggatccaagcttangacgcgtgcatgcgacgtcatagctcttctatagtgtca

SEQ ID NO: 125965 - DNA, 508 bp, Arabidopsis thaliana
  unsure (1)..(508): unsure at all n locations
anatgccccccccattcaaccccttagggctttngggaaacccggccntcaagcncngcacattgtgaattagtggactcccccccagtggtggctcgactgtgccagaaagagctttgggtccagcttttaagacattcccgaaagagaccagcccaaggttgggagagagtagctgcagctgtccctggtaaaccgatgaaccaatgcaagaagaagtttgcagagcttaaggaaatcattagaaacaagaaaaccggagtatgaggtaaaatcatttcggagtcccatgagaattttgggttttaatcctcttggggcaccgttactttgcgagaagcaagacctaaaacttttttattatttgtaatgattcatttccctttgatgtctctatatattgagagtgctggagccactattatggagtatgtttttcttttacataatcttatgtaacgtttgattagcgtctagtttcaagttgtgaaataaagcgcgtcgctcc

SEQ ID NO: 125966 - DNA, 627 bp, Arabidopsis thaliana
  unsure (1)..(627): unsure at all n locations
nnnnnnnnnnnnnnnnnnnnnnnnnnnnnnnnnnnnnnnnnnnnnnnnnnnnnnnnnnnnnnnnnnnnnnccacgcgtccggaatctttagattcgatttctcactcggagctactttgaattggaatctttagattcgtcactctcaatttctgtcctgcgtttttcagatctgggggaatctccgaatttggaattggaaaattcacagatgtcgaaaccttggggtggaatcggcgcatgggctgatgaggctgagcgtgccgatgaagagcaagctgctgaagctacagccacggcggcagattcacagagtttcccgagtctgaaagaggctgcgactgctaagtcttctaagaagaagaagaagatgactttatcggagtttaccaaaggagcatacactgctccgagttctgctggattgacgagagagcagatgcttcagctacctactggtccaagacaacgttctgaggatgaaatgcaacctggtcgtctcgggggtggattctcttcttatggtggaggaaggtctagtggacctccgggaagaatgtcacgagatcgagaggattctgatgggtcttggggcggtggtggtggtgggaagagatcttatggggg

SEQ ID NO: 125967 - DNA, 690 bp, Arabidopsis thaliana
gacgacccacgcgtccgaagaaaagcacaattttggcgaaacccagtgagagagagacagagagaaaggagggaaattccagcttcccttttctctctcgttcttgctcttttgatctgcgtgaaaagaaagaatttttattttcccgacagagaaaagtcccaatttttaaaattaggactttttgattttcgaaaattttggtgttaatggaaacagatagtatcgattccgtgatcgatgacgatgagatccatcaaaaacaccaattctcatcaaccaagtctcagggaggagccaccgtggtaatctctccggctacaagcgtttacgagctccttgaatgccctgtctgcaccaattcaatgtacccaccaatccatcaggggcttcatggtcttgctcaatacttttgtcttcattttgaagcgtttcagctcggtatggctccagtttacatggcgtttctgagattcatgggcgatgaaaatgacgcacgaaactatacatacagtttagaagttggaggcagtgggagaaaacagacatgggaagggacaccaagaagtgtcagagatagtcacaggaaagtcagagaccgtcatgacggtcttataatccaaagaaacatggcactcttcttttccggtggagaaccagaaagaactggaacttagagtcactgggaag

SEQ ID NO: 125968 - DNA, 450 bp, Arabidopsis thaliana
  unsure (1)..(450): unsure at all n locations
nnnnnnnnnnnnnnnnnnnnnnnnnnnnnnnnnnnnnnnnnnnnnnnnnnnnnnnnnnnnnnnnnnnnnnccacgcgtncagccacgcgtccagaatttttaaaattaggactttttgattttcgaaaattttggtgttaatggaaacagatagtatcgattccgtgatcgatgacgatgagatccatcaaaaacaccaattctcatcaaccaagtctcagggaggagccaccgtggtaatctctccggctacaagcgtttacgagctccttgaatgccctgtctgcaccaattcaatgtacccaccaatccatcagtgtcataatggacatactttatgttcaacctgtaaatcaagagtgcataatcgctcttgggaaagtacctgagtcgcttgagttaccgtgcaagtattacaatcttggatgccttggggattttcccttatta

SEQ ID NO: 125969 - DNA, 478 bp, Arabidopsis thaliana
ctggtcagccatctttgtgatccacttgatttgtttgggatttgtgctcgcggtgcttggactcaataggtttagaatatcagataggttaaacatcgataggtacactcaagggttcttggagaatcataaaggtctaacagaggattactggcctctctatgctgttgctggtggcattggagtctttatcagttgggtttggtcattgctgcttggctcttacgccaatgagatgatgaaagtttcggttcacatcttaacaacctatctagctgtagttagtgtactatgtttctggtgcagactgttcttttggggcggtgcattcgctgttggatctctgttgcagttcttgtatgttatttcagttatagacagacttcctttcacaatgctggtcctacggaaagcgctgaaattagtctggggacttcctaaggtgataatggtggcacatgctttcacagtagtcatg

SEQ ID NO: 125970 - DNA, 555 bp, Arabidopsis thaliana
cggggcgacccacaccttccgcgaccccgtggttttggcttctctcttccaatcatccttcaagctcatctttttcttctacccaataacgaaagtctcctcctttactaatgggttgcttcagcagtaaacaccggaaaactcaaaacgacggcggagaaaaatcaatcccgatcaatccagttcaaacccatgtagtccccgagcatcgtaaacctcaaaccccaacaccaaaacccatgactcacccaatccatcagcagatttcaacaccgtcttcaaatccagtctcagttcgagatccagatacgattttaggtaaacccttcgaagacatcaggaaattttacagcttggggaaagaattaggtcgaggtcaatttgggattacgtatatgtgtaaagagattggtactgggaacacttatgcttgcaaatcgggtcttaagaggaagctaattagtaagcaagataaagaagatgtgaagagagagattcagataatgcagtatttgtctggacaacctaacaatgttgagatcaaaggtgcttatg

SEQ ID NO: 125971 - DNA, 361 bp, Arabidopsis thaliana
tcagcttcaaagccctaactctgaatcgtcgtcctcaaaccaaaatcgcgagtctctgaagtaagaagattgattcatctatggcggatgttgagaatcaacaggattcttcgtttcctgtgaagcgaaaatcggatctgttttgtcaagaccaggataatgtgacaaacaaggctcagaagcttaatccttcattgaattctgctgattctgagtccaaagacggagaaactaatggaagtggccaaatcgagaatctgaattcttccaccgaggaaacgattggagcataatcatcggttttatcggagaaagcatctgaagaggttgagagtggcgtaatcggcgatgttggagctga

SEQ ID NO: 125972 - DNA, 531 bp, Arabidopsis thaliana
  unsure (1)..(531): unsure at all n locations
nnnnnnnnnnnnnnnnnnnnnnnnnnnnnnnnnnnnnnnnnnnnnnnnnnnnnnnnnnnnnnnnnnnnnnnnnnnnnnccacgcgtccgcccacgcgtccgcttagatttcatgggttggtaagaatcaatcaatttgggaggtggagtatagtacaagtacttcaatttgcattgaaccctcacattgaatcatctgatttgcagaaaaaggagatctctttatgtaaaagtctctgagaattttggtttaaagagaggattttacggagatgggtttgttggaatcggtgaaatcaatcaactgggaacatgaatcatctccggtttatcaggattttcgagttcttcctctcttcgctgngttcttcccttcgattgagtttctcctgggtacattgcgggtggacaaattgggggagtattgggtctatcgggagacatggcaggggatgtggggtgagacccagggaggtaacggagggacgccggggaagcggccggatcggcgagtggacggggggaggctggg

SEQ ID NO: 125973 - DNA, 405 bp, Arabidopsis thaliana
gatgatgattttaaatttcccttttcgaatatattcgtttaattgtctctttatataattaacagtttttgttaatgggaatcgcaggtaacgattgagaagaatctctcgtttctccactgagagaatcacattctgagagatcagacaagaagaaacaatggtggaaggaggaattgcgaaagcagacaaaacagagttcacagagtgttggagaacaacatggaagacaccttacatcatgcgacttgctctctccgccggaatcggaggtcttctcttcggttacgataccggagtcatttccggagctcttcttttcatcaaagaagattttgatgaagttgataagaaaacatggcttcagtcaactattgttagtatggcagtggctggagccatcgt

SEQ ID NO: 125974 - DNA, 889 bp, Arabidopsis thaliana
  unsure (1)..(889): unsure at all n locations
nnnnnnnnnnnnnnnnnnnnnnnnnnnnnnnnnnnnnnnnnnnnnnnnnnnnnnnnnnnnnnnnnngcgccacgcgtccgcggacgcgtgggcggacgcgtgggcggcgatggaggcggtggttttgttattccggcgaagaggaagatccagtatagttcgatggttgtggttgcggcggcgggacagagtcggtgtgagcctggaagcagtctaaacgcgccgcttgagccacgatcggcgcaggggaggtttctgagaagcgtgttgctaaacaaacggcagctatttcattacgccgccgctgatgagctaaagcaactggctgatgatagggaagctgctttagctcgtatgtctctcagctctggctccgatgaggcttctctccacagaaggatagctgaactcaaggaacgctactgtaaaactgcagtccaagacataatgtacatgttaatcttttacaaatactccgagataagagtccctcttggtccaaagctatccagatgcatctataatggaagactcgagatctggcctttcaaagactgggagttagaggcaatttacagttgcgatacccttgagatcatcaaagaacacgtagcccagtcatcggattacgggtcaactatgggtgactgacaattgggcacaacgcagatcagaaacggatttaagaaagatatgcggcttgattttgacggtacttctgaaaaagctccctaaggccacttgggggtccttaaaatattatggagcggtttcgaaaggccatcttggaggctttccaacggcccggcagattcaacagcggggtggaattacttcaatttgtccggaattggagatggaaaacaggcaggggggggattcttgaaca

SEQ ID NO: 125975 - DNA, 831 bp, Arabidopsis thaliana
  unsure (1)..(831): unsure at all n locations
nnnnnnnnnnnnnnnnnnnnnnnnnnnnnnnnnnnnnnnnnnnnnnnnnnnnnnnnnnnnnnnnnnnnnnnnnnnnnnnnnnnccacgcgtccgcactaatccgctaaatcattcttcttcatctctctctcattcacaattcccgaaattctctcaaatcacagatccttttagggtttttccactgtttctaggttttttttattgctcaaatctgatcaatggatagttgtctctctaatcaaacggcgcttcagtttctcccgtcgcgttccaggagacagagcggcgatggaggcggtggttttgttattccggcgaagaggaagatccagtatagttcgatggttgtggttgcggcggcgggacagagtcggtgtgagcctggaagcagtctaaacgcgccgcttgagccacgatcggcgcaggggaggtttctgagaagcgtgttgctaaacaaacggcagctatttcattacgccgccgctgatgagctaaagcaactggctgatgatagggaagctgctttagctcgtatgtctctcagctctggttccgatgaggcttctctccacagaaggatagctgaactcaaggaacgctactgttaaactgcagtccaagacataatgtacatgttaatcttttacaatactccgagataagagtccctcttgttccaagctatccagatgcatctataatggaagactcgagatctggccttaanagactgggagttagagtcaatttacagctgcgatcccttgagatcatcaaagaacacgtagcgcagtcatcggattacgggtcaactcatgtgtgactga

SEQ ID NO: 125976 - DNA, 563 bp, Arabidopsis thaliana
  unsure (1)..(563): unsure at all n locations
nnnnnnnnnnnnnnnnnnnnnnnnnnnnnnnnnnnnnnnnnnnnnnnnnnnnnnnnnnnnnnnnccacgcgtccgctctgcgtttctttctcggggaaaaataatatctgagaagaagattcgagagagagagatctgaacggtttttcgcttagtctccaatgggaacgctacagtcatggcgaagagcttacggagccttaaaagacaccaccaaagtcggccttgtccgagtcaatagcgattacgccgaattagatgttgccatagtgaaggctactaaccatgtcgagtgtcctcccaaagatcgtcatctcaggaaaattttcctcgcaacgtcagcgattaggcctcgagcagatgttgcttactgcattcatgctctctcccgacgattacacaaaaccagaaattggacggttgcattaaaagcactgctagttatacaccggcttctgagggatggtgatccgacatttagagaggagctattgaatttttcgcaaaaaggacgcattatgcaaatttctaatttcaaggatgactctagcccagtcgcatgg

SEQ ID NO: 125977 - DNA, 537 bp, Arabidopsis thaliana
  unsure (1)..(537): unsure at all n locations
nnnnnnnnnnnnnnnnnnnnnnnnnnnnnnnnnnnnnnnnnnnnnnnnnnnnnnnnnnnnnnnnnnnnnccacgcgtccgctcattttacttatctgaagttcgtctacgatggaggaagagaaggtgagggttcgtctggtgtttgaagaccgacggattctgagtaagtatcaaaagaagcaaggtttaacacggagctgggttgttctaaatcgtaaatgtcaccgaactatatcagagttttctgatcatatctttcacacatttagcctctgtgaagcgtgtcctcatggcctctctctatctatggaaggtttcgttttgccacctttcgagtccagctgtgtattgaaggataaagatatcgtttgtgttaagaagaagaaagagtctttgttggagattgttggggaagacagtgatgagaatgtttacaacgctattgaggttgaggaaaggcctcagattcgtcctggtgaaatgctgcttgctaatgaggaattccagaaggaaactgnaggatatgaaagtgagt

SEQ ID NO: 125978 - DNA, 756 bp, Arabidopsis thaliana
  unsure (1)..(756): unsure at all n locations
ccataatttaaattgtggggatggtctaagacctcacgctcccatatgaggcccaccccccaagggctttgaccccctattattgcctcaccgggcttgtaatgtttgtgagggaaatgggaatcgacannnnnnnnnnnnnnnnnnnnnnnnnnnnnnnnnnnnnnnnnnnnnnnnnnnnnnnnnnnnnnnnnnnnnnnnnnnnnnnnnnnnnnnnnnnnnnnnnnnnnnnnnnggcccctttccacgcgtctgaaagagccgaccccccgcttttatcccactggacccgcattgatgatgggaagaaagtggcaacggatgaatttgtattacacaaccagtactggggaaagaacattcgacggagaaagcttaagaagcattatatcaggagtgttgttggtggctggatcgccacttaattcactaagtctgcctcatgctttgtatcaaagtgtgtgaggatattcttttaactcggaacttattacttaatttgatgttaaatctctttcccgcttaagttttcagcaatctggaatatgaagggaattatgtattcttatcagtcttttgatgaagtgaggtctacttctgggattatgcatttggtgaataatgtattccttagacctggtgctaaggaattgtttcacatgggggttgagtaaggaaaaaacgaacgcatagggcggccgctctagaggatcccagcttacgcacgcgtgcatgcgacgtcaagctcgtcttgtc

SEQ ID NO: 125979 - DNA, 1796 bp, Arabidopsis thaliana
  unsure (1)..(1796): unsure at all n locations
cgggcttattaatgtcatcgagacgataatctcttatttgtcatctccttcatctctcaggtaaaaaaactgagtcgagatttggtgacgtgatgaatcatttggtgataatctctgtgttcttgagctcagtattgttgttatatagaggagaatctggaatcacaagtagttttattcgatctgaatggcctgcggttgatataccacttgatcatcatgttttcaaagtcccaaaaggatataatgcaccacaacaagtacacataactcaaggtgattatgatggtaaagctgttatcatctcttgggttacacctgatgaacctggttctagccaagtacattacggtgcggttcaggggaaatatgagtttgttgctcaagggacttaccataactacacgttttacaagtataagtctggctttattcatcactgccttgtctctgaccttgagcatgatacaaaatactattacaagattgaaagcggtgaatcttctcgagagttttggtttgttacaccaccacatgtacatccagatgcttcctacaagtttggtattataggcgatatgggtcagacattcaactcgttatccacgttggaacattacatggagagtggagctcaggctgttttatttcttggagatctttcttatgctgatagatatcagtataatgacgttggtgtgagatgggatagctggggtcgttttgtggagcgtagtaccgcttatcaaccgtggctttggtctgcaggaaatcatgaagtagattacatgccatacatgggggaggtgacacctttcaggaattaccttcagcgttacactacgccttacttagcctcaaaaagtagcagtcctctttggtacgctgttaggcgtgcatctgctcatatcattgtcctctccagctattcgccttttgtgaagtataccccgcaatggcactggcttagtgaagagcttacaagagttgatagggagaaaacaccttggctaattgttttgatgcacgtcccaatatacaacagtaatgaagcacatttcatggagggtgaaagcatgcgagcagcttttgaggagtggtttgtccaacacaaagttgatgtaatctttgctgggcatgttcatgcctacgagagatcgtaccgaatatcaaatgtgcggtataacgtgtcaagcggagatcgttacccagttccagataagtcagcgcctgtttatatcacagttggagacggaggaaatcaagaaggtctggctggaaggtttacggaaccacagccagattattctgcatttcgggaagctagctatggccactctactctggatataaagaaccgaacacacgctatataccactggaaccgcaatgatgatgggaagaaagtggcaacggatgaatttgtattacacaaccagtactggggaaagaacattcgacggagaaagcttaagaagcattatatcaggagtgttgttggtggctggatcgccacttaattcactaagtctgcctcatgctttgtatcaaagtgtgtgaggatattcttttaactcggaacttattacttaatttgatgttaaatctctttcccgcttaagttttcagcaatctggaatatgaagggaattatgtattcttatcagtcttttgatgaagtgaggtctacttctgggaaaaaaaaaaaaaaaagnnnnnnnnnnnnnnnnnnnnnnnnnnnnnnnnnnnnnnnnnnnnnnnnnnnnnnnnnnnnnnnnnnnnnnnnntagaaatcg

SEQ ID NO: 125980 - DNA, 405 bp, Arabidopsis thaliana
tagactcgattcgtgcgactcgggaagactaggctcgtttaaaggttcacgcttttgatatttcgagctcctagagacctagactctagtcctgaggctgattggtagaggaaattggaaaagcttggattgaaaactatggaagcgaagaaagtgacagaagaggaagaagagacgtggaggagagagatagtaacaagcgttatgagattagtgagtacgagattgcctcagacagatctaatttctctacttctggttagcccatggctttatcgcaccctcatctcctatccttcaatctggctgaccatcaatttgcgcgagatgaccaatgcaggggatcggcttttagctgctctgtccttgccaagatatcgacaagtgaagcatatcaatcttgaa

SEQ ID NO: 125981 - DNA, 785 bp, Arabidopsis thaliana
  unsure (1)..(785): unsure at all n locations
ccgcatatatctgtaagtctccaatcattcactcacgatattctctttcttatcttttngatctcaacgcgcgtgattttttctcctcaacttctccacgtctctttngctcagatccagaaatccccgccgctagtgctcttggtctcgggaaacgaaaacgtggtcctggtgtttccggtggtaaacaaacgaaacgccgatctcgagtttctaataagaaatctcaaaccacgtttataacggcggacgctgctaatttccggcagatggttcaacaagtcaccggagctaagttcctcggttcttccaacagcattttcgcaccgattgtgaagccggagccacaccgtctcgctagtagattaccaccgtcgtgcggaaacttggaccgatcttcagctgttccaacgctagatacgtcgtcgtttttgtctaaccatcaccaagagaacattatcacagatttgggagctccgaccggttcgtttcatcatcaatccagtgcaggtacaacgacggcgaacgttggtggtggtagctccgccgtggaattggatagttacccgagcttcccaacactcgaatcatggaaagttatgtgatcgatctgattttaagattagtgtttatgtagagatgtaatcccttttgtttttttcctttgtgtttctcattttgttatgaagaatcttgtttaagtcaaaaaaaaaaaaaaaaagggcggccgctctagaggatccaagcttacgtacgcgtgcatcgacgtcatagctgttctatag

SEQ ID NO: 125982 - DNA, 598 bp, Arabidopsis thaliana
  unsure (1)..(598): unsure at all n locations
taggtacaactatagaagagttatgacgtcgcctgcacgcgtacgtaagctcggaattcggctcgagcacattcctttactcactctctctctctctctaaaaacagagctcaacaataatgatccactaaaaaagattctcttttctcttcttctccggtgatttacttacttaacaatcatggcgtcgtcggagggattagcaagcgttgatccttggtcattccgtcaaaacttcaacatcgattcgtggctactctctgattccttctcacacgacagtgatatactcgctaaagctcttcacagatccatctccacttccaccgaatcatctcctctttctccttcatctttcttcgactcttcaaccgccgccgtcgatttttctcctcctcaaactctctccaacgtctctttcggctcagatccagaaatccccgccgctagtgctcttggtctcgggaaacgaaaacgtggtcctggtgtttccggtggtaaacaaacgaaacgccgatctcgagtttctaataggagttctcaaaccaggttttaacgggggaggggtaaattccggaanngggtnaaaaggaccggg

SEQ ID NO: 125983 - DNA, 528 bp, Arabidopsis thaliana
  unsure (1)..(528): unsure at all n locations
attacccccgtggggcggaaacttggaccgatcttcagctgttccaagcctaaatacgtcgtcggttttgtctacccatcaccaagagaacatttccacagatttgggagctccgcccggttcgtttcatcatcaatccagtgcaggtacaacgccggcgaacgttggtggtggtagctccgccgtggaattggatagttacccgagcttcccaacactcgaatcatggaaagttatgtgatcgatctgattttaagattagtgtttatgtagagatgtaatcccttttgtttttttcctttgtgtttctcattttgttatgaagaatcttgttttagtccttaagcttatgcagctatggagtctcttgttcatacttttggggaaatcaaatggtttattggaaaaaaaaaaaaaaaaaaaaaaagggcgaacaannnnnnnnnnnnnnnnnnnnnnnnnnnnnnnnnnnnnnnnnnnnnnnnnnnnnnnnnnnnnnnnnnnnnnnnnnnnnnnnnnnnnnnnngg

SEQ ID NO: 125984 - DNA, 299 bp, Arabidopsis thaliana
gataactaacgaagctgtagctacctcctctctcaacgtatggcccggaagaagatcagagagtatgactcaaagagactggtgaaagaacacttcaaaagactctctggtcaagaactgcctatcagatccgttcagattaacgcaagagactgatctaaatgagctagtagagagagagccttggttctcatctgcagaagcttgtggtgaaacctgatatgttgttcggaaagcgtggcacaagcggtttggttgcaatgaacttagatatcgctgatgttgcaactttcgtgaaa

SEQ ID NO: 125985 - DNA, 1004 bp, Arabidopsis thaliana
  unsure (1)..(1004): unsure at all n locations
agcatcttcagattctttcaccgtaaatctaagaaaggttctgtgtttagggttctggttctgggaagctcgttctcaccggaaaaccgaagaatatgatcggagtcgggaaaatgaaacagtactccaacgtccttgacaagcctctcagcaaaggcaagcaagaggtgagcttgaccgcatttgctttcttattctcggagctcgttcagtacaatcaaacccaggttgacaatatagctgaacttgaaagaagactagaggatgctgggtatgcagttggatctcgagttctagagcttctttgcaaccgggaaaagggaaacagaagagagacacggttactgggaattctgtctttcgttcacagtactgtgtggaaagtgttgtttggaaaggttgctgattcacttgaaaaaggaacagaacatgaagatgagtacatgatcagtgaaaaggagcttcttgttaacaggttcatttcgattccaaaagacatgggaacattcaactgcggagcgtttgttgctggcatagtgaagggagttctggataacgcagggtttcctgctgtggtaacggctcattttgtacccattgaaggacaacaacgtcctcgaactactattttgatcaagtttgctgatgaggtgcttaagagagaggcacggctaagccaatgagagtactatggtcacgagtttccacgatctggaaactattggctttatgtgaactgcttgtgcaaatctgctatctgtttttggatgattatataacattttgaattgagctgcaaagccattgacccgtgcattgatgtaaacaacatacatatcctcttgttacaattgcagcttatgagacaacacttttactaaaaaaaaaaaaaaaaaggnnnnnnnnnnnnnnnnnnnnnnnnnnnnnnnnnnaannnnnnnnnnnnnnnnnnnnnnnnnnnnnnnnnnnnnnnnnnnnnnnnnnnnnngtagctggaatatcat

SEQ ID NO: 125986 - DNA, 613 bp, Arabidopsis thaliana
  unsure (1)..(613): unsure at all n locations
nnnnnnnnnnnnnnnnnnnnnnnnnnnnnnnnnnnnnnnnnnnnnnnnnnnnnnnnnnnnnnnnnnnnnnnnnnnccacgcgtccgtacggaagacgacagaagggtacggctgcgagaagacgacagaagggtcgcgtacacaactgcgaatgttgagatcttggaagcaatagctggggaaaccagagtccacattatcgattttcagattgcacagggatcacaatacatgtttttgattcaggagcttgcgaaacgccctggtgggccgccgttgctgcgtgtgacgggtgtggatgattcacagtccacctatgctcgtgggggaggactcagcttggtaggtgagaggcttgcaactttggcgcagtcatgtggtgtcccgtttgagtttcacgatgccatcatgtctgggtgcaaggtgcagcgggaacatctcgggttggaacctggctttgctgttgttgtgaacttcccatatgtattacaccacatgccagacgagagcctaagtgtttgaaaatcacagagacaggcttctgcatctnatcaanagcctttccccaaactggtactctagtaggcaagattcaacacaacacttgcatcna

SEQ ID NO: 125987 - DNA, 411 bp, Arabidopsis thaliana
ctgaaactaagaagccatggatgctcaatatcaagatctacctcctctcaaaagattaagactgttgcagagagatctcgaagctgctcaacagcaccagctaccgaaccaaccggagatgaagtcgttgcagttgccggcaaagaagaggaagcagactcgtgttgattatgacgatgacgacgcagagaactccaatcccacctatcattgtcttccggcgaagaaaaggatctgggcgattgatcccgatcttctctccggtggtggtaaccccttttcgccttttgatctaaatgtagagtataagccttatgttgaagagaaatcaattgagaaaaagtcaactctaaatgttgaatctagtctagaggtagaagatgatgatgattaagagaatattgttctctt

SEQ ID NO: 125988 - DNA, 681 bp, Arabidopsis thaliana
  unsure (1)..(681): unsure at all n locations
tcaatctcaaatatgctctctccatctctctattaaacagtcgatttcttacaaaaattctcacttccgtgcaagcaaatgcagtcttgtttcgagtttgattcacacaagattggaatagaggagacattgtctctttgattcttgagcttatttgggggagagaaagagagagcgagaggatctgatgtgtatctcaatctcgcaagtctctagattgagaatccattcatttggaagttcttgctgtgagcgtgttcatggatggatcaagaacagctctagcttgaagctgcttgatgttagagcttcttctgttgatggtaaagcaagatggatcagacgtaacgtgagtacaactacacaaggtagtagaagcaacactaagagcagtgtgttgggaggaacagttcctgtaaccagggattatagatgaagagagtagaaccaaggtacagccttttggtaatcttcagcaacggcttgccgcaagttaaagatccttgtctaagcgccccaccgggtataggctctgatctttgaaacaactgggtttgcatcnggaaaaatgagcngataatttgaaatttgccanctccggaatntaacttnggtgggtnggggttcnaccaccattttcaaaanctcnttgttccacccccgggggtgtttngtttcccc

SEQ ID NO: 125989 - DNA, 488 bp, Arabidopsis thaliana
ggtaaagcaagatggatcagacgtaacgtgagtacaactacacaaggtagtagaagcaacactaagagcagtgtgttgggaggaacagttcctgtaaccaggattatagatgaagagagtagaaccaaggtacagccttttggtaatcttcagcaacggcttgcgcaagataaagatctgtctaagctcctcacggttatagtctctgatcttgagacaactggtttgcatcggaaaaatgagcggataattgaaattgcagctcaggatatagctggtggtgggtacagcacatttcagactcttgtcaacccgggtgttgttcctataactaacgcacatatccatggaatcaggaatgatatggtctgtcgacccgaggttccaaggatggaagagctgataccgatatttctgcggtatgttgagagtcgacagaagcctggaggttatgtgatgttagttgcacacaacggcaaatcatttga

SEQ ID NO: 125990 - DNA, 907 bp, Arabidopsis thaliana
ccgcggacgcgtgggcggacgcgtggggcttcgtcctttgcgtgacagggaatctctccgttggggttttgtggctgcctacgatttctgcaagcaaaaccacagaactcaatctaattaattagccgagtcgactcaatccgagtttctacagccgcacgagggaatcatgaatcggctgagaggccgaggtacaccgattctgggttccgcactcgtgcctcagctgaagaaaaaagccctaaattcattggtcgccgtccaggattcatatctatccaccaaggacttgttcgagaggcacagggtcgtgtttacagttggaacttctatagcatctgttgctacggcttggattggttactcattacggcattacaatgaaactaggaattaatcagaggctggagtccattgacgaatgcgatgaaaaaacaacccaagagttaggaccgggggggaacctgaagaagctccgttgatccagtcggttccaggttcactacaacaattgccacagcgggaaccactttgatcctcgggtaattgggttgggttggccgaggcgggttatgggttgcaaataggaagtttggaagggagcaaatgagattggccgggcagttaaaaccgagagaatggaagttactagggaggataaaacctcgagcttggccaacaacaaagtttctcagacgaccattcccaagacagaacaaaacaacagaaaatgctttgaaggcaccagaatgtggaggttgaaaaattgaagaacaatctaaagaagtagctgatcggaacataaaagtgcacatgggttttgtcttgaagccaaaggctcttctgtctttttactcctttatgaggaaattcagcccacctaattcgaaaatcaaatagatttatg

SEQ ID NO: 125991 - DNA, 602 bp, Arabidopsis thaliana
  unsure (1)..(602): unsure at all n locations
nnnnnnnnnnnnnnnnnnnnnnnnnnnnnnnnnnnnnnnnnnnnnnnnnnnnnnnnnnnnnnnnnnnnnnnnnnnnnnnnnnnccacgcgtcccaaaaagtctccgacactctctagatttcctttgctccttcgttctggccatggcaatggcaaaactcgcaattttcaccactcttatggccatactcgtaatgacatctcaaggaaggattccaacagaaggaggagagaaagaagcagaggctgacagaattacgtcacttccaggtcagcctaacgtcacgttcgagcagttttccggctacgtcaccgtcgataaactctccggaagatcactcttttattggctcactgaagcttctgacctccctctctccaaacctctcgtaatttggctcaacggaggaccgggatgttcgtcggtagcgtacggtgcgtcggaggagattggaccattcaggataagcaaaggtggttccggtttgtatctcaacaagttcgcatggaactcaatctccaatctcttgttcctcgaagctcccgccggcgtcggcttctcttacactaaccgctcctccgatctcttaacaccggtgatc

SEQ ID NO: 125992 - DNA, 387 bp, Arabidopsis thaliana
cccacgcgtccgtcctaagccatgaaatagtcgcaaaggccctttcttcgtcttcgtttctaattgctttcgacgacaatcgatcgtagagaagtctacctcgtagacatctctctcacaaatccaattcaattaccattgtttgttattatctgatgtcgaatatgcaattctctcgtggttttaatccctttgttatcctcttctgtctcgccgtggttgcaccaattatatcggctgatgtcgctatcttgagaacggactattaccaaggaacatgtcctgatttccacagaattgtgcgtgaagccgttacaaccagacaagtccaacaaccaacaactgcggccgggaccctccgtctctttttccatgattgtttccttg

SEQ ID NO: 125993 - DNA, 751 bp, Arabidopsis thaliana
  unsure (1)..(751): unsure at all n locations
gcgaggtctatataatggacaaatctggtataatgtaaaatagggacttgacgcagatcttgttgggtctcgaaccttcctcttcgtttgcatcaggaaagagcgagaatggcgggaggaggaaactttattgcgagagtgatctcatacgttgcgaacgagttcatagttaatggtttggcaaacagccatgctttccagagatttgctgtgaggacttcaaagagaatagaaaacctctctaaaatggctgcagagaacagggagaaagtcgctcagcaaatggaagaatttgccaagaacattgactccacgaagaaaccctgatcattctagtgtggaatcttaaaacctcagtaaatcacatgggtcagctcaagtagggaggtctgtttatctttgtataaagaatgttaaaaagtaataagcttgtggattaaacaaccagtgatcttttggtgctgtttctcttctcttaaacccaactcttccggagtgactaaccattgtatgaaggaatttctatcgtcttttgcttcctacttatttgtagagtacatttattgaaaaaaaaaaaagaaaaataagggcgtgcgctcttaaggatccaagcttacgtacacgtgcatgctacgttataaactcttctattagtgggacactaaaatttcaattcacgttgggccggcattttttacaaaccgccgggcaactggggaaaaaaccctgggggtgtttcccccaactnnnn

SEQ ID NO: 125994 - DNA, 623 bp, Arabidopsis thaliana
  unsure (1)..(623): unsure at all n locations
tttggtacgcnctgcagggtaccgggtccggaattcccggggtcgacccacgcgtcccgggggtctcgaacctttctcttcggttgcatcagggaagagccagaatggcgggaagagggaactttattggccagaatgatcttattccgtggcgaccaattccttggttatgggttggccaacaggcctgcctttcaaaaattggtgggaaggcctcaaagaagattgaaaaccttttttaattggcttgcaaaaaccaggaaaaaggtccttcaccaaagggagaatttggccagaaccttggagtccccgaaaaacccctgatctttttactgaggattcttaaaacctcagtaaatcacatgggtcagctcaagtagggaggtctgtttatctttgtataaagaatgttaaaaagtaataagcttgtggattaaacaaccagtgatcttttggtgctgtttctcttctcttaaacccaactcttccggagtgactaaccactgtatgaaggaatttctatcgtcttttgcttcctacttatttgtagagcacatttattgattcttttcgttttgggctgtggctttgattttaaatatgtaaattacgggcccgttttg

SEQ ID NO: 125995 - DNA, 616 bp, Arabidopsis thaliana
  unsure (1)..(616): unsure at all n locations
tatacgacttactatagggaaagctggtacgcctgcaggtaccggtccggaattcccgggcttaaccacagaaaacagacgatggaagcaagaagcgtatcttatctctacgtttcatattaaagcgcatgaaaacgaacataataaagattctcttttttttttttgaaaaatgctagaaaaataaacatgggtcacttgccacagagcctctactccgccgctggaccaaagtttccatatcctggaagctccggtctaggagtagatcaacggaagctgacgtggagccgcttcccggtgttcctacggtgcgcgtcgacggagtcgttaacgagtttgactcagaataatgcggcggagatagagttgaagtatctggtgagtcaacacgggtgggacgtgaggagattgaatagagaccgccgaggatgagatccaggagagtgtctcttggttcaagcccgaagctttccacatccctctttgctctttttgatgattttttttttcatgtttttttcaggcaagagggttctatcaagcacttttctttacaaacctaaaggatttaccccccccnacatntgcttaatttngtgggggggaaaacaag

SEQ ID NO: 125996 - DNA, 913 bp, Arabidopsis thaliana
  unsure (1)..(913): unsure at all n locations
nnnnnnnnnnnnnnnnnnnnnnnnnnnnnnnnnnnnnnnnnnnnnnnnnnnnnnnnnnnnnnnnnnnnnnnnnnnnnnnnacgccacgcgtccgcgtctctgagataataaggacttgtgtatttttccatcgttaaaaggcatttcaaagagacaatatgtcaggtgatgaggctgcccctgttgttgttcctccccccgttgctgagccagcggccatcccagaggacatggacttaatgactgcattggagttgactcttaggaaagctcgtgcttatggtggtgttgttcgtggtctccatgagtgtgctaagcttattgagaagcgtgtggctcaactcgttgtcttggctgaagactgcaaccagcctgattatgtcaagcttgtgaaggctctctgtgctgatcacgaagtcaggttgctaacagttccaagtgccaagacccttggcgaatgggctggtctctgcaagattgattctgagggtaatgccaggaaggttgttggatgctcatgtcttgttgtcaaggacttcggcgaggagacaactgccctcagtatcgtcaataagcatattgcttctcaataaaatgccatgaagcatatctaaactcggatttcatatgttttccacccccaatgctgttttctcttgggttttgatatattatctaatatttagcggacagctcttgagatttgtttggaacatgatcaagttttgttgttatctagactttactcttccaaggccaaatttgcttgagatttatttggctccnnnnnnnnnnnnnnnnnnnnnnnnnnnnnnnnnnnnnnnnnnnnnnnnnnnnnnnnnnnnnnnnnnnnnnnnnnnnnnnnnnnnnnnnnnnnnnnnnnnnnnnnnnnnnnnnnnnnnnnnnnnnnnnn

SEQ ID NO: 125997 - DNA, 395 bp, Arabidopsis thaliana
aactcgccaaactaattccaaaacgtttcttcatcagatccaaagatcgttccactgtctctaagtcccccacggctttttccttcggatccgcttcctcatcttccggccaagactgtaaaaactccggtggtgatggcggtggcggttccgttaccccgactagcattctcccggaggttccttctccttattcctacgtcgagattctccaagcgtttaagttgatagacagagacaacgacggagctgtctctagacacgatcttgagtcgttacttagccggctaggtcctgatcctttgacggaggaggagatcaacgttatgcttaaagaggtggactgcgacggcgacggtacgatccgtcttgaagagcttgcgagtcgtgtagtc

SEQ ID NO: 125998 - DNA, 720 bp, Arabidopsis thaliana
  unsure (1)..(720): unsure at all n locations
ctcatatcgttttctgtttattttattttatcttcatttcatacactatttttttcctctccttattgtctatatatttttcctctttagctttttcatttcgaaatggccaccgttgaggttgaacaagtcactccagtagcagtagagaacgttgaggtaccaacaaagacagtggaggagacagtggtggagacagaggtgacccaacagccggaagaatccgtccccgccgtgacagaacaaaaatccgaagcaccaattgtagaaacaaacgaagaagtggttgtggaagaggcagagaagaaagatgaagaaaccgagaagaaaacagaggagaaagacgagaagacagaagtgatcacggaaactccggtagttgaggaggaggagaagaaagctgaggaagtgaccgaaactccggcggttttggaggaggagaagaaggcagaggtggttgtggggaaacagacttaggttgcggctgctgaggaattcgccgttgagaaggccgaggagtaaagaggaaggaagaagctatatatgaccttttttggtctcatatcgttttctgtttattttattttatcaacatttcataagtattttctatgaaaaaaacgggaaagccaagaaccaagnnnnnnnnnnnnnnnnnnnnnnnnnnnnnnnnnnnnnnnnnnnnnnnnnnnnnnnnnnnnnnnnnnnnnnnnnnnnnnn

SEQ ID NO: 125999 - DNA, 832 bp, Arabidopsis thaliana
  unsure (1)..(832): unsure at all n locations
ggcccttttttaggtttaattaccgccaagcctgggcgaaaaagggggaattgttgttcacaaagccggatttaatgttgnnnnnnnnnnnnnnnnnnnnnnnnnnnnnnnnnnnnnnnnnnnnnnnnntcgaggtcgacggtatcgataagcttgatatcgaattcgcggccgctagctttttcatttcgaaatggccaccgttgaggttgaacaagtcactccaggcggccgcgagaacgttgaggtaccaacaaagacagtgaagaagacagtggtggagacagaggtgacccacaagccgaaagaatccgtccccgccgtgacagaacaaaaatccgaagcaccaattgtagaaacaaacgaagaagtggttgtggaagaggcagagaagaaagatgaagaaaccgagaagaaaacagaggagaaagacgagaagacagaagtgatcacggaaactccggtagttgaggaggaggagaagaaagctgaggaagtgaccgaaactccggcggttgtggaggaggagaagaagacagaggtggttgaggagaaacagactgaggttgcggctgctgaggaagtcgccgttgagaaggccgaggagtaaagaggaaggaagaagctatatatgaccttttttggtctcatatcgttttctgtttattttattttatcaacatttcataagtattttctatgtttgttgggtttgttatgatgaaatcagatgtttggatcttttgcggccacannnnnnnnnnnnnnnnnnnnnnnnnnnnnnnnnnnnnnnnnnnnnnnnnnnnnnnnnnnnnnnnnnnnnnnnnnnnnn

SEQ ID NO: 126000 - DNA, 479 bp, Arabidopsis thaliana
atatttctcagcttcactcactctcgagactcgtgtatgttgatttacggtttgttcaagcaaagagaatgatgaatctaggatctctttcgttgagtacgagcaagtcgagtaagccaatggttagcatcagcttttggataccgtatttcactcactggggagagagcctgctggtctgtggctcggctcctggacttggttccgggaatgtgaaaaaaggtttgctgctaaagccatcccagcaagatgatcagctcatctggagtggctctgtctcggttccacctgggtttagctctgactattgttactatgtggtggatgactcgaagagtgtgttaaggtcggagtttgggatgaaacgaaaacttgtggtgcctgagacattgaccggtggagagtctgttcatcttcgtgatctctggcagagttgggatcaagctctttcatttagaagggcatataaagatgtcatc

SEQ ID NO: 126001 - DNA, 492 bp, Arabidopsis thaliana
  unsure (1)..(492): unsure at all n locations
cgcccgcaggaaccggnccggaatacccgggttcgcccacgcgtccaaaacagaagaagaaaactttcgatccatcttccaactctttcgcaatctgaaagaagaagaagaagagacaccaatggcggcgtttacagggacaacagacaaatgcaaggcgtgtgacaagacgggatacgttatggacttgtcgactttggaaggagtgcctcaccacaagccacgctccaggcgcagccattgcaatggcactcgcgcgacaggcaactactcatccagggatggagctccgcatcgcaagacccactttgaacagctcctcaaagaagcgggaaactccaggaagaaatgccaccagccgggaagaccgaaaagcgaatgacgcgaccaaggctccaaacagggaatcaccctgctgaaccggccaacagaacaaggagcacccggaaaaaaacagcacaccctcccgaaaaaacgacaacggaaggaaaa

SEQ ID NO: 126002 - DNA, 532 bp, Arabidopsis thaliana
  unsure (1)..(532): unsure at all n locations
nnnnnnnnnnnnnnnnnnnnnnnnnnnggaaagctgctacgcctgcaggtaccggtccggaattcccgggtctcccccccgcccggggagaagaagaaaacttttgatccatcttccaactctttcctaatttgaaagaagaagaagaagagataccaatgggcggcgtttacagggacaacagacaaatgcaaggcgtgtgacaagacggtatacgttatggacttgatgactttggaaggggggccttatcacaaggcatgcttcaggtgcagccattgcaatggcactctcgtgatatgtaactactcatccatggatggggttttgtattgcaagacccattttgaacagctcttcaaagaatctggaaatttcagcaagaatttccaaacagctggaaagaccgagaaatcgaatgatgcgacgaaggctccaaacaggttatcatccttctttagcggcacacaagacaaatgtgcagcttgtaagaaaacagtttatcctctagagaagatgacaatggaaggag

SEQ ID NO: 126003 - DNA, 778 bp, Arabidopsis thaliana
  unsure (1)..(778): unsure at all n locations
gcgtccgaccacgcgtccgcccacgcgtccgcggacgcgtgggatctttttcacgcaaatgcaaaccaccaacaaatctatattctagcatgatgatgaagtagctacttgcttcttcttcttcttcttcttaaattttggggtttttactttttggtgaagacagccatgtttcaaagattattactcttccttctcattgctcttctgctccaatcttctttccttttagagatttcctctgctctcaaggaaggaaaaacatgtataacaaacagcaactgtgacgctggattacactgcgaaacatgtatagccaacactgattttagacctagatgctccagaacccaacccatcaaccccatcaccaaggcaaaggggttgccttttaacaagtattcatggttaaccacacacaactcttttgctcgtttgggggaagtatcacggaccggttctgctattttggctcctactaaccagcaagattcaatcacaagccaactcaataatggtgtaagagggggttatgctcggcatgtatgactttccaaaacgggtatcttgggctttgccaattctttcggatgggaacaatgtttcaattttacccgttttaaaccggggttttaanaatttaangggggtttnaaggggttttntgnnaagaccttgggggngttttacngttttcatttgaggtttgngaatcccnnagggctcnaaggnttttgggtggttcgangnaattccggggtngtccccaatgggggta

SEQ ID NO: 126004 - DNA, 609 bp, Arabidopsis thaliana
  unsure (1)..(609): unsure at all n locations
gagagaaggactataagtttccatgagaaagaagaagtaatcacacacttgttcttcgattcgtttctgggaactgagaatatttaagaacacgatggctatggccgctttaaatcagctttttgttgtcctagcctcaaaacccgagcaggagaagatcacgcctgaagagtctagagctattgtctcttgccatttcaaagctttgtggacagctggttttgcgtctggtgtagggggaggtttaacttggcaaggttcgtcgtaattcctccattgactcttcttcttggttcagaaaatttagtcttttttncttttgtgtaacccaaatttgtaatggagatagatagatagcttttaattcctttnctgtggtgtattcttctagtgncaaagaagttgaaaaaagccgaaaggacttnagagggttgcccttgcagcttggagttgcttgcttccgcctntttgtggttgcctngaaattgggcaagtnccaaatattncaggttcaaccccttgaccaaaaccctaggcaaagnnnttccacgnatccagaaaaggnttttaaatnnctttngnagggcccccannggtnanntttggggg

SEQ ID NO: 126005 - DNA, 459 bp, Arabidopsis thaliana
gcagagtgcagacattgttgattgaagaacgctaatcgtttgtttttttaattgtttgcgttaagttaaagctacttgttgggacgtcaaagcaacgcttctttcgattctgactttcatataaatactaaactccaactttttgatttctctgctacttttgttcttctcttttacttccccagatacatcaatcgatcaatttgcaaaacatgtctgttgagttatgttcggtgaggcctttgtttggtggcgctatttccaccgtcttccctcaaagatttcaggatgtgagtaatatccgacaagttccagatcatcaggaagtgtttgtggatccttcaagagatgagagtttgatttttgagttgttggatttcaaggctgaggttggcgacattggcagagcctcttggtttcttaaagatctttgcgagtgagcaagaagcttgaggattt

SEQ ID NO: 126006 - DNA, 781 bp, Arabidopsis thaliana
ctacgactcatatagggaaagctgctacgcctgcaggtaccggtccggaattcccgggtcgacccacgcgtgcgcccacgcgtccgcccacgcgtccgtacggctgcgagaagacgacagaaggggatcttcggaaagtctcatttctcgatccccaattcgtggattagggttaaaagaaccatttttattctcgtcgcgcaacaacaaatccagatcgaaaaaggaagaagagatcgaaatggcgttgagaagggtttacagtgaaatcagagggaagaaggtgacggagcttccaggctatatcaaatcgactttttcaatggagaccgtgaagacctctgtgaagagaggactcgataactacaacgaaaaatacattcagaccagctccgttgatcctatccttcatatctgcttctacggcatggctttctcttaccttgtcgctctccctaatgagcgtcgccatcttgagcatcagcagcatgctaaggagcacggtggtcattgatctcgtgggaatcgtttcgatctcgagatgattttagggggggttgctgtgaaatctttctctgcttgatggtgacgacgactcaagaattgtgtcttattgtttcgttttcttgaattttcctggataatgttgacctaaaggaaaacctttctttcgaattaccccccatgatagtcaataattgaagcatcatgatgatatccatgaataatgaaactttttttttgttccgtgaagttgtgaattcagcaattgttttatcat

SEQ ID NO: 126007 - DNA, 405 bp, Arabidopsis thaliana
gcgtccgcttttcatacatattctcttgacgatcatgagactgatttcgtgaaaatatcgtcattatatcaaattagaagttgatggaaaacatgggggattcgagcatagggccgggccatccgcatctccctcccgggtttcggtttcacccgactgatgaggaactagtagttcattacctcaagaagaaagcagattctgttccacttccagtctcaatcatcgcagagattgatctttacaagtttgatccttgggagcttccaagcaaggcgagttttggagagcacgagtggtacttctttagtcctcgggatcggaagtatccaaatggggttaggccaaaccgggcagcaacttccggttattggaaagcaacgggaaccgataaaccgatattta

SEQ ID NO: 126008 - DNA, 438 bp, Arabidopsis thaliana
ggagcagcgatgaaatcggttgtccgcaaacaacggatagatctgtcgatgtttgtttttggaactccgcgttgaatcagcgtcgatgtttctccaatggaagataaaccattagggattctcagggttcatgtcaaaagagggattaatcttgctattcgtgatgccaccaccagtgatccttatgttgttatcacattggctaatcagaaactgaagacgcgtgtgattaataataactgtaatccagtgtggaacgaacaactgaccctttccatcaaagatgtgaatgatcctatccgtctgacggtgtttggataaagatagattctcgggagatgacaaaatgggtgatgcaggaaatagactttaggccgttcctagaagcgcatcaaatggagttagatttccagaagctccccaatggttgtgcaatca

SEQ ID NO: 126009 - DNA, 408 bp, Arabidopsis thaliana
aaaaaagggtttttgtgttcttcgatattatctcttattactattaggctattatcatcgccttattggggaaaaagcttcaaacttttatataaagtctcttcctttttctttctttctcggtggaatttgcagcaatggaagataaaccattagggattctcagggttcatgtcaaaagagggattaatcttgctattcgtgatgccaccaccagtgatccttatgttgttatcacattggctaatcagaaactgaagacgcgtgtgattaataataactgtaatccagtgtggaacgaacaactgaccctttccatcaaagatgtgaatgatcctatccgtctgacggtgtttgataaagatagattctcgggagatgacaaaatgggtgatgcagaaatagact

SEQ ID NO: 126010 - DNA, 540 bp, Arabidopsis thaliana
  unsure (1)..(540): unsure at all n locations
tgannnnnnnnnnnnnnntacgactcactttagggaaagctaccacgcctgcaggtaccggtccggaattcccgggtcgacccacgcgtccgaaaatgctggttgagttggctcattcatcaaatgatggagtcacacggaaccatatcttctccttgttcactgcaattgttaaatttgtccctgataaggttttggaccatattatcagcatacttacacttgttggtgaatccatctgtgacacagattgatagtcactcgaagtctatctttgaggggtttatatcaatggtcattccattttggctgtctaagactaagagtgaggagcagttgttacagatttttgtgaaagtcttacctgatattgttgagcatagaaggcgttcaattgtagcttacttgctgggagttatcggtgaacgaaatggcttgcctgctttgcttgtcctcttatttaagtctttgatttcaagaaaagactcaggcttggcttggtaatgccaacggttctgaaagtttcgctcccattgttaa

SEQ ID NO: 126011 - DNA, 591 bp, Arabidopsis thaliana
tcccaaggaagagtcgatgaagttgaaatcggtgttcgatgcttcggaaatcaaatcggaatttgaatcagcgggaataaaccctaaattcgcgattcaaatctggaagtatgtaattcagaatcctgattgcgtttgggacgagattccttcattgccttccgctgcatactctcttctccattccaagttcaagactcttacttcgtctcttcactcgctatttcattcctccgatggcaccacctcaaagcttctcatcaagctccagaatggagcttttgtggaagctgtggtaatgagatacgatactcggttggggatgttaggagggaaaccacgtcctggaggttggttgtaagatgggttgcacattctgtgctactggtaccatgggatttaaaagcaatttaacatctggagaaattgtggagcagcttgttcacgcctctcgcattgctgatatacgcaacatcgttttcatgggaatgggagaacctttaaataactacaatgctgttgttgaagctgttcgtgtcatgttaaaccaaccatttcagctgtcgcccaaaagaattaccatatcaactg

SEQ ID NO: 126012 - DNA, 572 bp, Arabidopsis thaliana
  unsure (1)..(572): unsure at all n locations
cctctcactttcagttcaattggatagccggaaaggctctcctccaagtggcgtttatatggaggtgacaaatacgagcagcatcatgtggttcttcagggacaaaggtttcgatgatccgagtatcgacaagatgttgagaaaatgcaaacagttggaaaaggctcaaagcgatgtggcatcagaaaactgggactacctgagtaacattgttggtatccaagagagaaaactcccttacatcgtctcccgatgccccaaaatcctgactttacgcctcgatgagagactcatccccatggtcgagtgcctctccagtcttggaaggaatcctcgggaagttgctttccgccattaccaaatttcctccaatactctctcatagcgtggaggagaaactctgtcccctttcttgctttttttcaagcggttgggtgtgcctgagacttaacttgggaaaattgtacctttttaccccggggttttcagggtccaggattggcacgaggttacaggtnttggaagtttttttgtnggcttggcttnntcaggtgggtnttgnaaanttttgg

SEQ ID NO: 126013 - DNA, 576 bp, Arabidopsis thaliana
  unsure (1)..(576): unsure at all n locations
agagttttgattcaacagagtctctctctgtcgcgaaacgttgcttcctgggagaactataaagttaacaaatttctccacgaaaccatagagtcacatcctcatgagtgttttgtgagctgcgatgatcgtgtgattttcaaatccctaacttttcgaaattcccaaaaccctcaaataatctgagtgtgacccattaatccatggcgatgtctctccgttccactccattcatctctctccgtacgagaaaaagctttaacctttctccgagaattctcgcccttaggttatcatgctgctctggtgggtcttctcaaaatcagaacttttctacagattccgagaacaagagatcattcgctgttgccaccggtgagcttttcatcggaatcgcgtcgaggcttttgaagggttctaatcaaaagacgccggccgattgatgatggggatagaatagncnagtgaattgangatnagattgagcagcgatgntatgggnacaaagggtaaagatgttaaccggggaagagagggggcattanagcccngggtaagtcccngcngtggctttgc

SEQ ID NO: 126014 - DNA, 512 bp, Arabidopsis thaliana
  unsure (1)..(512): unsure at all n locations
gaaactagtagtggtgaaggagaaggagaatgggagatctctacgctttggacttcgatggagttctctgtgatagttgtggagaaagctctctatctgctgttaaggcagccaaagtgagatggcctgatttgttcgaaggagttgattccgctttagaggaatggatcgtcgatcaaatgcatattgtgagacctgtggttgaaactggctatgaaaatcttctacttgtgcggctgttattggagaccaagataccgtctattcgaaaatcttcagttgcagaggggttgacggttgatgggatactggagagctgggcaaagtttaagcccgtgatcatggaaagcttgggatgaagatagagatgctttggtagatttgtttggaaaagttagagatgattggatttacaaggggccttgacaaccttggacttggtcccaataggtttctaccccaggggtttcaaatgcccttaaattttcccancccaaggtttnatcggtacc

SEQ ID NO: 126015 - DNA, 740 bp, Arabidopsis thaliana
  unsure (1)..(740): unsure at all n locations
accacgcgtccggatctttcgaatcaaaacgatctgaagaagaagaagaagaagaagaatcaaaatctggatcagaaacaagggaggagaagatgttgcccacaacttccagatctcgttcttcatcttcttcatcccgagctaatccaatgttccttcagtactttcgtcgtatcgttaagtggcagcaaatggatgttgaatatactttctggcaaatgcttaacctttgtacatctccgaaagttgtctatcaacacactaagtatcacaaacaaactaagaaccaatgggcacgtgatgaccctgcgtttattgtgatctgtagcctgcttcttgttgttgcaactgtagcctattgtgtcacgtatgaccatagtagctctcatgccgtcgtcgtagtcgtttcagttttgttcacccatttcttaatcaccggagcagttatagctacatgctgttggggtttgacaaattcttaaccttcggcgaggagactccaaacagtcatgtggggggcancgggcgcggtgaatggctggaaacaatttngatggtcactggaactcggtccttnccaatggttnnggctgcccnanggcggaaattanctccttaacacgggcccgaaaagacacnggntcancccttaanggaaacggaaccgggttcaangggcgggggtngganaccatnactnactnccngnatgngggnccattttgggggaaaaatctgta

SEQ ID NO: 126016 - DNA, 654 bp, Arabidopsis thaliana
  unsure (1)..(654): unsure at all n locations
atacngactcactatagggaaagctggtacgcctgcaggtaccggtccggaattcccgggtcgacccacgcgtacgcaccctagtaccctttttctctcttattcttctatcttcctcctcctctatctttcgctcgagccattgagcaattatgtcgattccttgtctaaccgaagagacagccaaaactgttcttcgccaggtggagttctatttcagtgatagtaatctacccattgatgatttcctcaagaagactgttacagagagcgaagatggcttggtgagtttggcgttgatttgctcctttagtaagatgagaggatatttgaagttgggtgattctaaaggagatgatattcctgaagataccatcaaagctgttgctgatactcttcgaacctcttctgctctcaagatttctgacgatgggaaaaaggttggtacgagtactgaattgttgaagctggaagatttgattgagcaacttaatgctagaacagtagctgcgtcacctttctcctatgatgttaaaagggaagacgtggaatcctttntcagtcagtatggaaaggttaatagtgtgaggatgcctcgtcatgttgcagagtcgaggatattntctggtgttgccttggttgagttccctacag

SEQ ID NO: 126017 - DNA, 544 bp, Arabidopsis thaliana
  unsure (1)..(544): unsure at all n locations
ccggnccggaattccttgttttacccacgggtgcgtgcgggcgtacactatccttccgccattttttgctttctaggttgcagagttaaaggagaaggttttcaattagggttttgtagagagaaagatgagccgaagtttgggaataccggtgaagcttcttcacgaggcctcaggtcatatcgtgacggtggagctaaagagcggcgagctttacagaggaagtatgattgagtgtgaggataactggaactgtcagttcgaggatttacttataccgcctaggatggtaagggattacagctttggcattgttttatttcgaggcttgttaagttagtgttatttggtcattacctatactattttaatacttgctttcaatggtttaattcattttttattgtcttctaatgctaggttaagatgctttttttcttggttttctattttttatttatcttttttaatgtatgttttcttcttttgttgttgttattcatcttttttttttaattttttgttattacatttcattcttttg

SEQ ID NO: 126018 - DNA, 833 bp, Arabidopsis thaliana
  unsure (1)..(833): unsure at all n locations
cccacgcgtccgcccacgcgtccggacgaagatgagtcggagtttggggattccggtgaagcttcttcacgaatcgtccggtcatatcgtgagtgtagagatgaagagcggtgagctttacagaggaagcatgatcgagtgtgaggataattggaactgtcagctcgagaacatcacctatacggccaaggatggtaaggtatcacagcttgagcatgtcttcattcgaggcagcttagtcaggtttttagtcataccagacatgttaaagaatgctccaatgttcaaggatgttaggggcaagggaaagagcgcttcactaggtgtaggcagaggtagaggtgctgcaatgcgagccaaaggtactgggcgtggaacaggaggaggaagaggggctgtgccacctgtgaggagatagtttagttaaccctcgtaatgtagcttcggctcgtgagacattctctgcagtatccatgagaatccgccatcttcagctcgtcacttatgcatttaaggtacacagcaagtaaaatctttaagacatggagggaagagagaaagaggaactagttctgtgttttgggttactaagatgtttgaaaaaatgacatgttttgttaatgtggtcattgagaggcttccccacatcttatgtataatatagcacgaatcaaaattctataatgaatgattcgtctttttaatcttggtagaaatcaggaatcattaaattgtgggttttctaaaaaaaaaaaaaaaaaaggcggcccgctctagaggatcccnagcttacgtacgcgtgcatgcgacgtcatagtcttnctatagtgtca

SEQ ID NO: 126019 - DNA, 885 bp, Arabidopsis thaliana
  unsure (1)..(885): unsure at all n locations
tacgcctgcagtaccggtccggaattcccggttcgagcgacgcgtaagcctggctgcgaggacgacagaagggggtcgctcttctttccttccgccatttttttctttctaggttgcagagttaaaggagaaggttttcaattagggttttgtagggagaaagatgagccgaagtttgggaataccggtgaagcttcttcacgaggcctcaggtcatatcgtgacggtggagctaaagagcggcgagctttacagaggaagtatgattgagtgtgaggataactggaactgtcagctcgaggatattacttataccgccaaggatggtaaggtatcacagcttgagcatgtcttcattcgaggcagtaaagtcaggtttatggtcataccagacattctcaaacatgctccaatgttcaagaggttagatgctagaatcaagggaaagagctcatcactgggtgttggcagaggtagaggtgcaatgcgagggaaaccggctgccgggcccgggcgtggaactggaggaaggggagcggtaccacctgtgaagagatgattgattttacgctcaacatgtaagctttgattctgggatagtctttctgtgatatccaggtgaaagccgcctttcttggttctgtcattaatgctttagagaaccctgtaaaaccaaacaagagagagagatatccagatgccctactagttctgtattttgggttaccaagatgtttgaatcattgacaagttttcgttgtgatctattttcttctttgcgccnnnnnnnnnnnnnnnnnnnnnnnnnnnnnnnnnnnnnnnnnnnnnnnnnnnnnnnnnnnnnnnnnnnnnnnnnnnnnnnnnnnnnnnnnnnnnnnnnnnnnn

SEQ ID NO: 126020 - DNA, 306 bp, Arabidopsis thaliana
  unsure (1)..(306): unsure at all n locations
cnnnnnnnnnnnnnnnnnnnnnnnnnacgcctgcaggtaccggtccggaattcccggttcgaccccccccgcccgcgcacgcgtggggctttacagaggaagcatgatcgagtgtgaggataattggaactgtcagctcgagaacatcacctatacggccaaggatggtaaggtatcacagcttgagcatgtcttcattcgaggcagcttagccaggtcttctgtcataccagacatgttaaagaatgctccaatgttcaaggatgttaggggcaagggaaagagcgcttcactaggtgtaggcag

SEQ ID NO: 126021 - DNA, 593 bp, Arabidopsis thaliana
  unsure (1)..(593): unsure at all n locations
gaancccggggcggacccacgcgtccgcaccgatacatacaccgacacatatgcatgtgtgtaagtatacgctcaagtgggggagcgttctcagatccctccaggaaagcaacgctttataagatgactcattttctgaaacgaactcaactccaagtgtgacacattctcaacgagagatcgtgatcgtacttatatacacacacgcacacttgcaaagcttgggaggaagaagtgatggacaagtatgaggttgtgaaggatttgggagctggaaattttggtgtggctcgtcttcttagacacaaagagaccaaagagctcgttgctatgaaatacattgagagaggtcgcaagattgatgagaatgtggcaagagagattatcaatcatagatcacttaggcatcctaatatcatcagattcaaggaggtgattctgactccaactcatcttgcaattgtaatggagtatgcttctggaggagagctctttgaaagaatctgtaatgctggtagattcagtgaagctgaggctagatacttctttcagcagctgatttgtggcgtggattactgtcattcactgcaaat

SEQ ID NO: 126022 - DNA, 338 bp, Arabidopsis thaliana
tgggcggacgcgtgggccaatttcgacgttgaacacaaacccttgcttctctcttctctgtttctctctcgcagcgaaaaatcatggcgattagctccttcaagcatgaacatcctcttgaaaagagacaagctgaagcagcacgtatcagggagaagtatccagacagaataccagtcattgtcgaaagagccgagaagagtgatgtcccggatattgataggaaaaagtacttggtcccagctgatttgactgttggccactttgtttatgttgtacggaagcggatcaagctcagtcccgagaaagccatcttcatttttgtcaagaacattcta

SEQ ID NO: 126023 - DNA, 531 bp, Arabidopsis thaliana
ccacgcgtccgcacacacgtccgaccgatctatcaagcaagtggttcctctctctctctacctctcgtttttggccaacgtcgtcgtcttcacgatccacgacgattcagttcttgagttccggcgattatcggtctctcacttctggttccgttgaacccctcatttctcttctcgcccgtgctctcaaattccgatatttgcccctgtgattcgaaaccctaatttcgcctatcaatctggaaaatctctcaattcgaagactttagcagcgcaaagatactctatccgggtaataagatcgaagaaaccatcaatttcttaccaaagtcgtgattcttggatctcgtctttgtttgatggacacaattagggtttccaaggaggttcctggatcttcgaaatcgaccgcacagtcgctcacggagtcgacctctcgcacggaaaccatcaatggctcccacgaattcaagatcagcggctactctttggtcaaaggcatggggattggcaaatacgttgcctcggata

SEQ ID NO: 126024 - DNA, 832 bp, Arabidopsis thaliana
  unsure (1)..(832): unsure at all n locations
cnnnnnnnnnnnnnnntcacgttaggggagctactacgcctgcaggtaccggtccggaattcccggttcgacccacgcgtgcgcccacgcgtccagtcacttaaaaccctaaattatgacgatcgcaccggcattgcagacgacgttcgtgtcatcaaccaacttcctgaaacattcttcttcgtggggatcaccatcaccgaacaatgtgattcttcccaaaaacaagagatcttcttcctccgtagttgtcgccgccgtcggtgatgtctcttctgacggaacaatctacttaatcggcggagccatcgccgttgcactcgtcggaactgcattcccgatcctcttcaaacgcaaagacacgtgtccggaatgtgacggagcaggatttgtgaggaaaggaggagtgactctgagagccaacgccgcacggaaggatcttcctcagatcgtttgtgctaactgcaatggactcggaaagcttaaccagattgataaatcataagtcttcttcatatatatgtaaaaagctccatttctcattcctcttcttctctacaatatacctctgcaaaagtagatagcttggaatgatcaatggttgcttggagatgggtggatatatatatatatatatatatatacaattgcttttttatgtgtaagtttctttgctttcttgttctgtaagaaattgtctgagtattattgtaagtttttaagcagttatagaaaaaaaaaaaaaaaaaagggcggccggtctagaggatccaagcttacgtacgcgtgcnnnnnnnnnnnnnnnnnnnnnnnnnnnnnnnnnnnnnnnncc

SEQ ID NO: 126025 - DNA, 710 bp, Arabidopsis thaliana
  unsure (1)..(710): unsure at all n locations
acgtcacgnagcaaatccaaattcaaaacctttccataaaaatcaaatcacttcttcttattacttcccccaaatcgaaatcagtcacttaaaaccctaaattatgacgatcgcaccggcattgcagacgacgttcgtgtcatcaaccaacttcctgaaacattcttcttcgtggggatcaccatcaccgaacaatgtgattcttcccaaaaacaagagatcttcttcctccgtagttgtcgccgccgtcggtgatgtctcttctgacggaacaatctacttaatcggcggagccatccgccgttgcactcgtcggaactgcattcccgatcctcttcaaacgcaaaggcacgtgtccggaatgtgacggagcaggatttgtgaggaaaggaggagtgactctgagagccaacgccgcacggaaggatcttcctcagatcgtttgtgctaactgcaatgggctcggaaagcttaaccagattgataattcataggtcttcttcatatatatgtgaaaagccccttttctcattcctcttcttatctacaatatacctctgtaagagtagatagcttcgaatgatcaatggttgcttggagatggatggatatatatatacaattgcttttttaaaaaaaaaaaaaaaaaaaaaaaaagggcggccgctctagaggatccaagcttacgtacgcgtgcatgcgacgtcagg

SEQ ID NO: 126026 - DNA, 578 bp, Arabidopsis thaliana
  unsure (1)..(578): unsure at all n locations
cagtcacttaaaaccctaaattatgacgatcgcaccggcattgcagacgacgttcgtgtcatcaaccaacttcctgaaacattcttcttcgtggggatcaccatcaccgaacaatgtgattcttcccaaaaacaagagatcttcttcctccgtagttgtcgccgccgtcggtgatgtctcttctgacggaacaatctacttaatcggcggtcacatccgccgttgcactcgtcggaactgcattcccgatcctcttcaaacgcaaagacacgtgtccggaatgtgacggagcaggatttgtgaggaaaggaggagtgactctnagagccaacggcgcacggaaggatcttcctcagatccgtttgtgctaacttgcaatggactccgggaagctttacccagattgataaatcataaggctttcttcatatatatgtaaaaaggtccatttctcattccccttctttttacaatataccccttagggagaggtaggttcgattgccatgggtctttggggtgggggggtttttttcttnttttttaacaggnngttttttgggaagtttttnttttgc

SEQ ID NO: 126027 - DNA, 673 bp, Arabidopsis thaliana
  unsure (1)..(673): unsure at all n locations
tccccnggnnngntttccntgttcccaaccttatcggcccnnttgggaagctggtcccctncngtccgnccggattccggntnccccagaacgaaaaataaaaaagaagaaactaacaaaacaaaaaaaaaaatggaggccgggaaaacaccaccgacgacgacaacaacgacggagaagaaaacggagcaagtgaaagacaacgacttgccgaccgatagcccttacatggcgacgggtactttggaagattacaaattgaaagcttatggagccgaaggtcaccaagagcctactcctggtcttggaggtggctccaccgatgctcctactccttctggcgacgcacccgccgccactaccaccgatgcgaaagctccgtgaaaaaaaagaaagactataataatgaacgggttttgtggatcgtcggaaaacaaacccataattgtagtatgttcaataactgatccagcttcgtttcttaacgtttttatggtttaattaaaaatgtatttgcgtctaatgctgaatgctaaagttcgagtttcgtatcaaatgaagttgtaacgatttaataattaatgtgaagcttatttctttttgataatgaccaatgttatctagttttatcgccgtcgatcatataacttaatttatnaatttaggattcanc

SEQ ID NO: 126028 - DNA, 500 bp, Arabidopsis thaliana
  unsure (1)..(500): unsure at all n locations
agaagaaacccaaaagcagaagaagatggtggcgatatctatgtacagaggcaaccttcacaaagttcccgacgtacctcgccggtggataatgcctgaccgtaatctctctttcaaggatttcaaatctcttcttcatcgccgtaaaaaagccctttctcgtctcccccttaaccctaatttgaaccttagcgtcaagactgagttggttactgatcaggagaatccaattcttccatctgaagcgaacggttcttctgggaagcagaagctatttgaggtaaagagagaggagatttgtgggaatcgggttaagggagatgagaacaacgacagaggttttgaaggagctcgatcagacggtggagatcgtcccgggagagtgacggaatcaaaggaaaccgataatgtgccacacaagtatgcggccaaggangaggagacgantgaagcagctgaaaaagtaccaagcgagacagagttaaaacggnaagaagtgg

SEQ ID NO: 126029 - DNA, 835 bp, Arabidopsis thaliana
  unsure (1)..(835): unsure at all n locations
cacacgcgtccgaagaaactccggagcagtggattccggtcctgaggaagatctgctggttcttggtcttggcacctcatgacccaatgcaatcaagcttgctcaatgcaactctggaagacaagaatttatcagaaatccctgatttcaagatgcttctaaaacaggtagtggcaatggaggttattcaatggtcatctctgtggaacaaatccaaggatgagttcgagaaagagaaaagcatgattggaggttctttgggtgacaaagctggtgaagatctgaaactgagaatcatcgaacataatatcctcgttgtctcaaagtactacgcaaggataaccttaaagagacttgccgagcttttatgcctgagcatggaggaggcggagaagcatctatcggagatggtagtgtcaaaagcactgattgcaaaaatagacagaccatctggaattgtgtgcttccagatcgcaaaggacagcaacgagattctaaactcgtgggcagggaatttggagaagcttctagatcttgtggaaaagagttgccaccaaattcacaaggaaaccatggttcacaaagccgctctcagaccttgaaaacatgcggtcttcttcatgaaaacttttcaggatcttcttcgttgagttattagcatctttatgtggtaaaaactcgaatcagtgtttccttttaaaaattgtactatggatctgtacactaacgaagtgttttgccacttattgggtaaaaaaaaaggttggtaaaaaaaagggcggccgcttctagaggatccaagcttacgtacgcgtgcatgcgacgtcagagnnnn

SEQ ID NO: 126030 - DNA, 447 bp, Arabidopsis thaliana
cctcattcttcttaattccgatttttgagtgatggctatggcctctgcttctggttctgctctttgcttcactgatgcttctagctctcttgctttaagacgcgattgtggagctctttgcttgcctcctaggacagttacgtttggatttgtcgataaacctcttgtcaatctcgagcgattaagattatccactttgaagattagagcatcaaatgctactgctgtggagaatggaaagcaagaaggaagtgctgctgattctgataaagttccaactccagttgttataatcgaccaagattctgaccctgatgcaaccgttcttgaagttacattcggagatcgtcttggagctttacttgacactatgaatgcgctcaaaaacttgttactcactttgtgctagctctgcataatcgaccaacattcacaaaagcttcttac

SEQ ID NO: 126031 - DNA, 536 bp, Arabidopsis thaliana
  unsure (1)..(536): unsure at all n locations
nnnnnnnnnnnnnnnnnnnnnnnnnnnnnnnnnnnnnnnnnnnnnnnnnnnnnnnnnnnnnnnnnnnnnnnnnnnnnnnnnnnccacgcgtgcgagcgaattaggtcaaaaaaacaaatcccaaatcttcatcatcttcaacgtttatggatttgagtcgttctcaaacaaattttcaattagggtttggttgttcacacgcatcaatgactccaacaccaacaccaagagctccaatcgcagacgattcgattaatctacaagtcgatcaaagtttccgatcattaccaacaactttctctccgattccgttacaattactcgaacaaaaagccgagaagaccaccaccgttgatgagccaaagaaagatggaggaggaggaggagatcaaaaggaagacgagcatttcagaatcttaggtcaccatatgtgtctcaaaaggcaaagagattgtccacttttgttaacgcaatcaaagcatccgaagagaagttccatcggtgattcagatctggaatcgcgacgtgctgctgta

SEQ ID NO: 126032 - DNA, 479 bp, Arabidopsis thaliana
cccacgcgtccgcccacgcgtccgcccacgcgtccgcggacgcgtgggcgaaaaatcaggaagaagaagaagaagattgacaaacaaaaaggattcacctttagtgactgagtgagagaaagagattgaaggaaaaaaaaaaaaaaaagggtgaagctttggagagaggataaccacgtagaggattctaatccgtggttgcaaacgaaggacccagaatttctggaatctcttgcttcgatcgaatcactctcatgtctaacgaagactctcttccgcctttcactttgtttggtttggctgatgtcgagaattacggtctggtcactgacgcagacaattcgttaccttgagatatatacaatcaggtttttcaacatgtgtagaagggaaagtagtcaatcaaagagtctcgctttgaataagctattatcagttactcagtcgccaattctactacacctcatgaccctaatgtt

SEQ ID NO: 126033 - DNA, 936 bp, Arabidopsis thaliana
  unsure (1)..(936): unsure at all n locations
aaaaaaaaaaacagaacaatttcttcttcctctgggatccataagttttgagattttggtggtcagtgtctgatggagtgtaatgcaaagccaccgtttcaatgggaattggaaaacttgatatcttttggcacttctacagctgaagttcctagaaagctaaaaccaatggagtgggaaattgatggatttgattgcacctctctgtattcttcaagctttgcctatgctggtagttcaggttctgatatagctcatgctttctctaaaagctcaaagtcaacttccattagctcttcatcagctgaagtaagaacacacaattttacatccgaaactggtgaaagtcttcctggagaatttgcaaaggggattgatacttctccaactcttgaactttcttttggctctggtgatccggttctcggtttaaagcttggtaaacgaacgtactttgaagacttttgggaagtggagaatgctaaaggtttgggacttcccgtgagccttgcttcgtcttctgtttctccggtgaagaaatcgaaatccattcctcagaggttacaaactcctcactgtcaagttgaaggctgtaatcttgatctttcatcagctaaagactatcatcggaaacataggatttgtgaaaaccattcaaagtttcctaaagtcgttgtgagtggcgtagagccgtcgggttctgccaacaatgtagcaaggttccactgtctctccgaggtttgatgaggagaaacggagctgtcgccgacggctctcagatcacaatgcaagacggcgcaagccaaatcctggagggacatatgatgggaaaccacaggtggtttttgtttgacaagtttactntcccncaggagtgggaaagtttttgcccttaagctnnccnagggtnttccggctaaaccgntccaaanttgc

SEQ ID NO: 126034 - DNA, 351 bp, Arabidopsis thaliana
accacgcgtccgtttgtttttcttgatgcgagaatgaatctgagttcaagtgggttacaaggaccaatagccttttcctttagagatctctccctcctcgagttatcgtaagtgtacaaatgcaagccatacaaacacacactttccaagagctttcttcagttgaaatggaacttagtgacaaacggtgtgaagatgaaggattgtttggctgcagagaaaatcagtcagtagccaacaaagaaataactttgtgtgaatctgctgatgtatctattaaggagttgataaagagacttaatgaaggtaagcttttgtaacgaattggtaagagacaactgaaattttcct

SEQ ID NO: 126035 - DNA, 545 bp, Arabidopsis thaliana
  unsure (1)..(545): unsure at all n locations
atgannnnnnnnnnnnnnnnnnnnnnnnnnnnnnnnnnnnnnnnnnnnnnnnnnnnnnnnnnnnnnnnnnnnnnnnnnnnnnccacgcgtgcgcgtgtcgcaagtatcaccgggaattgcaaagaagcagaggaccatgtacggagacgctacaaactggaatgaagatgagtatagagaatcaattttgaaggagcgagagatagagacacgcaccgtcttcagaaccgcctgggctcctccggcgagaatctctaatccagacgcatttgttgtagcctccagcgatggaactttagctttccattcactgaactcgcttgtgtctcaatcggcgagttttggctactcgaaaggtcaagatgttatggtggctgaacctgagagagtggttagggcacacgaaggtcctgcttatgatgttaagttctatggggaagacgaagatgctttggtacttaatttgggggatgatggganaagtagggggatggaaatggaaagaatttntcttaatcaaaaggtgtctcttcattttgaaagag

SEQ ID NO: 126036 - DNA, 410 bp, Arabidopsis thaliana
cccacgcgtccggtttcttactaaggttgaatccatggtttccgaaacaaccaaatcttctccacttcactttgttctcttccctttcatggctcaaggccacatgattcccatggttgatattgcaaggctcttggctcagcgtggtgtgatcataacaattgtcacgacgcctcacaatgcagcgaggttcaagaatgtcctaaaccgtgccattgagtctggcttgcccatcaacttagtgcaagtcaagtttccatatctagaagctggtttgcaagaaggacaagagaatatcgattctcttgacacaatggagcggatgatacctttctttaaagcggttaactttctcgaagaaccagtccagaagctcattgaagagatgaaccctcgaccaagctgtctaa

SEQ ID NO: 126037 - DNA, 459 bp, Arabidopsis thaliana
acaagcttagatctctccacagttctttcgttatcttccttccacattgacacttgccttaagaagaggccccgggcgcggggctggaattctttcttcttcaagatttgtaaatgggtgttagttcttcaaagatctaaaatatcaagatcaggaagaaatgggaggtgacttgaaaagccagctatctagagagagccatgtgtttggacttaaggtgtgggaagtaattggtatagctgttgcattgctcatcatagctatcctctctgttctttcgtgttgtcttacttcgaaaaagaaatcaagaagatcgaaaaccggtcttccggttatccaaactcctccggtggtctccaaagagatcagagaagtgagagttgagcatgtctcagctagtaactttgctcctggtgaaggcattcttctaacaattcaggacaaaaataacaaagactc

SEQ ID NO: 126038 - DNA, 589 bp, Arabidopsis thaliana
  unsure (1)..(589): unsure at all n locations
atgattcttccnnnnnnnnnnnnnnnnnnnnnnnnnnnnnnnnnnnnnnnnnnnnnnnnnnnnnnnnnnnnnnnnnnnnnngccacgcgtccgcccacgcgtccggtgccttcagaaaagttgaagctagaatcgtcgagaagagaagaaaaggcttacactgagggactgtctattgcggttgaaagacttgaagcaggaaggaaaagaagaggtaacacatctggagatgagactagcgaaccaagcaataacaaaaagaggaaacatgatgttacccaaaaatattctgatgaagctgatacccagagtgtcatatcaagcccgcaaaatgtgcctgaggacaaacatgaactaccatcaagccaaacccagacgccaagtggtatggtagtcatcagtgaaaccgttaagatcacaagagtaacgtgtgagacagaggtgaccaacaaagtcacaacccttgactgctcagaaaggtccttcggaacgcggggagaaagatgggagaggagaccgaagatggggatgccaatcaactgggataaccccctttgaacaaggattcttaatgaacctgccacaaaaa

SEQ ID NO: 126039 - DNA, 648 bp, Arabidopsis thaliana
  unsure (1)..(648): unsure at all n locations
gctcnnnnnnnnnnnnnnnnnnnnnnnnnnnnnnnnnnnnnnnnnnnnnnnnnnnnnnnnnnnnnnngtccacgcggtgcggattaaaccagtagagagcatcaattttgttttgttagaaaattaagttttagttaatatttattcccatgaaaatgtccgctactactaaagaaagaatcgtaacagacggatcacaaacagtcacagatccgagccctgttttgagtttacgagaagaatattaaaattctcatctttaaccattttatccgatcatgaatgtgagagacgagggaaaaactacggcggagaaacacggcggaggagaggagaataaatcaccggagaacaaatggcgatttaattctcctctagctcaagtgagcttaatgggattcgtttgtttctgttgtccaggaatgttcaacgctctctccggcatgggaggcggtgggtcaaggagatccaccgcggtgctaacaacgctaacaccgccgtttacaccgctttcaccgttttcggccttttaggcggcgggttttacaacgtcctcggtccacggctcacgttagccgctggatgttcgacttacgtactctacgccggatctttcctctactacaaccatcaccaccaccaagcctt

SEQ ID NO: 126040 - DNA, 382 bp, Arabidopsis thaliana
caacgtactatgcttgcatatcagggaacatcctctgtcgttaattatgattcttgtttggctactttgatagccaagacaaatgtctttgttgtggaaggctatttgtttgagcttcctgatactataagaaccataacaaaagcctgcgaagaagcccacagaaacggggcacttgttgctgtgacagcatcacatgtgtcctgcatagagaggcattatgatgatttctgggacattgtggggaactatgcggatattgtatttgcaaatagcgatgaagcaagagcgttttgtcacttttccgcagaggaaagtccaatttcagcgacaagatacatgagccactttgttccgtttgtttctgttaccgatggaatca

SEQ ID NO: 126041 - DNA, 432 bp, Arabidopsis thaliana
ccaaatacaaaggagagagagagagaagaggcgcttcgctacgagatttgcgggaccaaatcaatgcccattggtccctcctccttcacactgagagagccattggccaatttccagatatagacgacgacgacgacgaagcagcagcatgatgatggagtaactagacgaagacgaagaagattagaggagcttctgaagaatcactttgaggaagaagacaacatatctcacaagtgagcaatgggagcgattgctggagaagagctgaagaaaatggagaagacacaggtgcatgttgcccgggaagagaagatattggttctggtgagactgagacctctgaacgagaaagagatcttggctaatgaagctgcggactgggaatgcatcaacgacaccaccgtattgtacagaaacacgttgcgtgag

SEQ ID NO: 126042 - DNA, 538 bp, Arabidopsis thaliana
attttaaaagtttcaatctttttaaaattattttttattttttggtaatcgtttctaagaaatctctcctcccgttgcctgtggactgcctgaatcaaaagacaatggcaacatgttcttcaagcttattggtgttaccaaatttgagattgagttctaaccaaagacgcaatttcaaggtaagagctcaaatctctggtgaaaacaagaaggcgacatcattggaaccagtgaacaacaacggttcggtctctttgtctactactgttcaaaaccaaaaaggggcaaatgaagtgaatgggaaagggaaatccaagagaaagatagtgagtgatgaaattgagttgttatgggatgatgggtatggctccaaatctgttaaagattactttgctgcggctaaagagattttgaaggctgatggtggtcctccacggtggtttagtcccgttgattgtggtcgacctgttgaagatgctcctacgttactcttcttacctgggatggatggcacagggatgggccttgttccacatca

SEQ ID NO: 126043 - DNA, 409 bp, Arabidopsis thaliana
ctcttgcgtgttcactgcctcctcggtgactaccacactgctctcaaatggttgcagcccattgacatcactcagccaggtgtttacaccagtgtcattggttgccatatcgctactatctaccactatggatttgccacccttatgttgcggaggtatgtcgatgctgttcgtgagttcaacaagattctcctctacattttcaagactaagcagtaccatcaaaagtcacctcagtacgagcaattactcaagaagaatgagcagatgtacgctttgcttgctctctccctctccctctgccctcaaactaaactcgttgacgagtctgtcaactctcagctgcgagacaagtatggtgaaaagatgatgaggatgctgaggtctgacgacgaggcctttggtattt

SEQ ID NO: 126044 - DNA, 542 bp, Arabidopsis thaliana
tatacgacttacttagggaacgctggtacgcctgcaggtaccggtccggaattcccgggtcgacccacgcgtccgcccacgcgtccgaagaacacataactgggcggttgcactgaaaactcttattgttattcaccgtgccttgagagaagtggaccagacatttcatgaagaagttattaattatagcagaagcagaagtcatatgctgaatatgtctcattttaaagatgattctggtccaaatgcttgggcttattctgcttgggtccgtttctatgctctattcttagaggagcgattagagtgcttccgtgttttgaagtccgatgttgaggttgaccccccaagaaccaaagatttggacactcctgatttgctcgagcaacttcctgctctgcaagaacttcttttccgggttctggactggcaacctgaggggcagctggtcaaaaccacattttccatgcgccctctcattggttatttctgagagcactaacatttatcaagcactgacagatgggcttagacaatttggg

SEQ ID NO: 126045 - DNA, 825 bp, Arabidopsis thaliana
aaggtgtcagagattgtaggttcccacttctgaaggatgaccatccattgatcatagtggtaaggcttattgtctagtactttttgcatgtcttcttcaaagtcaaaacaaaactggaagcagcctcttcccagatctgaacccgtagcttttcctttcagattccaccggtttgagaggaaaggaaagagagaccataatcgttggatagatgggtttgtgaggcgatccattagagttagggaattagcttcgatgaggtctgaagtgtccagttctggtgcacgaattcttcttcgaattggtggggatagttctctctctattcatttacctttgagatggtaggggattcttgaactcatgattacagagggcgtaaggtttgaagcggagaggcatcagggataaagtagagattcaaacagtttcagggtttcaaacaggataacagggatacacatgattaaaagtttgaaaagggttacaaaacagaattagagagtaaaagcagagacactaccgggatgcatagagaagatacctccacttctcggtgaggtgaaaacagttgaaaacgccggaaaaaggtcactggaactccatctttgcccgttgtgtaaagccatttttggaaggaactgttggataattctgttttagtaaaaagaggtagctgagatctggtttttcaaaagtttccaactgctaatagactgcattggagaaagtgcctgggagaaaactcaacgctctttttaaccttcagtcaataccctctgaattcttttcctctgtttatttctcatttcgcgaattctctct

SEQ ID NO: 126046 - DNA, 415 bp, Arabidopsis thaliana
atcatttgtgacacaagcagcagtatcatcgtcgtcatcactcactagcaaagctcgacctgcttccgtcttcttcaatggtcgctctcttccttctctgaacccgatctctccgtttctgttcctccccacaagtagatccttcgctctcgtcgtcaagagcactctcggtacaaccaccttgcatgcagaaggaatggagacaaatctttacttaggatgactttaagtggggatagctcggaaactgtagagatgacttcaactgatatgattttcgagcccgattttggagcatggagtttccggtttgattgttctgttgaccataggaaggctgcttttcctagtgtttcatttaagaacagcaaagacccggaagttcctattgtgagtcacattgttccagcatata

SEQ ID NO: 126047 - DNA, 433 bp, Arabidopsis thaliana
cccacgcgtccgagaccatcaaaaattgcagaaaataggcttaatctgaatctcttctcctccgtcgaagttttgaattctctctggttctccaattctcctctcgagctgccttaagcttcgcatttacgtttacgttatgcacgaatgagatcatcgtagatcgtgattgaagaagcgagagataaattaggagagcgaagatgagcgagggccagaagttccagttgggaacaatcggcgctttgagtttgtccgttgtgtcatctgtcccgattgtgatctgtaacaaagcgcttattagcacccttggcttcacattcgcgactactttgacaagttggcatcttttggtcacattttgttcccttcatgtggcattatggatgaagatgttcgaacacaagccttttgatgcacgagctgtgatggg

SEQ ID NO: 126048 - DNA, 870 bp, Arabidopsis thaliana
  unsure (1)..(870): unsure at all n locations
catcttttcccacccaagatctctccttcttgtttccccagatctgaaatttcaaaagctacccaattttaactcaagactctgaacaacacatctagatccatttccatggcgagcgcctggaaaaaagacaagaaccaaaaacttttatcaccaaagacactaatctcacttcttgtcctttccattatcttcctctcttctctcttcttcttcttctctaactcctctctccaatactccaatccaaatctctccatcaattccccataccctatccctccttttgattgcttcaaatgtccacaatcaaaacccataatcgcaaacgtcgtcgagaatctcaagtacccttttgtttactctctcgctgatctcggtaatctcccggagaaaccacataagaacattgttaggctacttaaaggtaagccctttaggaaaccagatatctccgcaacgattcaggaggtattggatagtatgagagctagtggtaaaaatgggattgtngttgatgttggagctaatgttggtatggctagctttgctgctgcgggttatggggtttaaagttcttgcctttgagcctgtttttgagaatttacagagggtttgtgatgggggtttgggttaatagagtttctcctttggttactgtgtttgaaggctgctgcttcttgacagaacaggggntnattancctnccataagttggtaggaccggctttacaatagccncggtttccggagggtngggtgcaaagncttncatttcaagtcccccaaaaggggntagcagttcaaggcaaaatccattacccnctngnnaaactaatttccncctnnttaancntgtcnntctntcaa

SEQ ID NO: 126049 - DNA, 408 bp, Arabidopsis thaliana
acaccaaagacactaatctcacttcttgtcctttccattatcttcctctcttctctcttcttcttcttctctaactctctcgctgatctcggtaatctcccggagaagccataagaacattgttaggctacttaaaggtaagccctttaggaaaccagatatctccgcaacgattcaggaggtattggatagtatgagagctagtggtaaaaatgggattgttgttgatgttggagctaatgttggtatggctagctttgctgctgcggttatggggtttaaagttcttgcctttgagcctgtttttgagaatttacagaggatttgtgatgggatttggtttaatagagttgcttctttggttactgtgtttgaagctgctgcttctgacagaacaggggaatatta

SEQ ID NO: 126050 - DNA, 393 bp, Arabidopsis thaliana
cgcggacgctttcaactcaaaatctttttcatttctctgtatcctcctcatatttttattcttttgtaatgacaggttgctttagcttgtctgaagcattagaacgaacttacaaatccgggttcaaaagatccggtctacgacccgtaaccatcgacttgaaagatggaaccgtagtcaacttttgggtatccaaaaccaaacccgaatccaaacccaaacctaatctcctcctcatccacggcctcggagctactgccatctggcaatggtacgacgtagctcgccgtctctcacgttatttcaacctctacatccccgacctagtcttcttcggcggatcttccacgacccgacccgaaagatccgatattttccaagcccaaacactca

SEQ ID NO: 126051 - DNA, 731 bp, Arabidopsis thaliana
tcgccaagctttaattcgcctccttataggaaaagctggtacgcctcaaggtaccggtccggaattcccgggtcgacccaggcgtccgctcactgattagccaagatgtcgtcggctcgttctgcgatcacaaagctaaagctggctcgatcctttggggagagtcagattggtgcatcgcgttcggtggtatcgactcgaggaccggcgattcggtacttcagtgacgataaaggtcgtgtgctcagcgaagaggaacgcgcgaaagagagcatgtatatccagaaaatggagagggaaagactggagaagaagaagaaactcgagcaagataagctagatggtgagaaaggaagtgccaacaagaaacctgagacaagcaagccatgagtttatcactcacagtatacagaatccggtcataaggcaagcagtagtgaaaaacaataatgcctttgacctatgttctctcttggtatgagagatcttgtacttgtacagagatctttaaccttctgatgtgtgtgtttgtatgttctaagaaatcaagtttaaaataatcgagaaaaacaaccatatgcgttgattcaaaataccaaaatggttaccaaacatatttgtgtttacaaaaagcttccctatacattaaaaaaaaaaaaaaaaaaaaaaaaaaaaaaaagggcggccgctctagaggatccaagcttacgtacgcgtgcatgcgacgtgat

SEQ ID NO: 126052 - DNA, 573 bp, Arabidopsis thaliana
  unsure (1)..(573): unsure at all n locations
ccnnnnnnnnnnnnnnnnnnnnnnnnnnnnnnnnnnnnnnnnnnnnnnnnnnnnnnnnnnnnnnnnnncgacccacgcgtccgagacgacagaagggaacccaaaaaaaacgattttgagaaaaccatctcactgattagcaagatgtcgtcggctcgttctgcgatcacaaagctaaagctggctcgatcctttggggagaggcagattggtgcatcgcgttcggtggtatcgactcgaggaccggcgattcggtacttcagtgacgataaaggtcgtgtgctcagcgaagaggaacgcgcgaaagagagcatgtatatccagaaaatggagagggagagactggagaagaaggagaaactcgagcaagataagctagatggtgagaaaggaagtgccaacaagaaacctgagacaaacaagccatgagtttatcactcacagtatacagaatccggtcataaggcaagcagtagtgaaaaacaataatgcctttgacctctgtcctctcttggtatgagaggccttgtacttgtacagggttcttaccttctgagggggnntttttntttt

SEQ ID NO: 126053 - DNA, 808 bp, Arabidopsis thaliana
aatttgttgagcggggaataacaaattttccaccccaggaacccagctattgcccaatgatttacgcccaagcttcttaataggactcaactatagggaaaagctggtacgccctgcaggtaccggtccggaattcacggggtcgacccacgcgtcggggcatctgaagagttaagaggaagaagaagaacgatggcatggagaggaagcatatcgaagtctatgaaagagcttaggattcttctttgtcaatcttctccagctagtgctcccaccagaacgtttgttgagaagaattacaaagatttgaagtctctaaaccctaaattaccaatcttgatccgtgaatgtagtggagtccagcctcagatgtgggcaagatatgatatgggtgtggagaggtgtgtaaacttggatggtctgacagagccacagattctaaaggcccttgaaaaccttgtgaaatccggagctacaaaggcctaagtttgtttgtttgtttgtttttctctatatgatcccgaataagattaaaccgcaaaacaatcatttgacatttcctgtcattctactactttgtaactccgtggtgtcatatcgccttgcatttgagttggtttttttgtgtaatccttgaacttggaattaaaccattccgtataattgaaatcacagaaaggagaaaaataaaccatctctgtttaataaaaaaaaaaaaaaaaaaaaaaaaaaaagggcggccgctctagaggatccaagcttacgtacgcgtgcatgcgacgtcatagtgttctatagtgtaaggaat

SEQ ID NO: 126054 - DNA, 416 bp, Arabidopsis thaliana
acgcgtccgaatagattagacactaaactaagcaaaaacacagagataagttaaaacagaaacaatgtccattttcatcatcttcctccttcttctctctacttctgtatccgtctccggccaaaaaaagcgaagtgtctaccaggttctcgaaaactacaccttaccacgaggaatattaccagaaggtgtccacgactacgacctaaaccgaagaactggcgttttcaaagtccgtttcaacaccacgtgtcagttctccatagactcgtacaaggtcaaatacaaacccgtaatctccggcatcataacatgaggacgggtcataaggttgataggcgtaagcgtcaaagttcctttcctttggatcaacatctccgagggtgtctcgtgacggcgacgacgtcgagttcttc

SEQ ID NO: 126055 - DNA, 511 bp, Arabidopsis thaliana
  unsure (1)..(511): unsure at all n locations
tccnnnnnnnnnnnnnnnnnnnnnnnnnnnnnnnnnnnnnnnnnnnnnnnnnnnnnnnnnnnnnnnnnnnnnnccacgggtccgcgcacgcgtacgggctgcaagaaaaccacagaaggggacagactctggactctgaagaagcaaatggctgggatcaccagcaccgttggattcaacgccattctcgccggagccaccaaaacggtgtcgcatcctgttaaatctaagctctttggtcttcgactctgtgtacccgaattctcaattgtttctctttccccttatcatcatcgccgttgtcccgccatcacttgccgttacggaggcggtggtggcggaggctctagatttcccggcgataggagaggtaggcagaaagaatccgaggatgatgattcgcttaatatctcagctattaggtcagccactgttaggcttattgatgatcagcagaacatgattggtttagtttccanagaagaagctgttcgaagagctgaagatgctg

SEQ ID NO: 126056 - DNA, 706 bp, Arabidopsis thaliana
  unsure (1)..(706): unsure at all n locations
cccaatcaaggcattcagccaagcccaattgccttaacatgcagcccacagattgatgccaagaggacgagggtaccggtacccttctggtggtagaaacatgcctgacggtccaatgccaggagaaatggttccagttgcttatgacatgaatgtaatgccgtatagtcagcctatgtccgctggtcaattggctacttcccttgctaatgctacacctgctcaacagagaacacttcttggtgagagtctatatccattagtggaccagatagagagtgagcacgctgcgaaagtgactggtatgcttctggaaatggatcagaccgaggttttgcatctgctcgagtcaccagaggctctaaatgccaaagtttcagaggcattagatgtgttgagaaacgtgaatcagccatcttcacagggaagtgaaggcaacaaaagtggaagtccaagtgatctcttggcttcactttccatcaatgatcatttatgagaagcttttgttcgagtttttttttttactttgactctcttcctctctatctctctctctgattgacaaatttttgcgggaatctatttgctgttttagactttttttgctcgatatgattgtttctgtttgcccttcttacttttttgggttgacttaaaaaaggatggttttatttaaaaaaaaaaaaaaaaaannnnnnnnaaagtt

SEQ ID NO: 126057 - DNA, 361 bp, Arabidopsis thaliana
aatagtttctctctctctcttttcctttgtctccagagccgatgataaacgacggcggttttcaccggaactgagggaaattaagctggtaaacatggcgggtgaagatgtttcaagcaatttccgagctttggtggagaacgcagaccggaaattcgcaagagttcgcgatcttccggcgtttggaagagcacagagtcattacttccaaaaggtgttcaaagcttatatgaaactatggaactatcagcaatctcataggtcaaagctggtcgagtccggtttaaaccgatgggaaatcggcgagatcgcgagccggattggtcagctttactttagtcaatacatgaggactagtgaa

SEQ ID NO: 126058 - DNA, 413 bp, Arabidopsis thaliana
atacccagaaattatcatcatccacagagaaacccaaaagagattgaagaagatgcattacatgggtttgtttagtagagctggaaacatatttaggcagcctagagcgttgcaggcctcaaacgctatgttacagggcaatctttcattaactccatccaaaatctttgttggaggtctctcaccatctactgatgtggagctcttgaaagaagcttttggcagttttggaaaatttgttgatgcggtagtggttttggaccgtgaaagtggtttatcaaggggctttggtttcgtaacatatgattcgatcgaagttgctaataacgcaatgcaagctatgcaaaataaggagcttgatgggcgaataattggagtgcatccagctgattcaggaggtggtgggggtggtg

SEQ ID NO: 126059 - DNA, 468 bp, Arabidopsis thaliana
gggtcggccacgcgtccgacctagcagagaatgtattcccggaaagaccaggccaacctgaatgccaattctacatgaagacaggagattgcaaatttggaacagtctgcagatttcatcatcctagagacaggcaaacccctcctcctgattgtgtcttaagctcggttggccttcctttacgcccgggagaaccactgtgcgtgttctattctcggtatgggatctgcaagtttggtccaagctgtaaatttgatcacccgatgcgagtcttcacttacaacaacaatactgcatcgccttctccttcatcatctctgcatcaagagactgcaatcaccacagagctcaggaatctcctagtctcttcttctgtggaagcaaaacccacatcactccctgaaacaacctctgctaaagacaccattgttgatgcacagcactgaaaccctgtgttttgtctatctt

SEQ ID NO: 126060 - DNA, 889 bp, Arabidopsis thaliana
  unsure (1)..(889): unsure at all n locations
atgttnnnnnnnnnnnnnnnnnnnnnnnnnnnnnnnnnnnnnnnnnnnnnnnnnnnnnnnnnnnnnnnnnnnnnnntatacgactcacttagggaaagccggtacgcctgcaggtaccggtccggaattcccgggtcgacccacgcgtccgagccaccgtttcctccgcaatcttcataacctaaacaacactcatcccctggtacttaaacaatgggaaagaggaaatcaagagcaaagcctgctcctacgaagcgaatggataagcttgacacaatctttagttgtcctttctgcaatcacgggtctagtgtcgaatgcatcattgatatgaagcatctgattggtaaagcagcttgtagaatctgtgaagaaagctttagtactactatcacagctttgactgaagctatagacatttatagcgaatggatcgatgagtgcgagagggttaataccgcggaagatgatgttgtgcaagaagaggaagaagaagtagaagaggaagaagaagaggaagaagaggaggatgatgaagatgaccatgtctctgtcaaaaggaagtataacttctgagacgagtgttttatcgaaaatcatgtaagtcgtcgtcttagagttatctgctttatgttgtaatatctatctgatgaaatcacaagaacaatctttagtgttttctcagtgtctgatagagaaacatacatttaagtgaacaatctttaatcacaataacagtgtatgattatgatttgtaagtggatttaaggctttgcttaattggttccaatccatacaaaaaaaaaaaaaaagnnnnnnnnnnnnnnnnnnnnnnnnnnnnnnnnnnnnnnnnnnnnnnnnnnnnnnnnnnnnnnnnnnnnnnnnnnnn

SEQ ID NO: 126061 - DNA, 591 bp, Arabidopsis thaliana
  unsure (1)..(591): unsure at all n locations
actctatccaccaagagagggaaaacgaaataaaaatagcacaggggagagacaaaatgagataaggatttgaagcctctcaccactctcctcgttttcgcttcgtgcttatttgtcaaacgcgaacatttcaccgaaacttagcgacttttctcgctttactctttctgggagcaatttctcagagcataggcgagcttaaaggtgacagttcttagctatggctacgattacaccttcttctattagcaatgcctggctcattcctggagcttcttttactgtaaagaagagtgattgttccatcaaatgtagcttttcgcgtaaagctgggaaacagattctatcatcaacgcagagacttgtgttacctttgtcgacttcacttagattgtttcctacacatggaaggcagtttgtgttgcatcctcatcgtagagctactgggactgatgttgtggcggctgtagaggnacaagattctactcccggtggtgcggagggtnaagaaaccgtggcaagtganagcagatgccctgnccaannntcagcaangggggcagcaancctggagganatnaatcctcgggc

SEQ ID NO: 126062 - DNA, 420 bp, Arabidopsis thaliana
cccacgcgtccgcaaaatagtagaagaagaactttttttgatctccgattcttacctctgcaatcttcagattctagctgattcaaggatcttgtttgtgatagaaattggaggagatgggagcattcatgtcgaggttttggttcatgatgtttcctgcaaaagagtataagattgttgttgttggtttggataatgctggtaaaacgacgacgctttataaacttcatttgggtgaagttgttactactcatcctactgttggtagcaatgttgaagagcttgtctacaagaatattcgctttgaggtatgggatcttggtgggcaagataggctaagaacttcatgggcaacatactatcgtggaacacatgctgtgattgtggttatagatagcacagacagagccagaatctctt

SEQ ID NO: 126063 - DNA, 561 bp, Arabidopsis thaliana
aattgtttgacagcatctgtcagtgaaatcgaggaagtcagatcaaatgtaacgtcagttatcaatatggagcatacaaggctatgtggttttggtggatggttccatgttcagttctcggggagaaaagaagaccccgctcagcaagaaatcgagttgaccacagctccaagtgagcagcactgcacgcactggggacaacaggttttcattatgtcgaatcctataaatgttgaggaaggtgataatctgaatcttggtttgttaatgagccggtccaaggaaaatcaccgactaatggagattgagcttaactgtgaaataaaagaagcatctggtaaccccaaagaatctttcaagaagacttacttcatagagtgattgattgattatagagaagctttccttggggcttgctggttcttgtatcccatgtatgaaccccaaatgtaatgttttattgcttcttgccttttttttctatgtaaacgagattgttataccaattttcaatagatttttatatgggtgatataaaaaagggaggaaaaaaaaaaagga

SEQ ID NO: 126064 - DNA, 405 bp, Arabidopsis thaliana
cgaagacgagaaaggaaaagccatgaaagaggcgaaggagaagaagaatccagaaatctccgttagtatcacgatatcaacttggggggcttttgctgtttatgtgattactgggttatttctgatcttcggatttcacgtggtccgtaacaaatactctgtcgatctcatttctgatccaactctcactctgcgtctcctatggattattgagttcccgatcgtggtaatcatctacagcttgttccgacgaaacccagagaaatgctcgtactttagagctgttggccgaagcttagtcggactaattgccggtgctcttataaatgctttgggagctgtttctttgggtgcacctattggaatgcaatctctatcaaaaacaattcactggtcctttctaat

SEQ ID NO: 126065 - DNA, 495 bp, Arabidopsis thaliana
aaggataagccatgaaagaggcgaaggagaagaagaatccagaaatctccgtttgtatcacgatatcaacttggggggcttttgctgtttatgtgattactgggttatttctgatcttcggatttcacgtggtccgtaacaaatactctgtcgatctcatttctgatccaactctcactctgcgtctcctatggattattgagttcccgatcgtggtaatcatctacagcttgttccgacgaaacccagagaaatgctcgtactttagagctgttggccgaagcttagtcggactaattgccggttagtatttctgtttttcagcttattatagctcactaatttttcaaagaagttgatttgctcaatgaggtcacctggcaaattctagatgttaagctaaacctgaagatgtgagtgagtctgagcttcttatgctttcatcttgtgcttttgctgattcagtatcccttgattgtgtctactatatctata

SEQ ID NO: 126066 - DNA, 520 bp, Arabidopsis thaliana
  unsure (1)..(520): unsure at all n locations
aatgannnnnnnnnnnnnnnnnnnnnnnnnnnnnnnnnnnnnnnnnnnnnnnnnnnnnnnnnnnnnnnnnnnnnnnnnnnnnnccacgcgtccgggcagatgttcttggaagtggtcctctggggcctgttacttctgcagttaatcaagctaaagctgggttggatattgatgccgtagatggtgaagtcgccaagctttcatcggcagttggggaatcacctgcacagcttgtaatttcagactcagataggacactagcttccacagggcttggggaaggcagcccaaaggataaaatatcagatgacatgttcactgatgatatctttggggagtctccagctgatagtcagaaaatgggctatctgcgagggaaagggaatggcattcctattgtaaggagtggactcgacgataattgggatgatgcagaaggttattacagttatcaattaggggaactacttgatgatagatatgaaatcatggctactcatggaaaaggtgtcttctctac

SEQ ID NO: 126067 - DNA, 679 bp, Arabidopsis thaliana
atgatactccagctacatcgactacgatagggaaagctggtacgcctgcaggtaccggtccggaattcccgggtcgacccacgcgtccgcgacgatcgattcttcttaatctgtaaaggtcaggaacgattccgagtcaccgatctcgtccgtacgaaaccttacctcgtcgcgaaagtgacgtggcttgaagatcgaccgtccggtgaagagaatctggacgaattggcgaatgaagttgaggttctgatgaaagaagtgattcgattgtcgaatagattgaatgggaaaccagataaggaatctcaggatctgaggaagaatcagtttccgactccgttctcgttcttcgtcggaagcacgtttgaaggagctccgatggagcagcaagcgttactggagcttgaagatacggcggctaggttaaagagagagagggagacgctgaggaatacactcaattatttgacggcagcttctgctgtgaaagatgtgttcccatcgcagccatagtttaatcggtatttagatatttcttctggtctccgtttcggtgttttcagttattattggatacattatatttgatcaatgtgtaaagtttcagacaccttaggtaatagatagtggagatgtgtttcataggatcgtttggattgatcaagaaatgggtttttac

SEQ ID NO: 126068 - DNA, 674 bp, Arabidopsis thaliana
tttggtttaccttaacatccttcgtcgccggaatttgacgactaatatcagacttcatcagcttacgtcgatctacgtacgacggctatgacgatgacgtcgatcatcagatccagtcctactctcgctttcatcgtcttacagatttgcttcatcttctttgcttccactttcccttgctcttctgggtctgaggatagttacaccattactggtagagtcaagattccaccaagcaacgtgattggtcacatagcaaagttctcaaatgtcaaagttatactcaatggtggacagaagattacgtttctcaggcctgatggatactttacttttcatgaagtgcctgctgggactcatttgattgaagtatcagcaatgggttacttcttttctccggtacgagtagatgttagtgctcggcatcgtggcaaggttcaagcaacactaacagaaaccaggaggagtcttactgagctggttttggagccattgaaggaagagcaatattatgagattcgagagcctttcaacattatgtcgatcgtgaaaagtccaatgggtctcatggtgggattcatggtcgttagtgtgttcctaatgcccaaatttatggaaaacatagatccagaggagatgaagcaagcacatgaggaaatgaggagacaaggcgt

SEQ ID NO: 126069 - DNA, 366 bp, Arabidopsis thaliana
caaaacttccgatttcaaaaaaacaatttgaaatttgtcaaaaggaatattctgacgatcgattcttgattcgttttctcgcgtatagagagaaaaatggcgcttaatttatcgcatcagctaggagtactcgccggaactccgatcaaatccggtgaaatgacagattcatcgttgttatcaatttcaccaccatcggcgagaatgatgacacctaaagcaatgaatcgaaactacaaggctcacggaacagatccatcaccgccgatgagtccaattttaggtgcgacacgtgcggatctgtccgtggcgtgtaaagctttcgcggtggagaatggaatcgggaccattgaagaacagagaacg

SEQ ID NO: 126070 - DNA, 416 bp, Arabidopsis thaliana
atttaatatatactatttgttgggatgctattttgtggtttactcgtagtcatgttttcaaaattttcattgttgaaactagtctcatttgtggcaattttgttgcagagacgcagatatggattcgacctgaaatcaatggcgtaccgccctgcccgagggacagtcatagctgtacaacagttggtgataacctttttgtgtttggtggtactgatgggaccaaatatctcaacgatgtgcacatccttgatacttattcacacacttggatacgtccggatattagaggggaaggaccaagggttagagaggctcatagtgcagcgcttgttgacaaacgtcttttcatatttggcggctgtgggaaatcttctgattcggatgatgaagtattctataatgacctttacata

SEQ ID NO: 126071 - DNA, 609 bp, Arabidopsis thaliana
  unsure (1)..(609): unsure at all n locations
gaattgatttattgtgacactatagaagagctatgacgtcgcatgcacgcgtacgtaagctcggaattcgggtcgacccacccgaaccaaagaagatctaaagagataaagagaatgatgaagaagcaagtgacgatagtggcggctcttctgattatgatggctttatgttccagcttgaatatggtggccgaggctcaattaggccccggagactgctacgacggttgctccaccgcctgcgtccaacgtgacccgagaaagacgtcccgatgcgatcgcaagtgttccattcgttgtggtccagatgctgccagggcaagtgggagtggtgtttaaactttatattttaccaagatccatgcatttggatttaattatgttgtaatcttatttaataatcgtatctctggaaaacatattctgtaatttttatgtagttattggaaccaataaataataacagctacaatggtggaattaagtacactagtgctggtttgtaatcaaaaaaaaaaaaaaaagnnnnnnnnnnnnnnnnnnnnnnnnnnnnnnnnnnnnnnnnnnnnnnnnnnnnnnnnnnnnnnnnnnnnnnnnnnnaacaatccg

SEQ ID NO: 126072 - DNA, 537 bp, Arabidopsis thaliana
tacgactcacttagggaaagctggtacgcctgcaggtaccggtccggaattcccgggtcgacccacgcgtccggcacgtccaaaaaacaaaaccaaaaaaaaaaaaaaaaaaagacaaaaaaaaattgaacactccaataaaactcgcctttctcattctctgcattgccctaaccgcaaccgcatttatagtcccagcaaaacgtgacgccgtttcaccacaccaccaaaaagccgtcgatggaatctgcagcgttgtgcaagacaaacgtctatgcagcattaccttaagaaacgtcccaagcgatgatcccgccgttttggttcgttacttagccacggcagcagaagcgtccgttaaaaagggtttgaagttcctctccggaatcaaaccaaaatacaaaggaaacgccttcgccacaacatgcatcaccggctgcgagaaacagctacacaacgccttggacgactttgcagatttctggaaagccgcaggaaaaaatctaacgagcatggctgagaattacttcacatgta

SEQ ID NO: 126073 - DNA, 987 bp, Arabidopsis thaliana
  unsure (1)..(987): unsure at all n locations
aggacgcgtgggcctctcgctgccgtccggtggtttttccgacgacgaactatgacgattcacgctgcagtaatccagaagcttctgaacaccggagcacatctcggccgtcgtgccgccgagcaccatttcaagcaatacgcttacgggacgcgtaacggaatgacaattatcgactccgacaaaaccctaatttgcctccgtagcgccgctcatttcgtcgctaacctcgcccacatgagaggtaacatcttcttcgtcaacacgaatcctctcttcgaccacgcctccgcccacgcgtccggtcggatccaaggagattcgtataatcacaaccgtgcgatgaatctgtggaagatgggagggtttttgactaacagctacagtcctaagaagtttcgatctaggcataaaaagctttgctttggtccaactactatgcctgattgtgtcgttgtgtttgattctgagaggaagagctctgtgatacttgaggcatcgaagcttcagattccggttgttgcaattgtggacccgaatgtgccattggagttctttgagaagattacgtatcctgtgccagctcgtgattcggtcaagtttgtgtatttgttctgtaatgtgatcaccaagtgctttgtggcagaacagatgaagttggggatcaaagaagggagcaatgaagatttgatgaaggatttagctgcttgattttgatatttgcaacaaaagtatgaaacttcacagttgtttttctgagtctggaataattgttcttcagaattgtggttacttcaactttgaaattctgggagttttttacacatggatgattttgtttctctgatggatatttctgtataagattgttgagttctagtgttctacatcttgataaaaaaaaaaaaagggcgaccgctctagaggatccaagcttacgtacgcgtgcaggcgacgtcataactcttctatagtnnnnnnnnnnnn

SEQ ID NO: 126074 - DNA, 378 bp, Arabidopsis thaliana
cggtctcgtgggcctctcgctgccgtccggtggttggtccgacgacgaactatgacgattcacgctgcagtaatccagaagcttctgaacaccggagcacatctcggccgtcgtgccgccgagcaccatttcaagcaatacgcttacgggacgcgtaacggaatgacaattatcgactccgacaaaaccctaatttgcctccgtagcgccgctcatttcggcgctaacctcgcccacatgagaggtaacatcttcttcgtcaacacgaatcctctcttcgacgaaatcattgagctcacttctcgtcggatccaaggagattcgtatttatcacaaccgtgcgatgaatctgaggaagatgggagggtttttgactaa

SEQ ID NO: 126075 - DNA, 673 bp, Arabidopsis thaliana
gttggtcaaggtgatttcccaaaagatggtcagcaggtgacttttcactacattggctacaatgagtctggaaggcgaatagatagtacttacatacaaggttctcctgctagaatccgcatgggaaccaatgcacttgttccaggatttgaaatgggaattcgtgacatgaagcccggtgggcgaagaaggattataatccctccagaattgggacctccggtgggaccttcgaccttcttcagctcgaagcaatttgaagttttcgacgtggagttgctcagtatccagaattgtgagaggaggactataataggtttctactcagatgtcacatgcagttaacttccaaatgatggtcatcactaagcttcaatgaacctgcattcttcaatcttcaatactctaaatctgcacggcagatgagaactacaaagaaacaaaaagaacaattattctttgcttaggcatttatcttgtgggtttcatgtagagatgcacaattacatagagagacagataaagatcatgtaaagtctcgacctttttcataatcgtagtttacttttgttgctttgttaaaaaaaaaaaaacccaaagggcggccgctctagaggatccaagcttacgtacgcgtgcgtgcgacgtcataactcttctatagttgtaccta

SEQ ID NO: 126076 - DNA, 521 bp, Arabidopsis thaliana
  unsure (1)..(521): unsure at all n locations
nnnnnnnnnnnnnnnnnnnnnnnnnnnnnnnnnnnnnnnnnnnnnnnnnnnnnnnnnnnnnnnnnngaaaaagagaaatagaattttgcgtttcaagtactccatctccgtctcttttcctccgcatctaaaaccatctgagaaatatctccgacgaaggagaagaaacgaaaatgacggagactggagtaatcggatgtggctgtcgcggagtcaccggcggcaatttcttccatcccggaggattttctttgaaatcttgtttcctcgagcagagtacaaagcgtaatcgtaactttttccgaagcgtttctatgattcctcctttcaaacgcggtcgtttcatcactaagttgcgttccgtcgccgggaacagccgaatctttagcatggatgctcgagagaaatcacgatcgtttgtgttggtatcatcaaggcacaagagagttccagtttttgtgatgatgccgattgatacatttggaattgatgcttctgggtgtccaaagattaaaaggctc

SEQ ID NO: 126077 - DNA, 520 bp, Arabidopsis thaliana
  unsure (1)..(520): unsure at all n locations
nnnnnnnnnnnnnnnnnnnnnnnnnnnnnnnnnnnnnnnnnnnnnnnnnnnnnnnnnnnnnnnnnnnnnnnnnccacgcgtccgtgatgaggtcacaaacgttgcctgtggggctgacttcacagtgtggttatcgtctactgaaggagcctctatactgactgccggtctcccacagtatggtcaacttggtcatggaactgataatgagttcaatatgaaggatagttcagttagactcgcctacgaagctcagccacgtcctaaagccatcgcctctcttgcaggggaaaccattgtcaaagttgcatgtggaacaaatcatactgtggccgtagataagaatggatatgtttacacgtggggatttggtggatatggaaggcttggacatagggagcagaaagatgagtgggctccacgccgtattgatgtgtttcagaggaataatgttttgcctcctaatgccattctttctgctggttctgcaaactccgcttgtacagctggtggtggacaa

SEQ ID NO: 126078 - DNA, 580 bp, Arabidopsis thaliana
ccgcaagattcattttctcttttatcactcccctcggcgatctctcttcttgctccggcagggtttttctgctgctccttgcttgtccggactctagcttgcctgtaactgttaagagattacaatgggggactccgataatgctataccattttccagaaagagaactgctctgaaagagctgtctcgggacaatcctggtcttgatgatgatgatgaagacacttctgcactcgagagtggtaccttcaacactgctagtaaggaggtgttggcaagcagaagaattatcagagttaggcgcacagatcgatctgctactgcaccaccagcttctaatccatttactggaattcgtttggttccttttactgctcctgctccttctactgctgctgcagaaacgactaaacctctgtctgcgggaaaacaagagacactggctgatggaaggtctgatcgcccccaaggaaactgatggtgacagtaaagaaaagagtgacgcaattgatgctgtaggaaaacaagagacacagggtgatgaaatatatgctaagaccaaggatattattgatggtgg

SEQ ID NO: 126079 - DNA, 557 bp, Arabidopsis thaliana
  unsure (1)..(557): unsure at all n locations
nnnnnnnnnnnnnnnnnnnnnnnnnnnnnnnnnnnnnnnnnnnnnnnnnnnnnnnnnnnnnnnnnnnnnnnnnnnnnnnnnnnccacgcgtccgcgcacgcgtccggaacagctagggaatgttttagatgttgtacatggagatcttcttccagaagataagtccagaatcatacaagagtttaagaaagagggaccaaccgcaatggtaggggacggtgtgaatgatgcaccagctttagctacagctggtgttggtatctccatgggaatttctggctctgctcttgcaacacaaactggtaatattattctgatgtctaatgatataagaaggataccacaagcggtgaagctagcgagaagagcacgatgcaaagttgttgaaaacgtgtgtctatcgatcattttaaaagcaggaatactcgctttggcatttgctggtcatcctttgatttgggctgcggttcttgttgatgtaaggacttgtctgcttgtgattttcaataatatgttgctgcttcgagagaagaaaaagattgggaacaaaaagtgtt

SEQ ID NO: 126080 - DNA, 433 bp, Arabidopsis thaliana
aacccaagctcaaagctgccgtcttgacctctccaacgagctattcggtggcgtcaacgaagcttgcggaagaaaccttgaccggagtcgatgttgccctgttttagccgcttggctcttcgcagctcacgctcgctctgctctccagttaccagctcctgctccaacgccggaatcttctgatcccgacgaacccatgaagcctgacgactctcagaagtgcgtcaacacattgcaaagtgcgcttttgactaaacaaatcaagatccctcagcctaattctagctgtgacgcaatcttgtgcttctgtggtattcgtctccaccagattagctcactctcttgtcccgccgctttcaatgtctcctccggcttcaaaaacgcaactccgaccgccgccgtgaagaatcttgaaaaagaatgccggaactct

SEQ ID NO: 126081 - DNA, 946 bp, Arabidopsis thaliana
  unsure (1)..(946): unsure at all n locations
nnnnnnnnnnnnnnnnnnnnnnnnnnnnnnnnnnnnnnnnnnnnnnnnnnnnnnnnnnnnnnnnnnnnnnnccacgcgtgcgctgtgaatggcatctagaacatggtttgcttaccactgagaatgtggttgatgtgttccagcttgcgctgctgtgtgatttccctcggcttagcctcatatctcaccgtatgatcatgaaacactttaacgaactctctgcgacagaagcatggacgagctatgaagaaaagccatccctttcttgagaaagaagttagagactcagtaatcatcgaagcaaatacgcggaaagagaggatgagaaaacgcaatgatcagaggatatattcgcagctatacgaagcaatggaagcacttgttcatatatgcagagatggatgtaaaacaatagggccacacgataaagatttcaaaccgaaccatgcaacgtgtaactatgaagcttgcaagggattagaatcactgatccggcatttcgcaggctgtaagctaagagttccaggaggttgcgtgcattgcaagagaatgtggcaactccttgaactgcattcacgtgtttgcgcaggttctgatcaatgtcgagtccctctatgcagaaaccttaaggagaagatggagaaacagagcaagaaagatgagtcgagatggaaacttctggtgaagaatgtattggggagtaagaaaatcggaggctctcctttctttttaccggtgacaaactgttaaaaaacattttgtcaatctcaagaagggcgagttttaagcgtttcttgtgatcctatctttaaaacaagtgtaacataatgagtttgaataaatgacacatattttggtcgaccaaaaaaaaaaaaaaagnnnnnnnnnnnnnnnnnnnnnnnnnnnnnnnnnnnnnnnnnnnnnnnnnnnnnnnnnnnnnnnnnnn

SEQ ID NO: 126082 - DNA, 571 bp, Arabidopsis thaliana
  unsure (1)..(571): unsure at all n locations
atcctacatgaatgtctttgatacattaaaaacatgttgaaagattcatggaatctggaatgtttgttttccaagttgtatatgacttgtaattcttgattttaggctagacaaaacagttatatatgttccataggtacacaaaaacatacgagtctatctttgagatttcgatgtcttatctttacatattatgttcgtagaacaaatgtttgacatggagtgtgacgttgtaatgatcctctacacgtgtatatatcaacagtttgtatcacctatccatgtgaaagcagtgtctccttctcttagcctctgcttgcagcaaaattatctttaagcccttatgtatcatcagcttgatcattgaagaactgtctcattgcttgtatgnaaatatctgtgaaaagacgncccgatggtgccaaaggtccaaccttnganaaattaagcagnggggggctacttgcccgacnaattganatngaaggggtgttgtantggaannagggccacttgcnggggtangcccgaagncnnctggaacccaatgccaaccngagccgagggaaga

SEQ ID NO: 126083 - DNA, 447 bp, Arabidopsis thaliana
  unsure (1)..(447): unsure at all n locations
aacttagctcagtgaaaagaagaagaaaaacaagaagctaaaaatgtctatcctttcgtttcctcacactttctttaacatctctccttcactcttctacactatccttatatccagtttagttctactgatcctcacgcgccggagtgctaaatcaaagatcgtgaagcttcctccaggtcctccggggtggccggtggttggaaacctcttccaattcgcgcgctccgggaagcagttttacgagtacgttgacgatgtaaggaaaaaatacggtcctatctacacgttgaggatgggaagtcgaacaatgatcataatctctgattcagctctcgtccacgacgttctgattcaacgtggaccaatgttcgcaacccgacccaccgagaattcgacccggaccatcttcagctncaacactttcacccgtaaacgcttcagcgt

SEQ ID NO: 126084 - DNA, 541 bp, Arabidopsis thaliana
  unsure (1)..(541): unsure at all n locations
nnnnnnnnnnnnnnnnnnnnnnnnnnnnnnnnnnnnnnnnnnnnnnnnnnnnnnnnnnnnnnnnnnnnnnnnnnnnnnnnnnccacgcgtccgaacaaattcacggcggcgattcgaattccggcggcggaggaggaggaagtagccggaacgatgagatttctgtgacgagagcgtcgcgtttcgatgcattgccggaagattgtatctcgaaggtgatttcacatacgagtcctcgggacgcttgtgttgtggcttcggtttcgaaatcggtgaaatctgcggcgcaatcggatttggtttgggagatgtttcttccgtcggagtactcgtctcttgttcttcaatcagcgaatcatttatcgaaaaaggagatctttttatctctcgctgataactctgttttggttgaaaatggcaaaaagagcttttgggtggagaaagctagtgggaagaagtgttatatgttatcagcgatggaattgacgatcatttggggagattctcctgcttattggaaatggattacagttcctgaatc

SEQ ID NO: 126085 - DNA, 624 bp, Arabidopsis thaliana
  unsure (1)..(624): unsure at all n locations
gacctacgcgttcgaaaagtcaacgatttgattcgatcttcttcacttatgctttaaaaccggtcctgtaataaactgtgaagattgtaagaagattaacacgaatcaagaacatcgaactgttgactttagacagagagagacggagatggagtttagtgagttaaaggaagcaatagagaagatagagctcgttgatgctcacgcacacaacattgtctctcttgactcatcttttccgttcatcggaactttctccgaggctgccggcgacgctttaaccttcgctcctcattctctctccttcaagaggaacttgagggagattgctcaactttatggcactgaagtatctttagaagcggttgaggaacatcgtaaaacctcgggtttggattcttttacttccaagtgttttaaagaagctcgaatctctgctctcctcattgatgatggattaaagctagacaagaaacatgatattgaatggcatagaaactttgttccattcgttggtagagtgttgcgtatcgaaactcttgccgagcaaatcctcgaagaggagtgtcctggtggttatttctatggttctgagagtactganaccgcctgttgggatttaga

SEQ ID NO: 126086 - DNA, 477 bp, Arabidopsis thaliana
ggtcctttcaacaattcaatggcagacccaagagttgcagttgttactggttccaacaaagggattgggtttgagatttgcaggcaactagctaacaatgggataactgtggttttaactgcgagagatgaaaacaagggtcttgctgctgtccaaaagctcaagactgagaatggtttttctgatcaagccatctcctttcaccctcttgatgtctccaacccagacaccatcgcttctcttgctgcttttgtcaagacccgcttcggcaaactcgatattctggttaataatgccggagttggaggggcgaatgttaatgttgatgttctcaaagctcagattgctgaggctggtgcgccaactgatatttccaagataatgagtgatacatatgagatagtcgaggagtgtgttaaaacaaactactacggcgttaagcgaatgtgcgaggccatgattccctctcttcaatct

SEQ ID NO: 126087 - DNA, 230 bp, Arabidopsis thaliana
atgctgtgttcttcaattgctttagtattagcttgttcttagtgttcatagaatttagggttattagaatggcttcatcagatagtcgatgtggatttgtccgttcccagatgattcgttcccttgaagcaatattaatcgtgttgctctcgttctctaaattgctctctaatcatgagagtaatcatacggttaattcgagtatgataccgattagtgagcataacttg

SEQ ID NO: 126088 - DNA, 513 bp, Arabidopsis thaliana
  unsure (1)..(513): unsure at all n locations
ccacgcgttcgaatcagaatacctctggaggcagttgagataacttttggacctggagcaccattttcgaaagagtctcgggctgaagctaagataaaattagaagccttggacaagaaagatagggaaagaagaagaacggctgagttaaaaaacaaccttgaatcttatatatatgctaccaaagagaagctggaaacacccgagtttgaaaagatatccacccaagaagagcgcaaggcgtttgttgaaaagcttgatgaggtgcaagattggctttacatggatggagaagatgctaatgccacagagtttgagaagcggcttgactcacttaaagccatcggcagtcccatatctttccgatcagaggagcttacagcacgaccagtagcaattgaatatgctaggaaatacctaactgaactcaaagagatcataaaagaatgggaagcgaacanaacttggcttccaaaagaaaaaatcgacgaggtctcaaaggaagcagagaaa

SEQ ID NO: 126089 - DNA, 561 bp, Arabidopsis thaliana
ccgatctcatcatctccttcctcccttgcgagatctgatcgtatcaatggagatcttctacttcgtggtgttcggtggcctggctgcgatcgtcgccggcttggagctgagcaaatcaaagagataacgcattaacacctcctccgccttcaactccttcaagaagaactatctcctcgtctactctctcatgatggctggggactggttgcagggtccgtatgtgtacgatctctacagcacttatggctttgggaagggagagatcggtcagcgctttattgctggttttggatcttccatgttgtttggcaccattgttggatctcttgccgacaaacagggtcgcaagagagcttctatcacctactgtatcacctacattctcagctgtatcaccaaacattctccccagtacaaagttttgatggtcggtcgtgttctttggggatcgcttcttctcttcttttctctgccttagaatcctggctcgtcgctgatgcacatcaagagaggcttctggctgctaatgctttttgttacttctcttcaaggctattt

SEQ ID NO: 126090 - DNA, 528 bp, Arabidopsis thaliana
  unsure (1)..(528): unsure at all n locations
atgatactccnnnnnnnnnnnnnnnnnnnnnnnnnnnnnnnnnnnnnnnnnnnnnnnnnnnnnnnnnnnnnnnnnnnnnnccacgcgtgcgctctcgtgataatgaaaccggcggtgaactcttgatttccgattagttgacgccgtgattgtgtgtaattgtgttatctgaggcttctagacgccggattcatcagaacgaaagacggtgaagaccatcggcggaagagaaacccaatcggagaatggcagatctgatttggagagtaatcgttgccgaagtctccaaattaggtatgaatcaagccattcttgcttgtatatcgtgattacatgttgtagttgggggtttaatctttcaattcaacataagataaaaatgcaggtaaaacaattgtaaaaccaatgttgaatattgaatttaagattgatgaatactggttttgactctacctggtttgttttttccgaacttggttttgcggatctgactttccccggagggttttgttcaggtgaacaaaaagg

SEQ ID NO: 126091 - DNA, 529 bp, Arabidopsis thaliana
  unsure (1)..(529): unsure at all n locations
nnnnnnnnnnnnnnnnnnnnnnnnnnnnnnnnnnnnnnnnnnnnnnnnnnnnnnnnnnnnnnnnnnnnnnnnnnnnnnnnnnccacgcgtccgcaagaataaaaaccagaagaatccgtataaattatcctaacagtttcttccaatatccaacaaatttcagatttttgtttttgttttcttcttctctacttgagtaatcatcaacgattatggcgtcaagtcagtggacgaggtcggaggataagatgtttgagcaagctttggttctttttcctgaaggatctcctaatcggtgggagagaatcgctgatcagcttcataaatctgctggtgaagttagggagcattacgaggtcttggttcatgatgttttcgagattgattctggtcgagttgatgtccctgattacatggatgactcggcggctgcggcggcgggttgggattccgctggtcagatctcttttgggtctaaacatggcgagagtgaacgcaaaagaggaactccttggacagagaacgaaca

SEQ ID NO: 126092 - DNA, 757 bp, Arabidopsis thaliana
  unsure (1)..(757): unsure at all n locations
nnnnnnnnnnnnnnnnnnnnnnnnnnnnnnnnnnnnnnnnnnnnnnnnnnnnnnnnnnnnnnnnnnnnnnnnnnnnnnnnnnccacgcgtccgcggcccgatcacggagctcacctttcatcgtcaatctccggcggacgaatttctcttcgtagccgttacttctcattatttctttgaaactttcttagaaaattctctgttttggttaggacaatacaaacagaggatgttgatgacactagcggcgacgacctccgtttcatttaactcgaagcttctcctatttcgaatacgttgctcggattctaaccctaagcgtggcttcggctcaaaaaaggaagagaaagacccggcattgcagcaaaggaaatcatcttctaaacagtctgtttctgtacccagaaaggcacctggtctgaatactcagtttgaaggaaaatctggtcgatcttttgatatagacttcgatgaacggctggaaaacatcagaaggtcagctcttgagcagaaaaagacagaagtagttaaagaatttggtccaattgactatgatgcaccagtcaagtctgaccagaaaacaattggtcttggtactaaggttggagttggcatagctgttgttgtatttggtttggtttttgctcttggtgactttcttcccacgggaagtgatagtccaactaagaacacaacagtagttaaaaatcaaatttcagaagaagagaaagccacgcttcagcaaaggctcaaagag

SEQ ID NO: 126093 - DNA, 523 bp, Arabidopsis thaliana
aatacgactcactttagggaaagctcgtacgcctgcaggtaccggtccggaattcccgggtcgacccacgcgtccgccggtttagaaaaaaaatgttggtgttagcattattttccatttacttcttatcaatagaagctgtccggaatgaatcatttcctgcgctattagcttttggagattcaatggtcgatactggtaacaacaattacctcctgactctaatgaaaggaaattactggccatatgggtggaatttcgactcaaaaataccgaccggaagatttggaaacggaagagttttctccgatgtagttgctgaaggtttggggatcaaaagaattgtaccagcttatcgtaagttatacattgctccaagcgaccttaaaacgggtgtttcttttgcatcaggtggtgcaggagtcgaccctgttacatccaaattgctgagagttttatcgccagctgaccaagtaaaagatttcaaaggctacaaaagaaagctaaaaggtgtagtaggcag

SEQ ID NO: 126094 - DNA, 535 bp, Arabidopsis thaliana
  unsure (1)..(535): unsure at all n locations
nnnnnnnnntacgaccacttagggagagctggtacgcctgcaggtaccggtccggaattcccgggtcgacccacgcgtccgcccacgcgtccgcccacgcgtccggtttagaaaaaaaatgttggcgttagcattattttccatttacttcttatcaatagaagctgtccggaatgaatcatttcctgcgctattagcttttggagattcaatggtcgatactggtttcatcaattacctcctgactctaatgaaaggaaattactggccatatgggtggaatttcgactcaaaaatacccaccggaagatttggaaacggaagagttttctccgatgtacttgctgaagggttggggatcaaaagaattgtaccaccttatccgaagttatacattgctccaagcgacctttaaacggggggttcttttgcatcaggtggtgcaggagtcgaccctgttacatccaaattgctgggaggtttatcgccagctgccccactcaaaaatttcaaaggctccacaagaaagctaaaa

SEQ ID NO: 126095 - DNA, 463 bp, Arabidopsis thaliana
  unsure (1)..(463): unsure at all n locations
caatggcgttgttctccccgccaatctcttcttcatctcttcaaaatcccaatttcatccccaaattttcattctccctcctctccagtaaccgcttctctctcctctccgtcactcgagcttcctccgacagtggatcaacctctcccaccgccgccgtctccgtggaggctcctgagcccgtggaagtgatagttaaagagcctccccaatcaacaccagctgttaaaaaggaagaaaccgccaccgctaaaaatgttgccgtcgaaggtgaagagatgaaaacaacggagagtgttatcaaattccaagatgcggaggtggattaatgggactttgggatctgaaacaattcgagaaagatgggaaaaaccgattgggattctgtaatcgttgctgaggcaaaggggaggaaatggncttgaaggggatccngnaacaacgggtaacggcngggccagtc

SEQ ID NO: 126096 - DNA, 589 bp, Arabidopsis thaliana
  unsure (1)..(589): unsure at all n locations
atgattctgnnnnnnnnnnnnnnnnnnnnnnnnnnnnnnnnnnnnnnnnnnnnnnnnnnnnnnnnnnnnnnnnnnnnnnncccacgcgttcggttcgaacggaaatgttcactccgcaaaggaatcgttggccggagacagaccggaagggaaaggccatagctttttccgacgaaatcattacacctcctccacaaagggtgcttctccgagaggatgatgattggcagaagttcaaagaggttggcttgcttgatgaagcttctctagaaagaaaagatcgtgatgctcttatagagaaaatcttgaagcttgaaaaagagttgtttgattaccaacataatatggggctattgcttattgagaagaagcagtggacttcaacaaataacgaacttcaacaagcttatgatgaagctatggagatgcttaaacgtgagaagacgtcaaatgcaattactgtaaatgaagctgacaaaagagaagagaatcttagaaaagctttgattgatgagaagcantntgctgctgagcttgagaatgatttgaagtattgggcacgagacactctgtggtgagtctacttctg

SEQ ID NO: 126097 - DNA, 422 bp, Arabidopsis thaliana
tgatgatatcagttgcacacacataataagctattccgaagatatcaaacggaattcagcggccacgatgtcttgggatgacggaaaacacacgaaggtgaagagagttcagcttacgttcgatgatgtcatccgatctatcgaggtcgaatacgacggaacctcccttaagtcccagccacgtggcaccgctggcaccaaaattgacggatttacactgagctctgatgagtatataacggaggtgaatggttactacaaaactacgttttcgggagaagtcataacgtcgttgacgttcaagacgaacacaaggacatatgggacttacggaaataaaaccagtagctacttttctgttgccgcacccaaagataaccagattgtcggttttcttggaagtagcagccatgctctcaact

SEQ ID NO: 126098 - DNA, 540 bp, Arabidopsis thaliana
  unsure (1)..(540): unsure at all n locations
atgatacgtcnnnctctcctacgactcacttagggaaagctcgtacgcctgcaggtaccggtccggaattcccgggtcgacccacgcgtccgggaaggattgggtcgaaagtgacattggaccagatgtttaagccttcttttatttttaatctgccaccgatttcttggtacgttcgtcggataaccatcaagaccatgaaaactctgatcgaagatcttcaaattacaagtgccatgatccgaggtatttgaaacgtcccaaatccgctacaaattgatagaacatcaaataaagttataaaatcactttttataaatttaaatagcagaatattacatatgactttagaagtgtatgttcttatggtcactttataacatcaaattaaatgtatagaaaatgtttctacccccnncaaaagaaaatatcatcactntttttctctttaaaaggggcgggccgttctaaaggaacccaagcttaactaccgccggcatgggaaggaataagttttttattggggcaccttaaattaaa

SEQ ID NO: 126099 - DNA, 649 bp, Arabidopsis thaliana
tttcctttgcggtaccggtccggaattcccgggtcgacccacgcgtccgctatgcaggaaacaatgagggaggaagagcagcgttggactgggaaacaaggttaaggatctgtttggaagctgcgaggggaatttctcacatccattctgcatctggtgctaaactcctccatggaaacatcaaatcaccaaatgtcctcttaacccaagaacttcatgtctgtgtctctgatttcggtatagctccattgatgagccatcacaccttgatcccatcaagaagcttaggttacagagcacccgaggccatagaaacacggaaacatacccagaagtccgacgtttacagctttggtgtactgttgctagaaatgctgactgggaaagcagcagggaagactactgggcatgaagaagtggtggatctgccaaagtgggtgcaatcagtggtgagagaggagtggactggagaagtgtttgacgtagagctgatcaagcagcaacacaacgtagaggaagaaatggtgcagatgttgcagatagcaatggcatgtgtgtctaagcatccagattctaagccctctatggaggaagtggtctacatgacggaggagattccaccttcaggctccagtcctggtactggtaa

SEQ ID NO: 126100 - DNA, 513 bp, Arabidopsis thaliana
  unsure (1)..(513): unsure at all n locations
nnnnnnnnnnnnnnnnnnnnnnnnnnnnnnnnnnnnnnnnnnnnnnnnnnnnnnnnnnnnnnnnnnnnnnnccacgcgtccgggaggagcacgggtggctcttcgtcggaatatacgacggattcaacggtccagatgcgccggattatcttctctctcatctctatcctgtcgttcatcgagagctcaaaggattgttatgggacgattcaaatgtcgaatccaaatctcaggatttagaaaggtctaacggagacgaatcttgttcaaatcaggaaaaggatgagacttgtgagcgatggtggagatgtgaatgggatcgtgaaagtcaagatcttgaccgtcgattaaaggaacagattagtcggagaagtgggtcggatcggttaacgaatcattcggaagtattagaggctctgtcacaagctctgaggaaaacagaggaagcgtatttagatactgcagataagatgctcgacgaaatcctgaactagctntgatggggtcttgtgt

SEQ ID NO: 126101 - DNA, 481 bp, Arabidopsis thaliana
  unsure (1)..(481): unsure at all n locations
gacggcnggnggttcccgcnccccgtnttggaggatccccggncnngcnnggntatgccnnttntgaggtgggaaaattntccggccgggaagaagtnaaggnaggagggccnggggaaacccgtatgaccggatgctaaagnccaaccaagtaagaaccaaatttggcttgcagaaacctcagattagctctacttatggccacttctactaaactcccttaagcctcgcactctctctcgaaattcatctacttaacatataatcccaatgtttagaaagagagagtgtgtgatgtgtttgtttgtgtgtgttgaacaaacgaacgtgcgtggttgtctttggtgagttggtctcatctttgttgatttttgaatgcgcatgtatttttttcttctttttcatgacgggcaaagtgttatgaagaacaatgcaattgtctaaaacaggataagtcaatggttcgtgtgtgccataaagt

SEQ ID NO: 126102 - DNA, 552 bp, Arabidopsis thaliana
  unsure (1)..(552): unsure at all n locations
nnnnnnnnnnnnnnnnnnnnnnnnnnnnnnnnnnnnnnnnnnnnnnnnnnnnnnnnnctttcctttctcaattctctccttcgaagcttttttcttgtgaggtcagaaaagaaaatgggaagtcaacaagtagcgatttcgtttctgacgaacttggcgaaggcggcgtttgggttaggtgtggcggcgacggcactaaactcgtcgctctacactgttgatggtggcgagagagctgttttgttcgatcgattcaggggagtgttggatcagaccgtcggcgaagggactcatttcttgatcccgtatctccagacgccgcacatatacgatattcgtacgaaacctcacactttctcctccaaatctggtactaaggatcttcagatggttaatctcacccttcgtgttctctttcgccctgaggtttcgcgtctcccgtacattttccaaacattgggtcttgaatacgatgagaaggttcttccatcgattggaaatgaggtcttgaaagctgtggttgctaatttcaatgctgatcagctcctcact

SEQ ID NO: 126103 - DNA, 500 bp, Arabidopsis thaliana
tctcgacttacttagggaacgctggtacgcctgcaggtaccggtccggaattcccgggtcgacccacgcgtccggtgatgtgcaatggatgatgaatgctgactcatcaagtgcagtttatctaggggcttacgacgaagaagaagcagcagcacgtgcctacgacttagcagcattgaagtactggggacgagacacactcttgaacttccctttgccgagttatgacgaagacgtcaaagaaatggaaggccaatccaaggaagagtatattggatcattgagaagaaaaagtagtggattttctcgcggtgtatcaaaatacagaggcgttgcaaggcatcaccataatgggagatgggaagctagaattggaagggtgtttggtataaatatctatatcttggaacatacgccacgcaagaagaagcagcaatcgcctacgacctcgcggcaatagagtaccgtggacttaacgccgttaccaatttcgacgtcag

SEQ ID NO: 126104 - DNA, 759 bp, Arabidopsis thaliana
  unsure (1)..(759): unsure at all n locations
acccattgtcctcctctcatttctctctttccccatttgggtcggattttctaaaaaaaagggggtcacatctctatatcaccacacaaaaaaccataaaatcaaaaatcgctacccacatttctttcattctatcctaaatcctcatcactcaacctgagctcacaaagctaaacaaaaaaaaaagagcttaggcggagaagaagaggagaccaaaacaccaaacaaacaacaatggctgtctcaactatctactcaacacaagctctcaattcaactcatttcttaacctcttcttcctcctccaaacaagtcttcctctaccgtcgtcaaccacaaaccaaccgtagattcaacacactcatcacttgcgcacaagaaaccatcgtgatcggactagctgctgactctggctgcggcaaaagtacctttatgcggaggctcaccagcgtctttggtggcgctgctaagccaccaaaaggcgggaaccctgattccaacacactcatcagcggcacggccactgtgatctgtcttgatgattaccattcttttggataggtacggtagggaagagcagaaagtcaccgttttgggcccacggggcaatgactttgttctcatgtttgggcaagtcaaagcccttgaatatgggatagccggggggaacccggtttttaccatggccctggnttnttnncccncggggttntnagccccaaagttttgtaannagggttncccatggttttgnnggta

SEQ ID NO: 126105 - DNA, 549 bp, Arabidopsis thaliana
  unsure (1)..(549): unsure at all n locations
ctcatcactcaacctgagctcacaaagctaaacaaaaaaaaaagagcttaggcggagaagaagaggagaccaaaacaccaaacaaacaacaatggctgtctcaactatctactcaacacaagctctcaattcaactcatttcttaacctcttcttcctcctccaaacaagtcttcctctaccgtcgtcaaccacaaaccaaccgtagattcaacacactcatcacttgcgcacaagaaaccatcgtgatcggactagctgctgactctggctgcggcaaaagtacctttatgcggaggctcaccagcgtctttggtggcgctgctaagccaccaaaaggcgggaacccctgattccaacacactcatcagcggcacggccactgtgatctggcttgatgattaccattctttggataggtacggtggaaagagcaggaagtaccgctttgggccacgggccatgactttgntctcatgttgggaggtaagcnttaaggtggatancggggacaccgttttacntggactggcttttaccccgggtttgc

SEQ ID NO: 126106 - DNA, 647 bp, Arabidopsis thaliana
  unsure (1)..(647): unsure at all n locations
ctatcctaaatcctcatcactcaacctgagctcacaaagctaaacaaaaaaaaaagagcttaggcggagaagaagaggagaccaaaacaccaaacaaacaacaatggctgtctcaactatctactcaacacaagctctcaattcaactcatttcttaacctcttcttcctcctccaaacaagtcttcctctaccgtcgtcaaccacaaaccaaccgtagattcaacacactcatcacttgcgcacaagaaaccatcgtgatcggactagctgctgactctggctgcggcaaaagtacctttatgcggaggctcaccagcgtctttggtggcgctgctaagccaccaaaaggcgggaaccctgattccaacacactcatcagcggcacggcccactgtgatctgtcttgatggattaccattctttgggtaggtacggtaggaaagagcaggaagtcaccgtttttgggccacggggcaatggctttggtctcatggtttggcaagtaaaggccctttagaatggttgccgcgggaaccggttttacctgtactggtttttgccccgggtttttaagcccaaggtttggtggggggttccccaattttttttgggggnaagngnttttnggnttantttttttggnta

SEQ ID NO: 126107 - DNA, 900 bp, Arabidopsis thaliana
  unsure (1)..(900): unsure at all n locations
ctcctccaaacaagtcttcctctaccgtcttcaaccacaaaccaaccgtagattcaacagcgctgcatcacttgcgcacaagaaaccatcgtgatcggactagctgctgactctggctgcggcaaaagtacctttatgcggaggctcaccagcgtctttggtggcgctgctaagccaccaaaaggcgggaaccctgattccaacacactcatcagcgacacgaccactgtgatctgtcttgatgattaccattctttggataggtacggtaggaaagagcagaaagtcaccgctttggacccacgcgccaatgactttgatctcatgtatgagcaagtcaaagctcttaagaatggtatagccgtcgagaaaccgatttataaccatgtcactggacttcttgaccctccggagcttattcagcctcctaagattcttgtcatcgaaggtcttcacccaatgtttgatgagcgagtaagagacttactagacttcagtatctacttggacattagcaacgaagtcaaattcgcttggaaaattcagagggacatggctgaaagaggtcacagtttggagagcatcaaagcgagtatcgaagcccgaaagcccgacttcgatgcattcatcgacccgcaaaagcagtacgcggatgcggtcatagaagtgcttcctacgactctgatcccagatgacaacgaagggaaagtgttgagagtgagattgataatgaaggaaggtgttaagtacttcagcccggtttacctgttcgatgaaggttcaaccatctcgtggattccttgccgccccgctcttgaaggttccaagctttacgtacgnttncatgcaangnnatagctnttctnagtgtacctaaattaattnantgggccttggttt

SEQ ID NO: 126108 - DNA, 521 bp, Arabidopsis thaliana
  unsure (1)..(521): unsure at all n locations
nnnnnnnnnnnnnnnnnnnnnnnnnnnnnnnnnnnnnnnnnnnnnnnnnnnnnnnnnnnnnnnnnnnnnnnnnnnnnnccacgcgtccggcgagttgtggaatcaaaagctcttcgggagagagttttctatggaggcattgagcaccagttgcgtagagaggtatggccctttctcttgggatattatgcatatgactcgacatatgcagagagagaatatcttcgatctgtcaaacggatggaatatgcaacattgaaacagcagtggcagagcatttcccctgaacaagcaaaaaggttcacaaaatatcgggagagaaaaggattgatagataaagatgtggtaagaactgatagggcatttgaatactatgaaggggatgacaatctacatgtcaatagcatgcgtgatattctgttgacctactccttctacaattttgacctgggttactgccagggaatgagtgattatctgtctcctatcttgttcgtgatggaaggataatcaaaaatctt

SEQ ID NO: 126109 - DNA, 457 bp, Arabidopsis thaliana
atcagattctacgctgtagagatgtcgctaccatgtttatgtccatgcccatcatcgccgatttctctttcattgtgttctccgagattcaatcttcttaacacaacaagcaggagactaggtttgtctagaaactgtagaactctgcgaatcagttgttcatcttcatctactgtcactgaccaaactcaacaatcgtcttttaatgatgctgagttgaaactcattgacgctttgatcggaattcaaggccgtggcaaatctgcttctcctaaacagctcaatgatgttgaatctgctgtgaaagttcttgaaggtttagaaggcattcaaaatcctacagattctgacctaatcgaaggtcgttggcgattgatgttcaccacaagacctggaactgcatctccaatccaaagaacatttacaggagttgatgtgttcactgtgtttcaagatg

SEQ ID NO: 126110 - DNA, 397 bp, Arabidopsis thaliana
catttcttctacagaaccctaatttcatgttctaggtgtctctcgaatggttctcatctcattgattactcaatctctagggtttagtggttcatccaaattcgtaccctaatgggtgccgtagcgatcaatcgtaaacgcagcgacgaatccttcaatttcattaatcaacaatcaaccaaccctttacgaaattcaccgtatttccaagcttccaagaaacgaagattctcattcgctatgtctgaagattctggtaagccagcgtcttcaaacccaacaatttcgaggatttcaaggtaccctgatgctaaagctcctcttagacgagagattcatgctcctagtagaggaattcttagatatggaaaggcaaaatctaatgattactgcgaaa

SEQ ID NO: 126111 - DNA, 569 bp, Arabidopsis thaliana
  unsure (1)..(569): unsure at all n locations
aacggagggggaaaaaaagngggggagccttttggtgtcactctnanaagagctatgacgtcgcatgcacgcgtacgtaagcttggatcctctaaagcggccgctcccgagggagagcggacatgttgctctttgctttcattcaaatatgcatttgtttggggggaaaggaggcatcagtcttccactctggatccgagagattggagacgtcaataaggacatatactatagagataaaagcggattttccaacaatgactatctcacacttggagtcgatcaacttcctttgttcggtggccgtactgctgttcaatgctatgaagattttatgctcagtttttcaacaaaatttgagccatatcttgggaatgtgattgaagaaataagtataggtcttggtccttcgggggagcttagatatcctgcacatccttctggagatgggaggtggaaatttcctggaattggtggaattcccatggccttgaccaggtccttgatggaacaactctgatgggcctggggctcccccaagaaggcgaatcccttattgggggaagcag

SEQ ID NO: 126112 - DNA, 521 bp, Arabidopsis thaliana
ggcggcagaatctgagatcggatctttagagagagagagaaagatgcagagggacgtgtcgagctgcaacacttacaactatggagacgctctctattgggacgctcgttacgtgcaagacgcgctttctttcgactggtaccaatgttactcttctctccgcccttttgtccgcagcttcgtctctacttcttcacgagtcctcatggttggctgtggcaactccctgatgtcagaggatatggtgaaggatgggtatgaggacatcatgaatgttgatatctcttcagtggctattgagatgatgcaaaccaaatatgcatctgttcctcagctcaaatatatgcaaatggatgttagagatatgagttactttgaagacgattcctttgacactattattgataaaggaacccttgattcattgatggctgattaaacctggagggacctactttttgataacctacggtgatccgaaagtgagaatgcctcatttgactcgttctgcgtacaactgg

SEQ ID NO: 126113 - DNA, 821 bp, Arabidopsis thaliana
cccacgcgtccgttcctttctagttttatatttcaagttcttttttttttaaccttgccatcaatacaaccatggcaaggatttctctgttgttctctttagccttagttctagccatcgggtccgtcttggctcacccacctacccacaagaaattacaaaagaccttgtgtccatctactttgtccaaagttcaagctttcccttaccttgaagtctctagcttcgtcgagaagaaggttcagttcgcaccaaaaaccattgcgttcaagtctttgttctccatctgcaagagctacatcgactttcttgggggcgttaagttttctgcctccagagatgtgtttcacgtcgttcatgtcaaattcactttgatgaccaaggcgatggttattgcacaagcacacattggagttgaaggagacctcgctgttaagttgggcaaaagctacaccgtgatggctgaaaggtttgtcaaccttttggagatgatgtctacggtctcggccaagtataagttcgatgctaatgctaagataagcgctagtgagagtgctgagattgaaaaatgtgtgatgaagttgaagagtgccattaggtcttacgtgaaggtgatctctcagtgcagcacgaaattctctgctggaaagagtattggtttccccacttaccccgttggtttcattggaggtatagctaaacaaggtgtgggatatgcgggtaaaattgttggagctcatggccaagttggagccggattcgaaatcggagctaaagctaaggttggagttcagagtgcacaattcttgtaagttctacca

SEQ ID NO: 126114 - DNA, 808 bp, Arabidopsis thaliana
  unsure (1)..(808): unsure at all n locations
ccaagcctcttaaaaggaaccgnttgttttccctggggccttaagnccgcgncnttncgatttnctgnacaaaaatctgggatcttgcaagctaagtggatgcccgatccaagagtatgtagaccaaccatggaacaagaagaacgagatgttcaagttcatggctaacatttgccaaaagaagtgtgaggaagaatacttgggattcgccattgtgccaactaccacatcatctggtaaagagagctttatctactgcaatgcggatcatgccaagcgccttaaagtatcgcgtgaccaagcctctgcttctctctgaaaacattctcatctgattctgtttgatctcggcatgtgtgtgtccagtgtgtacaaaacaggaaactttcttctatattattccgattctacaaaattgcgtctaaatatttaagtttataccatctctatgagccactgtaaaacttgccatcgacttctagtctatttccagtgatggtttgattctcccaacgcttacgtgctttttaaagatatgaggcttaagagtgttaccatacacttggtttattcttccaaaatatcttctcgtaaccggttttaagttctcagctgtatcgtctcttgaccatttactacactggtaaatggtgtgaatccaagaaagtgttaatgccattaaaaaggttcacattaaaaaaaaaaaaaaaaaaaaagggcggcaacannnnnnnnnnnnnnnnnnnnnnnnnnnnnnnnnnnnnnnnnnnnnnnnnnnnnnnnnnnnnnnnnnnnnnnnnnnnnnnnn

SEQ ID NO: 126115 - DNA, 363 bp, Arabidopsis thaliana
cttctttcaatttgccattccttctgcaatgatgtgttgccttgagtggttagctttcgaggtcattactttgctgtctggtcttctacccaactcaaagctcgaaacatcggttatttcgatttgcctcacgacctcttcattgcattacaatctagtaaatggaattggtgatgcagcaagcaccaatgtggctaatgagctaggagctgggaatccgcgaggggctcgtgattctgctgcggctgcaatcataattgcagctgttgagtcagttattgtgagctctagtctgttcttgtctcgcagtgtgtggccttatgcatatagcaatgtggaggaagtaattagttatgtgactga

SEQ ID NO: 126116 - DNA, 485 bp, Arabidopsis thaliana
ccaatctccctcaaaactcataaacatattgctctcctttgttcatttctgggtttacgcttctttcgactttatgggtttcggagcttagttttactacaatttcgtttggaaaagagctcttatttgatgttcatggcgtctctctccttcacccaattcttatcattccccagatgcaatgcagatgttccttgtctgctccagtcgcatggttttgtgaagtttagaggtgaaagatggaatgggaaacaaagcttttctatggctgctggtaggagaaagttatcagagtcagcacctcttgaagaagaaggtaatgatggaaacggtgcggttgtgggaaagaaaccatctaaaagtgttaagagaacaacgaagaagaaggttgtggttaaggatgaaccattagaagaaatttctgaatttttgggtgataatgatgatgttttagacaaggaaagcattgtctcagcttttgaacc

SEQ ID NO: 126117 - DNA, 536 bp, Arabidopsis thaliana
cgccgacattggccgacagagttttggcttctcacgctttagaaagaagatgaaggagacgagaaagctgaagaagagtaatctccctaaagaagaaactgtggggaaaaaatttcagaggaagaagaatgagaaagtgagcgatgtcgaattaagcgaggatcctcaggctgcacagcttcaagctaaatcaagtgagaaacccaatagaaagaagattcagaagggtaaggaaataaaaagctctccagctgatggtaagctgagtgggaagatgaagaagagaaaagagaaagtaggcaatgttgatataagcgaaccgattctggaagctatttcaactgagaaagtaaaagaaaagaagggcaaaatgaacaagactaagaagaaaaggaaggccgaggaaataactagatcttcagtcgaagatctgaaaagagaaagcaagtttaagaaatcaaataagaagaaaaagatggacatgacctctaagaaagagaacaaaattgaagaggaggaagatgtttatcaaattt

SEQ ID NO: 126118 - DNA, 693 bp, Arabidopsis thaliana
  unsure (1)..(693): unsure at all n locations
nnnnnnnnnnnnnnnnnnnnnnnnnnnnnnnnnnnnnnnnnnnnnnnnnnnnnnnnnnnnnnnnnnnnnnnnnnnnnnnnnnnccacgcgtccgcttacgcgtcttcataatcttcctctttttttctttgtctttgatattcaaagtttttgtttattttttctttgcttaacccggagagacaccctctccataaatttagttttgatccctctgggttccttgaagaaaaaaacaccaattccattcatattcttcttcatacgttcaataattcttacgaggacgagatcttcctaacgtctttgatcttcttcattaggagataagtctaaactggtcgaagatgttgggagatttcatcatcagactccttgtattgatattagggtacacatacccagcattcgaatgctttaaaacggtggagaagaacaaagttgatatcgaggaactcagattttggtgccaatactggatacttttggcgctaatttcatcattcgagagggttggcgatttttttatctcatggttaccgttatacggagagatgaaagtagtcttcttcgtatatctctggtaccctaaaacaaagggaacgagacatgtgtatgaaacattgttgaagccatacatggctcaacacgagacagagattgacagaaagatcatggagttgcgagctcgag

SEQ ID NO: 126119 - DNA, 416 bp, Arabidopsis thaliana
gcctgaccgaactcctcatccagcactccatgaggttaagcattgttaccaaccaatcaaggtttcattgacggatggcatgataaaggttgcaaacacttactttttcaacacaacagaagaattggagtttagctggacaattcatggggatggtcttgaacttggatctgggactctctctattcctgtgataaagccacaaaatagttttgagatggagtggaagtcaggtccatggttttctttctggaatgactcaaatgctggagaattgtttctgacaataaatgccaagcttttaaatcttactcgttcgcttgaagccggtcatcttttgtcttcaacgcagattcctttaccagcaaagggacaaataataccgcaggcgataaaaaagacagacactagtatca

SEQ ID NO: 126120 - DNA, 543 bp, Arabidopsis thaliana
  unsure (1)..(543): unsure at all n locations
aatgannnnnnnnnnnnnnnnnnnnnnnnnnnnnnnnncggacgcgtgggttctcctacgaatgaaattgaaattaatttgagccacgcgtccgggatcgggtcggatcttttgaagttcttcaatggcgcagatactttcccctgtttgtacggatcttttgaagttccagaactcagctcttagctccagatcaggtgcgtcgccgcggttctcggcgaagaccaccggtgcttcttcatcttggtacttacctcggtacgcaggaaagaggcgaaccgattcaatcggaagattgagagttgcaactgaggatgcttcttctctttccaccggtgatgtcgccgatgattactatgccgttctcggactccttccagatgctacgcaggaggagattaagaaagcttactataactgtatgaaatcgtgccatccagacttgagtggcaatgaccccgaaaccacaaatttctgcatgttcattaacgatatctatgagattctcagtgaccctgtacagcgtatggtttacgatgaaat

SEQ ID NO: 126121 - DNA, 1405 bp, Arabidopsis thaliana
  unsure (1)..(1405): unsure at all n locations
nnnnnnnnnnnnnnnnnnnnnnnnnnnnnnnnnnnnnnnnnnnngatttttgtatactacgtgtctgtgtatgacaccatcatataaaaacgagcggccatggaaatcgcttcttgttcaattcttaacaatcttcaaatttcttgtacaaagacttctattttcactcagtatttgagcgagcgttcttcacacgacactggaagacgcaatttcttgcctttttcaaatttccctggaaaatctcagattctcggaaaatgcttgcgattgcagagattctcttcgatttgcttatcagctagcagagaagacgtaaacccatctgaagaattcgctgtgatacttgaggttgatagggttatgattgatacatggtcaagtaatcgccaagcgttcaatgtagcttttcaaaagcttgggctagattgtgcaaattggcctgaaccagtttattcagacttgttgagaaaaggtgctgctgatgaagagaaaatgttgcttttgtatttcaaccagattggttggccttcgtcgttgccaaccagtgagaaagcaagttttgtaaagagtgtattgcgagaaaagaaaaatgcaatggatgagtttctcatatcgaaaagcttacctctgagatctggagtgcaagaatttatcgataatgcatacgcggagaaagtaccggttgctatcgtaacagcctactgcaagagtggagacaaagtagccctatccattgtcgagatgcttgggcaagaaagacttccaaatgtgaaggttatcggagacaatgaggtagaacagagtatgtatggacaacttgttcttgggaaaggagtttcttcaagtctagaggagcaactagtgaaggaagtaaaaaaagcagcgtccgctgagaaacagaggatagcagaagaagttgcatcaatgctaaagcttaagtgttgaatattgacacaccctccacctgagagattggaaaaagattgcttgttgcattcccgtgctgctgcggcaacaccataggattacctgtcaaataactgtgtacttgttgctggtagtcaacctggagtttctgctgcaaagatgataggcatgccgtgtgtagtcatgcgaagcagtttaacggcaagaggtgagtttccatcggccaaaggtgtaatggatgggtttggaggtgcagacctaacaatcccaaaacttaggaacaagatcaagtcttgaagaaacaattcaagaaagttgtctaaaaatcagaatctggaaatactgtcgagttattgttcacttctcgaagttcttgtgaagttttcgacttgatatatattaactatagctacgtgttgtgcggccgcgaattcgatatcaagcttatcgataccgtcgacctcgagggggggcc

SEQ ID NO: 126122 - DNA, 560 bp, Arabidopsis thaliana
ctcgatcgtcacgttttccagaaatctctcactatcgccatcgattttagcagacattgaagaagatgggagtattcacattcgtatgcaagaatggaggcggcgcgtggagcgcgaagcaacacgaaggagaacttgaatcttcagcttcttctacctacgagctccagcgtaagctcgttcaggtatctctctccgctgattcctccggtggcgttcagtcttcgttttctcttgtctcccctacctccgccgtattccaggtaattgttggtggtggtggtggtggaggattctctgctggaggagctgcctcaagtggaggtggtgcgggtgaagctgcagctgcccctaaggaagatgagaagaagaaagaagaatcagaagaggaacaaggagacttcggattcgatctctttggttaagattgaaatagtattttgcaggtgttggtttgagctttccatttttgtgtggggtgtttcttccattgtcaagtgtgatatggtacactgctttcaattatatttcgtgagtaatgacaagtttctctttcgatc

SEQ ID NO: 126123 - DNA, 533 bp, Arabidopsis thaliana
  unsure (1)..(533): unsure at all n locations
nnnnnnnnnnnnnnnnnnnnnnnnnnnnnnnnnnnnnnnnnnnnnnnnnnnnnnnnnnnnnnaaccccaaaagaaaaaacatcttcgcgtcaccaaaaatggcttcgtcttccaaagcactgatcgaatccataggctctcttgacaaagactcatacgtttctctcttatcaaaactcataggcgaatctaaattcgtccagaacaatccgccggagctcatccctcaagaggacctaatcgtcaaacacgtccttgactctctccgtccttatagcacagaaactggtggtggtcctctggtgatcaatcatgtcgcgtatcattcaggtagaggtaatctcatcgttgagtacccaggatctgttcccggaaagatcttgtctttcgtcggaatgcatatggacgtcgtcactgcgaatcctgatgattgggaatttgatcctttctcgctaagcatagatggtgataagcttcgtggtcgtgggacaacagattgtcttggtcacgttgctcttgtcactgaactcatg

SEQ ID NO: 126124 - DNA, 446 bp, Arabidopsis thaliana
cttgaacaaaaaaagacttctataggccaaatgctgaaaaaacttgcgaggaatgcgcgtaaagcttgtccaaatgggaattcacttccacaatgggtccttacatcgagagacagaggtggtcttgcatgcaacctcgagggcattatagaatcaccgattacaaatggctacaggaacaagtgtgagttctcggttggattatctcttcaggggaagccaactgttggattcagtctaggaagtttttgtgcgggtgtgacagcagtcgaggagcctgtggattgccccaacgtctccaaaattgcttctcaatatgcttcaatatttcagaagtttatagaaaattcaaaattccaagtttggaataggtttcaacatagtgggttctggcggcaattgacggttcgagaggggagaaaacccggcgtgttttcaaatgatga

SEQ ID NO: 126125 - DNA, 378 bp, Arabidopsis thaliana
tttttccaaatctgccagagtccgtaccatgtccaccatgcctccacaatttcccttggagatccgctcagctcttcgccgggcttcctccaccgtctatctccaccgttccatcagcaccgtcactactactccttcgtttcgtcaccgaacgacgttgttacgaccgagagctttctcttcttcctctgttaagctccccacgaaaccttctctttgcaccgccgacgagctttcattacgtctccgttcctaacaccgattggcgtctcgctctctggcgctacttgcctccctcctcaggctccgacgaggaatcatccattgttactgttgtctggagtaggaactaatgccatcggataaggatttatcttc

SEQ ID NO: 126126 - DNA, 458 bp, Arabidopsis thaliana
  unsure (1)..(458): unsure at all n locations
aacctatagaaagttctcatctctcaaataaacatgtcttttttcggaaaactcgcagacactgtggtatcttttgcaaacgattctgcgaaatctgttgtagaagaagtggtaaatccaacggtgtcttttgcaaacaattctgcaagaactgttgtagaagaagtggtaaatccgacggtctcttttgcaaacgactctgcgagaactgttgtagaaaaagtgctaaatccaacggtatcgttcatcgatagccagctccagcggccacgggacgtccttgtgcaacaacaaatcctagacaatctccaagaatcgaatggttcgaatttccctggggatgactaccactcgcctgaccggaagaactggatggcccatctctctgtggataaactaacccttaacaagatncgtgtggccaggaactcacgactcagccaccaacggaattgggg

SEQ ID NO: 126127 - DNA, 906 bp, Arabidopsis thaliana
  unsure (1)..(906): unsure at all n locations
atgatactnnnnnnnnnnnnnnnnnnnnnnnnnnnnnnnnnnnnnnnnnnnnnnnnnnnnnnnnnnnnnnnnnnnnnnnnnngccacgcgtccgagaaaatggagattttgagatttttgctttctctctttatatattttcttttgttgaatctttctctttcacattttccttcgatttcagctcaaaggactaaccatgaaaacttcctcaagtgtctctctcaccgaatcaacgaggacgactcaagaatcatacacacatcaaaagatccttcgtatttctcaatcttgaattcttccatacaaaatccaagattctttgttctcgaaacacctaaaccggtttcaatcatcactccggttcaagccaccgatgttcaatctacgattaaatgcgcacggcttcacggtatacacatcaggactaggagtggtggtcatgactacgaaggtttatcttacatgggtaaaagcagaccgttcgttgtcattgatttgagaaatctccggtctattacattagatgttgataaccggaccggttgggttcaatccggagctacaattggggaattgtactatgagattggaaaattaagcaaatctttggcctttccggccggtctttatccaaccgttggcatcggagggcaattcgggggtggtgggtacggtacgttgatgagaaaatacggcttatcggcggacaatgtaattgatgcacatattgttgaccccaatggaagcttttttgacccgaaaggcctgggtggaagatttcttttggggcttattccgtggagggcggagggaatcaagccttctcctggttggtcctgcccatgggaaagaatttagaatttggctttgatggatttcccgtcgcggaaagtaaaccggatt

SEQ ID NO: 126128 - DNA, 538 bp, Arabidopsis thaliana
  unsure (1)..(538): unsure at all n locations
aggnnnnnnnnnnnnnnnnnnnnnnnnnnnnnnnnnnnnnnnnnnnnnnnnnnnnnnnnnnnnnnnnnnnnccacgcgtccgcccacgcgtccgcccacgcgtccgtctgcctctgcctcagcctcctctcagtcgccggagacggcaatgattaggtcgtattcagacaaaaggtctacttcgaggtctttttcttgcaggacaagtaacgagtggtggttcgacgatatgtcaattctcgggccaaaaatcattgaaaagctgataaatacacttggtgcgcatgataagaacaatgacagcttggtcctcacaaaatttcttctccattacctcaagacaaaggtcccaaacaagtcaaccaacaagctcgagtattcaggtttagctgatacagcggttcaaggagtggttttcgcagcgaaaaccgcgttttcatgcagaaaaatgttctgggttctgcgagttttatcgggatttagcataagtaaagaatcaagaattggtttagagagggttataggagaaatgctggat

SEQ ID NO: 126129 - DNA, 511 bp, Arabidopsis thaliana
tcctacgcactcactatagggaaagctgctacgcctgcaggtaccggtccggaattcccgggtcgacccacgcgtccgattttgttctccgcaatgcgtgttgttgatcatgccgtctcacctgatacctctgtgctaagtgttgtactcaaggcttgtggtcaaagctccaatattgcatatggagaatctttgcatgcttatgcggtgaaaacttcgcttctcagctctgtatatgtgggaagttctttactggatatgtataagagagttggaaagattgataagagttgcagagtctttagcgaaatgccttttagaaatgctgtaacatggacagcgattattacggggttggttcacgctggtcggtacaaggaaggtcttacgtacttttctgaaatgtcgagatcggaagaactatctgatacttatacatttgctattgccttgaaggcttgtgctggtttacgtcaagttaaatatgggaaaggcgattcatactcatgtg

SEQ ID NO: 126130 - DNA, 302 bp, Arabidopsis thaliana
cgcgtcagccgagtctctcgttccttctctggtggcgttttcaccatgccgaagcattacagaccaacggggaaaaacaaggaaggaaatgcggctaggtatatgaccaggtcgcaagctcttaaacatcttcaagttaacttgaatctattcaggaggactatgtattgtcaaaggtatatttccccgagaaccagagaagaagattaagggaaaccatcacacttactaccatgtcaaggacattgctttcctcatgcacgagcctcgtcttgagaagtttagggaaatcaaaacatacc

SEQ ID NO: 126131 - DNA, 385 bp, Arabidopsis thaliana
  unsure (1)..(385): unsure at all n locations
tcgtcggcgaatctgagaactaagcatcaacaacaagaacaatgagagcgaagtggaagaagaagcgcatgaggagattaaagaggaagcgtcgaaagatgagacagcgatccaagtagactccaagttcctcccccaaataactatcggctctctgtgattctctttttagttttgtcttgaaactttttctttcttctagcaaaccttttttattttgattatggaagttttgaacattctgtgatgtatgtaaaacttgctcttgtgctcttatctatctaatcacagatcctttatctannnnnnnnnnnnnnnnnnnnnnnnnnnnnnnnnnnnnnnnnnnnnnnnnnnnnnnnnnnnnnnnnnnnnnnnnnnnnnnnnn

SEQ ID NO: 126132 - DNA, 476 bp, Arabidopsis thaliana
cacagagaagaagcacaatcggaagaaaggagaagacgaagatgtcgttggtatggttggaagcgatgttgcctctcggaatcatcggtgggatgctctgtatcatgggcaattctcagtactacatccacaaagcttatcatggccgtcctaagcacatcggccacgatgaatgggatgttgctatggaaagacgcgacaagaaagtcgtcgagaaagctgcagctccttcctcatgattcgctttatctcttttgtgttcctcaggggcttaaggtgaccacttgtggtgacaaataaagtgcattccagaagaagaagaagctgggggatctagtactttcattcccatttgattttccttggacatattaaagctttcagaaatcagacctcaataacatttggtttatcaatatttctctattcgtgatattttgtatgcttttaagttgcatgatacactgaactactct

SEQ ID NO: 126133 - DNA, 435 bp, Arabidopsis thaliana
acattctgcctccatatccaaagcagtttccacacatttaatgtgaacacgttttctcactaccaacaaaaaaaaaaaactcaaatcggaaaaaaaaatgtcggttcacggacgatttccggcgagtccaccgatttcattatctccgtcgtcttcttccacatctccgtcttcacagtcaccgtcaacaccacctgatctaaagcaacgagtcatcgcttgtctcaacaagctcgctgatcgtgacactttagctctcgcttccgctgagcttgactcaatcgctagaaaccttactcacgattccttctctccgtttcttaactgtatccacaacactgactcttccgttaaatctccggtgaggaaacagtgcgttgctcttttatcggttctttctcggtaccacggagattctctaacacctcaccttgc

SEQ ID NO: 126134 - DNA, 521 bp, Arabidopsis thaliana
  unsure (1)..(521): unsure at all n locations
cnnnnnnnnnnnnnnnnnnnnnnnnnnnnnnnnnnnnnnnnnnnnnnnnnnnnnnnnnnnnnnnnnnnnnnnccacagatgcgctcaatcgctagaaaccttactcacgattccttctctccgtttcttaactgtatccacaacactgactcttccgttaaatctccgatggtttcaactgttattcgccgtctccgagatccggattcctccgttcgctctgcttgcgccgtcgcgacggctgatatgtcggctcatgttacgaggcagccttttgcttccgtcgcgaagccgttgattgagactttgattcaggaaggtgattcgaatctgcagatcggagcggcgttgtgtttagcggcgtctgttgatgcggcgacggatccggaatcggagcaattgagaaaatcgttgcctaagattgggaaattgcttaagagtgatggttttaaggctaaaagctgcgttgttgagcgcccccgggagtataattaccggcgggggggcgggaactaaaccgg

SEQ ID NO: 126135 - DNA, 389 bp, Arabidopsis thaliana
agagatcttgtgtacatacattcaaatgataaaagttcttcttcacgagacattgttgtgtatactgattcagattccgacaaggaaaacctcatgaaggaggcaaaggacgaacgcaagagattggcagaaagaaaaatacaatctgcaatcgggttccgtcaagtgattgatctgcttgcttcagagaaaaagctgatcgttggtcacaattgtttcctcgatattgcacatgtatacagcaaatttgtgggtcctcttccttcaacagctgagaaattcgtggcctccattaacagtcactttccttatattgttgacaccaaaatactcttaaacgtgaatccaatgttgcatcagcggatgaaaaagtccactacatcactgtc

SEQ ID NO: 126136 - DNA, 198 bp, Arabidopsis thaliana
cggacgcgtgggcggacgcgtgggcggacgcgtgggcggacgcgtgggcggacgcatgggaaaagatccttgggttctgtggttcataatcagaattggctaacacaggggaaagcttgtgagacaaacctatatggagtcttgtaggcatgaccgctcttgtcacctggtggctcaaaaggcatcggataagctgtg

SEQ ID NO: 126137 - DNA, 417 bp, Arabidopsis thaliana
cccacgcgtccgcggacgcgtgggatcactttataacaaattaaagtctacgttgagatatggctttaaaaacatggaagccattcataactgttgtttctctacaatttggatatgctggattgtcgatcatagcgaaattcgcactgaaccaaggcatgagtcctcacgttctagcgtcgtatcgccatatcgtcgctacaattttcattgctccatttgcctatttcttggatagaaaaatacggccgaagatgacgctatccatcttcttcaagatattgttgcttgggttattggaaccaacaattgatcagaacttatactacactggtatgaagtacacttccgccactttcacagctgcaatgacaaatgttcttcctgcctttgcctttattatggcatggatcctta

SEQ ID NO: 126138 - DNA, 583 bp, Arabidopsis thaliana
  unsure (1)..(583): unsure at all n locations
acgcgtccgaggaaacgtccgcccacgcgtccgataaaaccgtctctgcccactgaaatatcaacttagctcataagcatatctaatcggagctcggagaaatttcggttgtgaagagaagaaagatggggaatttgttttgttgtgtgcaagtggatcaatcaacggtagcgataaaggaaacattcgggaaattcgaagatgttcttgagcctggttgccattttcttccatggtgtcttggtagtcaagttgctggttacctctctctaagggttcagcaattggacgttcgttgcgagacaaagactaaggacaatgtgtttgttaatgttgttgcatcgattcagtaccgtgctttagctaataaggcaaatgatgcgtactacaagctcagtaacacaaggggtcagattcaagcttatgtgtttgatgttattagagcgagtgtccccgaaggttgcttccttgatgatgtcttttgagccagaaggaatgatatttcccaaaccntttttaagggggcnctcagaaggcaaatttcgggcttncgggtttnnagttttccaaccnnccattttga

SEQ ID NO: 126139 - DNA, 530 bp, Arabidopsis thaliana
gccgagcactaatacgactcacttagggaaagccggtacgcctgcaggtaccggtccggaattcccggttcgacccacgcgtccgggtcaccggccgtactatgagagattcaccgtgaagtcgaatattaagtgagagaagctccgattgatttcactttctgccgccaatttttgttttttcttcggtgagacgaagaagataccatgggtcgacctcccagtaatggcggtccggcgtttcgatttatcctgcctgaggtaacggagatggaagcaattttgctacagcataatacagcaatgccaggtcgacatattcttgaagctcttgctgataagtttagtgaatcacctgagcggaaggggaaagttgttgtgcagttcaagcaaatctggaactggtttcaaaataggcgatatgctttacgagcaaggggaaacaaagctcctgggaagctaaatgtatcttccatgccgcgtatggatttaccaaatcagatgagaagtgtgattcaaccattatcagt

SEQ ID NO: 126140 - DNA, 660 bp, Arabidopsis thaliana
  unsure (1)..(660): unsure at all n locations
ggggtcaaaaagaacaaaaaatcaaattttgggggggcgacaccataaaataaagagaaaaagcagagtccataatccgttgcctccccccctccggcaactggaaaacacaaaaacagacgccacgatggatgaatgatttcgcaaatcgtcgagattttggaattcgatgaagagcgtatcaacctgggctttgtctttcttctccgacgaactttctcggcgagctgtttccgattgttatttatggaccaccgcgatttcgcttctcttaatccttctccttcatatcttcttttccactaaatttcgcttcttcacttctgctccttcttcttcttcttcttcttcttcttcttcctctccctctacagaatcagttcccgcgaactctcaatcaaggatatccaaactagtctctgatgaagatttgaaatttctgatcgagaatttggaggaggaaacaaatgattccacggagatatgggaacatgttattcacaaaagcaacgatcgcatttcatactctgctaaacgctgcnaacccaaagatggcggtnggtcctatgaaagacctaagtgtcacggtcttcgagggtgtctctgcagagattgtgagggacttttacatggaccatgattataggaaactatgggata

SEQ ID NO: 126141 - DNA, 810 bp, Arabidopsis thaliana
ccgtctgcaagtaccggtccggaattcccgggtcgacccacgcgtccgcggagcgatcacagagaacaagaaagccatggcggaagaagagaaaagcgtgatgaagcaagtgatggtggcgattgatgaaagcgaatgtagtaaacgcgctcttcaatggacgctcgtgtatctcaaagatagcctcgccgattccgacatcatcctcttcactgctcaacctcatcttgatctcagctgcgtctatgcttcctcttatggcgccgctccgattgagcttataaactcattgcaagagagtcataagaacgctggattgaatcgtcttgatgaaggaaccaaaatttgtgctgagactggggttactccaagaaaggtgttggaatttggaaatcctaaagaagcgatatgtgaagctgctgagaagcttggtgttgatatgcttgtggttggaagccatggtaaaggagcattacataggactttccttggaagtgtaaccaattactgggttaacaatgctaagtgcccaattattgtggtgagaacaaaggtttgaacacctattttcatgaaagaggtcaagaaccctggctagatatgagtgggttgtaaacatatcgataataatgccctggttggttactattgaacgaagaaactttgggagtaaacatgctttgattttggttggataaggaaagaacatttgccgtgtttcgggggtttgtggatttggcttaacccagagcactttaccacgatggcggccttctcggccatcaataaagaatatggggccgggccccc

SEQ ID NO: 126142 - DNA, 912 bp, Arabidopsis thaliana
  unsure (1)..(912): unsure at all n locations
atacgactcactttagggaaagctcgtacgcctgcaggtaccggtccggaattcccgggtcgacccacgggtccgcggacgcgtgggcggacgcctgggaaagaagagaaagcaaatcaccaagtcatcggagcgatcacagagaagaagaaaaccatggcggaagaagagaaaagcgtgatgaagcaagtgatggtggcgattgatgaaagcgaatgtagtaaacgcgctcttcaatggacgctcgtgtatctcaaagatagcctcgccgattccgacatcatcctcttcactgctcaacctcatcttgatctcagctgcgtctatgcttcctcttatggcgccgctccgattgagcttataaactcattgcaagagagtcataagaacgctggattgaatcgtcttgatgaaggaaccaaaatttgtgctgagactggggttactccaagaaaggtgttggaatttggaaatcctaaagaagcgatatgtgaagctgctgagaagcttggtgttgatatgcttgtggttggaagccatggtaaaggagcattacaaaggactttccttggaagtgttagcaattactgtgttaacaatgctaagtgcccagttcttgtggtgagaacaaaagcttgaagacctcttctcatgaaagagttcgaccaccctggcttgatgtgtgtgtgttgtaaacatattgataataatgctctgcttggttactattgtttgaagaaactttgtgagtaaacaccccttattttgtttgataatgacccagcattgccgtgttcggggcttgtgattgctgaaaaaaaaaaaacccaaagnnnnnnnnnnnnnnnnnnnnnnnnnnnnnnnnnnnnnnnnnnnnnnnnnnnnnnnnnnnnnnnnnnnnnnnnnnnncaa

SEQ ID NO: 126143 - DNA, 857 bp, Arabidopsis thaliana
  unsure (1)..(857): unsure at all n locations
aaacgatgtcgtctctatctcgcgttctccgtggcaccttcaacacttgcccgatccgccggttttcctccgccgccaccggagtctccgagcccaccgcagtcactgccgcaatctcgcctccgcaaaagtcactaaccagtctcgtgaatggcgaacgaaaccccaaacggatcgtggagaaattcaagaaggcatgtgagtcggagcggttccggaccaacatagccgtgtacgatagaaccgtgcgccgtctcgtagccgcaaagagattacactatgtcgaagagattttggaggagcagaagaagtaccgcgacatgtcaaaagagggattcgcggcgaggatcatttctctgtatggaaaagccggcatgtttgaaaatgcacagaaggtgttcgaagaaatgccaaacagagactgcaagaggtcagtgttgtccttcaatgccttgcttagtgcatatagactttccaagaaattcgatgtggttggagaacttttcaatgagttacctggaaagttatcaatcaaaccagatattgtatcttacaatactttgattaaggcattgtgtgagaaggattctttacctgaagctgttgcattgcttgatcgagatttgggaacaagggactaaaacctgatatagttacattcaacacacttttactgtcttcggatctaaaggggccagtttnagctagggggaggggttttggccttaaaatgggtggggangnatttngccattggcatcngggctttccaatctaggcnncnttggtttngcccattggggggaatcnaaagnctngaaannnttttggggccctnagggcntngggccaaaccc

SEQ ID NO: 126144 - DNA, 537 bp, Arabidopsis thaliana
  unsure (1)..(537): unsure at all n locations
nnnnnnnnnnnnnnnnnnnnnnnnnnnnnnnnnnnnnnnnnnnnnnnnnnnnnnnnnnnnnnnccacgcgtccggcggtggtgaaaatggctcgaaacgactcgcgatctacgtcgccgtctcaccgccgacggtactctcgctcgcctgtgactcatcgtagcagccgtcgtaccaggcgcgaccgcagccgctcaccctacacatcaaggcataagaagagcagatctcctgcaccaaggcaacaccaaagggatagaagtagttcattgtctccttccgagcatagaattgcgattgaagtgaagaaagaacaggaagacaaggcaagattgcagcatgaggcggagctcaagcgactagaagaagagactgcacagcggattgaggaagcagtaaggaaaaatgtagaggaaaggatgaaaaccgaagaagttaaagaagaaattgaaagacggacaaaggaagcttatgagaagatgtttcttgacgtggaaatacagctgaagaaagaaaaagaagctgctctaaacgagg

SEQ ID NO: 126145 - DNA, 1017 bp, Arabidopsis thaliana
  unsure (1)..(1017): unsure at all n locations
ttttttttttttanatgtntgaataattttttattttttgatttataactntgggccttttgtttatttcatgaaaaacaaaacctgctacgcgaaagagagtgtctcatctgacgtagcgaataccgagcagggattgtaacgggttaaatgacccgacccgatttgttctattaatttctatttcatttcttttttttttaatcattcttctcaaataatttactttctggtccttcgataatggcggcctcctgcttcgcaattcccttatcttcttcttctcgatcgtctcacaatgcaattcccaaatacaaaaccctaatctcttcttcttcttactcttacttagaatctctgaaacttcaattctcttcttccaattcttttcatcactcttctctttctcgtccctttgtagctcaaccacttcaaatcagggtctcttcttcagaaattatcagttctcgatgaaagaaaaagaagaagatgttgttaaagggagaacaaaacccaataaagattgtgtcgtctccaaagcagaaaccagtaaagaaaccgagaaccttgcgagctctacgtgtgtatatccctaaaagctacaacattgctcaccttcttnacntnttcacctttnggaactgtanctctgtanangtggtactctnncaaattgatngatcctacantgcctttataaaattcaaattttactcttncacttactttgaaaatcaaaatcccccattntntttgaaaatcttacttganttcnncaaaaaaacaacntgnggtnaccttgnatttngganatnacattttttgaangntctgcnggaatnattgcggttccaatcccnaaggaaaaaccngaacggtcttanntgntcaaaccccnaaacccttgtcttgagaanntaaccngaacaaanctccctccccggtnattaataatcngggttgtcnaaaagnatnngggganggttgtcntnanaaccaaaaaaaacctttntncct

SEQ ID NO: 126146 - DNA, 859 bp, Arabidopsis thaliana
tacgactcactatagggagagctgctacgcctgcaggtaccggtccggaattcccgggtcgacccacgcgtgcgggagaagcagaacccaataaagatagtgtcgtctccaaagcagaaccagtaaagaaaccgagaccttgcgagctctacgtgtgtaatatccctagaagctacgacattgctcagcttcttgacatgtttcagccttttggaactgtaatctctgtagaggtatcgcgaaatcctcagacgggagagagccgtggaagcgggtacgtgacaatgggttctataaactctgccaaaatcgccattgcttctcttgatggaacagaagtaggtggtcgggaaatgcgggttaggtactctgttgacatgaatccaggaacaagaagaaaccctgaagtcttgaactcaactccaaagaagattctgatgtacgaaagccaacacaaggtctatgtcggaaatctcccttggttcacacagcctgatggtttgagaaaccactttagcaagtttggcacaatcgtaagcacgagagtgttacatggtcgtaagaccgggagaaacagagtctttgcctttctttcttttacaagcggtgaagaacgtgatgcggctttatcattcaatggaacacaatatgaaggtcgcagaatcatcgtcagagaaggtatcgagaagagtgagtcgtaaaccaactgttctgcttttgctgcaaagacatctcttggacacaaacaatgtgtaatgaatgtcttctgatttcttcgacaagtaacctttacatattatatccttctcgattttgtttatcacccattatatctacctgtataattctcttttcgatc

SEQ ID NO: 126147 - DNA, 549 bp, Arabidopsis thaliana
  unsure (1)..(549): unsure at all n locations
caaccacttcaaatcaaggtctcttcttcagaattatcagttctcgttgaagaaaaagaagaagaagtagttaaaggagaagcagaacccaataaagatagtgtcgtctccaaagcagaaccagtaaagaaaccgagaccttgcgagctctacgtgtgtaatatccctagaagctacgacattgctcagcttcttgacatgtttcagccttttggaactgtaatctctgtagaggtatcgcgaaatcctcagacgggagagagccgtggaagcgggtacgtgacaatgggttctataaactctgcccaaaatcgccattgcttcttcttgatgggacagaagtaggtggtcggggaatgcggggttagggacctctgtttgacaattgattcccggggccaaggaggaaccccctgaaggctttgacctcaacttcccaaggaagattcttcgttttccggaagcccacacaaagggnttttttgggaaantccccttggtttccnaaaaccttntngtttttnnaaacccccttttgaaggtttttgc

SEQ ID NO: 126148 - DNA, 363 bp, Arabidopsis thaliana
ctttcttctctctctctctcgtttggatctggccggtgattttctcccgacggcgataagtttgttgcatgaacgccggtgatggcttctgtttgcgtcaacaatgttactgtttctcaggattttcctacttacggatgtttcaatccacgagcttctttcagccgtgacgacggtggtcggagttctggatccgtcgcatcggagattccgaaggaggaaacagcagtcggagctggtgatttcgagtttaggttagaggaggatccagtcggaatgctcccagccgatgagcttttctccgacggtaaactcgtgacgaagcagcaacaacaacagacgacgggagatcggcgggaaatg

SEQ ID NO: 126149 - DNA, 909 bp, Arabidopsis thaliana
  unsure (1)..(909): unsure at all n locations
nnnnnnnnnnnnnnnnnnnnnnnnnnnnnnnnnnnnnnnnnnnnnnnnnnnnnnnnnnnnnnnnnnnnnnnnnnggggatcgttttgttaccaactacagaaagatggcaagcaagatcaagcgacaagggtttatccagaatgtgtcaactccaccaagaaacatgcctccggtgacagaaatgggaagtgctgagaagagagggaggaaaggaggggaagcaggagaagaggatgtagacattggagaagatataccagttgaggattatccatcagtggagattgaaagggatggtacagctgccgctgctagtggtggctctagttcttctggcagcttcagttcgagtggcagttcttcttctagtgattcagagtcagggagttcatcaggaagtgattcggatgcggatagtgtgcagtctccatttgtggaagcaaaagaagccccgtaataattgttgaccgtacgttgaaatatgcttaacaactccaggagactagaatcggagaatttgggtggaggtggaacctttgtgtaaatggaagggaaaggaaggaagggaaactcgaaagaaaagattttgagtgttagggaaacagtagatagaggaaaacatgtaaagggtagttagtgaatttctaggttgagcaaagaggtggaagttttctgtcctcttcctctttcagattaaggttctttagattattggtgaccccatgaacagagtgacttagtaagaaaagatcgagaggatctaagaaaaatgtagtggagaatgtgaaaatggttcgaagaaaaatattatctctgttcgtttcgtttaagaaccaaaacacaaagggaggccgctctagaggatccaagcttacgtacgcgtggatgcgacgtcntagctcttctag

SEQ ID NO: 126150 - DNA, 706 bp, Arabidopsis thaliana
ctctatacgactcactatatggaagctggtacgcctgcaggtaccggtccggatttcccgggtcgacccacgcgtccgtacggctgcgagagacgacagaaggggagaagaagaaaaatcgatggcggggatactagtgaacaatatcctccctcaacctccgattctccgatcgctttcttcttcttcgcgaagaagttcaattcgaaccctagttatggtcaaagcttcttcctctgaaccttccgagtctgtttcagtctccacgaagaccagtgacgacactggagctgttgttgtgttcactgctcctcctggtttcaagccaccggagccaaaacggttcgccgtcaaatccggaaaactcttcgatgtcttgggtgcagcaattggattgtttttccgattcggcactggtgttttcgtttctgggtactctgcatcttttgtgtctaaggaagagattccagctgatcagtatgcgttgcgtttaggcgggatcacggtaaaggaaactgctaaggtcgggcctcgtcctgagaaacccattgagatatactagtttgaaggctgtcccttctgccggaacgtcagggaaatggttgcagtgttggctcttgaaagtctctaccacccttgtccaagagggagtccaaaattccgcccgaacgctaaacacatgggcgggaaacatcagtttccgtac

SEQ ID NO: 126151 - DNA, 598 bp, Arabidopsis thaliana
ttaggtgccactatagaagactatgacgtcgcacgcacgcgtacgtaagctcggaattcggctcgaggtaaaaaggagagaggagagaagaaagaaaaggaaaagacccaaactttgagaaacaccttcattctcttccttccttcatcaaagcttaaccttttttaatttttatcctcgttttttcaattcgcgtgaagagacagagagagagaaagataaagctagaagagaatcgacattacgaatcttttgttccagatcgtgagagaggaggagttggaagaatgaagatgactattgggtctttgttccaaccctaattttgcagattaatttcgtttttgttgatttctgttttgggtttgcgttgctgattccggtggattaaagggttctttttggagagcacaaatttgttgggtttttttttggggaaagagaattaaaattttctcctttagagtcggcgtttgggttgagagagattattatagtttttagggttttggatttctgaattggtgattatcgatggagcctcgtgtgggaaacaaatatcgtctcggccggaaaattggaagcggttcatttggag

SEQ ID NO: 126152 - DNA, 527 bp, Arabidopsis thaliana
  unsure (1)..(527): unsure at all n locations
cannnnnnnnnnnnnnnnnnnnnnnnnnnnnnnnnnnnnnnnnnnnnnnnnnnnnnnnnnnnnnnnnnnccacgcgtccgacttagtccgccacactcgataatgatccatcaagctttagctctccctcgtcctattctcaccagaggatttgtgtctaatggtggcggtatgtttgtccatcaatgtcgaacaaaaacccctagggttacattttgcgctgctgatgatcagatagccagttccaagtcgaacaagacaaggaaagtagtggagcatgtgtgtttactcaaagcaaaagagggtttatctgaggaagtagaaaaagatatgcttgactatctttacacaactcaataccaaatgagaggcattgttgctatatctgttggttgtatcggtgatagaaacaatgaatatttcacgcacgctctctacatgcgattccaaaagaaggaagaccttgacaagttctatgagaaccctttcttcttgaaagttctcaatgaatatgttacaccattctg

SEQ ID NO: 126153 - DNA, 525 bp, Arabidopsis thaliana
  unsure (1)..(525): unsure at all n locations
nnnnnnnnnnnnnnnnnnnnnnnnnnnnnnnnnnnnnnnnnnnnnnnnnnnnnnnnnnnnnnnnnnnnnnnnnnnnnnnnnccacgcgtccgcatttcttttccatgactttcctcttatcaagaacatttatttctctcactctcagaccttcttgttcgatttccatggcgaatttaacgacgaacgctaaaactcgcctgagaggtgttgtattcgatatggacggaaccctgactgttccggtcatcgatttcgccgcaatgtatagagctgttcttggtgaagatgcttacaagcgaatcaaagcagagagccctagtgggattgatattctgcatcatattgagtcgtggagtcctgataaacagcagaaggcgtatgaaatcattgctgattatgagaaacaaggaatagataagcttcaaatcatgcctggtactgctgaactatgtggcttccttgattccaaaaagataaagagggggctaattacacgcaatgttcaaaaggcaatcgacatct

SEQ ID NO: 126154 - DNA, 504 bp, Arabidopsis thaliana
acttttcaggggaatgctgatgcactgtcccaacctcacggcttctctaacaatcccttcatatttaccattttgccactacactagacaatttcgtccttctcatttccgatcatctgataaaaacccgaatctcgtttctatcatccgagcaaaacccagaatttctcattcgcttaggtgctttgtatcatcttcaatggcgactcctcctccgacgcagagcagcgaaaccaaaccttactctgttctttttgtctgtctcggaaacatttgtcgcagcccagcggctgaaggtgtctttagagatatcgtgaagaagagaggtctcgattccaaattcaacattgattccgctggaacaattgattatcacgaggggaatatggcggatccaagaatgagaagtgctgcgaaacgtcgcgggattgagataacatcactatccagaccgatcaaggcatctgatttcagagaatttgatctcattcttgcaatggatga

SEQ ID NO: 126155 - DNA, 513 bp, Arabidopsis thaliana
  unsure (1)..(513): unsure at all n locations
ctnnnnnnnnnnnnnnnnnnnnnnnnnnnnnnnnnnnnnnnnnnnnnnnnnnnnnnnnnnnnnnnnnnnnnnnccacgcgtccgcaaggtgatcattttttttattatctcattcaaatcttgcacatgcatatttattatagtactagtataatataaatatggaaatttgttgtatacatattaaatgcgtgagtcagtgttgaagaatacgcatacatattgtaatttttgtttttgagaacaaaccagagtattcgcttcatagttctgtttttcgaggtgaccaaattttttttcattatctaattaaaatcttgcacatattgacatgcatatgcatatatatactcctttgaccaaaaatgattacaatctctttatttgttttaaatttgtaaagtggtgaattgtgatcctgctatatacacagaatttatttttgaataaaatagaggagaataaacatatttgcgtgtttaaatacattaaaaaattatcattagggttttt

SEQ ID NO: 126156 - DNA, 718 bp, Arabidopsis thaliana
gcgataaagagatgggtggagaagagagatcaggagatggagaaaaaagaggggaagaagtagttgatgctggttctctcttcgtccttaaatccaaagggacatggtggcactgcggattccacttgacgacgtctatagtggcgcctgcgctactgagtctaccgtacgccttcaagttcttaggatgggctgccgggatatcttgtctggtcggaggagcagccgttactttctactcgtacactcttctttctcttactctcgaacaccacgcttctctcggcaaccgttacctccgcttccgtgacatggctcatcacatcctcagtccgaaatggggaaggtactacgttggaccaatacaaatggcggtgtgctatggtgtggttattgccaatgcgctcttgggagggcaatgcctaaaggcaatgtacttggtagtgcagccaaatggggaaatgaaactctttgagtttgtgattatttttggatgcttacttttggttttggcacaattcccatcctttcactctctacgatacatcaactcactgtctctcctcctctgcctcctctacagtgcttctgccgctgctgcatccatctacattggaaaagaaccaaatgcaccagagaaggactatactatagttggtgatccagaaactagagtgtttggaatctttaatgctatggctattattgctactacata

SEQ ID NO: 126157 - DNA, 729 bp, Arabidopsis thaliana
tgatacttcagctctacacgactcactattgggaaagctggcacgcctgcaggtaccggtccggaattcccgggtcgacccacgcgtgcgcgaaaagacagagaaacaaatagaggcagagagcagaagaaagacgaaacagaggattttcatagagaatcctctttcttcctcctttcttcgccttcttctgttcttcttcttctcctgggtcttgaagatacatgaaacaacatctcattgttatgaatgttgatgcattcttttatgtaaacttaactttttacaggtgacctctctgaaagattgtaaggttccttacaaaaatttgatttcgtttggtgaatgaaatagttagaaattctccaaaacaaaatatgggtggctgtgtttcttctcagagaaaactcagtaacaagcttcaacagaagaagcagaaacgcggcagatctggcaaatgtcggtccaaaatatcggcttctatgcccgatgttcctatgaaacgcatgagtaatgcgagtgttagggattttgcggtgagcgaatatgttcatcttgatttcgacaattgtgcagccaagatgatgtgtaagagagctgagatgtctaatgctaacttccatttaactcagcttcaatggaactgcagccaaatcgatggaaaccgaatttcacatgaggaggcttggtatgattcctttagctacatcgattctgattctgatgatg

SEQ ID NO: 126158 - DNA, 735 bp, Arabidopsis thaliana
agaaaagagtaattgaacaaaagaaagaaaaactgataatgaagggtcttcatctccacctcgtcctagtcaccatgacgatcgttgcctccatcgccgccgctgcaccggctgctcccggaggagctctggctgatgaatgcaaccaggattttcaaaaggtgactttgtgtttggactttgcgaccgggaaggcaacaattccgtctaagaagtgttgtgacgctgttgaagatatcaaagaaagagatccaaagtgtttgtgtttcgttatacaacaagcgaagacaggaggacaagccttgaaggatcttggtgttcaagaagacaaactcattcaactcccaacttcttgtcagctccacaacgctagcattaccaactgtccaaagcttctagggatttcacctagctcgccagacgcagccgtattcacaaacaatgccacaacaacaccggtggcaccagcaggaaagtctccggcaactccagctacgtccacggataagggaggatcagcttcagcaaaggatggtcacgcagtcgttgctctagccgtcgctttgatggccgtctcctttgtcttgaccttgcctagacatgtcacattagggatgtaatcttttcttatgaagttggttggtgcttttgtttttgtcccttttgtttcaaaacttatctttcaagtgtgtttctttgttcggacatttgttgtaatgagtcaacttcccactc

SEQ ID NO: 126159 - DNA, 550 bp, Arabidopsis thaliana
cagctacaataccactcactctagggaaagctgctacgcctgcaggtaccggtccggaatttccgggtctacccacaggtgcggatcattccattagatcttcttgatccctaagcaagtctcttcgttaacttttgtctttctccttaaaatggctacagaggagatagacatgagttattgggacgtgtcatggggagaattcaatgaagacaagaactcgtctatcttctgcgagtcacaccctcacatagtaaattcgcacgggatatgggaggttatgactttcaagagagggatgaacttctgggaatatccgctcccgaatctcgagatcttaatcttttcttactttttttatatggggggctttctccacatctccattcaacaaaattgggctcccgggatgcctaagatccacattatgtaaggatgcccgggggttaattgtgaagcgcaacccttcccgtttgaagcaaccagcgttgggaactcctgagcttttgttttccctgggtaatacccggcccgaaggggggcgccacaa

SEQ ID NO: 126160 - DNA, 513 bp, Arabidopsis thaliana
atgatacttcagctctctacgactcatatagggaaagctggtacgcctgcaggtaccggtccggaattcccgggtcgacccacgcgtgcgctcttgctggctttaatcacaaattgaggatcttgctggaagctgtcattcaaaagatagcaaaattcgaagttaaacctgacaggttttccgttatcaaggaaacagtcacaaaggcataccaaaataacaaattccaacaaccacatgaacaaggggcgaattactgctcactagtattacaagatcagatttggccttggacagaggaactagatgctctttctcatttggaagctgaagacttggctaatttcgttccgatgctattatcaaggacatttgttgagtgctatatagcagggaatgttgagaaggacgaacctgagtcaatggtcaagcatattgaagatgttctttttaccgactcaaaacctatttggtcgtccgttattttcatcccagttcctgaaaaaaagggta

SEQ ID NO: 126161 - DNA, 431 bp, Arabidopsis thaliana
gacaaataaagttttgagttttagctctcattcggtagatttagtgatttacgcgttgttggtgtctatgcttcttcgcatagcttagattttgttattttcgtaattcgtttaatgtttttgaggaaagcgatgatatgaaattgtcgccccaggcttaatctgcatccattacgatggttgtaacatggtgattgactatttttgtctgattctctcaaatcgtttattatgattctgttatactggttgcgtatggatatgatgaaatggcaataatgctttgtgacacccagtctgatcttcgtgattgatttgccatattttctgatcctaattcttcttcagttttgtgaattttgatccacagttttgatctttgaaagggaggaatgaggatataattccatacgtctgcaaatctgaaacac

SEQ ID NO: 126162 - DNA, 377 bp, Arabidopsis thaliana
cgattctcggccgtagttagttatcctccgaatagatttccgattctctgtttcttctagattgaatttaaaaaccctacttttgaattttcacatgggagaacaatcaccttctcaaccatcgactcaatgccaaagtcatccacaatcacccaaacccgatactcataacctaatcccaccggaatccaccgatgaatgtctcgattcagctggagtttcaggctcaatcgtctcatctaccacaatcgacgctcgacggatcactgaactaggcaatgtatcgtctccgccgtccaaaatccctctccgccctcggaaaatccggaaactcacactcgacggagacgtctccggtgaagattataaggcggagg

SEQ ID NO: 126163 - DNA, 406 bp, Arabidopsis thaliana
accacgcgtccgacgggatctagtagatccgagtctgataacttttgagagtagatccggaacgatggggaaaagaggaagggcttgtgtagtggtacttggagatcttggtcgaagtcctcggatgcaatatcacgctctttctcttgctcgtcaggcatcatttcaagtggacattgttgcatatggaggttctataccccatgaagctgttctaaatcacccatcaatccacatccataccatggcgcagcctcgattcattcagtactttccaaagatactttatcctgtaactctcttgctcaaggcatttattcagtttacaatgcttctctggtttcttttcgttaaagtaccagcgcctgacattttcttggtccagaatcctccttccgtcccaact

SEQ ID NO: 126164 - DNA, 528 bp, Arabidopsis thaliana
agctacaatacgactcactttagggaaagctcgtacgcctgcaggtaccggtccggaattcccgggtcgacccacagatccgcggacgcgtacgcccacgcgtccgcccacgcgtccgcggacgcgtgggttccttctgcgcttgaaaagtaatgtcgaattctaggatgaatggtgttgagaagctaagcagcaaatccacaaggcgtgtcgcaaatgccggaaaggcaacactgcttgctcttggcaaagccttcccaagccaagtcgttcctcaggagaatctagtggaaggatttctacgagacaccaaatgtgatgacgcgtttatcaaagaaaagctggaacacttgtgcaaaacgacaaccgtgaagacgcgatacactgtgttgacgcgagagatactggctaaataccctgagctaacaacagagggttcaccaacaatcaagcaaagacttgaaattgcaaacgaggcggttgtggaaatggattggaagccagtttatggtgcatcaaagaatgggg

SEQ ID NO: 126165 - DNA, 314 bp, Arabidopsis thaliana
accacgcgtccgcttgatcactatatcttgaaggaatgaagaagatgaatggtgaggcacggtcaagagtagtcgaccaagaagctggctcaactccatctactttgagagatgaagatcatccctcgagacaaaggcttttcggatgtctcccttatgatatagatctcaatcccctacgcattgtaatggcggaattggtggggacattcattctaatgttcagtgtgtgtgggggcataagcagtacccaattatccggcggccacgtgggattgctagagtacgccgtcaccgctggattatctgtggtg

SEQ ID NO: 126166 - DNA, 869 bp, Arabidopsis thaliana
agctctctacgactcactattgggaaagctggcacgcctgcaggtaccggtccggaattcccgggtcgacccacgcatctaaagccatcaaaaatatatccatagaagcttcatcgaaatggcgaatcaagcagctgctgcagcattcttccttttcgctttagccgtcttctccaacttggagctctcagcttcttcacttgtcagtggcaagatctcttgccttgactgccaccgcgatttcgacttctcaggcattaaggtcctccttaaatgcgacggagagaagaaacaaataaccgcggtggcagctgcagacggatctttccggtcagtgcttccaacggctgacaaaaaaggctccataaattgtcttgcaaagctcttgggaggccctgagcaactctatgctcacaaacacaacttggtctctgaattggtcaaatctaaacacgattccaaagttttaactacctcaaacccacttgccttctctctctcctgccccaaaccatcccgagatgatatcggaagtatgatcggagattccaagactattaattttccgggggcaggaggttttggattcccacctgccagcttctttcccttcttaccaatcattggtatcccatgatttaaataagtgttacttttaagtccttaaagacatatgtatacatatgttttgttgtttacgtgaatgaagccagccaagacaagacacaaatatttagcaaattacattactttgtttagtgagatataaggtttgtttatgtgctaagaaaatgttatttattggctttatttagtttaaatcagttgcttttgtatcaagtttgtaataagaaggttgggttaatccc

SEQ ID NO: 126167 - DNA, 413 bp, Arabidopsis thaliana
tattgccatcaaaaatatatccatagaagcttcatcgaaatggcgaatcaagcagcggctgcagcattcttccttttcgctttagccgtcttctccaacttggagctctcagcttcttcacttgtcagtggcaagatctcttgccttgactgccaccgcgatttcgacttctcaggtctactcttttaactagtttcatcacttggattttagtgtatgtcatggaagtttctaacttatgaatttcattttgcaaatcaatcacaccactaatcacatttttatgtagctttatttaaaaagggttataacaaagggagaaatgatatctagttagactatagttttcttgatatctaagacattagtattgcacaatttatttttcaggcattaaggtcctccttaaatgc

SEQ ID NO: 126168 - DNA, 317 bp, Arabidopsis thaliana
ctcctctctctctctctcacacaacacaaacaactcttgagagagagaaacaaatctttcacttgacacttctctccaaatcctcatctcattcttcatcctaaacatttgctcattctcacgatgagccataagcaaaaccaacctcaccggccagtcccggtccatgtcacaaacgccgagccaaaccctaacccaaacaacctcccaaactttctattatccgtccgtctcaaatacgtaaaactcggttaccactacctaatctccaacgctctctacatcctcctccttcatctcctcgccgcaacaatcgc

SEQ ID NO: 126169 - DNA, 471 bp, Arabidopsis thaliana
  unsure (1)..(471): unsure at all n locations
nnnnnnnnnnnnnnnnnnnnnnnnnnnnnnnnnnnnnnnnnnnnnnnnnnnnnnnnnnnnnnnnnnnnnnccacgcgtgcgcccacgcgtccgggccatttcagtccaattacatcgtccctaaaaccaccgtcacgccaccggcgattcctacaccacaatttgtcccccaaaacaccccttcaatcttctcttatcaaattcggcgccgaaaactccgaacctcatcctccacggccgttgccggaaactgattgtcccgttccgccggagcagcagccaatcaacgagtatcaatctctctccacctctttccctttctcctgggcttcaggagatctaatcgagtactctaccagacttttcttaaccggcgcttctttcgcatttttccggcgggttacccggttcctggttcggatccatcggacccgaatatgaacctgttaagaggattctcgccgccagctc

SEQ ID NO: 126170 - DNA, 661 bp, Arabidopsis thaliana
  unsure (1)..(661): unsure at all n locations
agttgagattgagaaagcagcaagggaagttcttgatgtacttggtttactcactacactgagctatgccgagattttgaaagaaatgaaactaaaaacactaataagagcagaaattggagaagaaggtatttcgcagttaatagaagaaaggataacagccaggaagaataaagatttcgcgaaaagtgatgagattagagagaaactgacaagaaaaggaatagcgttaatggacattggcaaagaaactgtatggagaccatgcttcccttctcaggctgattccagcacttgagcttagagcagagtcatggagatagttaacggtttcttcatttctctaactcttcttctttagccttttgtttgaggctctttctttataactctgtttttggaattgtgcaatgacttcaaacacaaacacatgttgctgtttgttgtattcttcccattcacaatgacattgtaacaatattgttactttggatattggttctatagccaaacttgatctatacgcttttggatatttgttcttaaaaacatcccaaaaaaatttataaataaaaaccaaacccaaagnnnnnnnnnnnnnnnnnnnnnnnnnnnnnnnnnnnnnnnnnnnnnnnnnnnnnnnnnnnnnnnnnnnnnnnnn

SEQ ID NO: 126171 - DNA, 507 bp, Arabidopsis thaliana
atgatactccagctctctacgactcacttagggaaagctgctacgcctgcaggtaccggtccggaattcccgggtcgacccacgcgtgcgcaaatattattcagtgccgagtcaaaattagtgttgagaatttgctgcttctgatcagtgagtgaagaaagtttgaagctttgagtaactttgaaacaatggaggtatttggaaaatctcatgtggttgttggctctgctaatgttatttacttatctgctatattgggtcacgaaggacccaatcacaaatgtgattggaaatgcgagaatgagaatgtgtgtgggaatatgtaccgttgcaaactaactgggttgactcatgtttgtgacaagaactgcaaccaaaggattttgtatgataatcataactctttgtgtcgagctagtggtcggattttcccgctttctttggttgaggaacaggcggttaaaggagtgaggaggaagcttgatgatgagagtaaacaacaccctt

SEQ ID NO: 126172 - DNA, 647 bp, Arabidopsis thaliana
  unsure (1)..(647): unsure at all n locations
atctttgtagattctgcaacatatcttgcttgatattccaagtcttgctttcttcaccacctatgctcttctggttcttttctgggctgaaatttattatcaggcgcgtgcagtatcgactgatggactcaggccaagcttcttcacaattaatgcagttgtatatgtagttcagattgctctatggttggttttgtggtggaagcctgttcgagttatggtaatcctatctaagatgttctttgcaggtgtttcattgttcgctgcccttggatttttactttatggtggaaggcttttcctaatgttgcaacggtttccagtagaatctaaagggcggcgcaaaaagctgcaagaggttggttacgtgacaaccatatgctttacgtgtttcctcatcagatgtatcatgatgtgctttgctgctttcgatgagggggcaaacccttgatgtgttagatctccccttccttaacttcatatattacctgttggtagagatattaccctcctctctggtcctcttcatcttgagaaagctaccaccaaaacgaggcattacacaataccatcagattcgctgaaatgtaaaggcacgtcaactaatgntcagatgnagaagncaaggctatggttgtttatgcttt

SEQ ID NO: 126173 - DNA, 521 bp, Arabidopsis thaliana
actcaccttagggaaagctgcgtacgcctgcaggtaccggtccggaattcccgggtcgacccacgcgtccggagattctctctgcgtttcttagatcgagcgagcgaagcgagagatcatggaaggtggagctgctctctacaatcctcgaactgtcgaagaagttttcaaggatttcaaaggtcgtcgtactgccattgtcaaagctctcaccaccgatgttcaagagttttaccaacaatgtgaccctgagaaggagaatctttgcttgtatgggttaccgaatgaagaatgggaagtgaatttaccagctgaagaagtgcctcctgagttaccagagccagctcttggtattaactttgctagggatgggctctctgaaaaggaatggctttcgcttgttgctattcacagtgacgcttggttactgtctgtctcgttttactttggctcaaggttttctttccacaaggaagagaggaagcgtttgttcaacatgatcaatgatgttcctactatat

SEQ ID NO: 126174 - DNA, 522 bp, Arabidopsis thaliana
  unsure (1)..(522): unsure at all n locations
aatacgactcactttagggaaagctcgtacgcctgcaggtaccggtccggaattcccgggtcgacccacncgctncgtgaaaccagatttcgcttcattcgcgtgactacgtttctcaaacgcactaattactacgacaagttgtcttccaagaaatatgcaatcagagtttcttgaattgcgtcaacggattaaggaatcgattaggacgaagatgcaaagcggagatactattattgctccaacctcacagacacagttacatcagagcaaaagtaatcttccgtacgactttggttccttttttggtccttctcagactgttattgcttcaagagtcttacaagaaagcaagcctcttttagaaaacgagacatcagcagctaaaatgttaaactctattcaaaacaagaaaagttctgttctaatgaatgatgcttcagggactaagaatgcgaatgagggcaaacgaaaagctgaaaaacttaagggggggaagagactacccattgcttttctctg

SEQ ID NO: 126175 - DNA, 562 bp, Arabidopsis thaliana
  unsure (1)..(562): unsure at all n locations
cggacgcgtgggcgacaacgaaatcaaatcccgattccgagagagagagagcgatagcggaagacgatggctttgacggtggcgaagagtgcgttggaggcgattagagagaaaggtctcggcggtttcatgaggatgatccgagaagaaggcttcatgagatgcctaccagatgggaacctcttgcaaactaaaatacataacataggagcgacacttgttggtgttgacaagttcggtaacaaatactaccagaagctaggcgatactcaatacggtaggcacagatgggtagagtatgcttcaaaggatcgttacaacgcatctcaagtaccagctgaatggcacgggtggcttcatttcatcactgatcacacttggcgatgagctcttgagtttgaaaccaaaaaaggtatgggcttgagcataaagagaacttcttttgagaaggtgttgcatacactcttccattcggagggggccattcctttgacccccggggccaaaaagaaccttggcctccgggtcccaatctatggggacccnccaaaggcttgtagta

SEQ ID NO: 126176 - DNA, 408 bp, Arabidopsis thaliana
  unsure (1)..(408): unsure at all n locations
acgcatctcaagtaccagctgaatggcacgggtggcttcatntcatcactgatcacactggcgatgagctcttgagtttgaaaccaaaaaggtatgggcttgagcataaagagaacttctctggagaaggtgatgcatacatctaccattcgaagggacataccttgaacccgggacaaaagaactggactcggtaccaatcatgggtacccaccaagactcagtaagaagatgatattttggttttacgctctgcgagactttctctcgagtgatttgttgttttgtttctgtgtcattttaataaaaagctgtcttggatctaaagctggacaattgggtttcggatctggaattgtaattgttactgtgtaataatttgctgattattaggtttcttggttcttc

SEQ ID NO: 126177 - DNA, 640 bp, Arabidopsis thaliana
  unsure (1)..(640): unsure at all n locations
nnnnnnnnnnnnnnnnnnnnnnnnnnnnnnnnnnnnnnnnnnnnnnnnnnnnnnnnnnnnnnnnnnnnnnnnnnncacgcgtccggcgagaagacgacagaaggggaacaatgataatgagaagcgcgtcttcactggaccttaacctacgcgccgcccagaaaccgtctgttccaagggtggtaaccacggctcgaaccgtctctgctgctactcctcgtgttgctaaaccgattacaagagcttcttcagatggaaacctctacaagattcagtcgccggagagcataacgaaaaccatcagcgtatatcacgaagaaacggcgtctttgagggttttggaaggatctcgactcccccaaggaggttccaacggtggatttggtggtagaggcggagatggtgccggaggtggcggtggaggtggaggtgggagcgtagatggttattacgaagagatgatccaacgttatcccggagacactctccttctctctaactacgctcgtttcctcaaagaggtgaaaggagatgggagaaaagcggaggagtactgtgagagagcgatgttgtctgagagtggaagagatggagagttactgtctatgtatggagatttgatatggaaaaatcatggaga

SEQ ID NO: 126178 - DNA, 107 bp, Arabidopsis thaliana
gaaaaaggtccttcattgatgaagagaatccaagatgcaatattcttcaaagccacattcaatgttcataaaacccaatctgagattggataatagaaagtataatt

SEQ ID NO: 126179 - DNA, 526 bp, Arabidopsis thaliana
  unsure (1)..(526): unsure at all n locations
gtttgtttttacatgtactggcagcataattggaaaagaacggctgttcgaattctcgaggaatttaggctagcacatccagatgtcacagttcttgatcctccagatgcaatactacatctccgtaatcgtcagtcaatgcttcagtgtgttgcggacatgaatctgtctgatagtaatggacgcgttggtgtgcccaagcaattggtaattaaaaaggatgcatcttcaattccggaggctgtcaataatgctggtctgagactacctcttgttgcaaagccattggttgctgatggaagtgcaaagtcacatgagctttcggctggcttacggtccaacactccccttcttgaagctccgagcctcctcttcgttcttcagggagtttgttaacccatggcaggtgttccttttcaaggtttacattgttgggggnggctntttagnggtntcccggggttttnccnaccntnatgtctnttggcgggactccccaaanagntggngnttcccgttcccaggg

SEQ ID NO: 126180 - DNA, 496 bp, Arabidopsis thaliana
ttaaagaaacacaaaacaaaatcgtcgatggctgttacaaaaaggcttttgtgagtgtcccaattccattcacaaagttttagtgtttaataatatctgacactctctttctttgaccgtcgccgccgcaatgaccgtcggagttttagctttgcaaggttctttcaatgagcacatcgcggctctgcggcggctcggtgtccaaggcgtcgagattaggaaggctgaccagcttctcaccgtttcttctcttatcattcctggcggcgagagcaccaccatggccaaactcgccgagtatcataacttgtttccggctctacgtgagtttgttaagatggggaaacctgtttgggggacatgcgcaggtcttatattcttggcagacagagcagttggtcagaaagagggaggtcaggaattagttggtggccttgattgcaccgtacataggaacttcttcggtagccagattcaaagttttgaagctgatatc

SEQ ID NO: 126181 - DNA, 742 bp, Arabidopsis thaliana
  unsure (1)..(742): unsure at all n locations
nnnnnnnnnnnnnnnnntatagggaagctggtcgcctgcaggaacggtcgggatttccaccccgagccacgcttcctcaaatcgcaaaattagggttagggttttcaattccccaaccttgcgaatttctcatttctcgtagccgccgcagcaatcaacgatgacaggcaaagcaaagccaaagaagcacacagcgaaggagctccaagctaaagccgatgcagcgttgaccaatcgcggtggaggaaaggcagggctcgccgatagaaccggtaaggagaaaggtggtcacgcaaagtacgagtgtcctcactgcaagatcactgtaccggatctaaagacgatgcagatccatcatgaatcgaagcatccaaagctgacttatgaagagccgaggaatcttcatgaggctttagctgctcctgctgaatcatctaagcctaagcctggaatcagaggaagccttaagaagtgaagtgaagatggtttgggattgtatcgaatttccgatttgaaatttgtggtctttttaatggtgtttttgatgtgagaatataaacttgcgttgatgatgctctatgtcttcgtatttttatggtatgatcatataaaaaagtaactgatattttcttattaaatggtttgtttctttctaaaaaaaaaaaaaaaaaaagnnnnnnnnnnnnnnnnnnnnnnnnnnnnnnnnnnnnnnnnnnnnnnnnnnnnnnnnnnnnnnnnnnnn

SEQ ID NO: 126182 - DNA, 756 bp, Arabidopsis thaliana
  unsure (1)..(756): unsure at all n locations
gggggaatnnnnnnnnnnnnnnnnnnnnnnnnnnnnnnnnnnnnnnnnnnnnnnnnnnnnnnnnnnnnnnnnnnnnnnnnnnnnnnnnnnnnnnnnnaattgggtaccgggccccccctcgaggtcgacggtatcgataagcttgatatcgaattcgcggccgcgttagggttttcaattccccaaccttgcgaatttctcatttctcgtagccgccgcagcaatcaacgatgacaggcaaagcaaagccaaagaagcacacagcgaaggagctccaagctaaagccgatgcagcgttgaccaatcgcggtggaggaaaggcagggctcgccgatagaaccggtaaggagaaaggtggtcacgcaaagtacgagtgtcctcactgcaagatcactgtaccggatctaaagacgatgcagatccatcatgaatcgaagcatccaaagctgacttatgaagagccgaggaatcttcatgaggctttagctgctcctgctgaatcatctaagcctaagcctggaatcagaggaagccttaagaagtgaagtgaagatggtttgggattgtatcgaatttcgatttgaaatttgtggtctttttaatggtgttttgatgtgagaatataaacttgcgttgatgatgctctatgtcttcgtatttttgcggccgcgaattcctgcagcccgggggatccactagttctagaacggccgccaccgcggtggagctccaaactttgttaggtttannnnnnnn

SEQ ID NO: 126183 - DNA, 619 bp, Arabidopsis thaliana
  unsure (1)..(619): unsure at all n locations
aaatcgcaaaattagggttagggttttcaattccccaaccttgcgaatttctcatttctcgtagccgccgcagcaatcaacgatgacaggcaaagcaaagccaaagaagcacacagcgaaggagctccaagctaaagccgatgcagcgttgaccaatcgcggtggaggaaaggcagggctcgccgatagaaccggtaaggagaaaggtggtcacgcaaagtacgagtgtcctcactgcaagatcactgtaccggatctaaagacgatgcagatccatcatgaatcgaagcatccaaagctgacttatgaagagccgaggaatcttcatgaggctttagctgctcctgctgaatcatctaagcctaagcctgggaatcagagggagcctttaagaagtgaagttgaagatggtttgggcattgtacccgaatttccgatttgaaatttggggcctttttaaaggggtgtttcgatgtgggaatataaacttgccgttgataacccccatggcccccgatttttgggggccggaatcctgaaaccgggggccctagtctaaanggcgcaccgggngggnccantttgncctagnggggattcggcttgggnacnnggnntc

SEQ ID NO: 126184 - DNA, 507 bp, Arabidopsis thaliana
atcacacacaaactaaaccggaatggccaccgccgacgaattctccgacgaagatacatcaccgattgaagaagtccgtttaacggtaacaaacaccgacgatccaacactaccggtttggacattcaggatgtggttcttgggtctaatctcatgttctctcctctctttccttaaccaattcttctcgttccgaaccgaaccgctcgtaatcactcaaatcacggttcacgtggctacactacctatcggtcatttcttggccaaggtgcttcccaaaacccggtttggcttacccggttgtggatcggcccggttctcgctgaacccgggtccgtttaacatgaaagagcatgttttgatatcgatatttgtgaatgcgggtagtgctttcggatccgggtcggcttatgcggtggtatcatcacaaatattaaagctttttatggccggagtatctctttttattgccggttggttcctcatcaacaatacacaggtatttgg

SEQ ID NO: 126185 - DNA, 621 bp, Arabidopsis thaliana
  unsure (1)..(621): unsure at all n locations
aaggtnggctagccttgatngggtntngggattggcccccgagggggttttaagggngttaggggttccagtgattccccagtcccaccactgggcctgccccggtggttgttgttagatttcctgatgataaggatggggaagatgggcaatcccgccgaccgtggtggggagaatctgatggaccagtgataacctccataccagtgccctgaggtggctgaagaagagggagataaggatgagtcccatgatgcttcggataagccagtagccagcaaggctttcatgttgccagaaggagacctccctaaggaggaccttagaaagaaaagaaagcgttcctttgcccttggtttgtgttcttgagtgtgcttaattgtgttgtttttggggtttggggtattctagatctcttttgtaagtattctcttgtttcttggttttgttttaaactctatggaatttgggatgagtggattcgatgtcttttgtttgtctttgaaaaagcagtgaaaagaatttcagtggtcttgtatatctctgcagttgaatagttggtacaaaataacatctttgacggttccaaataatatatcttgtcagtaatgaccattaaat

SEQ ID NO: 126186 - DNA, 1259 bp, Arabidopsis thaliana
gtacagagtcaattgaagaaaccgagagagagagtgagcggaatcatgacttctccgggaaaatctccgagatccgaccggaaatcaccgacggttgtcaccgtccagccgtcttctcccagattcccgatcagcacacctactgctggagctcaacgtaagatcgggatcgctgtcgatctaagcgacgagagtgcgtacgcagttcaatgggctgttcagaactatctccgatcaggtgacgccgttgttctccttcatgttcaaccgacgagtgtactttacggcgccgattggggcgctatggatttgtcgccgcagtgggatccaaataacgaagagtcgcagaggaagcttgaggacgatttcgacattgtcactaataagaaagcgagcgacgttgctcagcctttggttgaggcggatattccgtttaagagccagatcgtcaaggatcacgatatgaaggagaggctttgtttggaggtggagaggttagggctaagtactttgattatgggtagtagaggatttggtgctacgaagaggagtagtaaagggagattagggagtgtcagtgattactcagttcaccattgtgcttgtccggtggttgttgttagatttcctgatgataaggatggagaagatgagaaatccggcgacagtggtggggagaatctgatggacagtgataatcttcatacagtgcctgaggtggctgtagaagagggagataaggatgagtaccatgatgcttcggataagcagtagcagcaaggttgcctttgaatgcatgtcagtttcaatttacttaggaatattatatacaatcagtaatactctgctcggatcaagctttgacgtttagaatgattggatattaggaagatccactaagatgctattttattcctgatgcttgaggctttcatgttgcagaaggagacctccctaaggagacttagaaagaaaagaaagcgttcctttgcccttggtttgtgttcttgagtgtgcttaattgtgttgtttttggggtttggggtattctagatctcttttgtaagtattctcttgtttcttggttttgttttaaactctatggaatttgggatgagtggattcgatgtcttttgtttgtctttgaaaaagcagtgaaaagaatttcagtggtcttgtatatctctgcagttgaatagttggtacaaaataacatctttgacggttccaaataatatatcttgtcagtaatgaccatt

SEQ ID NO: 126187 - DNA, 626 bp, Arabidopsis thaliana
  unsure (1)..(626): unsure at all n locations
ccacgcgtccgtcccagtctcaagctatgtatatgcaacaatgttcagacccaggttcaagtacctgcatctggtggtgctaaccttctgggactccttctgacatcaacccagtctcaagctatgcatatgcaacaagttcagacgcaggcagtgaatcctcagccagcccaatcactagctgcttctcgacttcagccaatacaatcacaggtcgcacaaccactgccatcacgggttgtgcactttcaacaaactcaagctcaggtttcacatgtttcaccggcccactcgcaatctaattcctttggtggtggtagcaagtggtcacctgaagaagctgcttctcttgctagtagcctatctgggtttcgctcaagctgggtaaatggtcatgtaatgagggattgagatgcaaggaaatcatgggggtttcccattaccctgcacactcattcacccgtccaccaggtttacaatggcaatgggattgggtggtatgccatattctcagtcaagaacacccgaagctgtttccccccaaatggncccgtttttaancggggttttctgtgccngggcnattttttgggggaatccnngnggnttggattgnccccngggta

SEQ ID NO: 126188 - DNA, 543 bp, Arabidopsis thaliana
  unsure (1)..(543): unsure at all n locations
cnnnnnnnnnnnnnnnnnnnnnnnnnnnnnnnnnnnnnnnnnnnnnnnnnnnnnnnnnnnnnnnnnnnnnnnccacgcgtccgctttcaacaaactcaagctcaggtttcacatgtttcaccggcccactcgcaatctacttcctttggtggtggtagcaagtggtcacccgaagaagctgcttctcttgctagtagcctatctgggtttgctcagctgggtaatggtcatgtaatgaggaatgagatgcaaggaaatcatggagtttcctattaccctgcacactcattacccgtccaccagtcttacaatggcaatggtatgggtggtatgccatattctcagtcaagaacacctgaagctgtattcccacccaaaattgatccctgttttatcatccggagttgttgctgatggcctgggcgtccaatcttcattagcaaagaaaaatccaatcagtagagccttcaggcatcttggcccttcggctgggtttaactctgtcccagctaagctgcaaaaggagccagcacctgggttcga

SEQ ID NO: 126189 - DNA, 515 bp, Arabidopsis thaliana
  unsure (1)..(515): unsure at all n locations
cagctctcatacgactcacttagggaaagctgctacgcctgcaggtaccggtccggaattcccgggtctacccacgggtcncggcttggaggggttcttctttctgtaacaggtactgaagccatgtttgcaaatcttggccatttcacctcggtctcaatcagagttgctttcgccggtgtcgtgtacccctgtctggtggtacaatacatcgggcgcaggcgagctttctctgtcagagggccgtcgggtctattcctaacagtttttacgattcagtcccagatcctgttttctggcctgtctttgtcattgccacacttgccgccattggtggcagtcaggctgggataaccactacgttctcaataatcaaacaatgccatgccctagggggcttcccacgcatcaaagtagtccatacttcgaaacatatatatgggcagatctatttccccgagatcatcaggatccttgtgatccttaccttttgcatgggttatagggtttcgaga

SEQ ID NO: 126190 - DNA, 603 bp, Arabidopsis thaliana
  unsure (1)..(603): unsure at all n locations
aggatagagatagattcttctgagttcttgcatggttcaggcttattaattctctgcagataactgcagaagaaagaagaaagaagaagaagaagagattagagcttgagccataatatataatcccttgatcattagtctaaagaaccacataaaaagatgggattctggtcgttgttggaggtggcttctatgccggttattcaagttcttttcatgagtcttgtgggagctttcatggcctctgatcgttgcaagctcttccctgttgaagcccgtaattccatgaacaaggtggtgtttgtactatttgcaccggctctcatgtttgccaatctagctcagacggttacacttgaagacatcatctcatggtggtttatgccggtgaacatgggacttacactttctaaatcgggggnctttcttggggtgggtgggtggtaagnatttgaaaaccaacctccttaatcttgaagggcctaatgnttgnaacttnttcttcaggaaaaaatgggggacctaccaataaaaactngtcccangaattttcggtntgggccaaaaatcccttttnggaacccnaaggntttttttggaccc

SEQ ID NO: 126191 - DNA, 559 bp, Arabidopsis thaliana
acgcctgctctatacgactcactatatggaaagctggcacgcctgcaggtaccggtccggaattcccgggtcgacccccgcctccggcctccctcatctttctctctctgtcggcgatgcagaggatatcgttagactcatcagcttcgaagctccatagctatggaggacgaaaggacgatacctacgatattgatgacttgaaaccagcttcctcttctccttcttcgtcgtcatccgcagtagattacgacgatcacgagctcaaagactttaagccgcgacggttatcatcgttgcaatctccttttgttacgacgaatcagaaacaagagaagcttgttcacttcattccgattctcactctcatctgctttatcatcctttacctcacttcttacgctccgtctcaatcagatttggctcagtttaatggattcatgcgtccttcgaaacatctagaatcatccgacgaaaatggcgacgaaatttctggatttatcagagccgatactctatccatccgtagtagtgtacgaaacctacaagagacggaaag

SEQ ID NO: 126192 - DNA, 784 bp, Arabidopsis thaliana
  unsure (1)..(784): unsure at all n locations
atacgactcactttagggaaagctcgtacgcctgcaggtaccggtccggaattcccgggtcgacccacgggtgncggtgtctcagacaaagcagttatatcccggaacttctactggctgcatctgcctggaaaaaattacacacttcttggagccgtacaggaagaagcaaatccctctcaagatcacttgcaatgcagttatggtgggttcaagatatgagctggaggtcggggttcataacacatctagagctaacttagccaaaaacgttgtccaggaagacgaaaaacgtgatctggggttgctccagaaactctttagtagatgtgttgtttctgcagatagcaacccgtggtttgaaagtagtggaaatgaagggatcggattcaggagttgctttcttccttcgtttctcagttcacaatgcagagacagagaaacaagatacgaggattctaccagtacactactcagacaactatttctcactagttccaggtgaatcaatgtcttttaagatctcatttgcagctcctacaggcatgaagaagtctcctcgtgttatgcttcagggctggaactaccctgataggtttagtgtttttggttgagactattcatgtttcatgtttgttacataactgcctgtaatctcgaacctttcaataaatgaaacttgcacaaaaaaaaaaacccaaagnnnnnnnnnnnnnnnnnnnnnnnnnnnnnnnnnnnnnnnnnnnnnnnnnnnnnnnnnnnnnnnnnnnnnnnngtgaaatcg

SEQ ID NO: 126193 - DNA, 878 bp, Arabidopsis thaliana
ctcaacttcaatgtatggcatccacattgtttacttgaggtacaagcaaaacgtctaagctcgtcgacctcctcttaatggcttcaagttcaacttcattcccgttaaccaccgcgccaccgcagggtgtcaggtttaaccggagaaaaccgaggttaaccgtgtgggctaagcaaacggcgtttcaactcgggaaaacgaagggtgatgatgactcggaggggaaacaaaaagggaagaacccgttccagtttgatttcggtaagttaccggacatgaagtcactgataccggttgtgacgaatccttctaccggtttagtgtttggtaataacagaaagaaagatcctggtactatttttgtggctggtgctacgggacaagctggtatacgcatagctcaaacgctcttacaacgaggattcagtgttcgagccggtgttcctgaccttggagctgcccaggacctagctcgtgtcgcggctacttacaagattttatcaaatgatgaagtcaagaggctaaacgcagttcaatcccccttccaagacgctgaatcaatagcaaaagcgattggaaacgcgaccaaagttgttgttacggtcggggcaacagagaatggtccggacgcccaagtttcgacctcagacgcattgctcgtggtccaagcagctgagctagccggcgtaagccacgtggcgatagtctacgacggcaccatcagcgggtccacatacaacgtgctcgacgggattacttcgtttttcggcaatcttttcgcaaaatctaagccattgactatctctgacctcatcgagaaagttgcttaaaccgacgtggcctacacacttataaagacgagtttgacggaagatatc

SEQ ID NO: 126194 - DNA, 531 bp, Arabidopsis thaliana
  unsure (1)..(531): unsure at all n locations
nnnnnnnnnnnacgactcactttanggaaagctggtacgcctgcaggtaccggtccggaattcccgggtcgacccacgcgtccggcagaatttgaaggctttcaagcaaggtgctggttctagttctacagagccacttctcaaggattcgactggagccatttccactgatatggaagatgacatagacgtgcaagaggaaagagacagggtgatttcggggttgtcagacaacacgatgctctacttacagaacctgaggaaggtctatcctggtgacaaacatcacggcccaaaagtagctgtacagtctttgactttctcagtccaagcaggagaatgttttggctttctagggacgaatggagctgggaagactactaccttgtctatgttatctggagaagaaactccaactagtggaactgccttcatctttggcaaagacatagtagcgagtcccaaagctattcgtcagcatattggctactgcccccagttcgatgctttattcgagtatttgactgtgaa

SEQ ID NO: 126195 - DNA, 448 bp, Arabidopsis thaliana
atgtttctagcccctcaaagattgatcttaatcagataccaaggccaggttcaagctccagtccaattgtgtatgaaactcgtgtggaaaataaggctaatcctccaccacctactactgttgattatataactagagacactggaaattccagcccgcgttacatgcgatgcacaatcaatcagatcccatgcactgttgatcttctatctacatctggtatgcaactggcactaatagtccaaccaatggcgctttctcatccatctgaagagcctatccaagttgtggactttggtgagagtggccctgttagatgttcacgttgtaagggctacgtgaatcctttcatgaagttcattgaccaaggaaggaagttcatatgtaacttgtgtggatacactgatgagactcctcgtgactaccagtgtaatctgggtccagatgg

SEQ ID NO: 126196 - DNA, 491 bp, Arabidopsis thaliana
gtcgcatccacgcgtacgtaagctcggaattcggctcgagcattgacaaagggtaagagaacctaaaagagagcaaattcagaagctgagaatatgaagacggagcttgaagaagaagaagaagaagaatggagatccgttcacgaggttttattaatcgttcttccttatcttcattctctgttcgagcttctctctatgattcgcgtttcgcgatctctcagagacgcgatcagagacgaaaccgcgttatggacaaaactcgttattgaaccaccgttgagctctcgtctaaccgatgatattctatcggagttcagttccaaatccgccggaaagctgaaaactctgattctccggcaatgtcttatggtcaccaacaagggactccgtcgtgttgtggatgctaatcctctcatcactaagataattgtgcctggatgctctggattgactcctgaaggatcatggaatggttgaaagcttgtcta

SEQ ID NO: 126197 - DNA, 475 bp, Arabidopsis thaliana
gtcgagaagagaatgaacaatgaagtgaactaataaaacttccatttgcaatttcacgacctccattttcgtgctgagattctctaagctcgatggatctaacgacgacgcgtcagaggcgtccacttagatctgactcttcttcttcgtcttcgacgaaatcttactcgaagaccgataaacctggccgatctaatggcggtgatgcggaggatggtggtctccgatggttcttgccgtttatagcgctttgttatcttcgttacatgagcgcgacttctaatatcattcatgactgcgatgaagtgttcaattactgggagcctcttcattatattctctacaagtccggatttcagacctgggaatacagttccaactttgctcttcggtcgtacttatacattctattccatgaattggctggacggcctgcttcttgtggtttgtgatgacaggttagagttttctatgc

SEQ ID NO: 126198 - DNA, 412 bp, Arabidopsis thaliana
aaaccacaacagtgcctcgcctacaatgcctaacaatggcgacttcactaattctgctgcttcaagctctgagtttagtgagctcaactattctgtcccgggccgatcggatcacccgtttacccggtcaaccccgagtcgggtttcagcactactcacgttatgtcactattgacgagaacaaacagagagctctgttttactacttggctgaagcagaaaccaaacccatctctaaacctctcgttctctggctcaatggaggacctggatgttcatcattaggtgttggtgcattctctgagaatggacctttttagaccaaagggatcaatcttggtgagaaatcaacacagctggaatcaagaggctaatatgttgtatctggagacacctgttggagttggatttt

SEQ ID NO: 126199 - DNA, 463 bp, Arabidopsis thaliana
  unsure (1)..(463): unsure at all n locations
tnnnnnnnnnnnnnnnnnnnnnnnnnnnnnnnnnnnnnnnnnnnnnnnnnnnnnnnnnnnnnnnnnnnnccacgcgtccgatttttatcgattctacaacatattttgtttaccagatttgatagattttggaagatgacattagggttgttattcgggattggaagaacattccgaagaaagagagcttcttcgcttgatattctctctcccaaacgagctcccagagacttttacaagggaaaaaactgtaaacctcctggtttccacactcgtaaagctgaaaccatatgtatctcagtgccctttagacgtcaacaaaacaaacgagtcaactgaagcttccaagtgacgaagttagaagaaacatgtttttaactttgaagtcttcattagcttaaagttaaggactgtgttattctatcatccttagatatcttttgttcctcanaanaaaaaaaaa

SEQ ID NO: 126200 - DNA, 826 bp, Arabidopsis thaliana
  unsure (1)..(826): unsure at all n locations
ccggcacgcctgcaggtaccggtccggaattcccggggcgacccacgcgtccgcccacgcgtccgcccacgcgtgcggacggctgcgagaagacgacagaaggggatctcgcgagagacagaaagggacgattattggttggtgaaatttagagcatttttgggaattgggtaaacttttcgatggcgacttcgaagcttcaagctatttggaatcaccctgccggacctaaaaccattcatttctgggcaccaacgttcaagtggggtattagcattgccaacattgcagactttgccaaacctccagagaaactttcctatcctcaacaaatcgcggttacatgcactggtgttatttggtctcgttacagcatggtaatcaatccgaaaaactggaacctcttcagtgttaatgttgctatggcagggacaggcatataccagcttgctcgtaaaataaaacacgattatgcaaccgaagctgagcctgccgttgcgagcgaatgattatgatgacgaagctgagatttctaaaggaaactggaaatcatcttgcctctgtttgaaaatctagtctcaagaaatttgattttctttaaattccaagattttttgatcggatcacgattatcatttccaaggttttttaagtattcctgtttgacatttgttcaaatgataaaggaggtcaaaaagttcccttccaaaaaaaaaaaaaaaaaaaaaaaaaaaaaaaaaaaaaaaaagcaagggcggccgctctagaggatccaagcttacggacgcgtgcaagtgaagttannnnnnnnnnnnnnnnnnnnnnn

SEQ ID NO: 126201 - DNA, 640 bp, Arabidopsis thaliana
  unsure (1)..(640): unsure at all n locations
accngtgccttcanganncctacccgccgntctttcacgntaatccactacaaatcagagcnaatcgtcccggagaaaaggttcaattgaactcagaaggaggagtccttaaagttagccctgatggtggtttgcagcaaagctcaactgtagcagattcgatatctttcaagttcgctgatggtgttaccaaatctatcccttgttcatacattgagtttgctgaacgccttgtacttccgcagtaccaaaatatacccgaaagcgagatacaagagtctcatcgacgtgatggatttgaggtcggaaatgctgacaagatcttcgagagcacatttcaggagcagctttcccgacgaaccgggtgatagcaaatagtagccacggctttggatatatgtcaatcatgcctcgtacatgtgtaacgagtaaaaagctcaaaactgcttgtaatcttgatcagtaaagatgctaatccaagaactcttaatcaaatatatttatgtgtaaaaaagggcggccgctctagaggatccaagcttacgtacgcgtgcgtgcgacgtcataatcttctatagnnnnnnnnnnnnnnnnnnnnnnnnnnnnnnnnnnnnnnnnnnnnnnnnnnnnnnnnnnnnnn

SEQ ID NO: 126202 - DNA, 560 bp, Arabidopsis thaliana
gatctccagctcaatacgactcaccttagggaaagctgctacgcctgcaggtaccggtccggaattcccgggtcgacccacagctgcgggaattttcatggcggcgaggtcaccggacgttatataatttgtatcccaaatcaaaattctgagaaggaagagaaagcaatggaggacgaattggaaggtctacgagctcattttcctgtttcgttcggtaagacatcgaaggtttcggcgtcaactgaagccattcacagcgcaactcgccgcaccgatgtagccaacgacgccggagtttcgtcggatatcaccacgaagaaacctgattccgataaatctggattcccgtctctatcttcctcatctcaaacctggctccgaagtgttcgcggtccgaatcgtaaccctaacagctccggtgatgtagcaatgggtccgccaccgccaccgtcatctaaacggacgcaagaggaagaggaggaggatgaagaacttatgatgggaccaccgccaccgcctaagggactcgggaacattaatgattctgatgatgaggg

SEQ ID NO: 126203 - DNA, 528 bp, Arabidopsis thaliana
  unsure (1)..(528): unsure at all n locations
annnnnnnnnnnnnnnnnnnnnnnnnnnnnnnnnnnnnnnnnnnnnnnnnnnnnnnnnnnnnnnnnnnnnnnnnnnnnnnnnnnccacgcgtccgatttcgacttggaagactttctatccaaggattatggttttactgtcagcccatgatgggatccatgcgcgcattggctgcagtaattcagcaggcttcaacgaagcagtttgtgggttctggtgttcttaatctcttgcaaagtcaggctaaagcgagggctggtgataattcagtgaggtcattgttagagaaaatgacggagtgtgcaagcaacgcatacctaagcatattggaaaggtgggtctatgaagggatcattgatgatccgtatggggaatttttcattgccgagaacaggtctctcaaaaaggagagcctcagtcaggactctacagctaaatattggagccaaagatacagccttaaggatactattcctgggcttcctagcaaacattggttgcaccattatttggccacaggggaaata

SEQ ID NO: 126204 - DNA, 688 bp, Arabidopsis thaliana
  unsure (1)..(688): unsure at all n locations
agaacacgtggtggtcaacattcctgagtttccgttacaccagaagactatgcacgtttacgaggtcacttctcgtatatgcatctggtgcaagggaaaatcagtcggaaacgattcgccacagaacacgtggtggtgaacattcctgagtctttcaacattgagcacaaacacgacaagacgagtccaatggattcttcaggcttggagataacacagattaacccaatgtaagctctgtgatcacaaacgtgtgtttgtcacaacgcaccacaagtctgttgcctacaggccagcaatgctttcgatggtagcgatagcagcggtttgcgtttgtgtcgctcttttgttcaagagttgcccggaagtgctatatgtctttcagccattcaggtgggaattacttgagtatggaacaagctagtaaaacttccctataccagacattgaaaaagaatcttctcaatagaagatgtgttggtgtgaaatctgcgagtgtaattttatgtaacgtttaattatttttactagaatatgtatcattcagctttacatggtttttatgtaatgtagctttatctgaaaaaaaaaaaaaaaaggnnnnnnnnnnnnnnnnnnnnnnnnnnnnnnnnnnnnnnnnnnnnnnnnnnnnnnnnnnnnnnnnnnnnnnnnnnnnnnnnnnnnnnnn

SEQ ID NO: 126205 - DNA, 407 bp, Arabidopsis thaliana
ccgtccgcgcgtccgagcagtcctacaaaggcttactccactccaaatattctctcatatgatgcgccaatctataaaaaggggaaattttcaatctgccgttggtaagattaaaagtggcaaagttgagattttgatcgtcttcttcctctggaaatttcaatcgaaactatatcttcagagatgcagaatctgtgaaattgtagaaacgaatttcacatttttttttgaagaaacagacgacgcacatatctcagttgccggtaaagtactgtgcttcgagtttttcttccaccgcccaacggaattacggtgcttcgtcttcgccgtctcctattgtaatttgtgagagtaatggaatttccgatggtctttgggtgaagcggaggaagaacaatcggagattt

SEQ ID NO: 126206 - DNA, 494 bp, Arabidopsis thaliana
  unsure (1)..(494): unsure at all n locations
nnnnnnnnnnnnnnnnnnnnnnnnnnnnnnnnnnnnnnnnnnnnnnnnnnnnnnnnnnnnnnnnnnnnnnccacgcgtccgcccacgcgtccgcttgatcggcgcaatgtctacaatggctcttgcattcatcgtgatctttgttttcctatggatttggatgctctcaaagaaggaaagaaaagtaaagaagtacacagaagtcaagaaacaaaaggatccatccgaaacaagtaaaaagctgattactttccatggtgatcttccatactcttcaactgagctgattgagaagctagagtctcttgacgaggaagacattgtgggttcgggaggatttggcacggtttatcgaatggttatgaacgatcttggaacctttgcggttaaaaagatagataggagtcgacaaggatcagaccgagtttttgagcgagaagtagagattttaggtagtgtcaaacacatcaatctagtgaaccctactggatact

SEQ ID NO: 126207 - DNA, 333 bp, Arabidopsis thaliana
aacgaacaacagagttccgtaggctttgtgaaattataagaaatcatttggcaaacctgaacaagtacagagaccaaagggaccgacctgacttatcagcccctgagagcttgcagctgtatctggacacaaggtttgatcagttgaaagttgctactgagcttggactttggcaggaagcttttcgctctgttgaagatatctatggattaatgtgcatggtcaaagaaacgcccaagtcatctttattgatggtttattattccaaattgactgagatcttctggatttcttatagccatctttatcatgcttatgcatggtttaagctgt

SEQ ID NO: 126208 - DNA, 779 bp, Arabidopsis thaliana
  unsure (1)..(779): unsure at all n locations
actcactatagggaaagctggcccgcctgcaggtaccggtccggaattcccgggtcgacccacgcgggcgagagaagaagaagatgaacgatgcggatgtgtcaaagcagatacagcagatggtccggttcatccggcaagaagcagaagagaaagcaaacgagatctccatctccgccgaggaggaattcaacatagaaagacttcagcttctcgagtctgccaagcgtaagctccgtcaagactatgaccgcaagctcaagcaggttgatatccgcaagcgaatcgactactccacacaactgaatgcacgtaggattaagtaccttcaagctcaagatgacgttgtcactgccatgaaagactccgcagctaaggatcttcttcgtgtctccaacgacaagaacaattacaagaagctttttaagagtctcatcattgagagtttgctgcgcctgaaagagccatcagtgctgctgagatgcagagaaatggacaagaaggttgttgaatcggtcattgaagatgctaaaagacagtacncggaaaaagccaaagtcgggtctcctaagatcaccatcgacgaaaaggtcttcctccctccacctcctaatccgaagctccctgattcccacgaccctcactgctcgggtggggtggtgctggcctctcaagacggcaagattgtctgcgagaacactttagacgcacgccttgacgtcgccttcagacagaagcttccccagatccggacgcgcctcgttggagctcctgaaacc

SEQ ID NO: 126209 - DNA, 403 bp, Arabidopsis thaliana
gggagaattgtactggaatgagcataagctctctatttacagcaaagtgtgcacaacggtctagaaatcagactcaatcattgtcacctcctgatgtttctcgagttggttatcaagcacccatggggggccatggagcgccagatagcggctccaatgatcaagataaatcaactgaagattcttcagcggataagtcagatggagaatctcaatcaagtttggaaaagggttgtgataatgatcttggtcatcctctagaagatcaagacgcaccgtcatcttcctcatgcaatggaagtaaaggtttcctgtctcaccaaattgacaccaaagacctgaaggacaacgacgcgtacaacttttatcagtctgttgatggtcagcacattatccttcacac

SEQ ID NO: 126210 - DNA, 692 bp, Arabidopsis thaliana
  unsure (1)..(692): unsure at all n locations
aggacgcgtgggcggttgctaaagtttggaagaaaaagccgcggaccggaaagcttgatgatggattgggtatctgtaacgacttctgaaggagatgatcaggttgaagatacgagacactttgcggatagatcatcagaggatttaagaaagtcgagaatgggatctctacaaaatcatctctctgaggatggattcaatgagagtgagttccctgaacaagcttctaacaccgagctgaaagatgatcatcaaatgtctggaagcaactttaaagcgcaaaagtcattcttctcgctctccacattccgcggcaaaggaaatgattcgaagccaagatagagagccatcaaagaaagaagaaacttggatgtggatcaagttgcgtgagtaaagagagaaaagagacagattctatcgcagactcaggcagacttcaaagacggtattttttcccgatgaactggctggtaacttcttcgatggtgtgtgtacattttgtttagtgaacaagaattgattaatccgattttctgtaactacattgtgattttggcaattttgaaaaatcctatttgttttaaaaaaaaaaaaaaaaaaaaaaaaaaccaaaaaaagggcggccgctctagaggatccaagcttacgtacgcggtcatgcgcacgtcaaagctctnctatnnnnnnnnnnn

SEQ ID NO: 126211 - DNA, 1486 bp, Arabidopsis thaliana
  unsure (1)..(1486): unsure at all n locations
nnnnnnnnnnnnnnnnnnnnnnnnnnnnnnnnnnnnnnnnnnnnnnnnnnnnnnnnnnnnnnnnnnnnnnnnnnnnnnnngacccacgcgtccgttctttcctttgtataccaaaaaatataaaataaaaaacactatggcggaaaactacgaccgtgccagtgagttaaaagcattcgacgagatgaagattggcgtgaaaggactcgtcgacgccggagtcacaaaagtcccgcgcattttccataacccgcatgttaacgtagcaaaccctaagcctacatcgacggtggtgatgattccaacaatcgatctaggtggcgtgttcgaatccacggtcgtgcgagagagtgtagttgcgaaggttaaagacgcaatggagaagtttggatttttccaggcgattaaccatggggttccacttgatgtgatggagaagatgataaatggtattcgtcggtttcacgaccaagatccagaagtgaggaaaatgttctatacccgagacaaaaccaaaaagcttaaatatcactctaatgctgatctctatgagtctcctgctgcgagttggagagataccttaagttgtgtcatggctcctgatgttccaaaagcacaggacttacctgaggtttgtggggagatcatgttggagtactcaaaggaagtgatgaagttagcggagttaatgtttgaaattttatcagaagctttagggttgagtcctaaccacctcaaagaaatggattgcgcaaaaggtttatggatgctctgtcattgttttccaccctgtcctgagccaaaccgaacattcggcggcgctcagcacacagacagatctttccttactattcttcttaacgacaacaatggaggacttcaagttctctacgatggatactggatcgatgttcctcctaatcccgaagcacttatctttaacgtaggagatttcctccagcttatctcgaatgacaagtttgtaagcatggagcatagaattttggcaaatggaggtgaagagccgcgcatttcggtcgcttgtttctttgtgcatacttttacttcaccaagttcgagagtatatggacccattaaagagcttctgtctgagctaaaccctccaaaatacagagacaccacctcggaatcctccaatcactatgtggctagaaaacctaatgggaattcttcgttggaccatttaaggatctgaaacttgaacctatatctcagaggttttcttgagtttccaataaaatttggtgcacgctgtgacgtaccatgttcaagaccttgaacgtatcattcaataattcttccgttgtgagtttcggctgcatgtttgacccaaaccagagggagtatggatcaatcaaggagagtgaacctaaaaataaaaaaaaaaaaaaaaaaaagggcggccgctctagaggatccaagcttacgtacgcgtgcatgcggcgtcatagctctatctatagtg

SEQ ID NO: 126212 - DNA, 654 bp, Arabidopsis thaliana
gttagatcagacaatgcaccagaattgaagtttgtgaagttgtttaaagaaaagggcatcattcattatttctcttgtccagaaacaccagaacaaaactcggtggtggaaaggaaacatcaacacatattgaatgttgctcgttctcttatgtttcaagctcaagtgcctgtggaatattggggagagtgtgtgttaactgcagtcctcccctccgatcgattgcctacaccattgcttcatgacaaatctccttttgaagtgcttactaacaaaatgcctgattttaatggtcttcgtgtgtttggctgtctttgttacagttctacatcaaccaaaaatcgagataagtttcaaccaagagctaaggcgtgtgtgtttcttggttatccaccaggtgttaagggttatcgacttttggatttggaaaccaatatcatatacgtctcacgcaatgttgtttttcatgaagacatttttccatttgctaaaagtggatctactgttcttcctgagtattttgctactgaaacatctaatgttgatgcatcttctactgaagcatctacttctgaagcacctgcagttgtgaatgattctgtcactccatctaatatcaatcctgtagttggggagtgattctcctacggatac

SEQ ID NO: 126213 - DNA, 396 bp, Arabidopsis thaliana
attatcaccggttttttgggctctggcaagacaacattgctgaatcatatactgaccagagatcatgggaagcgaatagccgtgattgagaatgagtttggtgaagttgacattgatgggtcacttgttgcttctaaatctattggagctgaggatattgtgatgctcaacaatggctgcctttgttgcactgttaggggtgatcttgtcaggatgattggagaattagtcaataccaagaaaggaaagttcgatcatatagtcatagagactacaggattggcaaacccggcaccgattatccaaaccttttatgccgaggaagaaattttcaatgatgtcaaactggacggtgttgttactctagttgatgctaagcatgctcgtttgcatcta

SEQ ID NO: 126214 - DNA, 479 bp, Arabidopsis thaliana
  unsure (1)..(479): unsure at all n locations
nnnnnnnnnnnnnnnnnnnnnnnnnnnnnnnnnnnnnnnnnnnnnnnnnnnnnnnnnnnnnnnnnnnccacgcgtgcgagctaatccaatgggttatgtaatctacatatcgttcccggcgattcttctccttctgatcgtcgctatcgccttttatctcatcggacgaaaaatcggccggagagaagggattcaatcaacgtcgcagttacactacggaccgccgttggctgggggtccggcacctgcgccaccgcataaagctatggagaagccaccggggccggtttagtggatgtatgatgacgtaataatacttacgtattacgtaaaccgtctatatatggaggttggggtgttaaataagatggaattgggccgaggctgaaaccaattttaaaacaactctttatgggccctggggttaaaggaacacttcgggccgttaaattccggactccctaaggcaccctaaaact

SEQ ID NO: 126215 - DNA, 486 bp, Arabidopsis thaliana
  unsure (1)..(486): unsure at all n locations
nnnnnnnnnnnnnnnnnnnnnnnnnnnnnnnnnnnnnnnnnnnnnnnnnnnnnnnnnnnnnnnnnnnnnccacgcgtgcgctcgacgagtcaattttaaccagatttagaggatttgtggatgtgatttcttcttttggtgagttttctcctctttttttattgtttctttcattctctttggatcttcatagtttcagaagcttcgagtgttttttaaaggtagttcctttgtcgctgaagaaacatagtttcaattttagagcttcttgaaacttattttcttatctggctcaatcttgagagttttgagattctgtgggagagacaatcttagggtttctgcatctagcaaaagtttgaatctttaaatatcttttagcgtttgcgattgtggtattgcctctggtctgtgttcaatgggaatcttcccttttgggacagaatgattctctcttctcgttttagattcctcggttcatgtcct

SEQ ID NO: 126216 - DNA, 1024 bp, Arabidopsis thaliana
  unsure (1)..(1024): unsure at all n locations
atgatcttnnnnnnnnnnnnnnnnnnnnnnnnnnnnnnnnnnnnnnnnnnnnnnnnnnnnnnnnnnnnnnnnnnnnncggaatccacgcgtccgcccacgcgtccgctcttttagtaacaatggtttcttcttctttaaccaagcttgtgttctttggttgtctcctcctgctcacattcacggacaaccttgtggctggaaaatctggcaaagtgaagctcaatctttactacgaatcactttgtcccggttgtcaggaattcatcgtcgatgacctaggtaaaatctttgactacgatctctacacaatcactgatctcaagctgtttccatttggtaatgccgaactctccgataatctgactgtcacttgccagcatggtgaagaggaatgcaaactaaacgcccttgaagcttgcgcattaagaacttggcccgatcagaaatcacaatactcgttcatacggtgcgtcgaaagcgatacgaaaggctgggaatcatgtgttaaaaactctggacgtgagaaagcaatcaatgattgttacaatggtgatctttctagaaagctgatacttgggtacgcaaccaaaaccaagaatttgaagccgccacatgaatacgtaccatgggtcacactcaacggcaagccactcgatgacagcgtacaaagtacggatgatctcgtagctcaaatctgcaatgcatacaaaggaaagactactctcccaaaagtttgcaattcatccgcctcaatgtctaagtcgcctgagaggaaatggaagcttcaagtctcttatgccaataaagctaccaattattaagttaactatcaaacttcgtattgaactaagatggatttaagctttatgttataagtggaatgatgaataaaggcctgttctaaactaaaaaaaaaaaaaaaaagggcggccgctctagaggatccaagcttacgtacgcgtgcatgcgacgtcatggcttgtttataaannnnnnnnnnnnnnnnnnnnnnnnnnnnnnnnn

SEQ ID NO: 126217 - DNA, 481 bp, Arabidopsis thaliana
ggaaagctgctacgcctgcaggtaccggtccggaattcccgggtcgacccacgcgtccgtctctgtccgtacgacgtcgaatatctagattgttcgacggcgatgggagctgggagagaagtcagcgtatcgctagatggagtcagagacaaaaacttgatgcagcttaagatactcaacacggttttgttcccggttcgttacaacgacaagtactacgccgatgcaatcgctgccggcgaattcaccaagcttgcatattacaatgacatatgtgttggagctatcgcctgtcggctggagaagaaagaaagtggggccatgcgagtttatataatgacgcttggtgttcttgcaccctaccgtgggattggcattggctcaaatctattgaatcatgttcttgacatgtgctccaagcaaaacatgtgtgagatatacttgcattgtgcaggccaaacaccgaagacgcattccaagt

SEQ ID NO: 126218 - DNA, 455 bp, Arabidopsis thaliana
  unsure (1)..(455): unsure at all n locations
ggtcgaccacgcgtccgaggaagcgtgggttctagatcgcgagcggccgccctttttttttttttttaaaatagaacattttattatcattgcttacattaattaaccacaaaataaacccaaaccaaatagataaaatacacacaattggtaaaaaaaaaaaatagaggataaaatacacacaagaaagatcaccttactaaagtgtaccgaaatcaaaccgaagttgataagtcttacttaagcaatttcctgttttattattatattatcaaattaaaccaaaccaaaccgaagtgcttcgttttgttggcaaaaaccgttttattcttttactgttttatcatatttccttgtgaagcagtaagangcttctccctgaataaccttccacggctccttaacgtgcttctcctccgtcaatggcgctccaattgcgcaacgtgtacgggttt

SEQ ID NO: 126219 - DNA, 502 bp, Arabidopsis thaliana
  unsure (1)..(502): unsure at all n locations
atgannnnnnnnnnnnnnnnnnnnnnnnnnnnnnnnnnnnnnnnnnnnnnnnnnnnnnnnnnnnnnnnnnnnnnnnnnnnngccaggcgtccgcccacgcgtccgatggcataattgtgaactctctccgagctaggagtatgtttacttgcttcatgcaagaaccttttcaaatctttgcctcttatttgggtcatcaatgaagaaactcttgctgttcggtctagacagtacaactcaacagggcagactgaactcctcactgactggaaaaagattttcagccgggcatcggttgtagtcttccataattatctccttccgatactctacaccgagtttgatgctggcaacttctatgtgattcccggatctcctgaagaagtatgtaaagcaaagaatctagagtttcctccacagaaagatgatgtggtcatttccattgtgggaagtcagttcttgtacaagggtcaatggctggaacatgccctgcttctgcaag

SEQ ID NO: 126220 - DNA, 514 bp, Arabidopsis thaliana
  unsure (1)..(514): unsure at all n locations
gattnnnnnnnnnnnnnnnnnnnnnnnnnnnnnnnnnnnnnnnnnnnnnnnnnnnnnnnnnnnnnnnnnnnnnnnnnnnccacgcgtccgattgcagaaacagaagattgcattggcgaagcagttgaatcttcgtcctcgtcaggttgaagtctggtttcaaaacagacgagccaggttagcttatatcattaattatttatcttcattttcttcctgtgtaaacggtttattttcttcattggaagtatatttttttgctatgattaatttctgaaaagagggatgaggacgaaaaatgcatcacgagtaataataacaaattgtcgcatgtctatccttgtcatttttcgtgcaaaagtagtatatcacttccgctcatcatttccatatataattgcttatagtgacttattcacaaaaagaaaaaaattcataatccttctttatataatttgaacccaaaataaaaacgtcttctttaatctttacaaaaacaaagtcttatattgtt

SEQ ID NO: 126221 - DNA, 426 bp, Arabidopsis thaliana
cccccgccttccgggtctgacacgtgtccggttgttttaacgaagcagcgttcggtgagtgagaaatcagccgggtcgtcgtcgtcttcttcatcaaatttttcgagaatgagtttagattcgggtcgggttcacgggtcgagtacaccgagatgggttgagttttggagtgacgcggcggttgatcgtcggaggagaaactctgcttcttctatgtcgtcgtcacactcttcatcgccggagagatatttagatttaccaagatccgagacaccgaaatgggtcgacgattacgtgaaccggatcgggtcggttttaagaggaggcgggtggagcgaatccgacgttgatgatattgtacacgtgtcagcatctggtttttttgagggtgaaatggtaattttggataatcaagccgttcttgag

SEQ ID NO: 126222 - DNA, 470 bp, Arabidopsis thaliana
cgcgtccgaccaagcgtccggaaagagcgagagatgggagggaaaggaaaaaagaggagagagaaaaattacctagctgctcacggcggaccggcgagacttccgccgccgcctgatcgttcgaagcaagatgatgttccttctacgctccgtatcctcatgaactacacttctccttctccccatgattctactaaacaagtcgtagagaagaaggaaaagcttaagaaagctgaagtagttgttcctgcaacggagagtgatggagatgatagtgtggtggagaagaagaagaaaaagaggaagagaaatcaaatgacggatcttcgttttgaaaacgaacttgcagagattgatggccggtctaaaaggaaagaacgcaagaagaagtattgggaggccaagaagcaaaagatggtttaagggaagactgaagataccctccgtgaaaacttccccaagcatgaaca

SEQ ID NO: 126223 - DNA, 532 bp, Arabidopsis thaliana
  unsure (1)..(532): unsure at all n locations
nnnnnnnnnnnnnnnnnnnnnnnnnnnnnnnnnnnnnnnnnnnnnnnnnnnnnnnnnnnnnnnnnnnnnnnnnnnnnnnnnnccacgcgtccggttttggagacgcatcaactcatgatcaagacgtgtttagtttctatccagagggaagattctgtaatggatttgaggaagtattggctcgttatagagaaattgtacctcagcttaagctcgcaggaccaacttcttttgccccgatcattgaaatggcaatgacagtggttgagcagagtagtggccaatatcatgtgttagtgattatagctgatggccaggtcacaagaagtgtcgataccgaacacgggcggctaagtccgcaagaacagaagacagtagatgcaattgtgaaagcaagtacccttcctttgtcaatagtcttagttggggtcggggatggaccatgggacatgatgcaggaatttgatgataacatacctgcccgagctttcgataacctccagtttgtgaacttacagagatcatgtcaaag

SEQ ID NO: 126224 - DNA, 1275 bp, Arabidopsis thaliana
  unsure (1)..(1275): unsure at all n locations
gtcttaaaacaagtagagtattatttcagtgatgaaaaccttgagaatgatcattacctcatttctttgatggatgaagaaggatgggttcccacaaaaattatagctggcttcaaaagggttaaagcaatgactatggatgttgattttatagtctatgcgttggggttttctaattctgttgaagtgcagggtgaccagatacgcaagcgtgacaagtggtctgactggattcctgcatctaaaaagtcaacctctgcggagacaattggagacggtgacaaagattccccaaaaagtataacaagcggggataattttggaaacccttcaaagggttcttcaaagcctaccgtgtccgatttctcttcagagggagctcagtcatcaagaaccaataattataaaagtggtaacctggaatcatcagcagacgaaaaaagaaatgtggaggacttgtcaaacgatttttcaaacactttcttgcttgacgaggaactagatctggagcacagaagccccacgcggccgggactgtccatgtccaaaagcattgagtatgaagacgatgatatggctgttgatgatcaagatattcagaaacttgtaattgttacccagaatagtggtaaaagtgatggcgctggaatcggtgggacggaagcaaaaaatattcctaaggagcttgcctccacaatcaacgatggtctttactactttgagcaggagcttaaaaaaaaacgatctggccgtaggaagaacaactcccatttggataccaaagatgggaaaatcaaatctggggaaggattgaacactaagttgggcgaaaattccgcagcaaatgatggaggggaagagcatggaatcattacttcacggaggaagcaaaataagggaacgcacaaacatcatacagcccatgcacggaggttcttctcgagtaacataaggaacaatggaaatatatcagaaagtccgcctagtagctccattggattttcctttggttctacaccaccagacagtcatggccctaggctttcggaattgagttcatctncacaatgtacacttttcttggaagcagtccacctgtggggctctttnnccaaaatcattttccacctttttcaaacatncggggccacccaactnttttggaagnggaattgggntttaaacaaggnaagttcctttagggttntgaaaagcnctttttaaccgggannaaanaagctttgttgngggttnnntttgggaattacccttttt

SEQ ID NO: 126225 - DNA, 725 bp, Arabidopsis thaliana
tccaccagccaatccccggaggttcttttcaagttacataaggaccaatggaaatatatcaaaggttccccctagtagctggatgggatttttctttggttctacaccaccagacagtcatggccctaggctttcgaaattgagttcatctccacaatgtacactttctggaagcagtccacctgtgggctctttgccaaaatcatttccaccttttcaacatccgagccaccaactgttggaagagaatgggtttaaacaagaaaagtacttgaagtatcgcaagcgctgcttaaacgaaagaaagaagctaggtagcggatgcagtgaggaaatgaaccatttgtaccgattttggtcgtatttcctcagagacacatttgttctctctatgtatgatgactttcagaagtttgctcttgaggatgcagctggcaattacgattatgggctggagtgtctctttaggttttatagttatggtctggagaagcactttgatgaggacctttacaaggactttgagaagctatcgcttgacttctaccacaagggaaatctgtatggcttggagaaatattgggcattccaccattatcgaggcaaagaagaaccgataacaaagcaccctgagctagagaaactactgaaggaagaattccgtagcatagacgatttccgagcaaaggaaacaatcaccaaccaaaaagaaaacaagtctcact

SEQ ID NO: 126226 - DNA, 839 bp, Arabidopsis thaliana
  unsure (1)..(839): unsure at all n locations
ctaaacgactcactatagggaaagctggtacgcctggcagtaccgcacgtgaattgccgggacgacccacaaaaaacatcgcacaagaaaataaaagatttgtagaatcaactaagaaaatggctagcactatgatgactacattgcctcagttcaatggtcttcgagccaccaaaatctctgcagctcctgtacaaggcctggcaagtgttcagcccatgagacgcaagggaaatggagctttgggtgcaaagtgtgacttcatcggttcatcaacaaatctgataatggtaacgtcgacgaccctgatgttgttcgcggggagattcggacttgcgccatcagccaataggaaggcgacagctggacttaggttggaggcacgtgactcaggtctacaaacgggtgacccggccgggttcacgcttgcggacactttggcttgtggcaccgttggtcatatcatcggtgtaggagttgtccttggccttaaaaacattggtgctatttgaagttcctaaagctcttttatttgtatttgaaaatttggagatttttataacaatattatcatgcacctgaacgagatctaatggatcttacaactctcaggaacgaaaataaatatagnnnnnnnnnnnnnnnnnnnnnnnnnnnnnnnnnnnnnnnnnnnnnnnnnnnnnnnnnnnnnnnnnnnnnnnnnnnnnnnnnnnnnnnnnnnnnnnnnnnnnnnnnnnnnnnnnnnnnnnnnnnnnnnnnnnnnnnnnnnnnnnnnnnnnnnnnnnnttnnnnnnnnnnnnnnnnnnnnnnnnnnnnnnnnnnnnnnnnnnnnnnnnnnn

SEQ ID NO: 126227 - DNA, 766 bp, Arabidopsis thaliana
  unsure (1)..(766): unsure at all n locations
taggtgcaactatagcaagagctatgacgtcgcatgcacgcgtacgtaagctcggaattcggctcgaggaggaaaacaaagctgcgaaaacaaaaataaaaaaaacatcgcacaagaaaataaaagatttgtagaatcaactaagaaaatggctagcactatgatgactacattgcctcagttcaatggtcttcgagccaccaaaatctctgcagctcctgtacaaggcctggcaagtgttcagcccatgagacgcaagggaaatggacctttgggtgcaaagtgtgccttcatcggttcatcaacaaatctgattaatggtaacgcccccgcccctcattgttgttcccggggagattcggacttgcgccatcagccaataggaaggcgacagctggacttaggttggaggcacgtgactcaggtctacaaacgggtgacccggccgggttcacgcttgcggacactttggcttgtggcaccgttggtcatatcatcggtgtaggagttgtccttggccttaaaaacattggcgctatttgaagttcctaaagctcttttatttgtatttgtaaaatttgtagatttttataacaatattctcatgcacctgaacgagatctaatggattttacaagtctttatgtttatcttataatgttgtatcgaaaaaggtccccctttaaatnnnnnnnnnnnnnnnnnnnnnnnnnnnnnnnnnnnnnnnnnnnnnnnnnnnnnnnnnnnnnnnnnnnnnnnnnnnnnn

SEQ ID NO: 126228 - DNA, 1099 bp, Arabidopsis thaliana
  unsure (1)..(1099): unsure at all n locations
gccaagggctgcacgaagctgtttcatgctgctgaatttgtgtacaagcatctcaagctgaaacacactgagcttgtcacagagctgactaccaaagttcgggaagaactgtattttcagaactatatgaatgatcctaatgctccaggaggacaaccagccacgcagcaatctggcccgagagatagacctataagacgtaaacccagcatggagaacagactgagggatgatagaggtggacgcagagagcgtgatggacgtgctaatggaaatgacagaaatgatcggtcagaagatcaacagagaggggataatgatggtggaaatcctggggaagttgggtatgatgcatttggtggacaaggtggtgttcatgttcctcccttcttatcggatataaacccaccaccaatgctgatgcctgttcctggtgctgggccactgggaccatttgtaccagcaccaccttgaagttgctatgcagatgttcagggacccaagtggacccaacccctccttttgaaggtagcgggagaggtggacctgccccttttctgttgtctccggcctttagacaagatccttagaccggctgcgcagctaccccaagacccctagattgctccagagggagaagtgaccgttattgattacaggagcttgtagacaagacagggctagagagatcccgagtttactggttcgggttgggttaaagggcatcagtattagaaggcaaagctagcagattgtggcattttcttacccttttgatgtattatgtcttgttcctcccaattttcactcactaaagcgtaaaatacgcactccatacatttccttattgtttttcaaaatttttcatgtgctttcttactaattctgttcgacgatgattacataaatagcatgagaatttcttgtattgaataatgcgttttatccacattgtttgttatcaatacttaagtctccatggcagtcttaaatctccatggccattaaaaaaaaaaaaaaagnnnnnnnnnnnnnnnnnnnnnnnnnnnnnnnnnnnnnnnnnnnnnnnnnnnnnnnnnnnnnnnnnnnnnnnnnnnnn

SEQ ID NO: 126229 - DNA, 565 bp, Arabidopsis thaliana
  unsure (1)..(565): unsure at all n locations
cntttccacccccctgagttctagcaatntcnggcccaagngcccnaccccnttngaggtgcgggagaggtgncctncccntttctgtgtcnccggcntttagacangatccttagaccgngcgcagctaccaggncntagatgctccagaggaagaagtgnccgttattgattacaggagcttgtagacaagacagggctagagagatcccgagtttactggttcgggttgggttaaagggcatcagtattagaaggcaaagctagcagattgtggcattttcttacccttttgatgtattatgtcttgttcctcccaattttcactcactaaagcgtaaaatacgcactccatacatttccttattgtttttcaaaattttcatgtgctttcttactaattctgttcgacgatgattacataaatagcatgagaatttcttgtattgaataatgcgttttatccacattgtttgttatcaatacttaaaaaaaaaaaaaaaaaaagggcggccgctctagaggatccaagcttacgtacgcgtgcatgcgagctcaagctttt

SEQ ID NO: 126230 - DNA, 917 bp, Arabidopsis thaliana
  unsure (1)..(917): unsure at all n locations
nnnnnannnnnnnnnnnatacgactcactttagggaaagctgcgtacgcctgcaggtaccggtccggaattcccgggtcgacccacgcgtccgcttcaacaaagattgtctagttcggatcttgaaacgagcgatgatgagtgtgttgtaacgtatgggtttggttatgatgaatctgaagatgactataaagtggttgcgttgttgcaacaaagacaccaagtgaagatagagacaaagatctactcaacgagacaaaagctatggagaagcaacacaagtttcccatctggagttgttgttgctgacaaatcaagatccggaatctacatcaacgggacactaaactgggcagccacttcctcatcatcgtcatggacgatcatatcgtatgatatgtcacgcgatgagttcaaggagcttccagggccagtttgttgtggcagaggatgttttacaatgacgcttggagatttaagaggatgtctttcgatggtgtgttattgcaaaggagctaatgcagatgtttgggtgatgaaggagtttggagaagtatattcttggtctaaactcttgagcattcctggtttgaccgactttgttcgaccgctttggatctcagacggtttagtggttttattggagtttagatccggtttagctctctataactgttccaatggaaggtttcattacccagtttcaaacagcataagtggttgtcgtgacgccaaagtttatctcaagacaatggtttctccaaatgatctttgagatataaaaaattgttcctaatgtttctatccaagattttatttaaaaaaaaaaaaaaaaagggcggccgctctagaggatcccagcctacggacgcgggcctgcgacgtcctaagttctcctatagtgtcacctaaatcaat

SEQ ID NO: 126231 - DNA, 506 bp, Arabidopsis thaliana
acgcctgcaggtaccggtccggaattcccgggttgacccacgcgggcggagacctcaaccgtcttctgctccgccgccccgccacaggttcttagggttcttccgcatcggttctccgaattgcaatcccctcattctccacaataaacagatagctaatataattgagtttggatactcgcaagtgaaaatttcctccgtcacagcgggagtgagtgaatctgcaattgctgtaagggagaaactaaaaggtggttttggacagactaaagcgcgaatggtatgggccaggaaaagccccggagggggctgaggaagctgaagaaaatgataattgctggatgcaaaagggttctgttttggataaacttttccaaaaaagaaatatgggtgcggctagaaagatatcccagggtgcgcccggtaggctaaacttagggtggaaaaccgggccaaagtagagctgatcttcgggggataaaaaggctggaattatttttacggga

SEQ ID NO: 126232 - DNA, 429 bp, Arabidopsis thaliana
acgcgtccgagacctcaaccgtcttctgctcctccgccccgccacagtttcttagggttcttccgcattgtttctccgaattgcaatcccctcattctccacaataaacagatagctaatataattgagtttggatactcgcaagtgaaaatatgtcggtcacagcgggagtgagtgaatctgcaattgctgtaagggagaaactaaaaggtggtattggacagactaaagtgcgaaggtattggccaggaaaagctccggagtgggctgaggaagctgaagaagatgatgatgttaggatgcagaaggtttctgttttggatagagcttttccaaagaatgatgatttgggtgttgctaggaaggatgatccaaggctgcgccgtttagctaagactaaagttgaaaaccgtgacgaagttagagctg

SEQ ID NO: 126233 - DNA, 508 bp, Arabidopsis thaliana
  unsure (1)..(508): unsure at all n locations
nnnnnnnnnnnnnnnnnnnnnnnnnnnnnnnnnnnnnnnnnnnnnnnnnnnnnnnnnnnnnnnnnnnnnnnnnnnnnnnnnnnnccacgcgtccgcggacgcgtgggccagaatctgccgtcaccttttttcggtttttgcgtcttcctcaaaaattcgataacaatggtgaaacggaatcgagttccgccggcagaacaagcattacccatcgaagaagattgcaaatcgttgataaaaaatgcttgctgcggggtaagcaatcaatccgcgacagatccttgcgaactgttcttcgtacttggctcccagaacaaactgaaatctccgatgaagatatgaagaagctatggcaaggaatcttctattgggtctggcacgctgataagtctctttaccaatcagaacttattgatcggctctcttctgctcttcaatcacttcctcttcctttgtctatccattacttcaccgtcttcttgttcaccatgcgtcgtgagtggtctcg

SEQ ID NO: 126234 - DNA, 715 bp, Arabidopsis thaliana
atacgactcacctttagagaaagcacgtacgcctgcaggtaccggtccggaattcccggttcgacccacgcgtccggacacgattcaacatcaaatctagctgaattattgtttcgcgttgattgattgatccggagaaaggcgatgacatcgcctggatcgaagaaagttgttaccaccgacgacggatcggagaagaaagtttccggcaatctcggaaaagtaagtttttccggagatcttaatcatagtggaagccatagtggaagccatagtcgtagcagcagcagcgccggaggtggtgaaggaggaacgtttgagtatttcggatgggtttatcatttgggtgtgaataagatcggtcatgagtactgtaatcttcgtttccttttcattagaggcaaatatgttgagatgtataaaagagatcctcatgagaacccagacattaaacctataaggcgtggtgtcatagggccgacaatggtgattgaagagctaggacgtcgaaaagttaatcatggggatgtctacgttataaggttctataaccggttggacgagtcaaggaaaggagaaattgcttgtgctactgctggagaagccctgaaatgggttgaggcttttgaggaagcaaagcagcaggctgaatatgcactatcgagaggcggaagtacaagaacaaagttaagcatggaggccaacatcgatctgg

SEQ ID NO: 126235 - DNA, 801 bp, Arabidopsis thaliana
atcacttagcatgtacgcgtacgtaagcttggatcctctagagcggccgacctttttttttttttttaaaatctttctttcttttttactttaggaagaagagtatttgcttacaaagtttacatagcacaacgaaatcattttttttactgttttacacaacaatcacaaaacccaaaggtaaatgtatgtattaattactataaaaatgttatcaacccgagaagctgcattacacggcaaccgccacagccgcattaacggcgacgccttcaccgataccgccgttgcattttccgttaagaacaacgacgtcgtttctttctttgggtacgagactcttcatcatcacttccaaatccctcttgagcacgttgaccaaaagtccgttcttgatgaacaaagtaaacgacatcttttgttccaccttgtgtcccggcgccaccgatagtttatgcctgagtaaaaccgccgccgggatcgtattcatctggagatacgctagatcttttcctagacaggaggctgggccggagttaaacgcctcaaattggtcctgatcgagattcacgaattttccatcttccggggagaaccaccttttcggtttgaatttctaagtaaatcttttttccaacggtgctttttaatacctctcccgccggggtgagattcgaaataagttaaatcggacgaatcttcgcccagtttcacaaaaattttttcctcccgggaaaagaaaaatcgttaaggtatcaacagaacaggagctctttgtaaatctttgtcacgtcaccccga

SEQ ID NO: 126236 - DNA, 544 bp, Arabidopsis thaliana
gcattttccgttaagaacaacgacgtcgtttctctctttgggtacgagactcttcatcatcacttccaaatccctcttgtgcacgttgaccaaaagtccgttcttcatgaacaaagtcaacgacatcttctgctccaccttgtgtcccggcgccaccgttagtctatgcctgagtaaaaccgccgccgcgatcgtcttcatctgcagatacgctagatcttttcctagacagatcctaggtccggcgttaaacgccacgaatcggtactgatcgtgattcacgaattttccatcgtccggcgagatccacctctccggtttgaattccaagcaatcctctccccacgtgctcttcatcctccccgccgcgtagatcgaataagtcaccgacgatcccgccggtacgaaagttccgtccggtaagatatcgtcgttcacgacgtgctttgaatcttccggcaccgacgggtaaagcctcaacgtctcagagagcgcggccttcaggtaaaccaaccggtgccggtaagatatcgtcgttcacgac

SEQ ID NO: 126237 - DNA, 454 bp, Arabidopsis thaliana
accacgcgtccgatctgaagcagccatggagatagccgccgttagcactgtctccgtcgcgccacaatcgcgcagagtgtcgaatgcgttctccaggaatctaggatccgtatcttctctttcgtttggtttctttgagaaagaatattgctttaagagccctagccttcgtgtgtctgcagcagcttccatggacgccgtcacagctgagaaattttctccggcgagttttctagacaaaaaagaaaccggagttcttcactttgtgaaataccatggcctcggcaatgacttcattttggtcgataacagagactcatcggaacctaagattactcaagaacaggcggcgaagctgtgtgatcgaaacttcggtgttggtgccgatggagtgatttttgcaatgccaggagtcaatggtactgattacgcaatgcggattttcaattcagat

SEQ ID NO: 126238 - DNA, 513 bp, Arabidopsis thaliana
  unsure (1)..(513): unsure at all n locations
cnnnnnnnnnnnnnnnnnnnnnnnnnnnnnnnnnnnnnnnnnnnnnnnnnnnnnnnnnnnnnnnnnnnnnnnccacgcgtccggtcactgccaccggaaaaacgccatgaaacctcgttttcctcaaaatgtctattttttggctcgctattcatatctccgccgctttcagcatagtcaacgtcgaaccttcagctctttcctcaacaatatccgttcgaattattccggtgctcgtgcttcgcctctcggcggcagcagcggagccggagccggagccggaggaggtggaaccggagattccaaaggcaatgcttttcttgtgcccggagcaacaatggctactatccttatgcttggagctcttcatgctcgccgcctctatgaagacaagaagatcgaagagaaacgggagaagggaatcgaacttgagttccacccagatatcaaagcctcgttccttggagttctgcctctgcgatcaatctcaagagcttggggctcctttatgag

SEQ ID NO: 126239 - DNA, 656 bp, Arabidopsis thaliana
  unsure (1)..(656): unsure at all n locations
nnnnnnnnnnnnnnnnnnnnnnnnnnnnnnnnnnnnnnnnnnnnnnnnnnnnnnnnnnnnnnnnnnnnnnnnnnnnnnnnnnccacgcgtccgcgaagaagaagagaggaaggatgaagaagatcccggtgcttctcatgggctgcggaggcgttggccgccaccttcttcaacacatcgtctcttgccgatcgcttcacgccaaaatgggagttcatatacgggtgattggagtatgtgatagtaaatccttagttgctccaatggatgtgctcaaagaggaactgaatgatgaactcttgtcagaagtttgccttatcaaatcaactggttctgcattatcgaagttgggtgctttgggtggatatcgagtcgtccatgattccgagttaagcacggaaacagaagagattgcaaaacttcttggtaaatctacaggcttagctgtggtggattgctcagccagcatggagacgattgaaatatttgatgaaggcagttgccttgggttctgtattgtccttgcaaataagnagcctgttactcaacgntngaccattacggcaaatttgctttcatccgggttatccccatgatctcttttggntggctccngcangatccttaccanaattggtgggnccnntcaaaggttc

SEQ ID NO: 126240 - DNA, 428 bp, Arabidopsis thaliana
  unsure (1)..(428): unsure at all n locations
ctcattctctccatctctctcatggcgccggcgaccattgtaatccgacgatctctctctttcttgttcttctccatcgtgatattcatctctctctctctctttcttgttcttctccatcatgatatttatctctcgcttctgccggcaaaatctctccaacatttcatccttcgaattgagagagttgcaagtcataattacctgtttgagccgctattatcatcatctgcatgataaatggttaaatggagaagtggatacagttgctagaatgattgatgtctgttgtgtaagaattggatacaattaccgaatggaaggctcatanaagctagactaaaggatggattacaagaacacacaaagacatggcttcttttatggctgaactgctttaacactggtaagaaactatctctcaatat

SEQ ID NO: 126241 - DNA, 500 bp, Arabidopsis thaliana
  unsure (1)..(500): unsure at all n locations
ccnnnnnnnnnnnnnnnnnnnnnnnnnnnnnnnnnnnnnnnnnnnnnnnnnnnnnnnnnnnnnnnnnnnnnnnccacgcgtccgttcaactttgtcttctcagaatcaaacctctgaagacttttcaccaaaatgacattactttcctctctcggaagagcctctcgatctgctccacttgcctctaagctcctcctcctcggcactctcagcggtggaagtatagtggcatacgctgatgctaacgaagaagctaacaaaaaggaggagcataagaagaagaaagtagttgtgcttgggactggttgggctggtataagtttccttaaagatctcgacataacttcctacgatgttcaggttgtgtctccccagaactactttgcctttacgccattgttacctagcgtcacttgtggaactgttgaagctagaagcattgtggagtctgtccgtaatataaccaagaagaaaaatggggaaattgaattgtgggaagc

SEQ ID NO: 126242 - DNA, 156 bp, Arabidopsis thaliana
accatagataaataaatttagagaaatatctaagtttggttcttccctgtgtctacccaccgtgatcatcataaaatggattgtgatttctgatttgtgagtctatctttctctactccattagcttcctctcccttggatggttacgtcactttc

SEQ ID NO: 126243 - DNA, 541 bp, Arabidopsis thaliana
acagcactttgtcggtttagcaggccttatattattattgatgaaccacatccaatcacgaacgaggaattagtggttgctaaaaccatgacactttttatcaccaattatcggcttattatcactgcgaccccccccccgggtacggcacgcgtacggtgggctcttctaaattttcttctgcctgagatttttagttcagcagagacttttgatgaatggtttcaaatttctggtgagaatgaccagcaagaagttgtgcaacaactgcacaaggttcttcgaccatttcttcttcgaagactaaagtcagatgttgagaaaggtttgccaccgaagaaggagaccatacttaaagttggtatgtctcagatgcaaaagcaatactacaagggctttactgcagaaggatcttgaagcggttaatgctggtggagaacgcatacgtctgctaaacattgcaatgcaactgcgtaaatgctgccatcacccctatctcttccagggtgcagaacctggtcccccaataccacaggagatc

SEQ ID NO: 126244 - DNA, 499 bp, Arabidopsis thaliana
actcactatagggaaagctgctacgcctgcaggtaccggtccggaattcccgggctttcttctctgactcttactctgtctttcttcatcagaccaaaaacaaaccctaatttctcagctcgatttctctcttactccatttctcaatccttcacaaaatgcaccaacttccatttccgagatcgtaaaaaagcttgtggtactttctgataatagagagggaaaaaacgagagagagagaaaacacaaaatgctggaagctccggtgaacaagtcaagcatcctcaatggaggaggaggaggattctctcagctacagagttgcttcggcgattgcagtagcgaagaagaattgtcagtgttgccacgtcataccaaagttgtcgttactggaaacaaccgtaccaaatctgttctcgtcggtcttcaaggcgtcgttaagaaagccgtcggacttcgggggctggcattggcttgggttgactatgggaattgaagg

SEQ ID NO: 126245 - DNA, 872 bp, Arabidopsis thaliana
  unsure (1)..(872): unsure at all n locations
cagctctcctacgactcactttgggaaagctggtacgcctgcaggtaccggtccggaattcccgggtcgacccacgcgtccggcgaaaacttctcttttgtctctcaagtcagactcaattcccatggacttctccgtcaaaccttccggcggctcaccttctccgtcatcttccacctcttcttctacgcctcatcgtttcaaatccgttaccacaccaaccgcgactgccgctgccgtctcaggattctccccctccgccgccgctgatcgagatccgatgcattcctggtgggaatcagtctcaaagcaacgttctcgcatcctctctctttcatctcttctctccggcgattctcactttgaagacggtgacgtaactccgatctcctctcttgcagattccgatcggccggcgttatcgttactctcttctcgtgctgcttactctttgatatcgaattctctttgcaatccagcttctggttctggatctgatccgctttgtcaatggctatacgaaacttatctctcctctgatccaccacttcgtctcgttgtcctctcgttctttccgttactcgtcggaatgtacttgtctcgaattcattcctcggattcgacatctcttccttctctatccggattcgaagctgtgcttctcgcaatctacggcgctgaggttaaagctcgcgcaggtaaacctatantcgtacacattccagatctntntnaggcatctctttaccacanaacggngaacggcgttgacaaaancgcgngattccaatccaaccgcttcgtcggngcntnntntccgaagntnagctaaaatcgngggtaagtaaatnagggngccanaatngttgggg

SEQ ID NO: 126246 - DNA, 577 bp, Arabidopsis thaliana
  unsure (1)..(577): unsure at all n locations
gaaaaccggncttgaaagnnactggaagttnggacctntacagttaggatggtccaacccccnaanggnnctggnattgtggctgctaaaggtccntaagagggtccttnaaatcgctnggaattgatgatgttttncacttccnccaaggggatccaccaaaaacctccttggaaaacntccgtnaaggcntanantcggatttgcctttcaagaagactttacgggattccntacccccaagaggttctggaaaggagacaagattctctagatcaccataccaagagcacactgatttcctggcgtccaaggctctttcgaccagcaaacccgacccagtggttgaagaccaagcctaaacaatgcttccaccttgtgttctttttggattataatccttcatgagttaattttggttgaacctttggtagtatatgttgctggattgtgcaccttctgttttcatctcctcttccaaactactttatttttgcttatggatcttaatgttctagttttgctttttctacttttgttgagaaaagttaatccagtggtgccaattttaattttc

SEQ ID NO: 126247 - DNA, 1311 bp, Arabidopsis thaliana
  unsure (1)..(1311): unsure at all n locations
gagattaatctcgctaagctgtctgttgttccagtgaggagaggttactggggtaacaagattgggaagccacatacggttccttgtaaggtgactgggaagtgtggatctgtgacagtgaggatggttccagctcctagaggggatccaccaaaactcttggaaacttcgtcaaggctacattcgattgccttcagaagacttacggattccttaccccagagttctggaaggagacaagattctctagatcaccataccaagagcacactgatttcctggcgtccaaggctctttcgaccagcaaacccgacccagtggttgaagaccaagcctaaacaatgcttccaccttgtgttctttttggattataatccttcatgagttaattttggttgaacctttggtagtatatgttgctggattgtgcaccttctgttttcatctcctcttccaaactactttatttttgcttatggnncttaatgttctagcatttatcgatttattataaatacaattgaagtttttaaaaaaagtttccaaccannnancagtaattgtnctttctattgcatttctcagctaaaattttgccgaatttttcaaaatttaaaatataaaantacaaagatagagaagaataaaataaagaaaatttcaattttccttcccttcgtcaccgccttcttccaagtactctttcttcctcctctcagcattagataacagacaaatcaaaaggaaacacgtggcatacacaccgtgtatcttccagttcgtcttcggaggctgacgaagcaccaccctatgaaacaccgccacgtaataatgcagacctacagcaaagcccacaaaggtctgcgccaagcccaataccttaaggcccaaacacaatccgtggagaagacgagaacgaggtacatgagaagaagcnagaggtagaagacgtagcctagggtttgcaggatctgcaagcaaacgtatgttgagctcgatgttgcgtagagaaacttgagtggttccattccggtgccgagcgatgagaggcataggattgagaagtagatcgagaggtagatttggatgaagattaggatcttctggagtgagaaataagctttgaatctgttgaaaatgagtgagactaagagtagagggacgaggatgaagacgaaagagtctacggaagctatggttggtgagatatgatacaaaatagggtttaagtttttgggaccctcttgtggctatgtactctaccatttgtatgttttagattggaataaaatgattagggattttgaatct

SEQ ID NO: 126248 - DNA, 537 bp, Arabidopsis thaliana
gccaataaagtaagcagactccctcaataggcacccccaggctgaactctttacgctccggctccataaattgtgccaaaatggagcccaaacacatttcacacaggaaccacttatacccagaattcgcctaagctgtaatacaactccacatagggaaagctggttcgcctcaaggaaccgggccgagattccggggtcgacccacgggtccgcccacgggtccggaaaacggctgcggccccggctgctgcttctggatctaacaacgcctgattgaagaaatcacactccgatatcaaattcaatggagatcacagttttgaaattcatttgatggtaataaagattctatagaagacagaaaacattatgtaaacagttgttttttttttgtcaaacatttttgttgtcagttaccccccaaaaaaaaaaaaaaaaaaaaaaaaaaaaaaccccccaaagggcgagccgctctagaggatccaagcttacgtacgcgtgcgtgcgacgtcatagctctctatagtgtcacta

SEQ ID NO: 126249 - DNA, 1001 bp, Arabidopsis thaliana
  unsure (1)..(1001): unsure at all n locations
cagctctcctacgactcactatanggaaagctggcacgcctgcaggtaccggtccggaattcccgggtctacccacgcgtgcgcccacgcgtccggctttatgcctgcttgtgtgacaatctttgacaagaattgtaaaccattgatggaacttggcgaaggtccttataacactcttcgatggaacccaaaagggagagttttatgtgtggctggattcggtaacttgcctggtgatatggccttctgggatgttgtaaataagaagcagctaggaagtaataaagccgagtggtctgtgacaagtgaatggtctccagacgggcgttatttcttgactgcctcaacagcaccaagacgtcaaattgacaatgggatgaaaatcttcaactacgacggaaagcgttattataagaagatgtttgagaggctgtatcaggctgaatggaaaccagagtctccagagaggttcggtgacatcagtgaacttatcaagtcagttgaatcattgaaactcggcgagggcaaatcgcaaggacaaggatcagctcagaagaaaactattgcccccaatcctattgcacagaaaccggccgcatatcgacctccgcatgctaagcatgcagctgctgttcaagccgagttacttggaataagcacaacaggagagatgagcaagaacgctcttaaaaacaagaagaagagggagaataagaaagcggctgcggctgcggctgctgcttctggatctaacaacgcctgattgaagaaatcacactccgatatcaaattcaatggagatcacagttttgaaattcatttgatggtaataaagattctatagaagacagaaaacattatgtaaacagttgttttttttttgtcaaacatttttgttgtcagttacccgccaaaaaaaaaaaaaaaagnnnnnnnnnnnnnnnnnnnnnnnnnnnnnnnnnnnnnnnnnnnnnnnnnnnnnnnnnnnnnnnnnnnnnnnn

SEQ ID NO: 126250 - DNA, 523 bp, Arabidopsis thaliana
cttccaaactcccgaagaagaagaaaataactacaatgagtcaacaacctcctgctgttggtgttcctccttctcatgcttatccggcggaaggaccacccaaggacgcttatccacctccgggacaaccctatcctcagcaaggatatcctcctccgcagggatatcctcaacaaggttatcctcctcaaggttatcctccgcaggggtaccctgaacaaggatatcctcaacaaggttacccacctcagcaacaacagcaacagaaacacagtcctggtatgcttgaaggatgtattgctgctctgtgctgttactgtgtcttggacgcttgcttctgagtggaggtctccgcttgaagctgcaaaattggtttataccgatgatctcatctcattctctttcgtttctctacagacttgactctcttctaagcattttatcttagttactattagattatttggattttgccaaatgggaatgtaaatggttgggtgacccaattcatgttgcacattat

SEQ ID NO: 126251 - DNA, 408 bp, Arabidopsis thaliana
ttgtctgaaggaaccgctattgaagaccttttcatgcctgaccgtgtcctcatcggtggtcgtgaaacagctgaaggctttgcagccgtcaaagccttgaaagacatttaggcccagtgggtccctgaagagagaatcctcaccaccaatctatggtctgccgagctttccaagcttgcagctaatgccttcctagcccagagaatctcatcagtcaatgcaatgtccgctctctgtgaggcaactggcgccaatgtctcagaggtctcttatgctgtgggcagagactctcgtattggtcccaagttcttgaactctagtgttgggttcggaggatcttgtttccagaaagatattctcaacttagtctacatctgcgaatgcaacggcttacccgaagttgctgag

SEQ ID NO: 126252 - DNA, 716 bp, Arabidopsis thaliana
  unsure (1)..(716): unsure at all n locations
atgatacgtcnnnnctactacgactcactatagggaaagctgccacgcctgcaggtaccggtccggaattcccgggtcgacccacgcgtgcgggttgataaaggggctgatattcatgacgtttatcgcaattattgtgatattgatcacactggctcacatgacgatacaagacataattgtgtgtatccttgcctttatgcccacaggttgggggatgctcttgattgcgcaagcgtgtaagcgggtggttcatagagcaggattctggggatcagtgaggaccctagctcgtggatacgagatagtaatgggactgttgctgttcacgccagtggcgttcttggcatggtttccatttgtgtcagagttccaaacgcgtatgctctttaatcaagctttcagtagaggtcttcagatctctcgtatccttggaggtcatcgtaaggatcgctcttctcgaaacaaggaatgattcatctcttcattgtaatgacagggaagggatcttaatttatcccttttttatcttcatggatgattagggttaatgtaatttagttttcaatatatcgcttaggtaaaaacattgtagtattcatctataaattagacgttatctatcaaaaaaaaaaaaaaaaaagnnnnnnnnnnnnnnnnnnnnnnnnnnnnnnnnnnnnnnnnnnnnnnnnnnnnnnnnnnnnnnnnnnnnnnnn

SEQ ID NO: 126253 - DNA, 414 bp, Arabidopsis thaliana
  unsure (1)..(414): unsure at all n locations
ggnnactttaaatacggttcgatcaatgtaaccgatgtctacgttctaaggaacatgccgcctgtgacgattagtgggaagagaagaacaacgcgtaatggcatatcgttcaagaatccttcagcacctattggactagctgataagcttaaagttaaagatgtgtataagcttgatttccctaagagacctttaactggaccagctaaagtggcgacttccattatcaatggtacttatcgtggattcatggaagtcgttcttcagaacaatgacactaagatgcaaagctatcacatgagtggctacgcttctttgtcgtcggtatggattatggagagtgggacagagaacagtaggagggaacattacaacaaatggggatggtatcgcgcgttccactattcaggtgta

SEQ ID NO: 126254 - DNA, 676 bp, Arabidopsis thaliana
atcctaaagaggatgaagcacctccaaaagaaagattcaatacagcccgcattgggaaatgcatcggtgattatatgctgtattggtgctagcgagaaagagatctccgatattaccggtccttacaggatcgattacctagccaccaaaaaccttgttgatgctgcaacatcagcaaaagttaataacttcattttggtgacatccttggggacaaataaatttggatttcccgctgcgattctcaacctattctggggagttctttgctggaagagaaaagctgaagaagcattgattgaaagcggtcttaattacgcaatagttagacctggaggaatggagagaccgactgatgcatacaaagaaactcatgatctcactcttgctctagacgatacattgtttggtggtcaggtctcaaatctccaggttgcagagttgcttgcttgcatggcaaagaatcctcaactttctttctctaagaattgtggaagtggggtgctgaaccacctgcacctttaactccaattgaaaagcttcttgaaaagattccttccaaacggccttatgtccctccaccgaaggcatcagttgcaaccaaagaggtcaaaccagtccctactaagcctgtcactcaagaaccaacagctcctaaagaggatgaagcgcctcc

SEQ ID NO: 126255 - DNA, 444 bp, Arabidopsis thaliana
  unsure (1)..(444): unsure at all n locations
aggtaccggnccggaatacccgggtttacccacgcgggcgtggacttcagatcaagttaaagaatggcggcaacatcactattgtacaatcagctcaaggctgctgaaccattcttcttgttggctggtccaaatgtgattgaatccgaggaacatattcttcgaatggcaaagcacattaaagacatttccacaaaagttgggctgcccctggttttcaagtcaagttttgataaagctaacagaacttcttcaaagtcatttcgtggtcctggcatggccgagggtctgaagattcttgagaaggtgaaggtagcatatgatctaccaatagtaactgatgttcatgaatcaagccaggtataaatgaacgtaatcacataaaagattgagatttagcaagtctttagtaccttctaatgtgtgattttattttccttagtg

SEQ ID NO: 126256 - DNA, 656 bp, Arabidopsis thaliana
  unsure (1)..(656): unsure at all n locations
accacgcgtccgcccacgcgtccgcccacgcgtccgccctgatcagagctttaaagaaaaagatggaattcaccgcagagcagctaagccaatacaacggcaccgacgaatcaaagccgatctacgtcgcaatcaaaggccgtgtgttcgatgtcaccaccggaaaatccttctacggctccggaggcgattactcgatgttcgccggaaaagacgcgagcagagctttgggtaagatgagtaagaacgaagaagatgtgtctccttctcttgaaggtctcactgagaaagagatcaatactcttaatgattgggagaccaaatttgaagctaagtatcctgtcgttggccgtgttgtctcttaggtctctcttctgagattgcactatgttatgtaactattgtgtgtgaggatctttgtgttgtgtgttttctgatttcgtgtttggatctgatcgttttgatacaattaccataagtaccaaattatctatgaaataaatcggggatttcgtgttctcagtggtcttcatattctgatcttaaggttactttgttgtgcttaccaaaaaaaaaaaaaaagnnnnnnnnnnnnnnnnnnnnnnnnnnnnnnnnnnnnnnnnnnnnnnnnnnnnnnnnnnnnnnnnnnnnnnnnn

SEQ ID NO: 126257 - DNA, 451 bp, Arabidopsis thaliana
gtcccggagctagaaactgaaatcgtatttcaccaagagcatgacgacgggaagaattgcatcgtcttcttcgacggagaacaaggttctgagtcagctggtgccatacctgatgctcatgaggagtctcaaactgctgacttgaatggggagcaaacgcagttagaacctgaaaacggttcaacttctgaggataacgaaagatctcgtgaaattgaagaagtactagatggtgatgtctctaaagacttggatgctgttgatccactcgctggtgaggtgatagaggaggaggtggacttcgaagatgttgaatatcacgatgtggagaatatgatggataagcaagagacacatgatttgtactgtccaaactgcgattcttgcatcaccaaaaaggttatcctcaaaagaaggaaacggaagatccgccgtcatgagctgggagatt

SEQ ID NO: 126258 - DNA, 458 bp, Arabidopsis thaliana
gaccacgcgtccggatttagtaaatttggaggtcccggagctagaaactgaattcgtttttcaccaagagcttgacgacgggaagatttgcatcgtcttcttcgacggagaacaaggattttggaaatgtcgccactgcgattggacctacaaagagggatctttgttatgcaaaggttctgagtcagctggtgccatacctgatgctcatgaggagtctcaaactgctgacttgaatggggagcatacgcagttagaacctgaaaacggttcaacttctgaggataacgaaagatctcgtgaaattgaagaagtactagatggtgatgtctctaaagacttggatgctgttgatccactcgctggtgaggtgatagaggaggaggtggacttcgaagatgttgaatatcatgatgtggagaatatgatggataagcaagagacacatgatttgtact

SEQ ID NO: 126259 - DNA, 402 bp, Arabidopsis thaliana
acataaaccaaactgtttaggtttcgtcgtcgacgcgctctcatcaacaaagtcccatacgaaatttaaccaaaactatatatcgagggacgaagcgcgtgacgttagatcggagatctcaccgagatcgccggtgaattagggtttctacttcctttgttcttgttaacgttatatgaaagtttggaagtgatgctcaacctgtagtaaatacggtccagtctgagcttgctacctcaattgctgcttcggctgcagcagctgctgctgcagaattaccttgtactgtcaaactcagaatgtggtcgcatgacatcaaagacccatatgcacaactgaaatccgacagatgtctatttacaataccgcatgccgtcctttgcagtgaaatgggagctcatt

SEQ ID NO: 126260 - DNA, 475 bp, Arabidopsis thaliana
ctttgattctggaatctaggtttaaagtttagacctttgagatcacactatatcaaaaatggagctcaatttctcttcaatggctataacacaccccaaaatcccttctttcggttttacacccaccggaatattcctaaacccatcaaaatcagtgtgtttggcttcacatcatcggcttccgagagtttcatgctctgtttctactactactgattctcccaagctagtgacttcaacaaaggtgacggcaatggatggagtgagctctagagacttggagatgtcgaatttaacggcgttatcgcctttggatggacgttattggagtaaagttaaggacttggcttcttctttgagcgagtttggattgatctatttccgagtttttgtcgagatcaaatggcttcttaagctttcgaatattcctgaagtcactgaagttccaagctttagcaaagaagctcagagtttc

SEQ ID NO: 126261 - DNA, 626 bp, Arabidopsis thaliana
agagaattcgcaaactcgtttctccattcgtcttcgtctttcgccatggctgctctacaatacttggaatctctgaaaaatacgcatccagagctcggcgaatggtacaattcccttgcagatctgtatcagaaaaagctctggcatcaactcacccttaagctcgaacagttcatcgctctcgctgtctttcaggctggtgatgctttgattcagttctatcacaatttcatcactgactttgagacgaagatcaatcttctgaagcttgcgcattttgctgtggtggtctctcgacagtactctgagaaagaagctgcagttagctatcttgaaagcgtgattgagaaacttagagctactaaagagcctaggattactgaaccaatcatttatattgaaacacaaaaagctttattcaagcttgagcaaggtgatcagaacgagggcaaaaaaatcttggacgatggaaagagctctcttgatagtatgactgacattgatccatcagtctatgccaacttctattgggtgtcttctcagtaccataagtgccgtcaagaattttctgatttctacaaaagtgctctgctttatcttgcatacacgtctgtggaggacctttc

SEQ ID NO: 126262 - DNA, 1108 bp, Arabidopsis thaliana
  unsure (1)..(1108): unsure at all n locations
tttgctttcgcggacgcgtgggatcctctttgactaaaatattttaaaccacacaagagaaggaggaggcaatggcggtgttatccaccatctactccatcaccagagcttcaacgcctactatggcgtctctaactaatgactcaccgtctccacttccttcttcttcaccgtcgaagcttccctctcctacttctccgtcaaagaaaccgttaaaactaagacaagtgagcaaacaaatgggaagtcaaaaccagcaacgacgaggcaacaagccttcgatagcacagattgagagagcttttggctctggatcatatcgtgattccgaaggggaaatggatatgaatacggtattcgatgagcttctattaggccatgctaataaattcgaaagtaagatcgagaaggaagcttccgggaggtttggcggaaatctttgtagctcggaacagagcctaagcttcgttcctcgggggaaaccagtttttgatgtttacaattcaatggattcttccaatatggattttgcccctgctcgtggcttgtggagttatcaaactcccttttagcatccctttccttgatgacttgatcatgtgattcttctacacagttaatacacatgtactcttaccatatttcgttaataatacttttagtgtattagtgtaataccatacctcaaacaaactcatcacagataagtctctagggaaagaatgcttgttattggtgagataaacttttcagctcacggtgcactcnatatggaaggaacggaatggtcgtcgacatggagaagtacctattcatatctcccagttaactcgcgaactcgacaagcaaacccgaaacagaatcttttctattcgagagctaggtgatagaagatatgaagattctatggcaatctggtttggttcaaaataatctagacatcttcttaattcttgctcaaacacaagctgcacttgatgtaaaacagttttttttttccgaatgatttttcataaaaaaaaaaaaaaaaaaaaaagnnnnnnnnnnnnnnnnnnnnnnnnnnnnnnnnnnnnnnnnnnnnnnnnnnnnnnnnnnnnnnnnnnnaacg

SEQ ID NO: 126263 - DNA, 634 bp, Arabidopsis thaliana
  unsure (1)..(634): unsure at all n locations
ccgtattnagggaccgggccngaattccctgggcggcccactgnntccgggttatccaccatcgtactccatcaccagagcttcaacagcctactattggcgtctctaactaatgactcaccgtctccacttccttcttcttcaccgtcgaagcttccctctcctacttctccgtcaaagaaaccgttaaaactaagacaagtgagcaaacaaatgggaagtcaaaaccagcaacgacgaggcaacaagccttcgatagcacagattgagagagcttttggctctggttcatatcgtgattccgaagggaaatggatatgaatacggtattcgatgagcttctattaggccatgctaataaattcgaaagtaagatcgagaagaagctacgggagaattggcggaaatctttgtagctncgaacagagcctaagcttcgttcctncgggggaaccagtttttggatgtttaaattcaatggatnctccaatatggataangcnccggccgngcttgtggggtataaaancccctttnggatcccttcctgatgacttggcangggtntcanacagtaancctgaccttccaattcgaaaaaacttttgggnaaaaaaaanggggncgctttntc

SEQ ID NO: 126264 - DNA, 403 bp, Arabidopsis thaliana
ccttcacttgctcacttccttttactccactatccaaatcccttaaacccattcgttccccaattctacgctcagactatggaaccagcagaagctttgttataagatccatgacggttcaagaagatgacaagagaacaagcgatgaatcaatgagtattgacaatttacgaggattcgtcgatcttaatgtcggaaaatggactggctcctttcatcaatttgatggtaatgggaatttgttacataagattgatacacgtctttcagctagttcttatggagaagatgagctccttagtcttaatcaatcgttatatataaagcagcctacatcagctactttagtttccgaagaggaggaagaggaaccggaatgggtagagtacaaaattaaagaaac

SEQ ID NO: 126265 - DNA, 411 bp, Arabidopsis thaliana
  unsure (1)..(411): unsure at all n locations
nnnnnnnnnnnnnnnnnnnnnnnnnnnnnnnnnnnnnnnnnnnnnnnnnnnnnnnnnnnnnncttcactgtgagagggggggcttctcaacaatgttcttctctcatagggagaacacggtgagttcactggggagggttgtgctgatcatttggttattcgtggttctgatcatcaactcgagctacacggccagtctcacttcgatcctaaccattccacagctgacatctcgggggtgaaggaatagatagcttggtaacgagcaatgaaccaattggagttcaagaccgtacctttgctcggaactatctaatcaacgagcttaacatactaccttcaaggattgttcctctgaaagacgaagaacagtacctttctgctctgcaacgcggtcccaacgctggcggt

SEQ ID NO: 126266 - DNA, 408 bp, Arabidopsis thaliana
gtctatcagaggttagtgactaagaggatgggaacacatgtggcaccatggaagcagcttctctttggcgccattgaagccaattctcatctaagccactcttcttatgttcagctcgcaacgattggtttaaatggacggccttcgaatcgtaccgtcgtattcaggggatttgaagagaacagtgacaggattcaaatcaacaccgatcttcgcagtcgtaagattgaagagcttaagcattgtcctttttctgagatgtgttggtatttctcggatacttgggagcacttccggatcaatggaagaattgaggtcattgatgcgtccaatcctgaccagaccaagcttcaggttttatgtacattattacaatttaatattagtattttggaaacgaagaaacac

SEQ ID NO: 126267 - DNA, 562 bp, Arabidopsis thaliana
  unsure (1)..(562): unsure at all n locations
aaaggtcaaagctatggaactaatcgatgagctagagccaacgaggcgtggaccatacagtggcggttttggtggagtctccttcactggtgacatggacattgctttatcccttaggaccaatcgtttttccgacagcatgtcaatacaattcaatgtactcttccaaggatgctaacaaacggcgtgagtgggtggcttatcttcaagctggagctggtgtagtagctgatagtgacccgcaagacgaacactgtgagtgccagaacaaagccgctggtcttgctcgagccatcgacttggctgaatctgcatttgtgaaaaaatgattgtgcccaagaacagaggctggctttctttgaactccgagttcatgtgtataaaacagttacaagcagaacaaagttttttctttttcttgattttgtgagaattgcaattagactccattaatgaagctctgaaaaatgttacaatagaaaccatggtcaataatattcagctattctcccaaaaaaaaaannnnnnnnnnnnnnnnnnnnnnnnnnnnnnnnnnnnncac

SEQ ID NO: 126268 - DNA, 557 bp, Arabidopsis thaliana
  unsure (1)..(557): unsure at all n locations
ttctaacaagaagaagaatttaaacacaattatatatttaacgcgccaaaatcgcgtgtgaagtctctctattagtcaacgctatatcttgaaagggtctcgagactctccagccattttattctgccttcctctctatatttagaagaacaaaaattgaaaaaaaaatccttagagagaggaaaaaaatttagaggaaaatcttctaatttggttttaattcttcgtgattatccgctaatccagagtgattaagaaattaaaaccccttgaggaacagagaagacctttgggtgaaattaaaagcgcgacgacgaggacaatgccgagcaagcttaaaaaagcgattggtgcggttaaagatcagacaagcatttagcctcgccaaagttgctaacggagccaccggatgcggcgatctcacgnctctcggagttgcgtcttgnaagnttcgngccccggcgnggnagncccatcggngtcgctcggtacngatccccgggtncttnccccagnatntcagcgcnttggcgcnggtggnccggttgggtncggac

SEQ ID NO: 126269 - DNA, 597 bp, Arabidopsis thaliana
  unsure (1)..(597): unsure at all n locations
agctacaatacgactcactttagggaaagctcgtacgcctgcaggtaccggtccggaattcccgggtcgacccacaagctccgcccacgcgtacgaaattgacaagtgcaaaaatggcgacggattgcaatagagtcaacgatttcttgttttctcagcagcaagagtctacttctggtgcaaataaatacggaggacttgtgccaaagaaaaagcctctcatctctaaggattccaaacgtgctttctttgattcagcagattgggctttactcaagcaagaagcaagtatagatcagagaacaatagcggcaatagaaaaactaagacccaaattgcagagaacgcctcgcaagcaactttctcctaggagacccacatgtgcgacgggaaatgagaatctgacagagtcgagcttttagggtacaataaaaagggtttgcaccgggaaagggaacgtgacttggtttggtaccctacccacgtgtttcatgtttccatttaaaaacttgtactgcagttattgacagttgttcggttattttcactattgggtcctaaaatgcttgncgtttcaataagttgcgcagacaaaaa

SEQ ID NO: 126270 - DNA, 1030 bp, Arabidopsis thaliana
cggacgcgtgggctttcatcttctccaccagaatttgttttaggctctccttcttctgtttctttttctcccaaagaaacaattagatatggagaaccttaccctagtttcttgctcagcttcttctccaaagctgttaattggatgcaatttcacttcctcgctgaaaaaccctactgggttttctcgtcggactcctaatattgtcctccggtgttccaaaatatctgcctctgctcaatctcaatctccctcttcgcgtccggagaacactggagaaatcgtggttgtgaaacagagaagcaaagcttttgcaagtatattttcttcgagtcgtgatcaacagacaacttctgttgcttcccctagtgtgcctgtgccaccaccatctttcatcaaccataggatcaaccacttttctgggattgggtgttgggtgttgggctatcaagctttggtcctcataatgtaacttcaaatttaaaggaatatgcaatgcaaacagctttgaggccggtggtggaccaaatgattacgcaaaatagccagtttaataattctggattcccatcaggatcaccttttccgtttccatttcctcctcaaacaagtcctgcttcctcgccattccaatctcaatcccagtcttcaggtgctaccgttgatgtgacagcgacaaaagtagagacacctccttcaactaaaccgaaacctacacctgcaaaggatatagaggtggataagccaagtgttgtcttagaggcaagcaaagagaagaaagaagaaaagaactatgcctttgaagacatttcacccgaggaaaccacaaaagaaagcccatttagcaactatgcagaagtctctgaaactaattcccccaaagaaactcgcttgtttgagaatgtaagtttcgttttcttttgtatttccacagcacaccaagtggtgatttaaaaacgtgacatagttttgctaaccttctatgctctcttattgatctctgggtgaaggtcttgcaaaatggagctgg

SEQ ID NO: 126271 - DNA, 490 bp, Arabidopsis thaliana
gcctgcaggtaccggtccggaattcccgggtttacccacgcgtgcgatctcgcctctgctcaatctcaatctccctcttcgcgtccggagaacactggagaaatcgtggttgtgaaacagagaagcaaagcttttgcaagtatattttcttcgagtcgtgatcaacagacaacttctgttgcttcccctagtgtgcttgtgccccaccatcttcatcaaccataggatcaccacttttctggattggtgttggtgttggtctatcagctttgttctcatatgtaacttcaaatttaaagaaatatgcaatgcaaccagctttgaagaccatgttgtaaccaattgattccccaaaatagccggggtattaattctggattcccgatcaggatcaccttttccgtttccatttcctcctcatacaagtcctgcttcctcgccattccaatctcaatcccagtcttcaggtgctaccgttgatgtgacagcg

SEQ ID NO: 126272 - DNA, 428 bp, Arabidopsis thaliana
aaattggattgccttgaaatccgtggagggattgaccagaacaaaagaactccaacatttttgcaattcataaaggcggaaaccggtattttgttgtgtactaatgtcgctgcccgaggtcttgattttcctcacgtggactggattgtgcagtatgatcctcctgataacccaacggattatattcatcgagttggtagaacagctcgtggtgaaggagcaaaaggaaaggctctgcttgtcctaactccacaggagttgaagtttatacagtatctcaaggcggcgaaaattcctgttgaggaacatgaatttgaagaaaagaaattgctcgatgtgaaaccttttgtggagaatttgatatctgaaaactatgcattgaaggagtcagcaaaagaagcatacaggacatacatttcaggatatga

SEQ ID NO: 126273 - DNA, 420 bp, Arabidopsis thaliana
gagagaaaaaacactaaacaaatagaaaataaaaaaacaactcataaaattttccattttctcacgattttcctcgtcttaaaaaaaatttctgagaaagaaaaaaaaattcaattttgtcgttttatttattttcctggtttcagaccaaaccagttagaaacaaactcgtttttttttcacaaatttggattttattgttccactgtgaatgaaaggaaaccaaaaagactcatcggagaaacccatatgggatcggagctcatcgggtatatccatgacccgacccggccgattaataatctggctcatcctcttcatctccgtcacttacatcatctacactctcaagatcgtctccactacacacccttgcgaagatctaacctccgagtcaattctccaacaaagaccggagaa

SEQ ID NO: 126274 - DNA, 654 bp, Arabidopsis thaliana
cggtcgcgtgggcggacgcgtggggcaaaaatgacagaactcaaatggatatgtatttcattctcactaacactcttgctaagcttagcagttgaaggagcctttaacataaaccagaaatggtctggtggaagtcattttggttacgagggcgggttctgttttcccggtctctgcattggaggatctggtggtagtagagtccattatggcagggaccattacggtggtggaagtcaatatagaggtggtattggttacagagagaccatgtactgcaaaccgttgacttgttatggtggctcatgtgatgcactccatttgcatttagacaaagggttatatgaatctctcatacgcaatactaagacagcgaaacaatcgtcgactgttgatttcaacatgccagagactttgaaacacaatgtcatcaacaataactatgagtttaagatggcgaaagaagctgcaatggcaccacagtctaactagctagctaatgaagttgagtctttattgtatagtatgtatcaataaacgtaacggcctacgaatctcatcagactgagatggtatcacaagattatagttataaacttaattataatgtagaaaaggaaatcaaagcagtaatatatatgcttgttcaatagc

SEQ ID NO: 126275 - DNA, 1250 bp, Arabidopsis thaliana
gtacttgttaaacttgaatcccgtgttcgcgactttgcgatagattctctcaaatccaattccaatggcggatccatcttctcaaaaccctaacctcgccactccccctcctccttcttctccttcaccaacccatcaaattcaatctggaacctcggaattatcgccaccgtctcgaccgccttgctctaccttgtcctttctcaagactgctaaccgaccaaaactccgtgtgacatctgaattcgacagcgatagtctccttttcttaaacaaagtgtcttgtaagctcttcgataaccttgccaagcttaaactctcgtttcagaacaattcccagcgcgagatttcacagcctcaggtctcttttacttccaaacaccgtccggttctctatgatgtcgaagagaagaatactttcattaagagcactctcgatgttcacccgcgtcttcagctccgagctcttcataatgttaaggcacaacaaggagaagttgctatggaggcaaatctgactgaacctggctactctctggagctttcatcacctgtgcctattggttacccaagagcaactcttaaattcccacttggcgaaatttcgttacaagaaaaagatgaggaggaggaggagaagcagaaaagaactttatctgttaatgggtccctcaaacgtcaagttatgaatggtgtttgtacccgcttctatacacaggttgaaggagttgaggcctgagatattgcttataaggatgatgcattgtctttcatcccaagtatttcccttccttccaatgctgcatcatttgcattcaaacggcggtttagcccttcagataagttgagctattggtacaactttgattcaaacatgtggagtgctgtgtacaaacgcacatatggtaaagactacaaattaaaagctggctatgattctgatgttcgccttggctgggcatctctctgggttggtgatgaagctggaaaagtgaaaacgacaccaatgaagatgaaagtccagttcatgcttcaagttccacaagatgacatcaaatcatcagtcttgatgttccgagtcaagaaaagatgggacatttgatgaaatctttgaataaatcatctcttagtttcactttctttaatctctctataaaacccataaaagttgtttgtttctccaaccatacccaatcttttgcaaagtagatacaaaaacatgaggtgaataattgcaattgtaattctgt

SEQ ID NO: 126276 - DNA, 504 bp, Arabidopsis thaliana
  unsure (1)..(504): unsure at all n locations
cacacgcgtccgcaacaaacaacacgttctctctcattttctttcttctccgatcaatctagggtttactctcaccggcgacgaacaatgatccacctcctttacacagtgatcttcgccgaaatggcactgatccttctcctcctcttcaaaactcctctccgaaagctaatcatcctcaccttcgatcgaatcaaacgtggccgtggtcccgtcgtcgtgaaaaccatcggaaccactgtattcgtcgttctcttgtcgagtatctacagtttggttaatatccaacgccgatctgaagatggtgctgttcttaatccctacccgatcaagtccttgcggctaaggaatcttctcgaaggttctcttatgggggtttgtgnttgtttccnctcgnttatggattgaaaaggctacanccattncattaggngnggtttcggttttttgngggaggcaaangggggcttcaaaagnagggngncaaagnggntttttnggggt

SEQ ID NO: 126277 - DNA, 554 bp, Arabidopsis thaliana
tatagatatgaatggttttaaagtggaaatggagaatcaaagacgtcaatctcaagctgctcacaatgttgtaaatctgacagttgaagacgatgctgacatgacgaaaaatattgcagacgactgaggtccttggatatgacagtctctctgctcgtcctgttgtgaaaagtcttttggtgaatgggaagcctgtgataagggtttctgaaggcagtgaagtagaggttctgctggacagaactccgttctatgctgaatcaggaggtcaaattgcagatcatggttttctttatgttagcagtgatgggaaccaagagaaagctgttgttgaggtaagtgatgtgcagaagtctcttaaaatttttgttcacaagggcactgtaaaaagtggagctctagaagttggcaaggaggtggaagcagcagtagatgcagacttgaggcaacgagcgaaggttcaccataccgccactcatttgctccaatcggcacttaaaaaagtagtaggacaagaaacatcacaggctggttcattagtagcttttgaccgc

SEQ ID NO: 126278 - DNA, 518 bp, Arabidopsis thaliana
ctgaagtaaataagcaattgaacgatgagaaacaatctatgatcaaggagctcaattcttacgttgctctaagaaaaacgtatatgagtacccttggcaacaagaaagttgagctttttgatatgggagctggagttagtggcgaacctacagctgaggaaaatgttcaagtggcttcatctatgtcaaaccaggagcttgttgatgctggaatgaaaagaatggatgagactgatcaggccattgagcgctcaaaacaggttgtagaacaaacactcgaagttggaactcaaactgcagctaatttaaagggacagacggatcaaatgggacgcgtagttaaccacttggacactattcaattctcaatcaagaaggcctcccagctggtgaaagagatagggagacaggtggctaccgataaatgcataatggggttcctgtttctcattgtatgcggtgtagtagccataatcatagtgaagatcgtgaatccgaataacaaagacattagggac

SEQ ID NO: 126279 - DNA, 784 bp, Arabidopsis thaliana
  unsure (1)..(784): unsure at all n locations
gatactccagctctctacgactcactataagggaagcttgttcgcctgccaggacccgtcccgaatttccgggtccacccaagccttccgggcctttattggttggacccaacttggattggttggtccaccgccccaggtgataaacccggccattggaccaggcctggacagctttattggccttctcagggagctggtttggcttttattccgccatttggccaggctttgttgggttccttggggacagctgctggtgtaaacccagggaatggagttggaatgccaactggttacggtactcaagctatggcaccggggacaatgcctgggtacggtacacaacctgggttgcaaggcggttatcagactccgcaacctggtcaaggcggtacaagtagagggcaacatggtgtcgggccatacggtactccttacatgggtcactaaatgtatcatgtatccatccactcagatatcagaaatcagtgttttaattttggcctggtgattcttctcaagtttataaggagctgatgctaaatgaagtctttatgaaatgttactctttggtcactcctaaggccaaactcataaaaaaccttttaaggagttttagttttcatctacttgtttttcccaaactctctttatgaaattcctaaaaaaaactttgtactactaaaaaaaaaaaaaaaaaaagnnnnnnnnnnnnnnnnnnnnnnnnnnnnnnnnnnnnnnnnnnnnnnnnnnnnnnnnnnnnnnnnnnnnnnnnnngcat

SEQ ID NO: 126280 - DNA, 449 bp, Arabidopsis thaliana
gggtgcttggtgcacaggctaagtttgatgagaagaatgggacctcgcttgtgaatggggctcatgacacttccaaacttgcaggattattggagaactttattaagaagtatgttcagtgttatggatgtgggaatcctgaaactgagatacttatcactaagacgcagatgcttcagctgaaatgtgcggcttgtgggtttctctcggatgttgatatgagggacaagctaacgtcgtttattttgaagaatcctccagagcagaagaagtcgtctaaggacaagaagtcgatgaggagagctgagaaggaaagactcagagaaggtgaagcagctgatgaagagatgaggaagctcaagaaggaggctgctagtaagaagaaagcagcgaccacgggtacttcgaaagacaaagtgtcgaaaaagaaagatcattctccacctcga

SEQ ID NO: 126281 - DNA, 525 bp, Arabidopsis thaliana
  unsure (1)..(525): unsure at all n locations
nnnnnnnnnnnnnnnnnnnnnnnnnnnnnnnnnnnnnnnnnnnnnnnnnnnnnnnnnnnnnnnccacgcgtccgcggacgcgtccgcccacgcgtccgcccacgcgtccgctttgagtgaagatgatgaatgttgcagtgacagccactccctcgtctctcttgtactctcctctgcttcttccttctcaagggccaaaccggcgaatgcaatggaaaagaaacggaaagagacggttagggacaaaggtggctgtttccggtgttatcacagctggatttgagctgaagccacctccatatcctcttgatgctctggaaccgcatatgagccgggaaaccttggattatcactggggcaaacatcacaaaacttatgtagagaacctgaacaagcaaatcttaggcacggatctagatgcattatccttggaagaagttgtgcttctttcatacaacaaaggcaatatgcttcctggtttcaacaacgctgcacaggcttggaaccacgagttcttctgggagt

SEQ ID NO: 126282 - DNA, 525 bp, Arabidopsis thaliana
  unsure (1)..(525): unsure at all n locations
nnnnnnnnnnnnnnnnnnnnnnnnnnnnnnnnnnnnnnnnnnnnnnnnnnnnnnnnnnnnnnnnccacgcgtccggtttggaggttcttgcaaagttcaaatgggtcggatgtattggctacaaagcaggccttgcttttcattgttttggtccagtatataccgcgattcctacgtgtcttacccttgacgtcagaattgaaaaggacagcaggtgtctctgctgaaacggctggggctggtgccgcttattatctgcttttatatatgcttgcaagtcatatagttggagctttttggtaccttttagccttagaacgtaacgacgcctgctggcaggaggcctgtatagatgcagggaattgcagcacagatttcttgtactgtggcaatcaaaacatggacggctatgctgtttggaacagagccaaggaatctgttcttaagtccaagtgccgagctgacctcgatgataataatcctccatttgactttgggatttatacacaggctttatcgtctgga

SEQ ID NO: 126283 - DNA, 391 bp, Arabidopsis thaliana
gtagaggagggttgtgggaagcagcaaggaatctgtttgatgagatgacgaatagaatgattgagcaagatgttttttcttataatacgcttttggatgcaatttgcaaaagtgggcagatggaccttgctttcgaaatccttgctcagatgccagttaagagaatcatgcctaatgttgtaagttatagcaccgttattgatgggtttgcaaaagccggaagatttgatgaagctcttaacttgtttggtgaaatgagatatcttggtattgcattagatagagtttcttacaatacattgctttcaatctacactaaagttggtagatctgaagaagctttggatattctgtgagaaatggcatctgttgggattaaaaaggatgtggt

SEQ ID NO: 126284 - DNA, 644 bp, Arabidopsis thaliana
  unsure (1)..(644): unsure at all n locations
tcnaaatnnccgccacggtcccaacccttctgcgccacctggcgtttacgatcctggagctccttattacgctcagggatatcaaactgttccagtccatggtggtgttgctgaaggaagacctgtcagacaacgtcgccttccttgctgtggaattggtcttggatggttcctgttcattgttggatttttccttggagcaatcccttggtatgtcggattgttcatcatgatgtttggaaggagaatcgattacagggagaaaccaggatacattgcctgcactatcgctgctattctagcaacaatcgctgtgattctgggtgtatctaaaggagcagacgactggtgatggatcaatcatcttgtggggttactctaaaaatgtttgtataggtttctttatcgtgtgttgtattatctacttccttttttacttactctatgaagaaacaagaaaaaaaaaagtgtaaacttcacaagaattatttgagttttgttatctaaataagaagaagtcaaagatatgaaatttaagcccaaaaaaaaaaaaaaaaaaaaaaaaaaaaagcggccgctctagaggatccaagcttacgtacgcgtgcatggtacgtcaagctacttnctatagtgagacctaa

SEQ ID NO: 126285 - DNA, 563 bp, Arabidopsis thaliana
  unsure (1)..(563): unsure at all n locations
ggaatcagaaagagcgatcagatcacggagaaagagatgggtcacggagaagaagataaaagcaaaggatttgcttcggaagaaggtaaccagcatcatcaatacggtacctttcaaggtgtttccaattaccctccgccgcagaattctgctccggtcactgggtttcctcaaccttctgcgccacctggcgtttacgattctggagctccttattacgctcatggatatcaaactgttccagtccatggtggtgttgctgaaggaagacctgtcagacaacgtcgccttccttgctgtggaattggtcttggatggttcctgttcattgttggatttttccttggagcaatcccttggtatgtcggattgttcatcatgatgtttggaaggagaatcgattacagggggaaaccagggtacattgcctccactttcgggggtattttagaaacaatcgttgtgatctgggggtnttaaaagggcancggcttgtgatgggcaaanaanttttgggggancctaaaannntttannggtttttaccggggtgnntanccngc

SEQ ID NO: 126286 - DNA, 549 bp, Arabidopsis thaliana
actcactttaggggaagcacgtacgcctgcaggtaccggtccggaattcccgggtcgacccacgcgtccgtacggctgcgagaagagacagaagggtacggctgcgagaagacgacagaagggtacggctgcgagaagacgacagaagggtacggctgcgagaagacgacagaagggtacggctgcgagaagacgacagaaggggcacatccatctcttataacggggaacacaaatcaagataaaatggcggaaaagcaagcagcgacggcaatgggaacatcggcggtggagaaagcagccagagacgacgacagaggctgaagcaccaagtttgacgacgaagaggttggttggttgcgattgttgagagcgtttcttgggagcgttaccttggctgcggacgcctgttgtttagtgtgcttttctccctatgtgcgcttcttctttgtgggcaccagcgttcgtctcctgtgttcagtttcgccgttctgttttcacgtccgttgcgtttgctggcatttcgtatccttaactgtccccccgttt

SEQ ID NO: 126287 - DNA, 1029 bp, Arabidopsis thaliana
accggtccggtacttcccgggtggccccacgcgtccgccaacgcgtccgcggacgcgtggggaagacgacagaagggggatcacatccatcacttataactaaaaacacaaatcaagataaaatggcggaagagcaagcagcgacggcaatggaaacatcggcggtggagaagcagccagagacgacgacagaggctgaagcaccaagtttgacgacgaagaggatggtggttgcgattgatgagagcgactcgagcttctacgctctccaatgggtcattgaccatttctctaatcttttattgaccacagcggcagctgaggcggaaagtggaatgctcacggtgattcatgtgcagtcccctttcaatcactttgctgcctttccggctggaccgggcggcgccacagcagtgtacgcatcttcatcaatgatagagtcagtgaaaaaggcacaacaagagacctctgctgcccttctctctcgcgctctccaaatgtgccgagccaagcagatacgtactgaaactctagtgctagaaggcgaggcgaaggagatgatttgtgaggcggtggagaaaatgcacgttgatcttctcgttgtgggtagtcgtggccttggcaagatcaaaagagcgtttcttgggagcgttagcgattactgcgctcatcacgccaactgccccatccttattgtcaagccacctaaggagatgactaagtaatatggagctgtttacatgtttgggttattagtacgaattttataatgagtgtgccataatttacctaaaaaagaaaaaaaagaaaaaaagagtgttgtatgtacgtgtgtttgacttggataattagtgacattttaagcaaatgtgtatttggaaaagtgatgtcaatgaaatatgaatatgggtcgaataaagaagcgaagatctgtagactgttgcttctctgcatctgttgttgtattcccgatcatattgttgtatgtttataatttattaaaagcaaattgtcttcctaaaaaacaaa

SEQ ID NO: 126288 - DNA, 567 bp, Arabidopsis thaliana
  unsure (1)..(567): unsure at all n locations
cttataactaaaaacacaaatcaagataaaatggcggaagagcaagcagcgacggcaatggaaacatcggcggtggagaagcagccagagacgacgacagaggctgaagcaccaagtttgacgacgaagaggatggtggttgcgattgatgagagcgactcgagcttctacgctctccaatgggtcattgaccatttctctaatcttttattgaccacagcggcagctaagggccggaaagtggaatgctcacggtgattcatgtgcagtcccctttcaatcactttcctgcctttccggctggacccgggcggcgcacaagcagtgtacgcatcttcatcaattgatagagtcagtttaaaaaaggcacacccatgtgacctctgcttgccctttttttttcgggggtttccaattattccgcgccgccaaagctacgtactgaaactctngtnntaaaggcgaggcgaaggaaattatttttnaggcggtgggaaatcncgtgatttctcgttttggaagnnnggcttgaantnaaaanngtttttttggggtaagttnactttg

SEQ ID NO: 126289 - DNA, 437 bp, Arabidopsis thaliana
  unsure (1)..(437): unsure at all n locations
tacggctgcgagaagacgacagaagggtacggctgcgagaagacgacagaagggtacggctgcgagaagacgacagaagggtacggctgcgagaagacgacagaaggggcacatccatcacttataactaaaaacacaaatcaagataaaatggcggaaaagcaagcagcgacggcaatgggaacatcggcggtggagaagcagccagagacgacgacagaggctgaagcaccaagtttgacgacgaagaggatggtggttgcgattgataagagcgtttcttgggagcgttagcgattactgcgctcatcacgccaactgccccatccttattgtcaagccacctaaggagatgactaagtaatatggagctgtttacatgtttgggttattagtacgaattttataatgagtgtaccataatttacctaanaagg

SEQ ID NO: 126290 - DNA, 483 bp, Arabidopsis thaliana
  unsure (1)..(483): unsure at all n locations
aaaataaaaaaaaagaggaagcaattactataggggaaaaaaaaatctgaacaaaatgatgaaactcctcttggtggtggcaacttctgttgcccttatctttagcgtcactgatttatccggtgagggaccaaaacatggaggagaatccatgttgacagtccaaatccctgatttccgtctgattcctaccaccggagctttgggaccggagagttttgtctttgattttttcggcgatggtccttacaccggtttatctgacggtcgaattgttaagtggctagctaatgagagccgttggatcgatttcgccgtcaccacctccgcaagagaaggttgtgagggcccgcacgagcaccaacggacagaacacgtgtgtggacgaccattgggcctttcctttgacaaatccactggtgaccttnatatagccgntgtnannatgggcntnttaaanttggccannagntggtntncnnt

SEQ ID NO: 126291 - DNA, 463 bp, Arabidopsis thaliana
  unsure (1)..(463): unsure at all n locations
nnnnnnnnnnnnnnnnnnnnnnnnnnnnnnnnnnnnnnnnnnnnnnnnnnnnnnnnnnnnnnnnnnnnnnnnnnnnnnccacgcgtccggtcgccgagagttcctttcttgtccgacaaactacttcttctccttcgataagccaattctgcgccatagatttttgaaatctactgccggaaaggctgcatgcgatttcaactcccttttcccgggacaattcgcagcttgtgaagaagatcaagaggtgaactctgagtgatgagtgagccaaaggtcaggcgttgggttggcaaatatgaggttggaagattgatcggtgaatgtaattttgggaaactgcggagtgctgttgacacagagacaggagaccctgtggctttgatgatccttgataaagacaaggttctgaagcataagatggctgaacaataaagagagaatttctattatgaagctgatc

SEQ ID NO: 126292 - DNA, 519 bp, Arabidopsis thaliana
  unsure (1)..(519): unsure at all n locations
nnnnnnnnnnnnnnnnnnnnnnnnnnnnnnnnnnnnnnnnnnnnnnnnnnnnnnnnnnnnnnnnnnnnnccacgcgtccggtttagggtttcttggtcgacgtgatgagtcatcggcgagattacggcagtgatgcagttcacgtgagaatcacccacgaccctccgcctgagaattgttttccaaattccggcgacagttccgtctgggccactgaggatgattacagccgtgtctgggccataaactctgatggcgcagagtctccgagcaagaagacacgatcttcctcctcctccgagatcgggaaatcgttcttcaagacgaagctttgcttcaaattccgcgccggaacttgtccctactccgcgagctcttgccactttgctcacagcgcggaggagctccgtcttcctccgccgccgccgcccaattggcaggagacggtgacagaggcttcaagaaacagagaaagctttgcggttagtttaggccctcgtggcaatgttgctcagactc

SEQ ID NO: 126293 - DNA, 481 bp, Arabidopsis thaliana
ctttctcgtgggcggacgcgtgggaaaaagtttggatcttttgttcatctattttttctttgagtttttttttctgtgttcatcctctgttctattttttttttcttctcattcttgggttgatttttgacttctgtttgggtcgatttagtctgcagggtttaagcagaggttggtttgtggattcttcgatttcttcttcagatttagtctacaatgaagtgagaatttctaaagataaacaaagaaaaacttgagactttagcaagatggagactgtgagaccaatggttgttgctcctaagggtaacaaactcagacgcaagtttgctaaagttcttaacattcataagctaacgggtgttgctccagaaggagaaatgaagaagataaagttcgattccaaaaccgctaagttgtctgagtcgttctacaagtttgaggaaaagaagcttccaattcaccacattcctggcccgga

SEQ ID NO: 126294 - DNA, 466 bp, Arabidopsis thaliana
cgttttaattttaaaccttaactctcttttctctctactctttctttggacgaatctgtctattgtttgtaagttttcaaggaaggtaaagaaacagagagatctaacttcgtctgcagggtttaagcagaggttggtttgtggattcttcgatttcttcttcagatttagtctacaatgaagtgagaatttctaaagataaacaaagaaaaacttgagactttagcaagatggagactgtgagaccaatggttgttgctcctaagggtaacaaactcagacgcaagtttgctaaagttcttaacattcataagctaacgggtgttgctccagaaggagaaatgaagaagataaagttcgattccaaaaccgctaagttgtctgagtcgttctacaagcttgaggaagagtatgagagaagtcagggattggaagctcttcttgcgaagctttttgctacggtttc

SEQ ID NO: 126295 - DNA, 436 bp, Arabidopsis thaliana
cggccgcgtgggcggacgcgtgggctgactcactactctcactctccggcgctttaaacttacgttctccgtcgtttactctgttgtaaaaatgagttctagggctggtccaatgtctaaggaaaagaacgttcagggtggttataggcctgaggttgaacagttggttcaaggtttggcagggacgagactggcttcttcacaagatgatggaggagagtgggaggtcatttccaagaagaacaagaacaaaccaggaaacacttctggaaaaacttgggtttctcagaattcgaatcctcctagagcttggggtggtcagcagcaagggagaggtagcaacgtatctgggagaggaaacaatgtatccgggagaggtaacggcaatggtcggggcattcaagctaacatatctggtcggggacgagcgttgagc

SEQ ID NO: 126296 - DNA, 844 bp, Arabidopsis thaliana
  unsure (1)..(844): unsure at all n locations
aggtctctacgactcactattgggaaagctggtccgcctgcaggtaccggtccggaattcccgggtcgtcccacgcgtccgaaaaaaaaaagcaaatcttcaaagaaaaaaactccgtgtataaacttttctcgatcatttttgcagtctctctcccaaccaatcccattctgctcgactctcattgttgcagaggtttaggaagaaaggaatggttcgatcgtgactttgaattgggatattgtgtgtaaaatgtgggtgcctacattgagctcaagctcatgttcaagtgatgagagggatgagagcagtggagaagccgcgcttacgccggtttatctcaatgtctatgatctaacgcctgtcaacaattacctttattggtttgggattggcattttccattctggtattgaggctcataatttggaatattgctatggagctcacgagtatccaacaagtggggtatatgaggtggaacctaggaactgtccagggttcatctttagacggtcggttttactgggaactaccagcatgtcccgttcagatttccgctcatacatggagaagctttcaagaaagtacccttggtgacacttaccatctgattgccaagaactgtaaccatttcactgaagaaggatgcttgcagctaacaggaaagcctattccagggtggattaatcggctggcccgagttccttctgtaattggctttctgccagaaagnattcagntttacaagctgttagggntttttcccgganngctttgaatttttccngtgggggtngnttcaaacncangggggntnttttttnttcaaattaangnnggc

SEQ ID NO: 126297 - DNA, 331 bp, Arabidopsis thaliana
cggccgcgtgggcggacacgtgggttgaaaactccatctacctttttctccctcctcttctctctcccattcccaaattcgaacgaacctgcaatccctaaacccccaatttagaccatctccaaattcgtcgtccttttctctgtgtagtcgaattatatattacaagtagatgaattggttacctgaagctgaagctgaggagcacttgaaaggtattctctctggtgatttctttgatggtctcaccaatcaccttgattgcccacttgaagacatcgattccaccaatggtgagggagattgggtcgccaggtttcaagaccttgag

SEQ ID NO: 126298 - DNA, 438 bp, Arabidopsis thaliana
cttctccagaaaaaaacaaaacttttttctttgctctctcaacttgcagaagaagcgatttacacaaggttttgcgattcttctcacttatatataatcttctgtatgcttggaattggtatcaaaatcgattcttttaatctgtcattgaaggaactgggtttatacatttatctctcaagtcatagaatctgcatttgtcccaagttaagaagagaatcttgtactgctccttatctatgttttgctctctttaccaattgtttcaatgttatgaacaaaacccatatctctaaatagcaacaatagtgatttcatttaataatggattttgcctctgttccctatttatatagtaaccatggagcggctgatttctcatcctcctctcatgatcgtctcagaccttgatcacaccatggttgatcatcaagatca

SEQ ID NO: 126299 - DNA, 543 bp, Arabidopsis thaliana
  unsure (1)..(543): unsure at all n locations
agctgccacgcctgcaggtaccggnccggaattcccgggtcgacccacgcgtccgctttattgcagagcaggttacctggataaagccagagatatattccatacaataccttacgagccatcaagtgctatgtgtgctactctactgaaagcgtgcctcatccacgggaacacaaacattggggagtgggctgcagataagttactactagaaacaaagccagaacacttaggtcactatatgttgcttgcagatatgtatgcagtaactggttcttggagcaagcttgtaacggtgaagactttactgagtgacttgggcgtgcaaaaggctcatgagtttgctttgatggaaacagattcggagttagatggagagaataataagccgatgaacgatgattctgtcatcaatcaggagcaaagttcagatgaagaacgtcttgtagaagtaggataaagaatcaaattctgatagaaatattttatcaaactggagaatcaatttgtacataaatcttatatacaacaagttttaattgc

SEQ ID NO: 126300 - DNA, 596 bp, Arabidopsis thaliana
gtcgacccaggcgtccgctgaaagaaaacaacagaagggggactttgatgcatccgtacgaaaatggagctctgcaccaggtctaccacagtcatcactcatctccctgcgagcttcaacggccatggatatctagcgggaaaatctgttgatagaatctcacttcctctccagcgaaacgttgcgtctctcgttcttcaatcccgcacgttgcgttgtagtagaaagtttccaggagaaacagttactgaagaaacatcaacaggagtcaatgagtttggtgtggaggatcgtgatggagtagttgttgcagccgaagagaaaaactcgaatagtgaagctcctcaagctgaagatgaggaaactcaagccctagagtttttgaacgataattaacctggactcagacaagacatattcaatcctgctctatgggagtggtgcgatagttgctctctacttaacgtctgcaatcgtcagttcactcgaagcaatccctctgtttcctaagctaatggaagtagttggtctcggatacacactctggttcactacccgttatctgctatttaagaggaacagagaagaactcaaga

SEQ ID NO: 126301 - DNA, 728 bp, Arabidopsis thaliana
cagctccctacgactcactatagggaaagctggcacgcctgcaggtaccggtccggaattcccgggtcgacccacgcgtgcggactgaggcaaatgcattggttagaagtgttgaagaaaaatctcttgaagttgaggcaaagctgcgtgctgttgatgcaaaacttgctgaagttagtagaaagagttcagatgtggagaggaaggcaaaggaagtggaagctcgggaaagttctcttcaaagggagcggttttcctacattgctgaacgagaagcagacgaggcaactttgtcaaagcagagggaggacttgcgtgaatgggaaagaaagttgcaagaaggagaagaaagagttgctaaatctcaaatgattgtaaaacagagagaagatagggcaaatgaaagcgataagattatcaagcaaaagggaaaagaactggaagaggcacaaaagaagattgatgctgctaacctcgctgtgaagaaactagaagacgatgtcagttcgaggataaaagatcttgctttaagggaacaagaaactgatgtgttgaagaaatccatagagacaaaagcgcgtgagctacaagctctgcaagagaaactggaagccagagaaaagatggcagttcagcaactagttgatgaacaccaagctaaattggattcaacacagcgtgagtttgagttggaaatggagcagaaaagaaaatctattgatgacagc

SEQ ID NO: 126302 - DNA, 840 bp, Arabidopsis thaliana
taagtatagaggcttaaagccaagaattttctgtgcttatagaccaaaaaagcgttgaaaccccagagaatgatttatttgaaacccaagaaagaaatacttggaaaagaaaaacaaatatgggagggggtcgaccacggttggattcaaacctggggggggggtggccccttatacccaagaaaaagggggttatgccatgggcgaaaattcggaaatttttgaaagggttaaaagcaaggttgaagtacaacaagaaagtagccagaaggataaattcgaagagattttcaaaaaactgccaaaatgggtagacgtcaaatcatctaaatacggtactctccctgttctaagaaagaaacggctatcacgactcgggcccgcattgaaggtacttgatgacttgatccaaaacgagaacgagactgcgaataagaaactctacgaacttaaactggatttgctggaggaaataggttggagccatttggttacgtatgagaagcaatggatgcaggttcgtttccctaaaagcctacccctcttttagtagttgttgctaccttcttgttcaataaaagcttatccagaacatatagttgcaagttcttgttcaataaaagcttgtccagaacaaatagttcgttgtttttcgaaacccaaactactgtcttattttctgtccgtataaactgtatgttcttagtctctttgtattgacatttttcagttgtggaatcaataaaattgtcgctcaaaaaagtaaaaaaaaaatacaaaaacgaagggcggccgctctagaggatccaagcttaggtacgcgtgcatcatacgtgatag

SEQ ID NO: 126303 - DNA, 1108 bp, Arabidopsis thaliana
  unsure (1)..(1108): unsure at all n locations
ccctttgcggtaccggtccggaattcccgggtcgacccacgcgtccgatccaaaggataatccggtatcttatccgatatcatatgtggttccaccaaataagcctgaggaagataagaaggcagcttctgcccctacttgctctaaatcagtatcagaacgcttggaacaagaggttcgcgacacaaagatcaaatttcttgggaatctaaaacaagaaactgaggaagagcgttcagagtggagaaagttgtgtacctgtctcaagtctgaatacccagactatactccattactagctaagatcctggaaggtttactgtctcggtctgatgctggggacaaaatcagccatcacgaagagattatagaagctgcaaacgaagtagtacgcagtgttgacgtagatgagctagcaagattcttgctagacaaaactgaaccagaagatgatgaagcagagaaattgaagaaaaaaatggaggtgacacgtgatcaactggcggatgcactataccagaaagggttagccatggcgggaatcgagaatctgaagggtgagaaggaaggtgaaggagaagaagaaagtagccagaaggataaattcgaagagaatttcaaagaactgacaaaatgggtagacgtgaaatcatctaaatacggtactctcactgttctaagagagaaacggctatcacgactcgggaccgcattgaaggtacttgatgacttgatccaaaacgagaacgagactgcgaataagaaactctacgaacttaaactggatttgctggaggaaataggttggagccatttggttacgtatgagaagcaatggatgcaggttcgtttccctaaaagcctacccctcttttagtagttgttgctaccttcttgttcaataaaagcttatccagaacatatagttgcaagttcttgttcaataaaagcttgtccagaacaaatagttcgttgtttttcgaaacccaaactactgtcttattttctgtccgtataaactgtatggtcttagtctctttggattgaccagccgcaccgcgaattacgatgatccaagacttnatgcgatgaccgttcgtaccttcgt

SEQ ID NO: 126304 - DNA, 639 bp, Arabidopsis thaliana
  unsure (1)..(639): unsure at all n locations
ggaaantgggtcccngccactgcggccccttcccgganggttcccttgcgggacccggatctgagggtgngagggggttggggggaggagaaagtccccggacggnttattccgaggggaatttcaaggcacctgccaaaatgggtggccgtgaaatccacctaaatccggtactctccctgttctaaggggggaaccggctatcaccgactcgggaccgcattgaaggtacttgatgacttgatcccaaaacgagaacgagactgcgaataagaaactctacgaacttaaactggatttgctggaggaaataggttggagccatttggttacgtatgagaagcaatggatgcaggttcgtttccctaaaagcctacccctcttttagtagttgttgctaccttcttgttcaataaaagcttatccagaacatatagttgcaagttcttgttcaataaaagcttgtccagaacaaatagttcgttgtttttcgaaacccaaactactgtcttattttctgtccgtataaactgtatgttcttagtctctttgtattgacaatttnttcgcggccgcagaacttcngatatcaacnnttantcgataccagtngccatcngcggggggnncttgccaaaa

SEQ ID NO: 126305 - DNA, 525 bp, Arabidopsis thaliana
acgactcactattgggaaagctggcacgcctgcaggtaccggtccggaattcccgggtcgacccacgcgggcgcggacgcgtgggttgatgtactgtggtcacaagaagaaccatcgaaggaacattttgggattcttagctcttgaagttattttggtggtggctatcattcttattacgctctttgcgcttaagggtgattttgttaagcaaacatttgttggtgtgatttgcgatgtcttcaacattgctatgtatggagctccttcattggccattattaaagtggtaaaaacaaagagtgttgaatacatgccattcttgttgtctttggtctgtttcgttaatgctggaatttggactacttactccctcatcttcaagatcgattactacgtcctcgcaaggaatggggattggacccttttgggcactttctcaggtgatagtgtacttcatggactataagccaaccccaaaggagaaagacggtgaagccctcagaaggtgagatttctcctacg

SEQ ID NO: 126306 - DNA, 459 bp, Arabidopsis thaliana
agggaaacctggtacgcctgcaggtaccggtccggaattcccgggtcgacccacgcgtccgcggacgcgtgggcggacgcgtgggcggacgcgtgggttccgtttctctctcgccggaagatttttgctacttcatctccttatcgccccaccaccgtcacatattcactggtttcgcattttctcaagtttctcgttaatttcggttaaagaagatgccagacgttcaatcaacggtggtggaatttgttaacaagctcagaaagcgtaagattgagggctcacaggctacagccaaatacaccgtagagctacttaggtcagtaatttcgcatcagcggggtgcctcacgctaaccaagctgccgctcttatcgatgctgtgaaagctgttggtgagcaattgatcgctgctaattcctgtgagcttgcggtgggaaatgtagttagacgggttttg

SEQ ID NO: 126307 - DNA, 273 bp, Arabidopsis thaliana
gaagatttctgctacttcatctcattaacgccccaccaccgtcacatattcactgtttctcgttaagttcggttacagaagatgccagacgttcaatcaacggtggtggaatttgtgaacaagctcagaaagcgtcagattgagggctcacaggctacagccaactacaccgtagagctacttaagtcactactttcgcatcagcgggtgcctcacgctaaccaagctgccgctcttatcgatgctgtgaaagctgttggtgagcaattgatc

SEQ ID NO: 126308 - DNA, 476 bp, Arabidopsis thaliana
tgctcctttccctcttcttcaccttcatcacatacgtatggcattacggcagcagaaagaagtacctatgcgaccagcacaacaaggtccctatgaaatcaatactaagccttggcccgagcctcgggatcatcaaagtccccgggatgggtcttatctacacagagctcgccagcggtgttcctgccacatttaagcactttctaacaaacttaccggcgttctaccaagttgtcgtctttgtctgctgcaaaactgtccctatcccgtatgtgccgcagaaagaacggtaccttatcggccggattggaccaaaaacatacaggatgtaccgatgcattatccgagctggctacaaagacgtgaacaaagacggagacgactttgaagacgagctggtgatgagcatcgccgagtttatccagctagaatccgaaggctatggtggctcagacactgaccgttcgattgacggt

SEQ ID NO: 126309 - DNA, 409 bp, Arabidopsis thaliana
cggaaaaagagaaaatctttggtccaaaccaaaagaaacgttccctttttttaatttgtctctttgctttaataatttccttctcaccgaaacacacaccacaaccaattctcttctccttcttcctctttcacaaattcgtcatctgggtattcttaaatttctcacaaattcatttacttttttgttctgttccgagatttcaaggttcactatcgattctgaaactcttggaacaatccagattcttggttagcaggtggggaagcattaatcatgtatttatgatacactgctccattattattacgagagagttgaaagtttcctttttgactcgtttttaaaggcaaggaagaagaaaggactttgttttccattattattacgagagagttgaaagtttcct

SEQ ID NO: 126310 - DNA, 793 bp, Arabidopsis thaliana
ctctcgcgtccggacgaaaatggctccgagatcagattcacaaaccctagccaccggctccgacgaaaatgaatcctcaatcgatccgatcttccacattctccgtatcatccctttctccttcctccgaccaccacgtcttcgtctcaagctcccttccttcactctcccatctccaatgactgtcttctcactgattctcctcacttacttcctcgtcgtctccggtttcgtctacgacgtgattgtcgagcctccaggtatcggatcgacacaggatccaatcaccgggtcagtaagacccgtcgtgtttatgtcgggtcgggtcaatggtcaatacatcattgaaggtctttcttccgggattcaatgttcgtactcggtgggattggaatcataatgttggatctggcattggataagaatcgagctaagagtgttaaagcatcttatgcaacagctggagtctcccccattgtagattgcttaatggtaatgaggatgctcttcattcgcattaagggcccctgggtatccccgttaggggggtagaccacttttggcttcaattctgtaattggatctttagtataagatcgatcattagaaaaaatgtgactttttgttttgtttgtttgctaaagcttatgtgtttcttgtttgataatgagaatttagctttgaatgttagtatctgcacttgcattattgttgaattttgcgttgaagaagataatgggaaattttctgtaacagttatatgacaacacaaacaataaagtagagatttttg

SEQ ID NO: 126311 - DNA, 408 bp, Arabidopsis thaliana
ggggaagattttgggagattgaaatgtgagaatggtagattggtgaaggagaggaagaagagagaggaggtgattgagaggggtaatagggagaggagtgaattggtggagagccttgaggagaaggttagggagattgatgttttgaagagagaaattgaaggagttgtgaaagagaagatggaggttgagatggtgagacgtgatcagagggagatgattgtggagttggagaaaaagctgggagatatgaatgagattgtggagagtttgactaaggaaagggaggggttacgtggtcaggttgttgggttggagaagagtcttgatgaggttacggaggaagcgaaagcgagagctgagcagatcaatgaacttgtgaaagagaaaactgttaaggaatctgag

SEQ ID NO: 126312 - DNA, 657 bp, Arabidopsis thaliana
  unsure (1)..(657): unsure at all n locations
taggtgacactatagaagagtctatgacgtcgcatgcacgcgtacgtaagctcggaattcggctttctgcgactcttgagaaaggaagacgaaggaaggagaatagtagaagaagaagaaagggagagtcttgtgatatctacgtagaaggaagatggccttatctcaagtgtctgcgtctctcgccttttctcttcccaattctggtgccctaaagctagccacaatcacaaacccaacttctacatgtcgggttcatgttccgcaacttgctggaatccgatccaccttcgcttctggttctcctctcttgccattgaagttgagtatgacccgtagaggaggaaacagagcagcatcagtttccataagaagtgagcaaagtacagaaggaagcagtggtttggatatatggcttggtcgtggcgccatgggttggtttttgcagttgccattactgttgagatttcccctgggaaaaggacttcttgagaatttttggagtagcaaagtccattgcctaagggttgctttaactggtaanaccattnggtgggggtncaactngggtttaaacctnccaatctnctncaaaaatggtcaaaaanatcctggttgganncnncggggaaattctganaannccttganaaaacc

SEQ ID NO: 126313 - DNA, 704 bp, Arabidopsis thaliana
  unsure (1)..(704): unsure at all n locations
gaannttaaaaaaaaaggnacctttgacccccnnaaagaanggcntccnaagngcccgccccccctttcccncccaatttgggcccaaagctccccaaccaaaaccaaccccaacttccacatggcgggtcatgtccccaacttgcgggacccggcccaccctcccttctggtcccccctcttgccatttaaggtgagtatgccccgtagaggaggaaacagagcagcatcagtttccataagaagtgagcaaagtacagaaggaagcagtggtttggatatatggcttggtcgtggcgccatggttggttttgcagttgccattactgttgagatttccactggaaaaggacttcttgagaattttggagtagcaagtccattgcctacggttgctttagctgttacagcattggttggtgttctagctgcggttttcatcttccaatcttcttctaaaaactgatcaacaagaatcttgtttgtgatgctgccgaggatcattttcttgtattaagaatcttgtattatatatcactgtaacttctacatccatcagtggaaaatcttacattcttagttttttttggcaacatacatgatctatacatgtcttttggccaaatcttatttttacctttttaatacatgatctataacatgtattaagtttgaaaacnnnnnnnnnnnnnnnagagtatcat

SEQ ID NO: 126314 - DNA, 529 bp, Arabidopsis thaliana
  unsure (1)..(529): unsure at all n locations
cggggggacccacgcgttcgatagaaccccctcccgtgtttaaaccctccggcgacaaagctcagatagagaaccgctccacccttgtcgttcgctgcagccatgtacggcggagatgaagtgtcagctattgtggttgacttgggttcgcacacttgcaaggctggttacgccggtgaagatgctcccaaggccgttttcccttccgttattggggcagtagatggtgtagaggcaatggatgtggatgttgattctacaaagactaattcgaactctgaggattcgaagaccgagtctgaaaaggaaaagagcaaacgcaagctctatgtaggatctcaagccatgagctaccgcagagatcatatggaggttttgtcacctataaaagatggcatcgtttctgactgggatttggtggacaatatatgggaacatgctttcaagagttgtctgatgattcgatcctacggggcatcccaatggctncttagctggagcccnccttttaancncttcaaccagcnag

SEQ ID NO: 126315 - DNA, 386 bp, Arabidopsis thaliana
gcgtccgcacacacgtccgcccacgcgtccgctctcgctttctctctcacacacaaaattgcagaagaggaagagtcatgaatggtgaggaaagctttgtacaagattgctctgtttttgttgagattgatccttctggaagatatggaagatacgatgaaatacttggcaaaggagcttcaaagacagtatacagagcatttgatgagtatgaaggtatagaagtagcatggaaccaagtaaagcttcgaaatttcacaaggaatcctgaggaattagagaagtttttcagagagattcatcttctcaagactttgaatcatcaaaacattatgaaattctacacttcttgggttgataccaacaatttatcaatcaattttgtc

SEQ ID NO: 126316 - DNA, 392 bp, Arabidopsis thaliana
accacgcgtccgcccacgcgtccgcgaattctaaatcggagactaaacctgactccgatgagcctaaaggatctggtttcgatcctgagtcattggaaagaggtgctaaagctcttcgtgaaatcaatagctctcctcattccaaacaggtgtttgatctaatgcgaaagcaggagaagactcgattagctgaattagcggctgagaaagaacataatgaagctattcaagctagcaaggacattgaaagacagcggaaattggcagaggatcagagaaatttagtgcagcaacaggcccaagcgaaagcgcaaaatcttagatatgaggatgagttggccaggaagagaatgcagacagataatgaagctcagagacggcataatgctgaa

SEQ ID NO: 126317 - DNA, 457 bp, Arabidopsis thaliana
  unsure (1)..(457): unsure at all n locations
tgatactgccnnnnnnnnnnnnnnnnnnnnnnnnnnnnnnnnnnnnnnnnnnnnnnnnnnnnnnnnnnnnnnnnnnnnnnnccacgcgtccgcggacgcgtgggatcaaatctgatctaatctccgtaaattaatggcgagtagttgcgagctttgctgcgagatcttcatcgcaattcttcttcctcctgtcggagtttgtctcaggcatggctgttgcactgttgagttcttcatttgtttgatactgacttgcttaggctacttaccaggaataatatacgcaatttacgcaatttgtttcttgcaccgcgatgagtattttgatgaatacagacgcccaatctactatgttgcttgacctcttgattgattcttgctcttgagcacacatattgtactttaaagtgtaatttacttgtatcctggagataataataccatttttttttaagaa

SEQ ID NO: 126318 - DNA, 431 bp, Arabidopsis thaliana
cgaaggaggattctgctgaatcaagctggcgatgtgtggagcaatcagggagcttgattttgggtctgtgattcgattttgtttctccagtcatgtttgattgggaagaagaagagcttactaatatgatatggggtgatgatgctgagacaggcgaccatattgtgccttttaaagtcagaagtgaacaacttaacaaaaaggaacagattgaggaatctaagacagctgagcaaaagataactgggactaaaattgacctccatgataaaaatttggggagcagttcgagccataatgttgatgaggggcttcctcagccagatttctgtatgagctcatggcctgacacgtcgctaactaatgctacaaaggttgatcaagatttgagtgcgactgaactttcaaaatgcttagctgagccagtcaga

SEQ ID NO: 126319 - DNA, 651 bp, Arabidopsis thaliana
cgattgtatccgataagctcgatatcgaattcgcggccgcgagctacagatgctttaaaacaacaatggttggatctttggaatctgatcaaactctttcaatggccaccttaatcgaaaaactcgacatcttatctgacgacttcgatccaaccgccgtagtcaccgaaccgttacctcctccggtaactaatggaatcggagctgataaaggaggaggaggaggagaaagagagatggttctcggtaggaatatacacacaacgtcactcgctgtaacggaaccggaggttaacgatgaattcaccggagataaagaagcttatatggctagtgttcttgctcgttaccggaaaactttggttgaacgaaccaaaaaccatttaggttatccttataacttggatttcgactatggtgcgcttggtcagttacaacatttttcgattaaaattcttggagacccgcctattgaaggtacctttggagcacaccccagaccttttgaaggtgggggggtggattgagaagctcggctctgggagaaagagagagatgattatttgtggcttccattaccccaattggtggtaacctgaaagggctaaaccttgcaaggggccacttgtcaaacttcgagggagcgggaat

SEQ ID NO: 126320 - DNA, 528 bp, Arabidopsis thaliana
  unsure (1)..(528): unsure at all n locations
nnnnnnnnnnnnnnnnnnnnnnnnnnnnnnnnnnnnnnnnnnnnnnnnnnnnnnnnnnnnnnnnnnnnnnnnnnnnnnnnnnnccaccccgccgtctctttgtcccaccattttcaccgcttctcctccaatcactcagatctacagattcctttaaaacaacaatggttggatctttggaatctgatcaaactctttcaatggccaccttaatcgaaaaactcgacatcttatctgacgacttcgatccaaccgccgtagtcaccgaaccgttacctcctccggtaactaatggaatcggagctgataaaggaggaggaggaggagaaagagagatggttctcggtaggaatatacacacaacgtcactcgctgtaacggaaccggaggttaacgatgaattcaccggagataaagaagcttatatggctagtgttcttgctcgttaccggaaaactttggttgaacgaaccaaaaaccatttaggttatccttataacttggatttcgactatggtgcgcttggta

SEQ ID NO: 126321 - DNA, 407 bp, Arabidopsis thaliana
agaaattatccatatacctgaaaagccttcattgtcacctgaccatcagcccactgtgaaggtatatgctagcctaatcaaacccagatttgccaatacgatagtgaggcatttatgtaagattgctcctctagaagatcttcgtcatgttaaaagggtgaagaagaagattctgccagattgcggtatcccattgtgaaactcagttgactgtcatcttatgtctagcacctgagcacaacgatcagttgagtgacatgccacctgatgtgcagagactcgttgatccctatgagttgagtccttttattacacaaagtatgcaaatatgctgcggtatccaaagaagagtgggaagaacaaagtaagatatggcctacttcatttcatccaccaacctacaatat

SEQ ID NO: 126322 - DNA, 494 bp, Arabidopsis thaliana
  unsure (1)..(494): unsure at all n locations
cggaattttngtacgncgaatnaaaatccaccgaacaaaccggaaggctaggatgctcaagctttacggattganttagagagagatcgatttgaactgtgtnattttaagcatggtttctagaagaggctccgagacaaaagcgattgtctgtgtcctcacggatagaattaggatctctaatcaatgggtttcgcatttgtctttcgctggtctacttggtgttgctggtttcgtatttgcccaacagcacggtctattccgcaacttaaacaacttaaaactcttctccggtagagaaaaagactccggagacgattcttttctcgtacctggccttcaaaatctcggaaataactgcttcctcaacgtcatcctccaggctctagcgagctgcaaagattttaggagttttcttcaatgggttctagaggatgcgagaggttcgttagcaggagaacaagaggaacagcttcctcttacttttgctttgt

SEQ ID NO: 126323 - DNA, 455 bp, Arabidopsis thaliana
aatccgaccacgcgtccgcgcatcggaagtacgaagaaggatctttgttttcttcctcttctccttcttctactttcgaacactcgtgaatctgattctactctagtctaattgggtgctttcgatttctgaataaaaattcgattttggtctgacgattaagaaagcgaaagtgatggccgccgtaaatggatatcagggaaatactccggcagatcctccggcgtctaatggatcaaaacaacctgcggctccgaccaagactgttgacagccaatctgttctcaaaagactgcaatctgaattgatgggcttgatgatgggcggtggtccaggaatatcggctttccctgaggaagacaacatattctgctggaaagggacaataacaggaagcaaagatactgtgtttgaaggaactgagtacagactctcactctctttctccaatgact

SEQ ID NO: 126324 - DNA, 353 bp, Arabidopsis thaliana
gatgggaaagaatacgttgctggcaacagatgatgagagaggaatgtttccgggaagtagctccggcaacaaaataccggagactctcccgctgctcaattagccaccatcatcaacggctgagttttcaccttaaactcaaagcctgattcataattaagagaataaatttgtatattataaaaagctgtgtaatctcaaaccttttatcttcctctagtgtggaatttaaggtcaaaaagaaaacgagaaagtatggatcagtgttgtacctccttcggagacaagatcagagtttgtgtgtttgtgtctgaatgtacggattggatttttaaagttgtgctttctttctt

SEQ ID NO: 126325 - DNA, 380 bp, Arabidopsis thaliana
caacgagtccgcggacgcgtgggcggacgcgtgggctggaactaaaggatatatatggctggtcttatgaagttaggatgcttggtctttgtcttcgtgattgcggccggtccaatcacagcaaaggcggctctgagctgtggcgaagttaacagcaatttgaaaccgtgcactggctacttgaccaatggtggtatcactagcccaggcccacagtgctgcaatggtgttagaaagcttaacggcatggtccttacaaccctagaccgtcggcaagcatgtcgttgcattaaaaatgccgctagaaacgtcggccctggtctcaacgctgaccgtgctgctgggattcctaggagatgcggaatcaaaataccttacag

SEQ ID NO: 126326 - DNA, 512 bp, Arabidopsis thaliana
agtcgaggcctgcgcgactgcgtttgccacgtctccgccgcctcctccgattcttttaccctaactaaatttgccgatgttgtcactcatcaccgaagaatggccgccgaaactagcatcaggaagctcccatctctctccggcctccgtcaccgacgtaatccactggaagataatccctacttccacccctccaatggcttctacatcactccttctgacgtcatcctcgcccaggtcgcctacgacctctccgcccaatcccaatcacgcgtggcctaccacagggctgggcctcgccgtgagatcatgtacgagccatcggctgtgaaggcggcgatcgtaacgtgcggtgggctgtgccctggcatgaacacagtcataagagaactcgtggtgggtctttgggagctgtacggtgtgagagagatatatgggataccagctggttacagaggcttttattccatggaagccgtcaagttagatcccaaggcggttcatgattggca

SEQ ID NO: 126327 - DNA, 486 bp, Arabidopsis thaliana
gagtcttattgtgggccccatgggaagagtcctttatgtcatctgttaaagacttgcccatccccaagtttcccctaccgccaatagacccagaggctgtgaaaagggtgcagaaagggctgagccaagtggaaatgaacaacaacgaggcggcgtatcaggcgtggttgggttccgaccaatctcagcagaggattgcaacagaccccccccgactggtggacctggccaatgagtttagccccagcatgggacttgacagccccccagctctccccccccatgttcttggcaagttgggtctcaaaaacgttcctggtcttagaaccaagtagattttcttttttcctagtgatctgctttggttttaaaactttaatgttttgtaagtgtagacgtgtagtctcttgtccttaaaaaaaaaaaaaaaaaaacaaacccaaagggcggccgctctagaggatccaagcttacgtacgcgtgcag

SEQ ID NO: 126328 - DNA, 557 bp, Arabidopsis thaliana
cccacgcgtccgaaacataaaaaatattaaacaaaaagaacaaaaaaaatggcaaaactttcattagcattaggtctattgctactattagcattaagtgaggtctacgaagtgcaagggtcgttcttattgaggcattacatgaggaaatttcccagaaggtccagagactttcggccattcgcttgcagaggtatgttgaagttcgtggacgttttggagcttaagtgtccattaaagccacaatacaagagcttcttcggaaacctaaggtcttacatgaacttcataaactcggcatccgggtcgaaaaactttgatgccgagctaaaagggaaagcccagggcctcttctcagctatgtctgcaatgagtggcaaaggcgccgcatcggctgattctagcaaggttatggatacattgctgtcaatgggaaagacattgggcacccaacagcagatcggttcatcggtaatgtcgcttggacaaaggaaagatatgatcatgtctatggcgaattgggcacaaacgattggtcaacttgttgtgagtgctgc

SEQ ID NO: 126329 - DNA, 549 bp, Arabidopsis thaliana
ttaggtgcactatagaagagctatgacgtcgcatgcacgcgtacgtaagctcggaattcggctcgagaaaaactccaaaacctctctctctttcttcctcacacgcttttttcatttctcaactgtaaaaaatctgatccaatggagaaagacgatgcaacggcgtcgttttcacctagcttcagtacttattccggcgatagactcgtcgaaatcgccgaacgagtctgttacaaagagaaatcagacgccgaattcgagttttcgacggcggcgacttcttcttccggtgacggtggactagttttccctgtatttaacaagaatctaatctccggagatgtttctccggagaaagtaattccgttgaaggatctattcctccgtgaacgtaacgatcaacaaccaccgcaacaaacatactcatcgtcttccgacgaagaagaagaagacgacgagtttgattcgatcccgagcgagatctattgtcccatgacaccagcgagatctacggcggatatgtcacccagtggaggatgtagaaaaaga

SEQ ID NO: 126330 - DNA, 532 bp, Arabidopsis thaliana
  unsure (1)..(532): unsure at all n locations
cnnnnnnnnnnnnnnnnnnnnnnnnnnnnnnnnnnnnnnnnnnnnnnnnnnnnnnnnnnnnnatcaaagatgccacgcgtcagaatctttagtgtttttgtagtaacgttatggatcataagggttgatgctagggttttcggaggacgaggaatcgaaaaatttgtaactttcggtcagaattatattgttacgtggggacaaagtcatgtttctacactccattctggcgaagaagttgatctttacatggatcaatcttcaggtggtgggttcgaatccaaggacgcctacggatcaggtctctttgaaatgagaatcaaagtgccttcaggaaatactggcggcatcgtcaccgctttttacttgacgtcgaaaggaggtggtcacgacgagattgacttcgagtttctagggaacaacaacggaaaaccggtaacgttacagacaaatctgtttctaaatggagaaggaaacagagaagagaggtttttgctttggttcaatccaaccaaacactaccacacttatg

SEQ ID NO: 126331 - DNA, 1385 bp, Arabidopsis thaliana
atgactcgccggcactaatacgactcatatagggaaagccggtacgcctgcaggtaccggtccggaattcccgtgtcgacccacgcgtccgcgcacgcgtgggcagagatagaagaagaagaagaagaaggatcagcaagtgcaattacaggttcgagaagtttcgatcttcccgatgaacttcttcaagttctaccgtccgatccattcgagcagctagatgtagctcgcaaaatcacatccattgctctctcgacacgtgtctcagctctcgaatcagagtcgtcggatctccgggaacttctcgccgagaaagaaaaagaatttgaagaactccagtctcacgttgagtctctcgaggcttctctttccgatgcgtttcataagctttctctcgctgatggtgaaaaggagaatctgataagagaaaatgcttctttgtctaatactgtcaagagacttcagagagatgtctcaaagcttgagggttttaggaagacgcttatgatgtctcttcaaagatgatgaccaaaatgcaggaacaacggaaatcatcgctaagccggcaccaaacgatgatgatactccatttcaaccttcaagacattcatcaatccaatctcaacaagcttctgaagccattgaaccaagctgcaacttgacaacggtaaacggatcgctcctaaaccaagtttatcagctagtcttccgttagtatcacaaactactacgccgcggcttactcctgctggttctcccaccaatcttatctgcttctggtccaccgaaaacaacttcgagacctatctctcctcgacgccattctgtatcgttcgctaccactagaggcatgtttgatgatactagatcttctatttcaatctcagagcctggttcacaaactgcgagaactcgggttgatggaaaaagagttctttcgacaagtcaggagccgattatcttacgagcaatttggtgcatttcttggaaatgtgaaggatcttaacgcccacaagcaaacaagagaagaaacacttaggaaagctgaagagatatttggaggcgataacagagatctctacgtcatattcgagggcttgatcacacgcaacgctcactaagagtttggcttcttcagttacacaaagaacttatatactcggaaactcaggattcatcagtctgcaacattcaatttcttttgtttccttggctgtcaagtaagaccaagtaaaactgacaatttgattgtatcatttgtgctctctcgtgtatctatcgatctctctcttcgtgaataaattacatttcatcatcaaaaaaaaaaaaaaagggcggccgctctagaggatccaagcttacgtacgcgtgcatgcgacgtcatg

SEQ ID NO: 126332 - DNA, 661 bp, Arabidopsis thaliana
  unsure (1)..(661): unsure at all n locations
aacgacccactatggggttagctggtacgcctgcaggtaccggtccggaattcccgggtcgacccacgcgtccggaagaatattaagaaggatcagcaagtgcaattacaggttcgagaagtttcgatcttcccgatgaacttcttcaagttctaccgtccgatccattcgagcagctagatgtagctcgcaaaatcacatccattgctctctcgacacgtgtctcagctctcgaatcagagtcgtcggatctccgggaacttctcgccgagaaagaaaaagaatttgaagaactccagtctcacgttgagtctctcgaggcttctctttccgatgcgtttcataagctttctctcgctgatggtgaaaaggagaatctgataagagaaaatgcttctttgtctaatactgtcaagagacttcagagagatgtctccaagcttgagggttttaggaagacgcttattgatgtctcttccaagatgatggcccaatattgcaggaaccaaccgcaaattcaatcgcctgagccccgacaccccaaacggttgattaattactccnatttttaaaccttcaaaggcaatttnattcaattccaatcttaaacaaaggtttttnangncatttnacccannnttnnaacttncaaccggaaccc

SEQ ID NO: 126333 - DNA, 513 bp, Arabidopsis thaliana
  unsure (1)..(513): unsure at all n locations
gaagcaagacagcagtgaatcacaatcagctctaataaaccagtcttggtctcctgatggtttatacatcacctctggctcagttgatccggtgatccatgtttttgacatcaggtacaatgctcgtaagccgacacaatcaataaaagcgcatcagaaacgagtgtttaaagcggaatggcattactctcaaccacttctcatctccatatcttctgatctcaacattggtctgcacaagatctcatgaaacttttgaagctctcacatgtctttgttcctcatttcttattatctgaggatacaggttcaggtggcgaatatttatcagccatcataccaattcttagttttaggtataaacatcattcccatgtattaaactctcaatttttataaaggattcgttaattaaaaaaaaaaaaaaaaaagggcggccgctctnnnnnnnnnnnnnnnnnnnnnnnnnnnnnnnnnnnnnnnnnnnnnnnnnnnnnnnnnnnnnnnnnnncg

SEQ ID NO: 126334 - DNA, 569 bp, Arabidopsis thaliana
  unsure (1)..(569): unsure at all n locations
aatgtcccctttggacatgctgcgatcgagctagttgcaggcaaagaaagtgccattgcccaagtcattagaccctctcctggtcaaacttacaccctctccttcgtcgttggagatgctaagaatgactgccatggttccatgatggttgaagcttttgcagccagagatacactcaaagtaccacacacttccgttggtggaggtcatgtcaagaccgcgagtttcaagttcaaggcggttgaggcaagaactagaattactttcttcagtggtttttaccataccaagaagactgatactgtatctttatgtggtcctgtcattgacgagattgtggtttctcatgtcgcttagattaagtttactctttatgacaactgcacttgtgttcttagactggtcatggacttggtgccttgctttgtatgtcttggctccttttggaattgagttattgtcatcaagttaaaatgaatgatataaaaacccaaagtnaaaaaannnnnnnnnnnnnnnnnnnnnnnnnnnnnnnnnnnnnnnnnnnnnnnnnnnnnnnnnnnnnnnnn

SEQ ID NO: 126335 - DNA, 511 bp, Arabidopsis thaliana
tgccttagagacttgcgtgctgccgcgtcgtagctggaattcggttggggttttgggttagatttgggaactcgtgcgcggctgtggcagaggccaaacccacccgtgtactccatccgtcggatccaccaaaccaatattctttcatctctctctctctctctctctctcttcttcttcgtcttcttctctttttattctttcttcaggaacaaattcctctgctttgggcattttagggtttctcaaatttttgacgctttctcttaaaagggttgacgaaataaccctttaagggaaaaaacaaaggttgaggaagaccaccaaggtgaaaaaagaaagaagaattcgaacaacagcagcaacaagataaagttacgaatttttcctcttttgtaacctttgtttctcttcttcctcttcctccatttttttccattaaagattctgcctttgggttccaatttcgtctttcctttttcgattttgccgcgtttaacatgacattcgc

SEQ ID NO: 126336 - DNA, 607 bp, Arabidopsis thaliana
cggtcgcgtgggtccaaatcagggttttatcactcaactttcagaccaaatatcaacactgaacgagaggatggatgaattcacatcccgcattgaagagttgaattccaagatcccgaacaggatagctccttcaggtagtcaacataacttggctttaccaatcgaaaacggcaatgggtctgtcttatcattctccgcatccgcatctcagctcgtaagggaatctcctctgatggaagacgtcgtactggttgctcgtggacagcgtcagataatgcatcaaatggacaccctgagtaatcttcttcgggagtatgttggagaaaagactcgcatagagagactcgccagcagcagaacaaacagtgcaacccaaaacctcgaatcctctactgtaccgattcttcttggtttggccattggctgtgtgggcatctttgcctacagtcgtctgaaatagttgctctaactgtggaaacccaggcttcgtgaaatagtggcaatgatgtaaataacatggtttgggatacaccctggacaaattcagtcttgacaatgtaacatgtgccaagaataaaagactgattcgtttcttaccccttcc

SEQ ID NO: 126337 - DNA, 649 bp, Arabidopsis thaliana
atgattccccgagacctaatacgactctcttagggaaagctggtacgcctgcaggtaccggtccggaattctcgggtcgacccacgcgtccgcaattttcttcacgcttctcccataccctcttacctatcttcttattcttcttagatttctccatcgatctcgaacaaaggattcacctttgcattcatattctttatcttgacttcaaagtcaaacctccgattcgataaacaaattggggaatggatgcttgctttcgtctttctcaccagatctgaagcacccaagttccaaattcatattcgattcaccggcggctaggtatttctcaaatcggtcagatttctgagatttatttatgagaacaatggtgacgaccaaattgggaatgctccattatgtaattgaccatatatatggagcgtttatgcaccgcaccaagatgaccccacccttcttctctcgaggttggggtggtcccaatctcgaattgctcgagcgtatggttcaacgcctcttccctcttgaggttcaaggtcagaattggccaccgcctctggttcgtccagtctggagaactgtttgggagacaaagaccgctactttgagagaaggtgttttccagactccttgtgccgatgagctt

SEQ ID NO: 126338 - DNA, 522 bp, Arabidopsis thaliana
  unsure (1)..(522): unsure at all n locations
ctctcatacgactcactttagggaaagctcggacgcctgcaggtaccggtccggaattcccgggtcgacccacggcgtncgggcaaaagaagaaagattttacaacaaatgaaaagtgatgcagctttgcttaacctggaataggagaactgccttcttccaggttaagactcaagattagcatctctcatttctctggatggcattttgaagcaagtcaaggaaatcacaagacaagcctctgtccatgttttgagtaaaagcaagaagaaagcattacttgagtcccttgatgaactcactgagcggatgccttctcttcttgatatcgaccatccatgcgcacaaagagaaattgctacagcacaccagttggtcgagacgattcctgaacaagaggacactaatattctggaacaatcacacgaccggagaccctcattagaatcaatatcctcaggtgaaactgatgtatctcagtggaacgttctgcaattcaacacaggctcttcagccccattc

SEQ ID NO: 126339 - DNA, 405 bp, Arabidopsis thaliana
tatgctttcgcagagagtcacaggacactgggatgggtgtgtgactctagagggtgttcctcttttgttggagcaacacattaacaaaggcgaaattgtagaccggctttggaggggtgaaatgggtctgccagaagaagatcagaagaaaactcaagaacaaaggttacaattaaacagcgaaaagatcagcaacagagaggtgactcaagaatcagttaataatagtatctgttgccagtctcgagctgtcccagagctgaacggtagtggttgccaacaaaatgggaactcctcttactgtctggaggagattcacacagagaaaaatacctcggagagagtaacctctgtaaaaaatgcatctcttcggataggaagcagcgagaatggatcttctggtgg

SEQ ID NO: 126340 - DNA, 466 bp, Arabidopsis thaliana
ccgagagaggaatggcgccagttcttcagagctcacagccatgggttgagaaataccggccgaagcaggttaaggacgtggctcaccaggaagaggtggttcgtgtcctcaccaacactctccagactgctgactgcccgcacatgctcttctatggaccaccaggcactggaaaaaccactactgctcttgccatcgctcaccagctctttggacctgaactatacaagtctagggtgttggagcttaatgcaagtgatgacagaggtattaatgttgttcggactaagatcaaggattttgctgctgttgctgttgggtctaatcatcgtcaaagtggttatccttgcccatcgtttaagatcatcatcctagatgaggctgattcgatgacagaagatgctcagaatgccttgaggcgcacaatggaaacttactccaaagtcaccagattctttttcatatg

SEQ ID NO: 126341 - DNA, 666 bp, Arabidopsis thaliana
  unsure (1)..(666): unsure at all n locations
cnnnnnnnnnnnnnnnnnnnnnnnnnnnnnnnnnnnnnnnnnnnnnnnnnnnnnnnnnnnnnnnnnnnnnnnnccacgcgtccgcaaatatttctttaactccaacacagaagtgcacatagcattaggttattcctaagatttctgggcttctggtcctaaaatcccattcactactgacgtagcgacaagaactccgacgtcctcaccaaatcttcccccaaacctctaagatctccctccgctgctcccaccaccactacgaccgcacctcctatctctacagctccgaggattccttcaaatcaagccatctctgatccagatccgagtcagatctctcttcgtcccttaggtcatacaggatctagttcctcgctttcttttccaattcggactcctgaaatcaacaaggctccggaggtaaatgctccaactccggtttcattgtccccgaaacctgatcggttcgtgccgccgcatcttaggccaggttttgttcggaaagacgagaaacctggactcaantcttctcgagttagagatccgaatccgaatctgaatcagagattgcctaaccaggggcagacacggcaggaatatttcggttatggacagaccggacgggccaaatngggcgggtatgngagngatcccctacgggtc

SEQ ID NO: 126342 - DNA, 625 bp, Arabidopsis thaliana
tgcggtaccggtccggaattcccgggtcgacccacgcgtccgccgacggctttgctggcgtttttcctgagcataaatatgagatagttaagcgactacaagcgaggaagcatatctgtggaatgacaggtgatggagtaaatgatgcgcctgctcttaaaaaggctgatattggcattgcagttgctgatgcaactgatgcagcacgtagtgcttcagatatcgttcttactgaacctggtcttagtgttatcatcagcgctgtcttaaccagccgtgctatcttccagagaatgaaaaattatacaatctatgcggtttccatcactatccgtattgttcttggcttcatgctgctagctcttatatggaagtttgactttccacccttcatggttcttatcattgccattctgaatgatggcacaattatgacaatatcaaaagacagagtgaaaccttcccctcttccaggtagctgggaactctcaggggtttttgcaactggcggttgtgtttgggagctacatggcgatgatgacagttatatttttctgggctgcatataaaaccgacttcttcccgcgaacatttggagtttcaaccctggagaaaacagcacatg

SEQ ID NO: 126343 - DNA, 448 bp, Arabidopsis thaliana
cggtggtaggttctttaaaagggaacccttttcaccactagttcttgaatccacatacaagccgaggcgtttcaatattaaatgtaaattttacccttaaaaccatttgatttctccttcaaaattcctgcaacgacattaatttgaaaaaaaaaaaacagagacgtaagatcaaagatgaggagcaagagcggttttagtttcttctctaaaatgacttcttcaaggaagaggccttctctctcactacctagcaagagtcacgagtccacggatgttaacaagaccatcgacaatgcagccgagattatcgagaaatggaacacagagtatgtttccgataagaaattttattctctgttttgcgagagcaagcgagacgcgaagaaatttgttaaacgcgtaaaggaacctgcaaaacccccttggattttgttaatttaaaaaa

SEQ ID NO: 126344 - DNA, 906 bp, Arabidopsis thaliana
aaaactttgaagatagcgaagagcaaaaagataatctctggctcgatttttgttggagtccttgattcgagcaagtttaaagactcgagggttttcttctggataacgtaattagatactcgtgttttctgaaagggtcatcactgctattgtcatagcttgagaaaggatctatttttaatatcagtgatattggtatctatgagatttggagtagttgtttggaggaacgtgtcctcttgcttgatgtgaagattgcttcttgttgtttgctgtttcttaatggagtggaggggaatcctctgctcgttgctttttattgtttccgtgggagagtcgtcaagtagatttgggataatgtggcatcctaatcttggtgttgattctggacaatacttgacttgggcaatcttaagtgctagtgtattcgtggttattgccatcctcctccccatgtatcttatctttgagcacttagcttcttataatctaccagaggaacagaagtttcttattggacttatgctgatggttcctgtggaggccgtggaatcgtttttgtctttggtgaattcagaagcagctttcaactgcgaggtgattagagattgttatgaagcttttgcactctattgtttcgagagatatttgatagcttgcctagatggagaagaacgtacaattgaattcatggaacaacagacagttatcacccagagtactcctcttctagaaagcacatgttcttatggggttgtggagcgtggctgtccaatgaactgtttcttaaaagattgcagtctttgtcctcagttttattatgcttgtgtaaaatggcatcgttcaatatatgatactgaaaattatttgtgctctgtttgcatttatcctctaaatctttttttt

SEQ ID NO: 126345 - DNA, 423 bp, Arabidopsis thaliana
tccttttcgtccgctttcacgccaaatgaaaggtggcaacctttgaattgtttattgaaagtttacatttttctgttgaatccaactatgtttagattgagaagtctcttgtcgctgaagagttcttcgattgtagaattgtcatcacataacgtcacagaagcaattcgtttcgctccatttcattcgacaagtgttctgtctgaaaaatcgaggagtagatttggttctgctagagattccgaacgcgaacgatcttcaaagaactcctccataagatttacatgtaccgtaaaggagaagggtcgtaccagtgctaagaagactgtggataaactccttttccacaggggaattaatgatccgcttcagaatgagtggcatttcgggccaagtccgcttatccgggataggcatatgaag

SEQ ID NO: 126346 - DNA, 416 bp, Arabidopsis thaliana
gcgttcattacgtgcttcctcaatggcggcacgatccctatggagaacccgtacgaagctcctcgttgttggtaccgccttatgcggtggttccggcgccgccttcattgcttcctccgatgacccatcaacaaccctcaagctttgcacctccatccccgttcgtctctaccgcaataccgttaccgccgcctctattgctttcgattatgagtactcgttgttgggtttggctgagggaagcagtgagagagctaaggtcaaacatgaagtccacctaaggtcagctcaaaagcttcaagagctctgttttaaaaatggaggaatctatatcaaactcggccaacatataggacaactagaatatcttgtgcctgaagagtatgttcgtactatgagggagtccatgttgaaca

SEQ ID NO: 126347 - DNA, 513 bp, Arabidopsis thaliana
  unsure (1)..(513): unsure at all n locations
cagctcctcatnnnnnnnnnnnnnnnnnnnnnnnnnnnnnnnnnnnnnnnnnnnnnnnnnnnnnnnnnnnnnccacgcgtccgactgaatcaaatataattattggatcacatctgatttaattggttcaaacactgcgagggatttgctaggcgctctcgcagttccctcgccatgtaagcagcattttgattgttttaaaagaccggtcctcgcaatttcctagtttggtttgcgagtgatttgcgaggaaatatattcttatatatacccgataacctagtttgagcggagctcaaacctgccgcatcaaaccctatacctaatttttttcttcgattctcttcttctccgatctattttcctcgtcgccggcttctcttcttctccgatctattttctttcgccgccgcctctcttcttcttcgatctgattacgtcgccgcctctcttcttcttctccgccgcgtctcttattctccagcagccgccgcaactcttcttctccagctt

SEQ ID NO: 126348 - DNA, 495 bp, Arabidopsis thaliana
ccatgagattcttagaaggttggcggagagacgacggagaaaacgacttaacgatcgtctttgtatgctccgatccatcggcccaaaaatcagtaagatggacaggacatcgatattaggagatgccatagattacatgaaagagcttttagacaaaatcaacaaattacaagatgaggaacaagaacttggaaatagcaacaattcacatcactctaagctcttcggtgatctcaaggatcttaatgcgaacgaacctctggtcagaaactcaccaaagtttgaaatagatcgtagagacgaggatactcgagttgatatatgctgctcgccaaaaccgggattgctactatctactgtgaatacattagagactctaggcttggagattgaacaatgtgttataagctgctttagtgatttctctttgcaggcttcttgttctgagggagctgagcagagagatttcataacatcagaagatataaaacaagc

SEQ ID NO: 126349 - DNA, 830 bp, Arabidopsis thaliana
  unsure (1)..(830): unsure at all n locations
cctctccaccgttctttctcttccttctctctctggacttcaacttttggagaagtacaagacatttataaagtgctgctcatcacccaacactaaacacaattgtcaaaagggtgtggtggaaggagaatctacttctatctgaacatcgatcagtcatatcttttcaatcaaatcaaagccctcctctctctcttactccttttttgttttaaatcaagaaaaagactccatgtcgagcatgtccatgtcgtcctcctcatctccagcttttccaccggaccacttctcatctacggaccagctctgttacgtccattgcagcttctgcgacactgtccttgctgtgagtgttcctccgagtagtttgttcaagacggtgacggtcagatgcggccactgttcgaaccttttgtcggtgaccgtgagcatgagagctcttctttcttccatccgtttccaaccttggccattcctttttacctccccctcctcctcctcctcctccaaatcttttggagggaatgcgaagcggagggcagggggtaaacatgaacatgatgatgagccatcacgcttcagctcaccacccgaacgagcatttggttatggcgactcgcaacggaagatcagtggatcatctacaagagatgcctcggccaccaccagccaatagacccccagagaagcgacaaagagtaccatctgcatacaaccgattcatcaaaaaagagatccaacgtataaaagcaggcaaccctgatatcaggcacagagaagccttcantgctgctgccaaaaactgggctcatttccctcacatacacttt

SEQ ID NO: 126350 - DNA, 402 bp, Arabidopsis thaliana
tgattttttgttgtagtatttaaagcatcttgcttacgacactgcacaaacaggttggaatgttgttagtagcaaccatagaggattgggaggagtttctgttacttcagattgcttctataatgctggatggacagatgatataagggtagttcttgattatcttcaacacaaatacccgagggctcctcgctttgctattggcactagcattggagcaaatgttctggtaaaataccttggggaagacggtgaaaagactcctctgagaggtgctgttgctatctgctctccatgggacctcttgattggtgacaggtttatctgtccgactttgaaacaaaagctctatgacaaagctctcaccatcggactccagggttatgcccaattgtatgtcca

SEQ ID NO: 126351 - DNA, 574 bp, Arabidopsis thaliana
cgagtttaacagttacttccagagactacgcctttatacacgaattctctccagttcagtgatggcgactccggaagaagtagcgtatgagaagttcctagagagagttcgtcgcactgtctacgtagacgaactcacgcctcttgccacagctcctgttatttcatctgctttcaatcagtccgggactgtcaagaaagtcagcttcatacctaactacttgggtccaaaggagcttcctatgggtgttcttgttgagatggagaatgaagagatgacacaggctgttatctctactgtctcacagttacctttcatggttgctggtatgccaaggcctgtgagagcttgtgctgctgagcctaatatgtttgttgataaaccgaagaagcctggtagaacggtccgttttcgctggattaagcctaacgatcctgatttcgacaaggccaggagagtcaagcggcttgctcgtaagcatagtgctgaaaattcgttcatgctcaagcttgaggaggcacagaagctgtcgatacagcaagctgagacggcggtaacacatcacaagaagttt

SEQ ID NO: 126352 - DNA, 577 bp, Arabidopsis thaliana
  unsure (1)..(577): unsure at all n locations
nnnnnnnnnnnnnnnnnnnnnnnnnnnnnnnnnnnnnnnnnnnnnnnnnnnnnnnnnnnnnnnnnnnnnnnnnnnnnnnnnnccacgcgtccgcccacgcgtccgtacggtgcgagaagacgacagaaggggcactagaaaaatggacaaaagattatggagtcttcaaggtatgactgctcttgtgaccggtgcagccagtggaatcggttatgccatagtagaagagttagctggttttggagctagaatccatatatgtgacatctctgaaactctgctcaatcaaagtttaagcgaatgggaaaagaaagggtttcaagtgagtggttcagtctgtgatgtagcctctcgtcccgagagagaaaaactgatgcaaaccgtctcctcgctgttcgatggcaaactcaacattcttgtaaacaatgtgggggtacttcgcggaaagccaacaacagaatatgtggcagacgatttcacttttcatatatcaactaacttggaagctgcttaccattttagccagctttcacatcttcttttaaaggcttcaggatttggaagcatcgtctttatg

SEQ ID NO: 126353 - DNA, 864 bp, Arabidopsis thaliana
  unsure (1)..(864): unsure at all n locations
cagctgctatactgactcactatagggaaagctggtacgcctgcaggtaccggtccggaattcccgggtcgacccacgcgtccgcccacgcgtccgccctcgcggccgctggtttctgttctgtcctaatttctctctggcgaaagctaagaggtttcggttacggtctccatctccgatcaaatcacgaagtttctatcggaaattttcagtgatacataccgtcagagattttctttacgagagaattgtcgccgacatactaaagcagagttttgggtgggaattagtaagatttcgactttggaattgggagatctttccattatgggttctgagcaaaacgacagcacaagcttctctccttcagagccaaagctctgcgtcaaaggatgtggcttcttcggatctccatcgaacatgaacctctgctctaaatgctacagagacatccgagccacggaggaacaaaccgcttccgctaaagccgccgtcgagaaatctctaaaccctaataaacccaaaactcaaccacaacagagccaagaaatcactcaaggcgtcctcggatctggatcgtcttcctcatcaacgagagggggtgattcggcttgctgctcccgtggatccaccgaaatcgacgggctacgagattgcttaagctgtaacaaggnaagttggcgtgacgggttttaaagtntaggtnttggaagcactttctgttgggacctcattaggttatccngggnagtcacggnggtgnccaatttcgggttttcaaaaggngttttccgnaganaaagctnttttcttaaaaggtaaatccctttnggtaaaagcntnnaaaaggtttntnagggatat

SEQ ID NO: 126354 - DNA, 973 bp, Arabidopsis thaliana
  unsure (1)..(973): unsure at all n locations
accacgcgtccgcacaaacaccataaaaagttgataaccccacccattttatatccactttatctcatcaaaaaacttccaatcaccaccgttggattagtaaacaatggcgtcatcactctccgattgtttcatcgaacgaatattatcagggatgtattaaatcttccgtgcgccttaccgcatatgaataaaccatttgaccacaaagacaaatgcaaaagaactaaaagagtctggtttctgttctgtcctaatttctctctggcgaaagctaagaggtttcggttacggtctccatctccgatcaaatcacgaagtttctatcggaaattttcagtgatacataccgtcagagattttctttacgagagaattgtcgccgacatactaaagcagagttttgggtgggaattagtaagatttcgactttggaattgggagatctttccattatgggttctgagctgtaacaaaaaagttggcgtgacgggtttcaagtgtaggtgtggaagcactttctgtggaactcataagatatccagagagtcacgagtgccaattcgatttcaaaggagttgcgagagaagctattgctaaagctaatcctgtggtgaaggctgataaggttgataggatatgaattggtgaagaaactgttgtgttctcttttgtttttttattttcaagtctcgtgatgttggtggtttggctctctgttttctgctcttattatggttttatttgcttttagggtttcttaggaaaggccttagattctgctattatgtggtttcatgttttgcaacattggatttgttgttctgtaataaagtgttggttttttttnnnnnnnnnnnnnnnnnnnnnnnnnnnnnnnnnnnnnnnnnnnnnnnnnnnnnnnnnnnnnnnnnnnnnnnnnnnnnnnnnnnnnnnnnnnnnnnnnnnnnnnnnnnnnnnnnnnnnnnnnnnn

SEQ ID NO: 126355 - DNA, 517 bp, Arabidopsis thaliana
  unsure (1)..(517): unsure at all n locations
ctgctgctccgttggatccaccgaaatcgacggctacgagatgcttgagctgtaacaagatagttggcgtgacgggtttcaagtgtaggtgtggaagcactttctgtggaactcatagatatccagagagtcacgagtgccaattcgatttcaaaggagttgcgagagaagctattgctaaagctaatcctgtggtgaaggctgataaggttgataggatatgaattggtgaagaaactgttgtgttctcttttgtttttttattttcaagtctcgtgatgttggtggtttggctctctgttttctgctcttattatggttttatttgcttttagggtttcttaggaaaggccttagattctgctattatgtggtttcatgttttgcaacattggatttgttgttctgtaataaagtgttggttatattaaaaaaaaaaaaaaaagnnnnnnnnnnnnnnnnnnnnnnnnnnnnnnnnnnnnnnnnnnnnnnnnnnnnnnnnnnnnnnnnnnnnnnn

SEQ ID NO: 126356 - DNA, 395 bp, Arabidopsis thaliana
ataaaaaccctaaacctaaagtcaccaattccttcctcctccggtattcacgattcgggttgtcttttcttttgcagtgagatttcgactgtggaattgggagatctttccattatgggttctgagcaaaacgacagcacaagcttctctccttcagagccaaagctctgcgtcaaaggatgtggcttctttggatctccatcgaacatgaacctctgctctaaatgctacagagacatccgagccacggaggaacaaaccgcttccgctaaagccgccgtcgagaaatctctaaaccttaataaacccaaaactcaaccacaacagagccaagaaatcactcatggcgtcctcggatctggatcgtcttcctcatcaacgagaggtggtgattc

SEQ ID NO: 126357 - DNA, 548 bp, Arabidopsis thaliana
aggtgacacttagaagagctatgacgtcgcatcgcacgcgtacgtaagctcggaattcggctcgagtagaaaacccgagaggagaaaagcaaaaaaagccagatcacaatctcaaactcgcttcttcttcttcctcactctcttattaggttcagttccttttcgattcttcgtgtggatcgctgtcggtagatttccgatttctttaggttctgctcgaaatcgtggtttagtgtttattatcatcgattcagaaaacggtgggtaaacttgtagcggaagatgaggcggtggccggtggatcaccggcggcgaggtagaaggagattgtcgagttggatatggtttctccttggttctttctctgtcgctggtttagttctcttcatcgttcagcattatcaccatcaacaagatccatcccagcttttacttgagagagacacgagaaccgaaatggtatctcctccccatttaaacttcacggaagaggtcacaagtgcttcctccttctctaggcagttagcagagcaaatgacacttgccaa

SEQ ID NO: 126358 - DNA, 415 bp, Arabidopsis thaliana
ccctcgcgtccgcccacgcgtccggtcacggtcgacataaaaacatcttttccatccaatatttaccggtttcgtttcaccggatttgggctctccggcgacggagaatagccaccatctccgtagaaaacagtatacttgatagctgaggaacaagagaagtgacaagggtgattgaaaagttgaaggactcagatgggaagcagaagcggagaacaaggaaagcgaatggcggaactgagcaaaaatcttaaagaaggtgagaggattctggagcccacacgtagacctgatggtactctccggaaacccattcggattcgacctggatatactccagaagatgaagttgtcaaatatcagtccaaaggttctctgatgaagaaggagatggcctcacaagggcctccaggtt

SEQ ID NO: 126359 - DNA, 460 bp, Arabidopsis thaliana
ctgcaggtaccgggccggaattcccggggtgacccacgcgtccgcggcgcgtgggtttagctcgagagctggaaatcagaacgactcggaggagagaagacaaagaaagcaattctttttactaagggtcttgcttcgattccacagaacccaaaacctctatttctctatcttcatccacaaaaatgccagcttctgaagatagaagagggaaatggaaaaggaagaagagaggggggttatcggcggcgaggaaaccgaaacaagaggaggaagatatggaggaagaagacgaagagaataacaacaacaacaacgaagaaatggatgacgttgaaaatgccgatgagcttcagcaaaacggcggcgcaactcccgatccgggacttgggttttgccaggtagttgaagattcttgtttcccccatctttatttccccgcagggttaaacctttttgt

SEQ ID NO: 126360 - DNA, 589 bp, Arabidopsis thaliana
  unsure (1)..(589): unsure at all n locations
gctgggccgttcttttcgtccgcccacgcgtcctcagagtttgagaacaaaaaaaacgatgccgttttgcgaggtcgtgaaagaagatgtcggcccagagacgacgcttaacaatgccgcaatcaaaatcttctacagaacgtacggtcatggtcctatcaaagctcttctcatcataggtttagccggaacgcatgagtcatggggtcctcaaatcatgggattgacgggaacggataaacccaacgacgatgatgacgacgacggaggtattgtttccgatgattccggcatcgaggtttgcgctttcgataatcgtggtatgggtcgaagctctgtgcctacccacaaatctgagtacacaacaacggtaatggcaaatgattcaattagtttgttggatcatttgggttggaaaaaagctcatataattgggcaattctatgggggcttttgatagcttgcaagttagcttcggttggtcccaaaccggggtctttctttggggtacttatatttacaggtggggtttttaatgtttccaaggttcccggaatggttccattgggnnggttttaagaaacccntc

SEQ ID NO: 126361 - DNA, 414 bp, Arabidopsis thaliana
cggacgcgtggggttcgggcgtacaagcatatactgcaggctgttgtagcagctgttgaaaacaccgctgatgtggccacctcaatagcaacatgcttaaatgtcctattggggacaccgtctgacactgagagtgtatacgatgaaaagattaagtggacctgggtggaaacgttcatttccaagaggtttgggtgggattggaagcatgaaggctgccaggaactgagaaaattttccattcttagaggactgtcacacaaggttggactggagcttgttcctaaagactatgagatggacacgtcttatccttttaagaagtttgatattatcagtatggttcctgtgtataagcacgtagcatgttcatccgcagatgggcgcactttgttgggatcatccaaaacctcc

SEQ ID NO: 126362 - DNA, 542 bp, Arabidopsis thaliana
  unsure (1)..(542): unsure at all n locations
ggnnnnnnnnnnnnnnnnnnnnnnnnnnnnnnnnnnnnnnnnnnnnnnnnnnnnnnnnnnnnnnnnnnnnccacgcgtccgtagagatcgatgaaggattaaagacgatcaataacggagatagagatcgattacaataatggatgaagagtatgatgtgattgtccttgggactggtcttaaggagtgtatccttagtggcctcctctctgtcgatggcctcaaggtactacatatggatagaaacgactactatggaggagaatcatcctctcttaacctcactcagctatggaagcgttttaggggaagtgacactcctgaagaaaatcttggagcaagcagagaatcaatgtcgatatgatcccaaagtttataatggctaatggactccttgttcaaaccctaatccacaccgatgttaccaagtatcttaactttaaggccgttgatggtagctttgtctacaagaaaggcaagatctacaaagtcccagccactgatgtggaagccctgaaatcgccattgatgggtcttttcaa

SEQ ID NO: 126363 - DNA, 1066 bp, Arabidopsis thaliana
ctcaagagagtggcaaggacatttcatcaaatcatgaccaaatatggagtggtaagacattgaatatcttgcattgccgagaaatttgatggaacgaatcaagtatatgattgacctgagaggaaaaactttgatgaatacaagaacttatatataagcgaaaaaggctgcacaaggggaggcaacgagagcttgacttgcattacggttcctaatcaacaagagaaccaaggtccaacgaataatagtaagagagaaagggaagatgggtttcttcttcacagagttagcttctcagagtttgttacttatactatcaactcatcaggagaagtcattgacacaaaattagttaagcagaaaggcaaagagaccatctaaggtttcattactccattgctgtgaagcgcacaaacattttgtattcttcgcttaatgaccgaaataccctttgagtggtctgagtctcagttgaattgtcagagggtaaaactggaaatttgattctataagtttcacccaaaaaaaaggaatgacctttagggttttgccttggatttggtctctctcatcattagtttaagtatgaggttctgctcccggaggattttttcttccggtggaagcggagccgatgatttcaaatctctcttgacgaaccactttttaaagtggtgatgaatcatccaatcatctcctccgtcaccaccactgccactactactgagcttcctcgattaaagattctactttacttggatctctatcttcttcttcttctttgtttttcggttaagctctcttcttcttcttcttcttcttcttattgggagacaatgatgattcttaagaagtcaataaaccagacattgtgggaacactcttctttcatggcggggctataaggaaaaaagagacctcctttttttctttgtaagcagccatggctgaagagttaatcctctaatttgtctgagaaaaggcgaatctgagtcctttttgctaaaaaagaatggattaaaaaaaaaaggcgagccgctctagaggatccaagcttacgtacgcg

SEQ ID NO: 126364 - DNA, 706 bp, Arabidopsis thaliana
  unsure (1)..(706): unsure at all n locations
atgattggtccggcactaatacgactcactttagggaaagcccgtacgcctgcaggtaccggtccggaattcccgggtcgacccacgcgtccgcccacgcgtccgtctaaaacaacacaaatatcataatttctccacgaactgactaagagaggtaccaagaagaaaaccagagaagaatcttctttagagagatgggtgtggtagaagaagctcacaacgtgaaggtgattggttcaggagaagccacgatcgtgttaggtcacgggttcggcacggaccagtcagtatggaaacacttggttccacatctggtcgacgattaccgcgtcgtcctctacgacaacatgggagccggtacgaccaaccctgactatttcgacttcgatcgttactcaaatctcgaaggctactctttcgatttgattgcaatcttggaagatctcaagattgagtcttgtatctttgttggccactctgtttctgccatgattggtgtcttggcttctcttaaccgtcctgatctcttttccaaaatcgtcatgatcctctgcttctccgaggtcacggaaaacggttgttgtttaccaaggggggttcgaccaaggagggtttaacccacttttttgnngccttccggggaacttnaaaggggggctnaggtttgnccnctnccnnggggggantggccctccngtnaaaattt

SEQ ID NO: 126365 - DNA, 533 bp, Arabidopsis thaliana
  unsure (1)..(533): unsure at all n locations
tcaccnnnnnnnnnnnnnnnnnnnnnnnnnnnnnnnnnnnnnnnnnnnnnnnnnnnnnnnnnnnnnnnnccacgcgtccgcttttttttgtgtgtggttaaggtctcatcgatcaacggataagatgaagcgtgaaggcaaacaacacggtatggtgaggacttaccggattctgcctccgtcgctgaatccaaggccggaatcgaagttggtcaaccctttgacttcacggccaaccgctggattatttaccaaagtgacatcaaagccgaccaatcactcgaaattcaccgggaaatgtggtcaagcaaggtgccttgactgccatatgcacccggtcaccaaatctaaagccaagactaaaggctcttcaaaggtgagaacaaatgatgtcacctataagatgctgacttggcaggtcgctgccggtgggcctagacccggtttgaagctttccgggttctcggctaccggaatacttgatcttatgtctgatgattatgggtatgatcatgattatgattatgatgaag

SEQ ID NO: 126366 - DNA, 695 bp, Arabidopsis thaliana
aaaaggcggaacaacaaaagaaaccctagcttccctttgtacctctctctgttccaaaccatgtcgaagagaaagaccaaagagccaaaggttgagaatgtgactcttggaccagctgttcgtgaaggagagcaagtctttggagttgttcacgtctttgcttcattcaacgacactttcattcacgtgactgatttgtctggacgggaaacacttgttcgcatcactggtggaatgaaggtgaaagccgacagagatgagtcctcaccttatgctgctatgcttgcggcacaagatgttgctcagcgatgcaaggaacttggaatcactgccatacatgtgaaactccgtgccactggtggtaacaagaccaagacccctggacctggtgctcagtctgctctaagagcccttgcccgttctggcatgaaaattggtcgcattgaggatgtgactccaatcccaaccgacagtacccgcagaaagggtggaagaagaggaaggaggctctgagttatttggcctctcgttggatctccttatgtagctttctcaatgtttcattttgttttttcttagtttgaaaagagttttggaattactatgctttgttatagtctcaactctgaacagctttggatctttttctgtatgaccataagatattcaaaaattggtagtcattttatctcaca

SEQ ID NO: 126367 - DNA, 417 bp, Arabidopsis thaliana
tgagcgtttcttttttctcggaaaaagattattagtattttataactaatgttttgcttttcaattgctaaagattggttattatctggttgctgttgagaatgattcaggaactgttggtttttcttccaagaatcactctcttgaatcttgatggctcctgtgttgaacatgcagatcaggatatgctctgttttgtgttagaaggaagtctctgaagaacaaggtacatattatataacagggttccaacggagaaccgtgcagataacttatttgggacagcttctacaaaaaaacatattccggcaaaagaaaacaatgcaactacctacacatggcttattaaaggcaaacaacacgattggtagacttgtttagaaccattcttcctagctgcatgtgtgttgatgtgct

SEQ ID NO: 126368 - DNA, 468 bp, Arabidopsis thaliana
  unsure (1)..(468): unsure at all n locations
cctgcaggtaccggtccggaattcccgggtcgacccacgcggtncgagaacaaactctcacttctcgcatcgttgattctccaaaaccagttttcactctctattgccgattctcgtttcgtttgatatcttaggaatctataaacaaaggttgaacaatgtttctcaaagtccaattaccatggaacgtgatgattccagctgaaaacatggatgccaaagggctgatgttgaagagagctatactagtagagttactagaggcgtttgcttccaagaaagcaaccaaggagcttggctactacgtggcagtcacaactttggacaagattggagaaggcaaaatcagggagcacaccggtgaagttttgttcccggtaatgttcagcggaatgactttcaagatcttcaaaggagagataattcacggtgtggtgcacaaggtgttgaagcacggtgtcttcatga

SEQ ID NO: 126369 - DNA, 595 bp, Arabidopsis thaliana
  unsure (1)..(595): unsure at all n locations
gaactacaaaagctaagagaaaagaaaatatcggaacttgaagaggaaatggaagaaactcaagaagattgcaagaagatcaaagcgcggttacaggaagtagagtgtctggttaatgaacacaagaaactcttttggntcaccaatgataagtatctagaagacattgaaaagaaagctatttcgcctttagatcatctgaaagacaccgatgcaactccaatatcatctgataaactagtcaaaataaggaagagttctggttttgtcccacgtttcatgacttcaactgttgctagtcgccaaaggcaaacaatgtcagagaaggaaatcaatgcaaaggctcagagcatacgatcagtggctaaaaatcttactcagttctccacttctcagtcgcttagtctctctgactcacgaagcaaagctctcctaagaagatcatacacaaaaccgcttcaagctgcagctaacagtggaacaccaccagaaacgcctaaaagacatatcaaagataattcttttacagagaaagaatatgaatgatacttcttcaccaaggagcaagatggttacttcatcggatccaaatgtg

SEQ ID NO: 126370 - DNA, 360 bp, Arabidopsis thaliana
agctggtgcaactgcagctaatcaacttcgactttggaataagggtgtcgattcagaaagcttcaatccccgtttccgttctcaagaaatgcgtataagactgagtaatggcgaaccagaaaagccactagtgattcatgtaggtcgcattggcgtagaaaagagtttggagcttttaaagagtgtaatggacaaattacctgaagctcggattgctttcattggagatggaccatacaaagaggatcttgagaagttgtttaccggaatgccagcggttttcactggaacgttacaaggcgatgaactctcacaagcttacgcaagtggagatgtgtttgtgatgccatcagagtcgga

SEQ ID NO: 126371 - DNA, 686 bp, Arabidopsis thaliana
gttttgcaaagtaacagtgatggaagagacgcgtttgttttcttgaataatagtaatgacaagactcggactcggtcttcttcgtcgtcgtcgtctacggcggcggaggagaatgataagaaggtaataacagagaagaaaaaggggaaggagaaaacttcgacgtcgtcggagacgaagaagaagacgacgacgactaaatcggcgcatgagaagctatacatgagaaacagagcgatgaaggaagaagtgaaacacagatcgtatcttccgtacaaacaagtcgggttcttcactaatgtgaatggtcttagcagaaatattcatcctttctgacaaaaataaaaattaagtttggtttttgggtgatttttttttgttttttggttatgtaaaaaaaaaatttaatttagtactcttctttggggtcacttctgcttggtagattgaaattttaaatgattgcagaaaggtgtactgttttttttccctattttctggtgttattgtgaagagtttggcttgtgtactaaaccattttgtaagtaaaaaaatatataaaatagttcgatttgcttaaagaaaaaaaaaaaaaaaaaaaaaaaaaaagaaaaacccaagggcggccgctctagaggatccaagcttacgtacgcgtgcatgtgacgtcatagatcttctatagg

SEQ ID NO: 126372 - DNA, 866 bp, Arabidopsis thaliana
  unsure (1)..(866): unsure at all n locations
cgactcacttagggaaagccggtacgcctgcaggtaccggtccggaattcccggttcgacccacgcgtgcggcgccaagctcaaatgcagcgtagggaccctaatcatccttctcttggcggtccaatgaatgctattggttctgaagggatgattgggcagtctaatgctagtgctttggctgctaaaatgtacgaggaacgcatgaagcagcctaatcctatgaattctgagacatcccaacctcatcttgatgcaaggatggcccttcttaaatcagcaacaaaccatcatggtcagattgtccaaggaaaccatcaaggaggtgtttcggcagcgctgcagcaaattcaatcacgaactcagcagcccactgaaatcaaaactgaagttaatttgggtacatctccaagacaactgccagtggatccttctacagtttatggccagggaattctgcaatcaaagcctgggatggggagtgcaggattaacccctggggtgagtggtcttcctttaaagggatggccattaccgggcatcgagcagatgcgaccaggtttaggaggccctcaggttcagaaatcttttctacaaaatcaaagtcaatttcagctctcgccgcagtagcaacaaccatcaggatgtttgctcaggttcaagcgcaagggaaattatgcctaatttaccccttgtattggtgggtgncaatgggcccctcggangatttttcaagggtttnccttgggggaaacntttaatcccgaaaggttggccaccaaaattgcaaattatgggcntttnngggnccccnatgngnaagntttnaaagtnttnagnntccccataacanaanctnttttngg

SEQ ID NO: 126373 - DNA, 932 bp, Arabidopsis thaliana
  unsure (1)..(932): unsure at all n locations
tgatactccagctctatacgactcactatagggaaagctgggtacgcctgcagggaccgggccggtataccggggcgaccacgcgttccgccacgcgttcggccaccgcgtcggccaagcggtcggccaacgcgtccgaattaattttaagttaccggtggataccatttactggtattttttcagaacccttagatcttttttttccttttcaattggtgatccgccagcatggttggacctttaaattactggaatttgagaacggattaagggtccggaccaactgagtattaattggttggggttttaatccagaagttcaatcttggcctgaggctttggctcaaagtattggggaagctgacagaatgctcgaggtttccatatatagatatttggtgaagaggaaacttcttaatattgctaagccgttaatgattgaagggaaggttcctcctgatccagttgcaatggatgcacctggagggtttctttttgagtggtgggctgtgttttgggacattttcattgcaaggacgaatgagaagcattcagaggctgctgcagcttatatagaggcacatcagggtaaagcgaaggagcagcaaatgcaaatacagcaactgcagatgatgcgccaagctcaaatgcagcgtagggaccctaatcatccttctcttggcggtccaatgaatgctattggttctgaagggatgattgggcagtctaatgctagtgctttggctgctaaaatgtaccgaggaacgcatgnagcagcctaatccctatgaattcctgagacatcccaacctncatcttgatgcaaggntgggccttcttaaaatcagncacaaaccatcatgggcagattgtncaaggnaaccaccaaggnggngttncgnancnntnnaannaantcaatnccgnac

SEQ ID NO: 126374 - DNA, 447 bp, Arabidopsis thaliana
cccacgcgtccgcccacgcgtccgcccacgcgtccgcccacgcgtccggatttactcttaacttacagctgattacaattcactgtaatctctcaagaaccctagattcttttttttccttttcaattgtgatccgtcagcaatgcttgatctttaaatttactgatatctgaagatcgaattagggttctgatctacttgatatttatttgtttgggcttttattcagcagctcgatcttgggctgaagctatggctcagagtaattgggaagctgacaagatgcttgatgtttacatatatgattatttggtgaagaagaaacttcataatactgctaagtcgtttatgactgaagggaaggtttctcctgatccagttgcaattgatgcacctggagggttttctttttgagtggtggtctgtgttttgggacattttcattgg

SEQ ID NO: 126375 - DNA, 604 bp, Arabidopsis thaliana
atctgatctatctctctcttccagctgtttcatgatcgatttactcttaacttacagctgattacaattcactgtaatctctcaagaaccctagattcttttttttcttttcaattgtgatccgtcaggtatgtgaattcgattactttctatatcaattcaacgaattccaaaagtcatgttcgcgtataagcaatttaaccttgtcgatttctttatattttctctgtatgtgtagcagcaatgcttgatctttaaatttactgatatctgaagatcgaattagggttctgatctacttgatatttatttgtttgggcttttattcagcagctcgatcttgggctgaagctatggctcagagtaattggggaagctgacaagatgcttgatggttacattataaagaatcagaacacttggattgggggatgcgggtcagaattgcaatgggattagcatattgccttgaccatatgcaccaactcaatccacctatagctcacaccagtctcgtctcatcatctcttcagctcacagaggattatgctgtcaagtatcagatttcagttcggttcatctgagacagaacaacatcaacaca

SEQ ID NO: 126376 - DNA, 521 bp, Arabidopsis thaliana
  unsure (1)..(521): unsure at all n locations
acgcttttatttcgaagagagagagagaagaagacggaagctagaagaaatcgtttttgatcggagatagtgtatgagctagttgtttgtaatttgacggctctcgggaactgatctatctccggtgtctctgctttgtcggtagctacaggagtgaagagagtttctacaagggttttaatggaagatgatgactctccttcttctcgggatttggatgcacagaacccttatgatcgattgcttgctctagatacaagtaccgtagatccaaattgtaacttggattcggtttctgccatttatctagcgatgaagagctctaagctggaatgtgttgacgagcgtggtcaagattcccttattacttcggtatgcatggaggatgaagaggatgaggagctcgatgagtttgatcccttatctgnttatcaaagaacttgcccgaacctgncttcctgttgccccaacttttaaaggccggnnttgntncctaaanaaaacccgnaggtgncccccca

SEQ ID NO: 126377 - DNA, 407 bp, Arabidopsis thaliana
cacaaacacacacagatctcttcttcatcacattacttctggctttacatcttttttcttctccatgaggaaagggagaggctcttccgtcgttggacccgcccttccagtaaccgccggtggatctgtgaaggagccgaggtatagaggcgttaggaagagaccttggggtcgattcgcagctgagatccgtgatccattaaaaaaatctcgtgtctggctcggtactttcgattccgccgtagatgctgcacgcgcttacgataccgccgcacgtaacctccgtggtccaaaggccaagaccaatttcccgatcgattgttctccttcttctcctctccaacctctcacctaccttcacaatcaaaacctttggtcttcttccggtgattcagaaccagatcgat

SEQ ID NO: 126378 - DNA, 737 bp, Arabidopsis thaliana
aacgacccactatagggtaagctgggacgcctccaggtaccggtccggaattcccgggtcgacccacgcggtctgtgtgtgtgtgtcaatggcggctttaagcatctcactagctttctctgttgattctctcaaaccaacccaatcaacgaagtttggcttctcgtcttcttcacatagatatccattactctactcgtgtaaatctcaccgctccaatctcagattcgctttccctccttcttcagtttcgacagctacagaaactggagaagaaaactctaaatcgaccgggaattacgcgtttctagaggaatcgtttcgtaccgggaggtttttgagtaacgatgagttagagaagcttaaaactcttgaaggatttgcgtattttcaagagcttgaatctggatcgatgtgggttcgagttatgagacatgaagagatggattcaacggtgcatctattggctgagtcatttggtgaatcgatgttattaccttctggtaatcagtctgtgttacggtttttgagtaagcagtactttgtttgagagaagggaagtgttgccacacgcagtcactttggttgggttctttaggaaaaaagttgatgagttttactgatgatgggataggaaggacgctgttgatggcctggaaccttgttgaaggtttggtttaggaagaaaaccaacgccgcttaaatggctttcctccctcgcttttttccaaacctcc

SEQ ID NO: 126379 - DNA, 745 bp, Arabidopsis thaliana
  unsure (1)..(745): unsure at all n locations
actcactatanggaaagctgctacgcctgcaggtaccggtccggaattcccgggtctacccacgcgtgcgaggaaaatttgagattaattcgttcatcactgtcggaggctgttgaatcctgtattgatgccgctggacatgaatttgatgtaactcgtcagagggctctgttacgagcggcaagttatggacaagctttctgcagcaattttcagcgtgaacgtgtccaagagacttgtagaacgttacgggttttaaatgcggctcgtgatcctgctattggcatacctcttagcattcagcagtacaagttactgacaccagtggttttgattagtcgccttattaatgctaattgtcaccttcttgctctgcggatatctgagtacttagatatgaataaagaagtggtgataatgcattgggcatgtgcaaagataactgcttcaccatcaactccagattctcatcttcttgaaattttacttgataagctccaactatgcaaaggaatatcgtatgctgcagtggccactcatgctgataactgtggccgtcgaaagttagctgcaatgctagttgaacatgaaccacgctccacgaaacaggtacctcttttattaagcattggggaggaagacactgctttagtgaaagcaactgagagtggtgacactgacctggtttatctggtcatatttcatatatggcaaaagaggcctcctttggaattctttgcgatga

SEQ ID NO: 126380 - DNA, 840 bp, Arabidopsis thaliana
  unsure (1)..(840): unsure at all n locations
tcccgggtcgacgcacgcgtctgaaacagacgtctgtaaggctgcgaagacgacagaagggggaaacagatcggaaaatcgtcgagagagagagagagagagagaatgtcgtatcttcttccacatctgcactccggttgggctgttgatcagtcgattctggccgaggaagagcgtctcgtcgtcattcgtttcggccatgactgggatgagacctgtatgcagatggatgaggtgcttgcgtctgttgctgagacgattaagaactttgcagtcatttatctggtggacatcactgaggttccagacttcaacaccatgtacgagctgtacgatccttctacggtcatgttcttcttcaggaacaagcacatcatgatcgatcttggaactggtaacaacaacaagatcaactgggctctcaaggacaagcaggagttcattgatatcattgagactgtctacccgtggtgcaaggaagggtcgtgggttggtgattgctccaaaagattactccaccaaataccgttactaatcgggcttcccaacactatctagtttgttaaaaccattgagtctagtgattctggtcacctgaaatatcccgtgaacgggtttcatttcatatatgctttgatgatgattgtgattctggtttttgcttactgtttcggttgttccccatttatgtaggtaactccttgcttcgaacatgattcagtgaaatgaaatttggaagccgttgggtttnnnnnnnnnnnnnnnnnnnnnnnnnnnnnnnnnnnnnnnnnnnnnnnnnnnnnnnnnnnnnnnnnnnnnnnnnnnnnnnnnnnnnnnnnn

SEQ ID NO: 126381 - DNA, 1158 bp, Arabidopsis thaliana
  unsure (1)..(1158): unsure at all n locations
ggaaaaatagcttcatatagagatattttcaacaacttgtccctctctaaactcatccaccttccaaaacagagaaggggaaaatatgacaccggctattttttctccgacgactcttcctccatcaactgctacatggccatgttcaacatctcagaagctcatcaccgttagatcaccactcaagttcaagtgtagagcaacttcatcatcatcgtctatcactgactttgatctttatgacctcttgggtattgatcgaagttctgataagtctcagatcaaatcagcctatcgtgcgttgcagaaacgatgtcatccagatatcgcaggagatcccggtcatgatatggccatcattcttaacgaggcttaccagcttctctctgatccgatctcgcgccaagcctatgacaaggagcaagcaaaactagaagaactcagaggctatacagggaaaccgatatactcggtttggtgtggaccagaaacagagcaacgagctgcgtttgtggacgaggttaagtgtgttgggtgtttgaagtgtgctttgtgtgcagagaaaacatttgctattgaaactgcttacgggagagcgagggttgttgctcaatgggctgatcctgaatccaaaatcaaagaagccatcgaagcttgccctgtagactgcatttcaatggtggagagatctgaccttgctccattggagttccttatgtcaaagcaaccacgaggcaacgtgaggatcggggttggaaacacggttggtgagcgtgtctccaatgtatttgttgatgtcaagaagttccaagaaagatacgctaaagctatgagcagaaccacaaaagagacctcccagagagaagtacaaataagtgcagtagaggcgattacgtccatttccaattggctatactggagattcatcaccgtacacaaaaccactgagtccagattcaaacatgagtctaacttttatcaaaagaaagaaagcggttgatccagatatcagaaagcttcaagatgttgtggcagcgatgaaacaagcagaacaaagcggaaaacccnaagagaaaggatcagcttacttgcttgggagaagattattggagtccatcaaacgcagctcttccctcatctggaaacaacaacggttcc

SEQ ID NO: 126382 - DNA, 367 bp, Arabidopsis thaliana
cttgacttaaaaattaaaataaaacgaaaagggaaagcgaaattgttccttcctttttagccttttaggtcttcgaattctcaattttcttcggtgatttctaaaatctgctttggatttggagaaacaactctgtctatgtatgaatctcgtttcgaatctccggagtttgctcaatgttgcttctcttggcgtgaagtttgttagatgacggatgatgatttctgagaaaccattgggagtggaggagtctatacggcaggatctggaggttttaaccgtgtcaaggaggcttgtgaaaagtgttagccagaagttgaagaaaaagattcataaaactgaggtggtggaagatgaagagattgca

SEQ ID NO: 126383 - DNA, 459 bp, Arabidopsis thaliana
ttcgtccgccctcgcgtccgcagatttcgtgagcttattcttacctttctctcgaaggaagctctcatcttttcactcagatcacgttccctgggcttattcgcttgtatctgttgatatacaagatggcatctgcgactctgagaaggcggcttcatcacggtgatgtagatgggaggaagtatgaacgctatgatgcaacagactctgaaactttaagtgaacccttgttaggaagtagtagtactgataatagtagaaatgagtacattgaggagcgtactctggaggatatttgggaagaagaacggaagagacagcaagttcactggacgttaatcttttctcagttgattgcacagtgggctcagtggatagccaaaatagtctttggatctggctcacttgttgggaggtttctttctctgcctacatttggtcaaataggtactggtggga

SEQ ID NO: 126384 - DNA, 479 bp, Arabidopsis thaliana
ctcgttttaaccccaaaccagaagaagaaacaaaaatcgaaattctcatcaatagcaaaaaaaaaattactcttagattttcctcaaaaaccttaatcaatcgccgggaaaatgaatattccggtgactatttcctccattactgtttctaataacgctgtttccgacaatcgtcgtcatgtttcccgtgaaaatcgtcagcgttaagaaaaccgtcacttatatttttttttcttttcttcttcgtttttgtgaagatgatgatccactgatttgagagtagtagcttgagaggtttttagtagatttcgattttgcgattatttttgtttcctggagagatctcatttttttgccacttccgatgatgaagatccagccgattaacaacgatttgccggcgaatagagtggaatcatcaaccaaaccagtgcttaagtctcgtctcaagcgtttattagatcgaccgttcacgagaa

SEQ ID NO: 126385 - DNA, 690 bp, Arabidopsis thaliana
  unsure (1)..(690): unsure at all n locations
atgatacgccagctctatacgactttcttagggaaagctggtacgcctgcaggtaccggtccggaatttccgggtcgacccacgcgtccgccacgcgtccgtctcgatcaattatccattttgcccagattttttccagaagctcatcgaattcatcgaatcacaatgtttgaaatttggtttcactgttgctgagtgtgtttggaggagaagcttgattggttcggtgtttcactgtttgaagattataagagttatggagaatggtggtcagtatgataatgcgcggttcaagcccgattacttcaaaggtgcacaatctatgtggaatatgattccccagcatcagattaaggaacaacataatgcgttggtgatgaataagaagatcatgtccatccttgctgagagagacgctgctgtacatgaaagaaatcaagctgtctctgctaaaaaggaagctgtccgctgctcgggacgaagcgcttcagcaacgtgacaaagctttttctgagagagataaagctttgatagagaggggtaatgcttattgctggctctttcaacaccatgaaaatagtctcaacctttgcttttgtctggtgggaagtgtgtttgattgggggtgtattgttttggtattnggggncccccccaaacttnaagncttccnnnngtcaacctaattcc

SEQ ID NO: 126386 - DNA, 381 bp, Arabidopsis thaliana
atgttcaatgatgatgtccagggaactgctggtgttgcactggctggactattgggaactgtaagagctcaaggtcggccgatatccgactttgtgaaccaaaagattgttgtggtgggagctggaagtgctgggcttggtgtaactaagatggcagtacaggcagttgccagaatggcaggtatcagcgagagtgaagcaacaaaaaacttttacctgatagataaagatggtcttgtcaccacggagaggacaaaacttgacccaggagctgtactttttgccaaaaatccagctgagatacgcgagggagcaagtatcgttgaagtggtgaaaaagtgaggccacatgttcttcttggtttatctggagttggtggta

SEQ ID NO: 126387 - DNA, 420 bp, Arabidopsis thaliana
cccacgcgtccgaattcaccggcgagagagaatgaatacgccgatgtcactctcggcggcgcgtggccgtatgctaccttttttagagaaggagaaatcagaagaagagtctgaaactctggaatcgagtctcttacagctaatcgacgacaatcgtcgatcatcgttacagctccgggaaaaaaccgagagatcgagaaaggaagcaatcaggcacgcggcgagaacggcggatctgctagtgaaggcggtgaacggaggagtagaggaatgtttcgttaacgagaaacggattgagtcggagattaggaatcttgccattacggtggcgaaattcggcaaacaaacggatcagtggcttgccgtcactcacgccgttaatagcgccgtaaaggaaattggagattttgagaattggat

SEQ ID NO: 126388 - DNA, 407 bp, Arabidopsis thaliana
gaaccacggcttgtgttgtggcttaaacacagaaatggcttctttaccgttcggagtttcgaatctatgcagaaatcaggaggttctgtctgcgtctgtaaggcttcttccggttgggcgacaaaccacaggattcggagctgcgaagaaagtcttatatagattcgagggacatagattgtcatcatcagtagaaaagggagagaaacagagaatgagatgtagagttagctcaaactctactgaaactgaagacgattctgctacaaaaaccaagacgacgccgtttggttacacgaggaaggatgttatattgataggagtgggagtgactgcacttggtatcgggctagagagtggacttgagtatgtgggagttgatccgttgcaagcggggaatgcagtag

SEQ ID NO: 126389 - DNA, 407 bp, Arabidopsis thaliana
ttcccgggcctcttctaccttgggtaactccgtctctccgttactttcttcctccgatcggtggttcagttctccaaagtatctaatctactcctgttgtttcagttctgagagaagatataagttgaatcgcgtgaccggagacatggagactcaaaacaaattgatgaatgaaactaaaagacatgttaaatccagattgtgcagagtttctggttcgatgacggagatgatggaaattcaagctgagaatcccacattccatgtattgtttattccgggaaatccaggagttgtgtcattttacaaggactttttggaatctttatacgagtttcttggtggaaatgcttctgtaattgctattgggcaaatatctcacacgagcaaggactgggagtctggga

SEQ ID NO: 126390 - DNA, 457 bp, Arabidopsis thaliana
tttcgctggagaaatttctaatcaacttaacttttaatttgtgtgggtttgttcccttaacattgttatagattagaattcatcctttgctttgtttatttgggtgtttatctatcgcaggaattagggtttttggtctgcttcgatggatatggatcaagagataggtcaaaattctcctggatttgatggtgaatcagtagtgtcaatgagtaatagaagcaaggagactgaaccagtcccggttgagaatgactattatcgggaaaacggattcaacagtgatggtgatggtgatgatgtgaaggttaatggtgacagaagctccttcactgatttgaatcaactcccggcgattccgccagcttctagtggtcaaggtttgccgtttgcacctgtcgatttcccgagccccggcgatgtttggacttggagagttgggaggagagtgaataat

SEQ ID NO: 126391 - DNA, 583 bp, Arabidopsis thaliana
ctaactgagtccatgttgaatagattctcctatagatgtaaggaaatactcggcttctacatcttaattaagcattacttcctatttctaaatagataggaacctcccggcccttctctcccagacgtgatttttgagacagccttttcatcaattttttctggcaccggtagagcgttagctcgtcggtgccaggagctagcttcttctcaccggtttcctcccataagctctctcatcggtttctctgttttttgtttcgtgttgtttcgtctcttttccctcctattagatccataaagcttcattaccgcacaaccttcgaaactactcccatctggtattagctcttctcttaccttgttcgcgattctcgtggatccctctcctcggctttccttaaagtcaagatcagcaactctttggtcctcaatggatgagagctcggcctcgacgtggaaactgtggaggcttcaaatcacaaaagaatcttcttctgcagaccgagattcatcactcgcacctctcgatgtggtcgttttagtcttagaagccctcaattcggtcaccagaatgttgcatt

SEQ ID NO: 126392 - DNA, 446 bp, Arabidopsis thaliana
taaaggacaaacatataataacaacaacttctcttctttactcgtttctctctctctcttttcttttcttttcttcaagcgcttctttaatggcggctgttcaatgtctcactttcctcttcttgtttcttctccaaaacgcgacgtcagcttcacctctccctctcttccggcggccgatccaaagcaaccacagcaacttcgtgaagcatcctcgccgaagtcaggtggttttcccggtgaatcatagtagttgtgatctgttcgccggcgagtgggtgcgggatgagacttacccactttaccggtctaaagaatgcggccgaggaatcatagatccgggattcgactgccagacttacggcagacctgactccgactatctcaagttccggtggaaacctttcaactgcaatgtccctagattcaatggagtgaagtttcta

SEQ ID NO: 126393 - DNA, 404 bp, Arabidopsis thaliana
ttcgtccgctggctcattattgaagcagcagttggaattgcagttatagtgcgtgtatttgttaataagcagaccatggaaactgaaattgtcaatagacttggaaatagtttctctcgtgcacctttggcggcagttgttggtctttgcactgctgttgccattttcgcatgttttccactgggtgaacttctctttttccacatgcttctcattaaaaagggaattacaacatatgagtatgttgtggcaatgagagccatgagcgaggcgccagatggagcatctgttgacgaggaaattcagaatgtgctctattctcccactgggtctgctacaaccggctttagtggtggaagctctctcggtttaccatacaggggggtctggtgcactccacctag

SEQ ID NO: 126394 - DNA, 526 bp, Arabidopsis thaliana
  unsure (1)..(526): unsure at all n locations
acatggagtctccaaaccaaatcaacgacaattgaatccacaccttcacgaaaccccccaaagtttttgtctttttcggtttcggattacatcatctccaagacaagcaccagcatcagattttctgcatccttaaagatctcgttgcggtttttgtcggaattgtttcgatttgttgtggttctcaataagctctcgcttgtcagagaaacaccggcaacgccgttgaaatagtcaccggagaccattttgcatcgtagagttcgccttttatggcgttcacgtggggatctgctctccggatttctgttctccttatccttgtagctgcaattgtcttagcttgttattttctccctgttgagaagctattgaaggattttttgttatgggttgaacaagatcttagggccttggggaccttttgccctagctgttgcgtacattcctctaacagttttggctggtcctgcctgggttaaggtcggtgggggtacnttttggggtgcaantggtttttnggggg

SEQ ID NO: 126395 - DNA, 392 bp, Arabidopsis thaliana
agaccacgcgtccgctgaagcttctactggggaatcgatgaagctcttgcatctgatattcttattagctttgactactggaatctctgctgttctaatctacattatcggcgtctctaatctctacgagtctaatcgttttaccaatgaagatttagaggcgttgcagtctttgcagaacggattccagaagtgcgtaagtgcaaatggtttgggactacaagctgctatgggtagagattattgcaaagtttctataaacttccctaaggatactgtccccaaatggaaagatcccaagtctggagagcttgaaggattgtcatatgagtttgacctgtgtgaagcagtaactacatgggaacaagtcaggaatagctctacaatactca

SEQ ID NO: 126396 - DNA, 262 bp, Arabidopsis thaliana
gagatagaccaccgggtagaaagactagagtatgcaggagttatggaactcgcatctgacgtgcagttaatgctaaggggagcaatgcaattctatgggttttcacatgaggtgagatctgaagcaaagaacgttcacaatctgttctttgatcgattaaagatgtctttcccagacacagatttccgggaaccaacgaatgccctttccgtttctggctcagccccaactttggtgtctacaccaaccccaagaggaccag

SEQ ID NO: 126397 - DNA, 962 bp, Arabidopsis thaliana
  unsure (1)..(962): unsure at all n locations
tctctacgactcactattgggaaagctggtccgcctgcaggtaccggtccggaattcccgggtcgacccacgcgtgcgcggacgcgtgggttgtccggtaaggctcggaggaaaacctaattcgtccggagaatctccacctcactctcgccaaacgcatctctgttgtagcttgtgatggatccaacacagaacacaagtgcagggattggtgggagcaatggtacaatcagatatcaaaccaatgatgggacttcaactgtgaccgttgctgatgattcaaaggagaatctttcccaagtcataaactctattgagaaaactttaggagtccttcatcagttacaccttaccgtcacttctttcacacccgcgtctcaactccatctcctccagcgccttaactctcttgtgatggagctagataacatgactaagttgtctgagaaatgcaacattcaaatccccatggaggttcttaacttgattgatgatgggaagaacccggatgagtttacgaaagatgttcttaatagctgcatagctagaaatcaagttactaagggcaagactgatgcttttaaggatttgagaaaacatattctggaggagcttgaacagaatttccctgatgaagtcgatatgtatagagaaatccgtgctagttctgctgctgaagcgaaacggttggcgcaatcgcaaagtgtgttaccaaatggggatgcaaaggtcaagaatgagctataagagcccaaaggatcctttttatgtttaccttgtactcttgtagaatataatgactgagtcgatgaatgtgatgtaacacgaacaatcccaagtggaatttctaataatatctgttggttctcttcaaaaacaccaaaaaagagnnnnnnnnnnnnnnnnnnnnnnnnnnnnnnnnnnnnnnnnnnnnnnnnnnnnnnnnnnnnnnnnnnnnnnnn

SEQ ID NO: 126398 - DNA, 423 bp, Arabidopsis thaliana
ggcatgtcactctgttgataaacaagactgatctggataatgctccacctggtccaaaggttgttcttgcttccatggctagtctcgaagccggttttgctcgagagatattcgtggagtgggcaaatgatcccacaaatttagtcctctttactgaaacaggccagtttggcactttagctcgtatgcttcagtcagccccacctccaaaatttgttaaagtcaccatgtctaagagggttcctttggctggggaagagttaattgcatatgaggaagagcaaaacagactgaaaagggaagaagctttgcgagctagcctcgttaaagaggaggaaacaaaagcttcccatggatccgatgataattcaagtgaacctatgatcatagataccaagactactcacgatgttattggttctc

SEQ ID NO: 126399 - DNA, 315 bp, Arabidopsis thaliana
cccacgcatccgtccacattgcataatcagcctttattaccctatcaggaatgggacattgacttctcagagctgactgttggaactcgggtggggattggtttttttggtgaagtttttcgtggagtatggaatgggacagatgttgcaatcaaattgtttctggagcaagatcttactgccgagaacatggaagatttctgcagtgagatatcaattctcagccgtgttcgccacccaaatgttgtactacttttgggtgcatgcacaaaaggtccacgcttagccatgatcacggagtacatggatctggga

SEQ ID NO: 126400 - DNA, 484 bp, Arabidopsis thaliana
cggacgcgtgggtgctgatggaaattcttgtacatgtgctgaggatgaaagtggcgtctcgaaacgccagcaaattaggactgaagttgtacagactggtaaaagagcatctaatttagcagctggactagctggaagtatattaccagtagaggctggtaaaccgctggtggtcccaaagacggttgagcatttcacccggccatcgcttcttccgcaacatgtttcctctcctgctttgccagggaaagcagattctgtaaatcatgcttctgctattattaaagaagacgtgggggtacctattggtgatcagatattcaaggctggtgtaaagtcttcaaatgtgaaagtcatcagaagagagcaccttgctaaagtctatcctaggtccgctgaccgagttcctataaacagctctccaggtactaagcaagcttcaaatgacgttgctgggaagtcgtttgaagctcatgatttactc

SEQ ID NO: 126401 - DNA, 580 bp, Arabidopsis thaliana
gcttaagggatacaaaagtttcagacagtgtgctatgtgaattccccggctctaccttggaagcacttgatatttcaaataccacggtcagtcattcattcgttagttatagtattatatatcttacttccacaggacatagccacattcatgtgatgctctgattcagtagtccatagcacgcgtccggccccactgcttggagatttttacagatatcttggatggctcttgctcgtgtaattagcagaaatcctaatctaaaaaccctcaaagccaggggatgtaaaaatctactccaattagaagttgacggcagaactgacaatttctctccgttggtttctggtcaagaggtgtttaaatgtttaagcaaggggagtggattggaggagcttgagattggttgggggttttcttatttctcttttgagtctttgagacctgcagcttcgttcctacgagttataagtgtgggtttgggtgcttccttaggtgaagatgttttaaagcttctaccttcaacttgtcctttgctagagtctatcgtcctccattttcaggaaatatctgattctgc

SEQ ID NO: 126402 - DNA, 438 bp, Arabidopsis thaliana
gcgtgggcggacgcgtgggcaaaccgtcttctcatctctgcctctggatttaactctcccttcacagttgcatagaatcttctgtcgccggcgaattgttcaaatcgtcggagtcgaagaaactgctccctcttttagtcaattctcgcttcactccctcaatataatgcgatttctcaaccggaatatctgaatctctcggtggttacctctgatatatcgccaggaactgaactcctactcgatctctatcaacaatgccgtccttgtagaactttggatccaactctctgattccgtcaatttccattaatatcagctcagcgaaggaactttgagtagaagaagataatgtcacattcatgggatggtcttggggagattgcgtcagtggctcagctgactggtttagatgcggtcaagttgattggtctcata

SEQ ID NO: 126403 - DNA, 687 bp, Arabidopsis thaliana
  unsure (1)..(687): unsure at all n locations
cttcacaccgaacttgaatctactccaccgagttcttcaagcttgcatccgttaacaccgactccacaaacgctgtcttaccgtgttaaggaagagttgtgtccatcttcctccttgccaagtcctaaaggccaacaaccaagagttgaggttagattaagagaaggaaaggcagtgaacatacacatgttctgtggacgtagaccaggtcttttactttccaccatgagagctttggataacttaggattggatgttcaacaagcggtgattagctgtttcaatggttttgctttggatgttttccgcgctgagcaatgtcaagaagaccatgacgtgttacctgaacaaatcaaagcagtgcttttagatacagcaggttacgctggtttggtttgattgcgaagcagaaggaagcatctgtgtggaacagagctagatctaagtccttgttctgttttagtcagcaattttcttacttagtttcatcaatttcaatcatgtatggaagatgataactgttttattttagctatgagaacatgtgtttggggaacaatagttgcaacctttgagcaaaatgccattgtttctcaataaaaaaaaaaaaaaagnnnnnnnnnnnnnnnnnnnnnnnnnnnnnnnnnnnnnnnnnnnnnnnnnnnnnnnnnnnnnnnnntgtaccta

SEQ ID NO: 126404 - DNA, 512 bp, Arabidopsis thaliana
agaaatgattgtagttttattgttggaaagccagtcgaacactcgggagttttggcatcttcttcaggactctttccacgcccttggtcaggtacatcaactacgtcagatgtgctgcagaaatttgtcctcttggggacagtggtagcaaaggctttacaagatggacgagtcttagaccttccactttccaaagccttctacaaattaattctcggacaggagttgagttcatttgacatccacttcgttgaccctgaactttgtaaaacactggtggaattgcaagctctggtacgtaggaaaaagcttttcgctgaagcacatggtgattccggagcagccaagtgtgatttaagtttccatggaacaaagattgaggacctttgtcttgaatttgcattgcctggctacacggattatgatctcgctccctattctgcaaatgatatggtaaatttggataacctcgaggaatatatcaagggtattgtcaatgccacagtatgtaa

SEQ ID NO: 126405 - DNA, 323 bp, Arabidopsis thaliana
tccgaagaacttcaacggcgagctcgggaaattaatactctccgacgatttgattcgttaaccaggctttgtataattaagggttagtttccaatcttgcaatggtgtctagtagtgaagttcttagcctatgtcgtgccttgcttcgagcgggacgtcaattccctgattacaacattagggagtacagtaagcgaaggaccttggatggcttccgcatgaacaagaatctcactgacccatcgaacgtgactgacgcttatgctgaagctaaaagacagctttttgttgctgagagagtgctcaaggtttacttggcatat

SEQ ID NO: 126406 - DNA, 323 bp, Arabidopsis thaliana
cggacgcgtgggacgatgaacagggtgctcgcaaggaatcttaggacaagtgtctgtggaacaaggattttgcagaggacttgttcgactgttgtgacacatgatgtttctacttcttgttccaatgagagcaatgcattaaataattccactgacgatggtccacaacatgacattgctattgttggtggtggaatggttggaatcgctttagctgcttcattggccagcaagccattgacaaagcacttgaatgtcgctattattgacaataatcctcttttggggagaagaaatatcatagagaaagggcatcaacctga

SEQ ID NO: 126407 - DNA, 562 bp, Arabidopsis thaliana
  unsure (1)..(562): unsure at all n locations
ggacctgnccttttnaaaccctaggcccgattccctttagttccctcaaggagaatatagaagacttgcctgacaagtgcgatgttgtctttgacgccattgggatgtgtgataaggcagtgaaggtgattaaggaaggagggaaagttgtggcattgactggagctgtcacgcctcctggttttcgattcgttgttacatctaatggcgatgttttgaagaaacttaacccatatattgagagtgggaaggtgaagcctgtggttgatcccaaaggaccgttcccattctcacgcgttgctgatgctttttcatacttagaaacgaaccatgccacagggaaggtcgttgtttatcccattccttaaggggctggcttgagtgtagtagcctttatctatctatgtgtataagcatagcaagtgttatcttctctttgtattaatgagggtggaaataaaagtaaatgctctttaaagcttgaaaacgtggacgaacgcatggatcggccgctctagaggatcccaggttacgtacgcgtgcatagcactgtcataaattt

SEQ ID NO: 126408 - DNA, 447 bp, Arabidopsis thaliana
gggaaggtccaaagcagtttggttctttagcggagtacacggccgtggaagagaagttattagctttaaaacctaaaaacatcgattttgcgcaagctgcagggcttccgttggcgatagaaaccgctgatgaaggtttagttaggactgaattctcagccggaaagtcaattcttgttcttaatggtgccggaggagtagggagtcttgtgattcagttggcgaagcacgtgtatggagcttcaaaagtagctgcaactgcgagtacagaaaagctagagctagtgagaagcttaggtgctgatttagctattgattacacaaaggagaatatagaagacttgcctgacaagtacgatgttgtctttgacgccattgggatgtgtgataaggccgtgaacgtgattaaggaaggagggaaagttgtggcattgactggagctgtca

SEQ ID NO: 126409 - DNA, 520 bp, Arabidopsis thaliana
  unsure (1)..(520): unsure at all n locations
atgtcagtgagctcaatgcttatgatgtgaggagtctcactcattaggctccggagggtatgctgtgtatgattgtggctggatatcatgtgtgcacatgtgagcggatatcactatgactcaggcaagatctaataccattatttatacgagatgttagtacgctccatataggggtacctggtatgcctggaggaaccggtcgtcaattcacgggtcggcccacgcgtccgcttgagatgactgaaaaggaagtagaaattttcttctaggagagacattgaagtgaagaagactttgtcactctgtaattttgcaccattagttgttgtttcattatttatgacgttgaaatgattcaagcgagagataaaacatttgttgttccttacggtgagatttaattttaattcaaggaagttttcatgaaaaaaaaaaaaaaaaaaaagnnnnnnnnnnnnnnnnnnnnnnnnnnnnnnnnnnnnnnnnnnnnnnnnnnnnnnnnnnnnnnnnnnnnnnn

SEQ ID NO: 126410 - DNA, 536 bp, Arabidopsis thaliana
  unsure (1)..(536): unsure at all n locations
cnnnnnnnnnnnnnnnnnnnnnnnnnnnnnnnnnnnnnnnnnnnnnnnnnnnnnnnnnnnnnnnnnnnnnnnnccacgcgtccgatcagtggtataaatttgatgatgaacgagtaaccaaggaagatttgaaaagggctttggaggagcaatatggtggtgaagaagagctaccacagactaatcctggtttcaataataaccctcctttcaaattcacaaagtactcgattgcttacatgcttgtatatatccgagaaagtgacaaagataaaataatctgcaacgttgatgagaaagacatagcagaacatttaagggtgaggctaaagaaagagcaagaagaaaaggaagataaaagaagatacaaggcacaagctcacttatataccataattaaggttgcaagagatgaagaccttaaggaacaaattgggaaggatatatattttgatcttgtggatcatgacaaagttcgcagtttccgtatccagaaacagacaccatttcaacagtttaaggaggaggtagcaaaa

SEQ ID NO: 126411 - DNA, 517 bp, Arabidopsis thaliana
tagggcacactataaaaaactatgacgtcgcatgcacccgtccgtaagctcggatttcggctcgagcaagtctctctaactgggagaggagatagaagacatctcatcatcaatctccggatccaatccaattctgcatcgactcttcagagttttattgggtcattggagatttttttcggttgaggatggctaacaatgaggagcatcctcctcgagggaatgaatgggaagtcgtctcgctcacttcatcagcttatgctgctgctcctggtccgtataacgttgaatcaagagatgtgcgcaagtatgatgcttactatggagcggaaacttcacgtgatctgtacatgtctgaacactttgtattcccacctagtgagcatgagaatttacccattgatgaatctttattcgtggcggagcaaagaaaggatggccgagacttgatgctggaaggtcagggattgtctgatcagtttcattatgaagctggaaacaaccaacagagtatcta

SEQ ID NO: 126412 - DNA, 512 bp, Arabidopsis thaliana
actatagggacagctggtacgcctgcaggtaccggtccggaattcccgggtggagccgcgcgtgcgatctctatattcttcttcgatctaaccaccgccgatgaatcgccgatgattttccctcttagctactcttccttaccaccgcgaccgcgagtcgaggattttcgccgccggcgccttcatcaatctcagctccctggcgcgcacatgaaactctacgatgacctcctctccaacggctactacactacacgattatggattggaacaccaccacaagagtttgctttgattggtgatactggaagtactgttacttacgttccttgctctacttgtaaacagtggggggaagcatcaggatccaaagtttcaaccagagttatctactagttaccaagccttgaagtggaatcctgattgtaattgggatgatggggggaaattatgtgtctaccaaagaaggggtgcggaaatgagttccagtagcgggggttttgagggagggt

SEQ ID NO: 126413 - DNA, 544 bp, Arabidopsis thaliana
  unsure (1)..(544): unsure at all n locations
nnaccactcacctgaggggaagctactacgcctgcaggtaccggtccggaattcccgggtcgacccacgcgtccgcccacgcgtccggcgaagttggagaagattgatggaaagccgaccgggagttttggtcgtcggatcctctggcgtcggcaagcgcaccctcctctctcgattgctctctgtggaatttgaggattcatcggagtcatcatctcatacagaagttcatggctggacgattaacactaagtattacactgcggatgtttctgtatgtatatcacatatttgcgatgaatactctctacccaatctccctaactcacatccactggtggcgttagttatggtcttcgacttgagtgagctgtcaacccttgttgctcttcaagactgggtttctcatactgacatcaacagttttgatatattgttgtgcattggtaacaaagtagatcgtgtccctcatcaccttgctcatgatgaatatagacggcgccttttgaaggcatcagacccctctagagatctgtattcggac

SEQ ID NO: 126414 - DNA, 449 bp, Arabidopsis thaliana
gaattattaaaaaaaaaaaaaaaaacacattgtcatatctctggtcccatatgtgatatgtcaccgtccttctccatcgccaccaccgtctcaccggcttctctagccgggactctggcctcgaactcaaagaatgttttgtgtagtttacattcaaagaacaatgatattaccaagacaaataggaatctgaagtttagagcttgttctgtttctggagggtataacaacaatacatctgtggacaatgtaccttttcctcgtgattacgtcgagctcattaatcaggccaaagaagcagtggaaatggctttgaaggatgagaaacagttaatggtgagttttgttgcaatggtctgttttaaaatggatgtacgaaaacacgttatttttcgtgatccaaaggaacccttttacaggaaattgagttcccaacatctggtctagca

SEQ ID NO: 126415 - DNA, 422 bp, Arabidopsis thaliana
aagaagaagaaaaaaaaaaaaaaaacgaactacgtaagatgacgaagacgaagaaacaaagataaaggctttagatttagctgcaggggaggtggcggaacaaaaccctaatcctaattttccccgaatatgccatttttgaggattgtgagacttctcttacctggaatcagggttttgattagaagatctctaatttggttgttgtagatgcatctccgtgaaatcattccctcttggatctaccagttatttggttgcatgggaggttgttttggatgctgcaataaaccaccgcttatagttgcagtggatgagccgtctaaagggttaaggattcaaggtcgtttagtgaagaagcccagcgtatcagagggacttctggagcacaagcacctgcgagatggataatagtacacttc

SEQ ID NO: 126416 - DNA, 436 bp, Arabidopsis thaliana
tctctaagtctctctatactttcatttctcgtttcataatattaggaaacttgttagtgtttaaggaaacaaaaggaagaagatgaagtatgtggttgtttcaggaggagtagtgagtggactcggcaaaggagtcacggcaagtagcatcggactcatcctcaaatcctgtggcttccgagtcaccgccattaaaatcgatccttacttaaacattgatgctgggaccatgtcacctattgaacatggtgaagtttacgtcttggatgatggtggcgaggttgatctggatcttgggaactatgagaggttcatggatattaagctgactagtgaaaacaacatagctactggaaaagtttataagcatgtgcttgagaaagagaggagaggagattatcttgggaagactgttcaggttgttcctcatattact

SEQ ID NO: 126417 - DNA, 529 bp, Arabidopsis thaliana
  unsure (1)..(529): unsure at all n locations
gaaagctggcacgcctgcaggtaccggnccggaattcccgggttgacccacgcgtgcgggcacgcgtacgcgaaaaaacaatggagacgccacttcttgtgggactcgaactacgttgtcctcctcatctcttcaacactcactctcgtccctcttcatctctctccattcccgccttatccttacgaatcctcacgccgacggcggcaacgacatcttccgctgttattgaattaccggcgaacgtagcagaagctcctcgttccaaacgccattccaattcatacctggcgagaaaatccgccatttctgaagttcaacgctcctcggattttctctcttctctgcagagattagcaacagttttgaaggtacaagatttgaatgtaattttgcgtgattttggaatctctggaagatggcaggatcttatacagctctttgaatggatgcaacaacatggaaagattagtgtttcaacttacagtacctgcataaagtttgttggtgccaaaaatgtcttcaaggc

SEQ ID NO: 126418 - DNA, 975 bp, Arabidopsis thaliana
  unsure (1)..(975): unsure at all n locations
ttcctcacacgatcaaaaagatagttcaaatttttctttaaagcttaagaaaccactcagtggaaaccaagactaattaaggctaatggtttctcgacaagaaggaaccctctactctagaaagagggatttcacagtctgtggagaagagtttcacaattcattcaagaagagcaaacaagaagatcaatcacagagcactctgttcaatgaacgaccaaaatcggagagtatgagatcaattacctttgattttgaacttcatctccacactcctctaccatcagattggcaaactaagggatattcaagaacatctgatgagcatagggcatatcccaaagatccagtgatttttggacaacctaagatgagcctagaccttgagctgaacctttcaccttcaggttcaccttcacgaaccacaacgaagaaatatgaatcctcctcaattcacaatgaaacagtatcatcatcaaagattaaagttttgacgaacacaagtaagaagagcataattgggacaggactaagtcgatcaccatcctggctagcgtttgaaggtggtgatgataacgatgttgatcacaaggggcaagagatggtaacaacagtttgcatgaaatgccacatgctggttatgttgtgtacatcaactcctgtttgtcccaactgcaagttcatgcacccacacgatcacagctctacaaaactgtttaaaccatcaaatttgcttaggcttctatgctaggctctttcaaggttactgaatctataaaatttgtacggcagataataagccaagagactagatatggacaaagttatgtatatactaaaagtaccagaaagtttgtattaattctctgcttctatgaacggcatgcttaggnnccaaccatancnggatttggaccggcgggatcccggccaaaggtgggggngcctngaaccnangcccccanggtccatncc

SEQ ID NO: 126419 - DNA, 396 bp, Arabidopsis thaliana
gtcgaaaatcaccaacccgattataccatctcttttagtctctcatctctacttctctaagctaaccgaaaccttttggtgggaatcgtcgaaagttttcaagacacctgaattgcatgtatgttgagacaaattccaacctgcaaaggtgggcgctttacacgagttttgcaatctatcggatcagttattagagaattttcagcatctgcaaatgctttgcaagactgttggaaaaatgggaatgaaagtaaagagattgatgatgttcacacacttttcagatattgcactaatttgcaatcagccaaatgtctccacgcacgtctcgttgtctccaaacaaatccaaaatgtttgtatctctgctaaacttgttaatctctattgttacctt

SEQ ID NO: 126420 - DNA, 644 bp, Arabidopsis thaliana
  unsure (1)..(644): unsure at all n locations
nnnnnnngttctagatcgcgagcggccgcccgcgatctaggacaaaaaaaatgcagatcttcgtcaaaaccctcaccggaaaaaccataaccctagaggtcgaaagcagcgacaccatcgacaatgtcaaagccaaaattcaggacaaagagggaataccacctgatcaacagaggttgatatttgctggtaagcagcttgaagatggtagaacattagcggattacaacattcagaaagaatcgactcttcacttggtattgaggcttaggggtgggactatgattaaggtgaagactctcacagggaaggaaattgagattgatatcgaaccaaccgatactattgatcggattaaggaacgtgttgaggagaaagaaggtatccctcctgttcaacaaaggctaatctacgccggaaaacagctagctgatgacaaaacggcaaaggactacaacatagagggaggctctgttcttcatcttgttcttgccttaggggtggttttggtcttctctgagaagtaactctttgtatggcttgttggagttcatgggaaaaaagtgattgcaatttggatatgatactttgaatattatgctgtttcactgggtttggatcattttaccaataatctgttaaat

SEQ ID NO: 126421 - DNA, 547 bp, Arabidopsis thaliana
  unsure (1)..(547): unsure at all n locations
gccaaaagaagacgagagaaggagaagagtcgaaatcgccattgaaatggctctcaaagcttcacctgttaccggattattccctcctctccgtcctactgcttcttcttccccttcgacttcttctaatcgcccttgttccctcaggattctccctctcagaacatctttcttcggtaactcaagtggagcgctgagagtgaatgtgttgagattagcttgtgataatagactcaggtgcaatggtcatggtgctactatgaatctttttgaacgattttctagagtggtcaagtcatatgcaaatgcgctcataagctcttttgaagacccggagaaaatcctggagcaaactgtcattgaaatgaatagtgatttgacaaagatgcgtcaagccactgcacaggttttagcatcacaaaagcagttacagaacaaatataaagctgcacagcagtcttctgatgattggcacaaagggccaattggtcttcaaaggggttggggntttcccgnngggccttaaagngaaantttggtgaaagga

SEQ ID NO: 126422 - DNA, 585 bp, Arabidopsis thaliana
  unsure (1)..(585): unsure at all n locations
nnnnnnnnnnnnnnnncagctctctacgactcactattgggaaagctggcacgcctgcaggtaccggtccggaatccccgcgtccgcccacgcgtccccttcaaatcttcatctctctctccatctctcttctccacaagaagctgagtatggatctcctcacaccactcatcttcctcctcctcctcctctcaccattttcactctcagatgctggttccatcggagtaaactacggccgaatctccgacgaactcccctccgcattcaaagtagtccaactactaaaatcccaaggaatcacgcgagtcaaaatcttcgacgcagacccatcagttctcaaagcattatccggatctggaatcaaagtcaccgtagatctccccaacgagttactcttctccgccgccaaaagaacttccttcgccgtctcatgggtcaaacgcaacgtagcagcttatcatccttcaacacagatcgaatcaatagctgttggtaacgaagtcttcgttgatacacacaacactacaagcttcttgatccctgcaatgagaaacattcacaaagctcttatgagtttcaatc

SEQ ID NO: 126423 - DNA, 527 bp, Arabidopsis thaliana
gttttaatctctttttaagacaacatataatgtcaattgtatgtacgtttttcttgtttctcttaaacacttcttttgcgtttgcatttgcgattcctaaaccgccaatagtaaggagactatcaacgacagtgacatcaaattcaacagcgtcttcttgctcagccaatggaaatccaatcgatgagtgttggagatgcgacgaaaactggaaggacaaccgcaaaaacctcgcggattgcgcggttggattcggacgcgactcaattggcggtagagccggggagttctacacggtgactgattcaggagacgacaatcctctaaatccaactccaggtacattacggtacgctgcgacacaagatcaacctctatggatcatttttgatcgagacatggtaatacaactaaaacaagatctttaagtagcttcatacaaaaccattgatggtagaggaaataacgtacaaatagcttatggaccgtgtttaactttatataaagttagtaacattattataaac

SEQ ID NO: 126424 - DNA, 483 bp, Arabidopsis thaliana
  unsure (1)..(483): unsure at all n locations
ctatgaaaaanttactgctccaggtgggatcagttttgaggatgggattgagaacattgacattggtggccctgctatgattagagcagctgctaagaaccacaaagacgttctcattgttgtcgattcaggagattatcaagctgttttggagtatctcaaaggaggacagagcgaccaacaattccgcagaaaacttgcgtggaaggcctttcagcatgttgctgcatatgattctgcggtttcagaatggctatggaagcagactgaaggaaaagagaagttccctcccagctttacagttccgcttgtacttaagagttctcttcgttacggtgaaaatcctcatcaaaaagctgcattttatgttgataagagccttgctgaagtgaatgccggtggtatcgcaacagcgattcagcatcatggaaaggaaatgtcatacaacaactatcttgatgctgacgctgcatggaactgtgt

SEQ ID NO: 126425 - DNA, 434 bp, Arabidopsis thaliana
gttggttttgagctaattgaagaccctatttgatcttaagaagcaatcagcttttagtttaagcatctagaaacttgaattttgcgaacctttttggacgcacacaagaacttaattcgattcagagagataatggattttaaaggtataaaatgggttgggaatgtttatcagaagtttgaagcaatgtgcttagaggttgaagaaattatcgtgcaggacacagcaaaatatgttgagaatcaagttcagacggttggtaacagtgtcaagaaattctgttcagatgtggttcacgacttgctgcctgatgaatctgtagattcgggaaaacctttgcccgtttctatgttacatgaatacgcccctgtttattctttcaaaaaaaaaaaagatagtatgaaccggaaaactaaagatgtgacacaagagca

SEQ ID NO: 126426 - DNA, 382 bp, Arabidopsis thaliana
ggctgaattaagcggaactcgatgccattttgctgtgaaagtcatggataaagcgtctcttgaggaccggaagaagttgaatcgagctcagaccgagagggatattctacaactattggatcatccgtttctaccgacattgtacactcattttgagactgacagattctcgtgtttggtcatggaatactgtcctggaggtgatctgcacactctaaggcaacgtcaacccgggaagcatttctcggagtacgctgctcgattttacgctgcagaggtgttgctagcactagagtatctccacatgctcggtgttgtttacagagacttgaagcctgagaatgttctggttcgagatgatggtcacataatgctttcagac

SEQ ID NO: 126427 - DNA, 484 bp, Arabidopsis thaliana
cccacgcgtccgcccacgcgtccgcttttaaagaagcaatattttttgtgttttgttttaagttttaacacacaaacacattacctcgaattcgatacgtcatagtaattagcaactatggaacgatgtcgttctggtcatcatcgcatcatttcttattatctctcttcttcgttgatactattttggtgtattttcgttctcgtgctgttatctacgacaagtactacaaatgctttagtgaaaatcccgaaaaacacgaccgttccggcggtaatagtgttcggtgattcaattgtcgatgccgggaataacgacgacatgataacagaagctagatgcgattatgctccctacggcattgattttgacggtggagttgctacgggaagattctctaatggcaaagtccctggtgatattgtagcggaagagctagggattaaacccaatataccggcatatcgaaatccgaatttaaaac

SEQ ID NO: 126428 - DNA, 454 bp, Arabidopsis thaliana
aggtgcgattgtgatggcatttgctccggctccttgggttatcatcgttggaagaatctttgttgggtttggtgttggtatggcttcgatgacgtctccgttgtatatctctgaagcttctccggcgaggattagaggtgcacttgttagtaccaatggtcttctcatcactggtggacaattcttctcgtacctcatcaatcttgcttttgtccatactccgggaacatggagatggatgttgggtgttgcgggagttccagctattgttcagtttgtgcttacgttgtcgctacctgagtctccaaggtggttatatagaacggacaggattgcggaatccacagcgattcttgagacgatttacccggctgacgaagtggaggcggagatggaacctttgaaactgtcagtggaggcagagaaagcagacgaggcaatcattggggatagc

SEQ ID NO: 126429 - DNA, 683 bp, Arabidopsis thaliana
  unsure (1)..(683): unsure at all n locations
gagcctcatagtttaagcaacactntttggttaaagaataaagattagatcggtccaattnatatatttacatgtnccgccattatcatcttctaatttgaaaactcttcatcattccctaccaccggattcaatggcggcgaaaattcccggagtgatcgctttgttcgacgtcgacggtactctcacagctccaaggaaggaagctactccagaattgctcgattttatccgagaattgcgaaaggtcgtcactattggagtcgtcggtggatctgatctaagtaagatatctgagcagcttggcaaaacagtcacaaacgactatgattattgtttctctgagaatggtcttgtcgcccataaagatgggaaatccattggaattcagagcctgaagctgcaccttggagacgataaactcaaggagttgataaatttcacgctgcactacattgcagacctgggtattccaattaagagggggacatttattgaatttccggaatgggattgcccatggttcacccattgggcggaactgagccaaggaggaaggggttgaattttgggggttttgntanggtcaaanntccggcccaaggttggngnttacctttgggggngggtttanatntaccctnnttnnaaattggggcananaggtngttgntncctatttc

SEQ ID NO: 126430 - DNA, 866 bp, Arabidopsis thaliana
  unsure (1)..(866): unsure at all n locations
gcgtccgaaaagaggcaaatgacaaaacagcgagtgcttcagagaacgagctcaagctggaggaaaaacaaaacatgcgaaccgaattggaaatcgctgctgcttcagaaaagttggccgagtgtcaagagacgattctaaacctgggaaagcagctcaaggcattgactaactcaaaggaaacagctttactttcagaaacactcatgtacgacgttacagacaaatcgaacaacctacctgatgcacaaccttcacatgagactactaaaccagagaagagattgaccagccagagatcatctcttttggatcagatgaaggcagaagatcacaacaccggggaatccaaggatcagaaaccgcaagcagcagataaaaacggaaagggaggaaacagctctgtttccaatgaaaccattgaggcactagaacagattcttctctcagacaaaagcaaaggctccgactcaaactgctttgccattgttcctcagaaaaagaccggcggagttaagagcctctggagaaagctgttggggagaaataagaaaggtaagagcaagaaggtccctaatccatttgccaactaagaagatggtggcatctgtcatctagactataatctaataccttaatcctgtttctttatatggtcccaaagacccaaactatgcaaactaaactgtcattttctagatttttttggcagtatatatataatctccacgtagagtattactctataagatgatcattctgcttaaaaaaaaaaaaaaaaaaaaagnnnnnnnnnnnnnnnnnnnnnnnnnnnnnnnnnnnnnnnnnnnnnnnnnnnnnnnnnnnnnnnnnnnnnnnnnnnnnnn

SEQ ID NO: 126431 - DNA, 780 bp, Arabidopsis thaliana
tctgcggtaccggtccggaattcccgggtcgacccacgcgtccgaagaaaccgaggaagaacgatctcagtgagaggacgatcacttcgccgtcgcagtcatgggtcgaatgcatagtagaggtaagggtatctcggcatctgctttgccgtacaagcgttcatctccgagctggctcaagacaacccctcaagatgttgatgagtccatctgcaaatttgcgaagaagggtttgaccccatcgcagattggtgtcattcttcgtgactctcacggaattccacaggtgaaaagtgttactggaagcaagattctcagaattttgaaagctcatggtcttgcacctgagatccctgaggatctgtatcacttgatcaagaaagctgttgctatccgcaagcatcttgagaggaacaggaaagataaggattccaaattcaggctgattcttgtagagagcagaatccatcgtcttgctcgttactacaagaagaccaagaagctcccacccgtctggaagtacgagtctacaactgcaagcactcttgtggcttgagaagaatagagttgatcatgtccttcaagaaggaccatttcattgtctgcattgcaactcaaagctcttcttcttttgaacctatgtatctgttttcgctagttttgatgggttacaacttgctatgagattttgattttagggaacgaatttgtttatgcgaaaaataaaaaaccctatttattaaagggcggccgctctaaaggatccaagcttacgtacgc

SEQ ID NO: 126432 - DNA, 465 bp, Arabidopsis thaliana
  unsure (1)..(465): unsure at all n locations
tgtttncccctggnacccctggggttttatcacttggtcaagaaagctgttgctatccgcaagcatcttgagaggaacaggaaagataaggattccaaattcaggctgattcttgtagagagcagaatccatcgtcttgctcgttactacaagaagaccaagaagctcccacccgtctggaagtacgagtctacaactgcaagcactcttgtggcttgagaagaatagagttgatcatgtccttcaagaaggaccatttcattgtctgcattgcaactcaaagctcttcttcttttgaacctatgtatctgttttcgctagttttgatgggttacaacttgctatgagattttgattttagggaacgaatttgtttatgcgaatctttccattatcgttacagcttatctttcaattaacgttaataaaaggtttcagagaatttttccaaaaaaaaaaaaaaga

SEQ ID NO: 126433 - DNA, 551 bp, Arabidopsis thaliana
tgatctccagctctcatacgactcacttaggaaactggtcgcctgcagtaccgccggaattccgtcacccacgggggcgggcgcgtaaatcagtttgtcctccttgaatcaaacacgacgttcactggcttgcctaagcctcttgtctttgctgctcaccgagatgagttcaagtttattgagtcacgcttgacttatggtactgttggtggaagatttgtcaaagggcagaatccgttttacgaagaggcgtatcagcgggtagctcttgatcagcttctgagaatcgctgggattactgatgatgacttgttgttaatgtctgatgtcgatgagattccaagtagacacaccattaaccttttgagatggtgcgatgagatcccgaagatacttcatctgcgcctcaagaactatctttactcgtttgaattccttgttgataacaaaagctggagagcttccatccacagatatgagacgggtaagacacggtatgctcattatcgacagtctgatgaaatcttggcggatgcaggatggcattgtag

SEQ ID NO: 126434 - DNA, 308 bp, Arabidopsis thaliana
ggaggaaatattttttatatttccattttcagatgatgaagaaaatggacccgtatctgggcgctcactgaagttttcgattaaaggtttggtggaaaaatccccaaagaaaagcatggagttctgggaaacactcttcaagtaaaaagcatgctagtaaaaaaggtagtcacactacgttggagcctgaagttcatcaggagattggatctgagagacgccgactaggtggtgttagaattgataatgtgggttttcagataaacgaagaatcggacgttaattcttctgtaactggaatttgctca

SEQ ID NO: 126435 - DNA, 764 bp, Arabidopsis thaliana
  unsure (1)..(764): unsure at all n locations
caaccggaaagtattgtccaagacattgataatatggtccggtcttatgttgaaaggccgaattgcatcatattgggtagttctccancaaatcaagatattgctacctcagatgctataaaacttgctagagaagttgatcctacaggcgaaaggacttttggtgttgcaaccaagcttgatatcatggataaaggaacagattgtctagatgttcttgagggaaggtcataccgtttgcaacatccctgggttggaattgtgaatcgttcacaagctgatattaataagagagtcgatatgattgctgcacgtagaaaagagcaagaatattttgaaacaagccctgaatacgggcacttagccagtagaatgggatcagaatatctagcaaaactcttgtctcagcacttagagactgttatcaggcagaaaatccccagtattgttgctttgatcaacaaaagcatcgatgagataaatgcagaacttgataggattgggagacccattgcagtagattcaggagcccaactttacacaattttggaactctgccgggcatttgatcgtgtctttaaggagcacttggatggaggacgacctggtggagaccgaatttatggagttttcgaccatcaattaccagcagccttaaagaaacttccctttgatcgacatctgtctaccaaaaatgttcagaaggttgtttcagaagcagatggttatcagccgcatcttattgctcctgaacaaggatacag

SEQ ID NO: 126436 - DNA, 258 bp, Arabidopsis thaliana
aagtgtctagaaatttaaaattttatttttattataattattctattttaaaatttaacagagaaattaatgaaaatcaaaaatattttaaattggccggtaaacaatttgcgttcgaatttaaatctttcacgaatcaaactatttttgacaaaatctcaatccgaatcttagcgtctttttcaatattgacggttactttttcacatttcaaaatctcaatattaacggtccttatagacttttaccaaatccacc

SEQ ID NO: 126437 - DNA, 538 bp, Arabidopsis thaliana
gatactccagctctcatacgactcactattagggaagctggtacgcctgcaggtaccggtccggaattccccgcgtccgcccacgcgtccgattagagtggagtggagctttgaattggatgatcattatccatgtcgattctacttaggccgtcgtcctctccttcactctgttcttctctcaagcttttccgattatcctctccggattctttaatcgacgcagctgtcctcaggaacaggacaaagccgtcgcagtcgtttcgaatggaggtcgtttcgagtaattccacgtgtctttctagtattagcgtcggtgaagattttccatcagaatatgagcagtggctaccggttccggatccagagagcaggagaagagctggcgttttgctacacccgacgtcgttttcgtggtcctcatggcattggtgatctcggagaagaagccttccggttcatcgattggcttcattctactggttgctccgtttggcaggttcttcctcttgttcctccagacgaaggaggatctcct

SEQ ID NO: 126438 - DNA, 920 bp, Arabidopsis thaliana
  unsure (1)..(920): unsure at all n locations
nnnnnnnnnnnnnnnnnnnnnnnnnnnnnnnnnnnnnnnnnnnnnnnnnnnnnnnnnnnnnnnnnagagagaagaaaagtttctctctttggggttctcggccgcccaaaatcgagatcgcatcataatcttaaatctctcttctttctacgaattttcatgtttatgttccctctctcttgattctccaccatttcactattcacatattttttttttattgataaagttttctcctttttttgagttttacgagaggatttttcaaaggtctaaactttcttgggatctatcagattgtcttgaaactaatgcttacgggttttaacaggttgattgattgatcataccaccatggatatgcatcatctctgaaccaatggggaaacatttctgacatttaatggatcctcaagctttcattcgtctttcggttggctctcttgctttgagaattcccaaggtccttttaaactctacttcaaaatctaatgagaagaagaacttttcttctcaatgctcttgcgaaataaaactacgaggctttcctgttcaaacaacatctatccctttgatgccgtcccttgatgcagctcctgaccatcacagtatttccactagcttttatcttgaagaatctgatttaagagctcttttgacacctggatgcttctatagtcctcatgctcacttggaaatctcggttttcacgggtaaaaagagtttgaattgcggtgttggtggtaaaagccagcagattgggatgtttaagttgggggtaggtcctgaatggggggaaggaaaaccaatgattcttttcaatggtgggatcagtattgggaagaccaagcgggattgtcctcaagggttcattnaaagggaggttnncccancccgnnttttcaggttgggggtncnnc

SEQ ID NO: 126439 - DNA, 277 bp, Arabidopsis thaliana
ctccgcggacgcgtcagtgttcttcttcatttgctctcttcttcatcaatctctctctttttgtaaacggcgattttaaaatggttgatgcaaaacaagttcgtttcatcatcggagttatcggaaatgttatctcctttggtctctttgccgcaccagcgaagactttctggaggatcttcaagaagaaatcagtggaagagttttcgtatgtgccgtacgtagcaacggtggatgaattgtatgttgtgggtgttttacggtctccctgtggttc

SEQ ID NO: 126440 - DNA, 609 bp, Arabidopsis thaliana
  unsure (1)..(609): unsure at all n locations
nnnnnnnnnnnnnnnnnnnnnnnnnnnnnnnnnnnnnnnnnnnnnnnnnnnnnnnnnnnnnnnnnnnnnnnnnnnnnnnnnnnccacgcgtgcgcccacgcgtccgtacggctgcgagaagacgacagaagggggatcaacaaacaaacacatcacaattctcgaacttcgccggagaatgatggaaacagctctgctccggtactgcgtcaacttttccggtcacaagaaaatctctgctcatcaaagaagtaatagtgagattccgaaaacgagtccgggaggatgcgaagacgagtggtgtgctagggttttgagtagaagatcggtaatggcgtcagggttggtctcctcgacgacggctttagcatttccaagggaaggattggctgtcgttaaacaaggtcttctcgctgggagagttcctggtctgtccgaacctgatgaagaaggttggagaacataccgtagaccagacgagaagtcaggagggcatggtgttggttggagtcctattatccctttacgccttttcggttcctcaagattggaatgaggtacctgtatcgatcgctgatcttggtggcaccgagattgacttgagatttg

SEQ ID NO: 126441 - DNA, 655 bp, Arabidopsis thaliana
tttttggtggccatatgtgcattctttggacgacttcttaatggttctcgcccgtcttgctccatttgagaggggaatatacgaggattacgtggcaaatttctggtgcactacttccatactcataaaatggaaaaatctgttcacaacacaatccctcaagtctatcagcttagctgcaactatattggcttctcttccttcaatggttcaacaaatcttgtcaccaagcaatgaaggtttcctatatggcttgctcaacagttcaatggctttctaggggttttccttccaagtgcatgagaaatcaatcctgatgccttttctctccgcaacactattagctctcaaactacctgaccatttcagtcatttaacctattacgctctcttctcgatgttccctcttctttgccgtgacaaactcttgatcccttacttaacactatcttttctcttcaccgtcatctatcattcacccgggaatcaccatgcgatacagaaaaccgacgtttcatttttctcctttaaaaacttcccgggttatgttttcttactacgaacccatttcttcagctccgtagttcttcatgtcctctatcttaccattaaacctcctcagaagtaccctttcctattcgaagcactgatcatg

SEQ ID NO: 126442 - DNA, 561 bp, Arabidopsis thaliana
  unsure (1)..(561): unsure at all n locations
ccgcgaggccgcggctcccccgcccctngggggggtagtatcgccgggcatctatacgactcatatagggaaagctggtacgcctgcaggtcccggtccggaattcccgggtcgacccaggcgtccgtatggcttcttcaccagtgtccagatttgttggatttggtcatcatactattctcaggtatgataatgatcaacgtcttcgtcgtggttgttcttggactggaattgaaaagaagatcccttttcctcggtagaggcagagttagtctcacgagatatcggctgtcacttggttcaagttcttgaagctgtaaatacagttctcttcgatctgagaggcttcaagaggacatctattactttagacccggagaattcctaccttcactctgtacttaactgtagatgcagcactgcgtttctgattagtcgaatatacattgaagtttgtaagcgcctgaatgtaccaattgtgggatctccagttgggggaagattttctggatttggcctaaaacggagtatcctagaggaacttctttaaaggcaccttcg

SEQ ID NO: 126443 - DNA, 473 bp, Arabidopsis thaliana
  unsure (1)..(473): unsure at all n locations
ctgcggtaccggtcccgaattcccgggtcnacccacggtccggagatcagtctgatccgagtgagacagactctgaggagctattgcagttagatggaaagagtatatctgagtgggtgagtgaaatagatgcaatttccaaagaagtagaggcagagttagtctcacgagatatcggctgtcacttggttcaagttcttgaagctgtaaatacagttctcttcgatctgagaggcttcaagaggacatctattactttagacccggagaattcctaccttcactctgtacttaactgtagatgcagcactgcgtttctgattagtgtaatatacattgaagtttgtaagcgcctgaatgtaccaattgttggatctccagttggggaagattttctgatttggcctaaaacggagtatcctgaggaactctttaaagcaacttcaggccagagcttgtcctctattgttaat

SEQ ID NO: 126444 - DNA, 320 bp, Arabidopsis thaliana
aaccacagtgaatataaatggagttttcccgtcaacatatcattgtgtgacacctgatactgcaagtgtgctggatgttacatccgaacaactagtgcctaacggtatagctattcaagctgatgttttccaatctgatcaacaccctgagacgatgggtagacgccacaaagcgtcaaacaagttggttgatggaaaatatcacgtcacactttctgatagcgacgatagtagatctcagaggtcacgcaccgacagtgagagacattctgaaactctacgtaccaatggagatgcgggacctatgacattaagacaat

SEQ ID NO: 126445 - DNA, 740 bp, Arabidopsis thaliana
cccacgcgtccgctcgcatagctgaatcagcaaaacatgaccgtaatgcaattctgcgagcaagatgttgtgaatatgcattgttaacacttgaacattggcctgatgctccagaaattcaacgatcagttgatttatatgaagatctgattagatgctgtgttgcagatgctatgagtgaggtgcgggcaactgctagaatgtgctacagaatgtttgcaaaaacttggccggatcgttctcgccggttgttttcgtcctttgaccctgtcattcaaaggctaataaatgaagaagatggtggaattcataggagacacgcctcaccatctgtccgtgagagacattcccagccttcattttctcagacgtctgctccttctaacctacctggctatggaacatcagctatagtcgctatggatagaagttcaaatttatcatctggaggatctctttcttctgggttactcctttcgcaatcaaaggatgtcaataaaggttctgaacgtagtctggaaagtgtgttacaatcaagcaagcagaaggtcagtgcaattgaaagtatgctccgaggactgcatatatctgatagacaaaatcctgcagcccttcgttcaagtagtttggatctaggagttgaccctccatcgtctcgtgatcctcctttccatgctgttgctccagcatccaatagtcacacaagtagcgcagctgctgaatcaacacatagtatcaac

SEQ ID NO: 126446 - DNA, 467 bp, Arabidopsis thaliana
ctgcagggaccgggcccgaattcccgggttgacccacgggtccgggaaggagtaatcctgttgctgcaacagctatttcaaccattcagtcgatgccactctcgggatttggaaacagcaatgtttcttcgttttctagctatgatgatgggttttcttcgcagaagtctgctgagtctgcacccctaaactaccagctctacagttgggaaaattttgagccagtaggtggtatgctacctcagccagaatggacggcatgggaccaaacagttgaatactgtgcttttgcttatcaacaatacatggtcatatcgtccttgcgccctcagtatagatatcttggtgatgttgccattgcacatgcttctggaggctgtttggcatcccagaccagctgtttggggctcccccaacccccattggatgtggtttttgggatgccggaagtttcccaaatttttttt

SEQ ID NO: 126447 - DNA, 267 bp, Arabidopsis thaliana
cttcttcataaattgtttcattgtttgctctgtcttgttgcgttctaggttttgtttgttctgtctacctctgtaatttctctgttttgctctctagggtctttttaatttgatgctaattacattatttttgcttctaagtggatgcaattagattattattttcatagaatgtaatgatttcttcggagtaacagcttgtttagttgaacaaatggttttgtggaataagtatttgattctttggccttaaagttaatctctttt

SEQ ID NO: 126448 - DNA, 533 bp, Arabidopsis thaliana
  unsure (1)..(533): unsure at all n locations
nnnnnnnnnnnnnnnnnnnnnnnnnnnnnnnnnnnnnnnnnnnnnnnnnnnnnnnnnnnnnnnnnnnnnnccacgcgtccgcccacgcgtccgaagattttgatgtggttgatcttgacccatatggtgcgccgtctattttccttgactcagctgttcaatcagttgccgatggtggtttgctgatgtgtacagcaactgacatggcagtgttatgtggagctaacggcgaggtctgctattccaaatatggctcttatccactgaaagggaaatattgtcatgagatggctttgaggatcctcctcgccagcatcgagagccatgcaaatcgctacaagcggtatattgttcctgttctatcggtccaaatggatttctacgttcgtgtttttgtccgcgtctacaacttcggcgagtgcaatgaagaatactccactaaagctctcatatgtctaccaatgcattggttgtgattcctttcatcttcagtctgttggaagatctctccctaagaataacagtgtgagata

SEQ ID NO: 126449 - DNA, 282 bp, Arabidopsis thaliana
ctcatttatacagtcttccaaaggctcagtatatctctgtttgcaaggatgggaagccatttacattttctagcagatccgggaattctcaaggtcaatcagcgacaaaggatctgttgccgggagcaggcgaggctgttgatactaaatgtactgcacgatcagctaataacgacttgaaggatggaatggttactacaccacacgaaaaggctacagattccaagaaaagtggtaccgagtcaaactctcagccaattgtaggagactcaagctatgaaa

SEQ ID NO: 126450 - DNA, 404 bp, Arabidopsis thaliana
aacataaatgctgaatgtacttcgaaattctaacctgacccttgccgttttgatttgctttgtcttgatagcttcaaagctatgttccgtcgattcctctgtgtatgacccacacaaaaccctgaagcagcggttcgagaagtggcttaaaacccacagcaaattatatggaggaagggatgagtggatgctacggtttgggatatatcagtctaacgtccagttgattgactacatcaactccctccacttgccctttaagctaacggataatagatttgcagatatgaccaattctgagtttaaggcccattttctcgggttgaacacgtcttccttgaggttacacaagaagcagagaccagtttgtgacccagcaggcaatgtcccggacgctgtggact

SEQ ID NO: 126451 - DNA, 351 bp, Arabidopsis thaliana
accagtgaagactacaatgtggcgccggagcttcagtacattaccgaagaagaaatgggacgcggtggtgatcggaggtggccacaacggattaacagccgcagcttacctagcacgcggaggtctctccgtcgctgttctcgagcgccgtcatgtcatcggtggcgcggcagtgacggaggagatcgttcctggattcaaattctcacgctgcagttaccttcagggcttacttcgtccttgtatcattagagaattggagttaggtagacatggacttaagcttttgaagagaagtccttcatcgtttacaccttgtttagatggacgttatcatctgcttggacctga

SEQ ID NO: 126452 - DNA, 1067 bp, Arabidopsis thaliana
  unsure (1)..(1067): unsure at all n locations
gctttgacacgggcctcctcaaacaaaaacaaaaaaacctagcttctctcacaaaacgcatgcaacaacatcgaaattaagaatcaatcaaagcttcttcgttcgatcacactagaaagaaagatggcaacgtctggtgcgatttcaggagctactgtctcttccttcttcaccaaaactactactacttcaaacccatctcccaaactccattcctctgcttctcttttatcacagaaaactgtgtttcaaggagtttcgttggaagattcgaagaagagtgtatcagagatcttcgctgtctccgagagaaagatcggagggttaaatgggttgagaagattcgaaatcaaagcgagagcagcagcttctaagacaatagaggttgaagtagataagcctttgggtctgactctaggacagaagcaaggcggtggagttgtcatcaccggtgtggacggaggagggaacgcagcataagcagggcttaaatctggagatcaagttgtgtacacaagcagtttctttggagatgagctttggcctgcagataagcttggctttactaaaactgcaattcaggcaaaacctgattctgtctactttgttgttagcagaggtgcagaagttgatgttaagaaactaaataagcgtccggctcctccacggtttggaaggaagttaactgagactcagaaggcaagagctactcacatttgtcttgattgtggattcatatacactttacccaaatcttttgacgaacagccggatacatacgtatgtcctcaatgtatagcaccaaagaagaggtttgcaaagtatgacgtgaacacaggaaaggccataggaggaggattgcctccaattggtgtcattgttggcttattggccggtcttggagctgttggagctttgcttgtctatggtcttcaataaatttttcttaaaacntttataatcgctataaaacaagtccgctttgtaatngcaaaccaagaatgnatgttgatgacatcaacttgagagttaaattatgtaaagcattttccgatnccccccctcct

SEQ ID NO: 126453 - DNA, 618 bp, Arabidopsis thaliana
  unsure (1)..(618): unsure at all n locations
atactgataaggagacagacgacgtttttgcttgtaaatcgattttgaagaagaagctgaggacagctgttgatattgaagatgttaggagagaggttgagattatgaggcatatgcctgagcatcctaatgttgttactttgaaggagacttatgaggatgagcatgctgttcatttggttatggagctttgtgaaggtggtgaattgtttgataggattgttgctagagggcattatactgagagagctgctgctgctgtcactaagaccatcatggaagttgttcaggtgtgtcataagcatggggtaatgcacagggacctgaaacctgagaacttcttgtttggaaacaagaaggagactgcacctcttaaggcgattgattttggtctctctgttttctttaaaccaggcgagaggtttaacgaaatcgttggtagtccgtactacatggctcccgaggtgctaaaaccggnaattatggtccagaaggttcatattttggagttcanggtgtaattcttttncaaactncnaatgggggngtccccncttttntggggnanaancttnacaaagggggnttcncaaagcaaattattcgatcntttncnng

SEQ ID NO: 126454 - DNA, 651 bp, Arabidopsis thaliana
  unsure (1)..(651): unsure at all n locations
cccacgcgtccggggttatggcctgagattgctcgaggatgtacgagaggggcaattcctaattgaatatgttggagaggtgcttgatatgcaatcctatgagactcgccaaaaagaatatgctttcaagggtcagaaacatttctatttcatgacactaaatgggaatgaggtaatagatgctggtgcaaagggaaacctagggcgtttcattaaccatagctgtgaaccaaactgccgtactgaaaagtggatggtgaatggtgaaatttgcgttggaatattctccatgcaagaccttaagaagggtcaagagttgacatttgactacaactatgtgagggtttttggtgctgccgccaaaaagtgctattgtggatcatcacattgcagagggtatattgggggagatcctctgaatggtgatgtaattattcaaagtgattcagatgaagagtatcctgaacttgtgatccttgatgatgatgaaagtggagaaggaatcttaggtgcaacatctaggaccttcactgatgacgctgacgagcaaatgccacagagctttgaaaaggttaatggttacaaggaccttgctcctgataatacccaaacacagagctcagtatctgtaaaacttncagagagagaaat

SEQ ID NO: 126455 - DNA, 653 bp, Arabidopsis thaliana
tacgactcacctgaaggagagctgctacgcctgcaggtaccggtccggaattcccgggtcgacccacgcgtccggccacaaaaccctaaaaaatgggtggaagaacggacgaaagtggcggaggaggtaaagagaaagaggaagagcaagatggtttgtccgtacactctccctgtaaagctttaccttcctccgcctcctctctctccaaggagcagtcacaggttgaattagagctaaggttattagaagcccttgaaatctatcctcctgttaaactccgagggatacatcgccactttgttctttatggtctgatggagtatctcggaagaagctttgaccgaccgttcactgcggatgaggttctgcagctactcgatcgtttttacaacattgagatgctgaaatcagatgatgaggacatagacattctgaatcacgaggaagactttaccttgccgcagagtttctttgataaggaagaagaatgacagaggaagaagaaaagatgttttcttttcattcatcttctcccatctttttgtatatggttaggttttgtcttcagctcttatgataagcttttttctatatattctgaagttttaatgtcaataaaaccatcaggatcaatgaataatctttttgtt

SEQ ID NO: 126456 - DNA, 469 bp, Arabidopsis thaliana
cttaatttctgctcaccatcaaggcaagtttccttcttttgatcctcaacaatttccattgctactaaaaatatcttctttccaaaacaattcacgcatttacgtttttctcaatctttacatatatggtaaccaactcttattccattcctctgtaactcacacaaattcctgtccaaaaattagttttttcttttcatgtgatgtgagaatttgggttacgagaaagatgaagactattagtggattaggtattgggttaagtttaatgtttgggtttcttctattagcacttgttggagaagtctactatcttctaagatgtaagaagcacaagaagagagtcataagccaagagagtgaagaagagaaagaagaagaacaacaacaaaacggatacgctaaagaactaatccagctcttctgcttcaaaaaacctcaatctctgcagcaaaacaatggaggaaga

SEQ ID NO: 126457 - DNA, 228 bp, Arabidopsis thaliana
gatgtgtgggagagaggctgagacatttctggggattgatggagatgaaaggagataaagagagttttcagatgtaattaagagaaaacagatcttttggattttagggtttatatccaacaaaagctaaccagagactaataattcaagattggtgcttcggaagaagacgcagaagtgtattttcttgcagttgcaaaactgttacgaaatttttaaagttttcct

SEQ ID NO: 126458 - DNA, 287 bp, Arabidopsis thaliana
gaagacagatatggctgatatggttccaatcgccgccatgaacgaagaccttctccacaacattctcttgagattgccggcaaaatcgtttgctttcgcttcatgtgttaaccgattctggagcagcgtctgcaatcgaattctctctcgccccagaatgatatctgctttctctcgtagtcctgatcaacttagagctggagaagaagtacttgataaggttttgtctgagccaattcgaccacagtttgtgatcgcaaacattacatgtgggaacatggaagaaa

SEQ ID NO: 126459 - DNA, 674 bp, Arabidopsis thaliana
  unsure (1)..(674): unsure at all n locations
taatacgactcactttagggaaagctcggtacgcctgcaggtaccggtccggaattcccgggtcgacccacgaatggaggtagcagcagcgactgcgacgagcttcacaacgcttcgagctcgtacgtcagcgattatcccgtcttctacacgtaatctgagatctaaaccgagattttcttcatcttcatctctcagagcttctctttcgaatggctttctttcgccgtataccggaggaagcatctctagtgacttatgcggcgctaagcttcgtgcggaatcgcttaatccgttaaatttttccagttccaagcctaaacgcggagttgtcactatggttatacctttctcaaagggaagtgcacacgaacaacctcctcctgatttggcatcatatttgttcaagaaccgaattgtatatttgggaatgtctctcgtaccttcagttactgagttgatacttgcggagtttctttaccttcagtatgaagacgaggaaaagcctatttacctttacataaactcgactgggacaaccaagaatggtgaaaagttgggctatgatactgaggcttttgcaatctatgatgtcatggggtatgtcaaaccaccaatctttactctntgcgtcgggaatgcttggggtgaagctgctttgcttctgactgctg

SEQ ID NO: 126460 - DNA, 565 bp, Arabidopsis thaliana
gggactttcactctttctctctctctgctacataagaagaaatggaggtagcagcagcgactgcgacgagcttcacaacgcttcgagctcgtacgtcagcgattatcccgtcttctacacgtaatctgagatctaaaccgagattttcttcatcttcatctctcagagcttctctttcgaatggctttctttcgccgtataccggaggaagcatctctagtgacttatgcggcgctaagcttcgtgcggaatcgcttaatccgttaaatttttccagttccaagcctaaacgcggagttgtcactatggttatacctttctcaaagggaagtgcacacggacaacctcctccctgatttggcatcatatttgttcaaggacccgaattgtatattttggggatgtctctcgtacctccagttactgagttgatacttgcggggtttctttaccttcagtatgaggacggggaaaagcctatttacctttacataaactcgactgggacaaccaagaatggtgaaaggttgggctgggcctctgaggcttttgcaatctatgatgt

SEQ ID NO: 126461 - DNA, 459 bp, Arabidopsis thaliana
ttcgtccgcggtcgcgtgggctgaagtgttggctcatctctttccagattccggcttcgaaatttgggagataagcgatggcaaacgccaatggaaaagctgcgactagtttaccggagaaaatctcggctaaggcgaatccggaggccgatgatgctacggagatcgctgggaatatcgtctaccacgccaagtacagtccacatttctctccattgaagttcgggcctgagcaagctctctacgctaccgcagagagtcttcgcgatcgtctcattcagctgtggaatgagacttatgttcattttaacaaagttgatccaaaacaaacttattacttgtcaatggagtatctccaaggtcgtgctttgaccaatgccattgggaatttgaaccttcaaggtccatatgctgatgcactgcgtacgctgggttatgagcttgaggagatagctgagc

SEQ ID NO: 126462 - DNA, 886 bp, Arabidopsis thaliana
  unsure (1)..(886): unsure at all n locations
gaacaggaagaagatagagaacagagctcttcgatcttttttcctccaaggaagaagtagaaagatgggatttcatgttcttagacctcccatagctttacgcagctctctcctcggcttcttatccaaatcacacaatcctcttctccccgggagatgggttcaagctggagaatgcagtaccatgagatgttttgcttctgctactcgtggcaaaaacaaaaaacagagactagatgaggcatgtgttgaaaggtttaacgaatacagtcgcacactaatacaatcgtggattatgcaaggcaaagttcttgtggatgggagaagagttattaaagctggaatgcctgtatctactactgcagctataaagatcacagctgaggttccaaaatttgtatgtagaggtggactcaagctggaagctgcacttgagaagctagatgttgatgtttctgagaaagtagttcttgatgcaggactttctactggagggtttacggattgtttgctacgttatggtgctgctcatgtttatggcgtagatgttggttacggtcaggtagctgacaaaattcgcaatgataagaaagtgactgttatagaaaggacaaatctgagatacctcccaggactcccacaaaaagtcgatgtagtgacgcttgacccctctttcatttcccattcttaagggtgatgccagctatttatgaatgtaatgaaagaagatgcggctttagttacccttgttaaacccccaattttgaagctccgaaggcaaccaggtcggggaagggtcgcatagtgtgggancccccgtcatccggggtgttgggttctttgagaaggtgattaaccgggtttttagcnccttttgggttttncc

SEQ ID NO: 126463 - DNA, 722 bp, Arabidopsis thaliana
ttccgggtagacccacccgtccgccttgagaagcatgttataatggaaggaggagagaagattgagatcaaattcgccagcaagatccacatgaggatttgtttggaaggagggtatcatgtgcttgatgagtctacacattacagtagtgacctaagaccaactgcaaagcaactgtggaagcctaacatcggtgtgcttgagctaggggtcttaaatgcgaccggtttaatgcccatgaaagctaaagaaggtggtaggggaaccacggacgcgtattgtgtggcaaagtatgggcagaaatggatcagaactcggacaattattgacagctttaccccaagatggaacgagcaatatacttgggaggtttttgatccgtgtactgtagttacagttggtgtgttcgataactgccatctacacggtggtgacaaaaacaacggaggaggaaaagattcaagaattggaaaggtgaggataaggctctctactctcgaggctgatcgagtctacacacattcatatcctcttttggtgctacatcctagtggagtcaagaaaatgggagagattcacttagcggtgaggtttacttgctcttcattgctcaacatgatgtatatgtattctatgcctttcttcctaagatgcactacctacatcccctcaacggtagccaggctcaaaacttaagggatcaagcaactcaaattgtgtca

SEQ ID NO: 126464 - DNA, 717 bp, Arabidopsis thaliana
cacacgcgtccgcacaacactctcacaatatgatcccttatccaaccgtagaagatgcgtccgtggcgttaggacgaaaccttacttggttcgagacggtttggttcgattactcagccaccaaatccaatttccatgtatattgccacaccattctggttctcttccttgtcttttcactagctccttttcctcatgtgattgtcgaatggaccggttggttcgatcagtttaagattcagaagaaggttaagtattcgttgtctgatatgttccaatgttatcaagaagtcatgaagttgttccttctcgtcgtcggcacattgcaaatcgtttcttatccttccatccagatggttgggattcgaagtggtttgccattaccatcgttaatggagatagtagcacaattagtggtttacttcttgatagaagattacactaactactggatccatagatggatgcattgcaaatggggttacgagaagattcatcgaatccatcatgagtacacatcacctatcggatacgcatcgccgtatgcgcattgggccgagattttgattcttgggattccgacgattcttggaccggcaattgctcctggccatataatgacgttttggttatggatatctttacgacaattcgatggcgattgatacctacagcggttatttttttccatggtatgtgtcaaaattatttccattt

SEQ ID NO: 126465 - DNA, 388 bp, Arabidopsis thaliana
ctcaaagagatttcggtcccatgcatgagtgtttttgatgttggtggaaacagcttatcgggtgtaatccctgattttctcaacagtaccacaagccattgtcctcctgttgtttactttgacaggttttctattgaatcttacagcgacccgtcgtctgtttatctctccttctttaccgagaaggctcaagttggaacttccctgatagatcttggaagtgatggacgtccggccgtgtttcataattttgcagacaacaacttcactggtactctcaagtctataccacttgcacaggagcggttgggaaagcgagtctcttacatattttctgctggagggaatcagttgtacgggcaatttccgggaaatctgtttgataact

SEQ ID NO: 126466 - DNA, 414 bp, Arabidopsis thaliana
accacgcgtccggttgaacactgctagttctggtaataacagattgagtggtgatagttatgtattgtgctcttctgggtttcatgaacatagaggttatgctgataaatatgagttcttggaatcaaaaccactttgctctcaagatggcttctttgattacctcaactttgtttctgttctggtgtctggcttccatctgaatgtggcattcctatgatcagatatcttaaaatgggaatcggcaaaacggaaatcaatttcatgagattactttcagctgcacctaatcagcaaaaccagtctaagcttatgcattatgttgctactttgagggaacagttggaacaactctcggaagagaagacccttgaagggcttcccagagttacaaacgctaaggtgaatgagtac

SEQ ID NO: 126467 - DNA, 461 bp, Arabidopsis thaliana
ctggcacgcctgcaggtaccggtccggaattcccgggtctacccacgcgtgcgcgtccgccttgtccgattctgcttcacctctgcgcattccttgtctgatcctcgcaggaaactctactgtcagcaataggttgatgggttctgcagccagacagcctctcttctcatttggtgttattgctgatgttcagtatgctgatatttctgatggccgctcttttttaggtgttcctaggtattacagaaacagcatccttgtccttcaaagagctgttgaaacttggaaccaacatgggaacctcaaatttgttattaacatgggtgacattgttgatggcttttgtcccaaagatcaatccttggctgccactaagaaactagtccatgaattcgagaaattcaacgggcctgtgtatcatatgattgggaatcactggccctaccatctcccccgcaaaa

SEQ ID NO: 126468 - DNA, 393 bp, Arabidopsis thaliana
aaaatgccaacaaatcaaattttgtcaaaatggaggccaaaacattttttctcttcatgcttttcatcttttctcagtcttggctctcaacttctaaaaggatcctaaacaatccctctgttttctcatcgtctttgaatttttcgagtggtaatgcagagagacttataaaatcattcaatctaatgcctaagtatgacgttaatgtcatcccaaaaggaagccttgatgctccaagactcattgagagacacattgattttctggcgacagccggttccacaaacgcttccgttggtccttctgttcaagagtttggccactacgctggttattacagccatcctcattcataatcagccaagatgttctatttcgtttttgaatcacgga

SEQ ID NO: 126469 - DNA, 386 bp, Arabidopsis thaliana
cccatttcccattttctgctaattttctttcactttctcggctgattttcctgggaaaatactctttatctaaacgtcctaaaacactactcaaaaacgaatgttttttttatgttataacttatatttgtgtgactattttgatataactattattgcagatctgtggatcttaacacttctctaatgcttataatgacgagatctaagcatgagaaggaagagataagaagctcatgacaagaatctgaagaaaattaaatttgtttttcacttatcgccgccattgttgttctacactgagcttagacagttgacacctgtaatccaaaattcaaaaggttatcactgcaacatactcaggctttttacttaattatcatagc

SEQ ID NO: 126470 - DNA, 454 bp, Arabidopsis thaliana
cttcaatcaaaatcatgaacattttaagttctcgcttggttggacttgttccaatgctgatcaaaattgatgctgcgaattccttgattgaggattatgccgcctgccttgagggacgacttgaagagggtgaagttgtagagaacagttgtgatgatctaggggtccttattatgcagcttctggttgataatatcaaccggcctgccccaagtatcacacatttgcttctgaagtttgatcttgatgcccctgtggaagggacagttttgcagccgaagtttcactacagttgtctgaaggtcattcttgaaatgctggagaagcttccaaaccctgatataaacttcttactctttgagtttggcttccaacttttgtgtgagttgaatttggatccactaactagtggtccaaccatggatctattgagcagcaaaaaatatcagttttt

SEQ ID NO: 126471 - DNA, 386 bp, Arabidopsis thaliana
tgttgctctgccattggtccacagaacaacagaacagtgttagcacttgcaagcagaattgggatcaactatggaaaattaggcaacaatcttccttttccttaccaatcaatcaacctcatcaaaaccattaaagcaggccacgtcaagctctatgacgccgatccagaaaccctaaagctcctctctacgaccaatctttacgtcaccatcatggtccctaacaaccagatcatctcaataggtgctgatcaagccgctgctgataactgggtcgccactaatgtccttccttttcacccgcaaacccgaatccgattcgtcctcgttggcaacgaagtcctcagctacagttctgatcaagacaagcaaatatgggctaatct

SEQ ID NO: 126472 - DNA, 744 bp, Arabidopsis thaliana
  unsure (1)..(744): unsure at all n locations
acgtgtcacatttttccctctcttctctctctttcgctctttcttcttccccgcagttcccggagacgacgccggaggaaaatcgtacggaaactttgcttcgacttcacgtggccgctccacgaagcgcctttgggtttcgtcttccccgtttctctttctctctcttcttttgcctttgttaccacgaatagaacgagaggagagagataggaggagagttttgggatattggtggagagcgattatcgggagagccagagaaaaaaataagcagcttcttcctccctcatcgttgggaccgtgacttttgttttcttcagctttaagcaaacaaaaaaaaaagatgaccggcgttggcgagaatcagcttatctccattcaacctgatgaactcaaatttctctttgaacttgagaagcaaagctactgtgatcttaaagttgccaataaaacagagaactatgttgctttcaaggtgaaaacaacatctccaaagaagtattttgtaagacctaacactggtgtcattcagccatgggactcttgcatcattagagttactctacaagcgcaacgagagtatcctccagatatgcagtgcaaaggcaaatttntcctgcaaagtaccattgtaccnccacacacttgttgtgggctgaacttcctcaacggcacttttcacccaagggctagtcgggaaggcctttaccaggttgttagnttcaaaggcctcttattttt

SEQ ID NO: 126473 - DNA, 254 bp, Arabidopsis thaliana
cgaaagacttaaaatcaacgagctcacggggatgtcggccgtttcaatctccgccgtcaaatctgattttttcaccgtcgaagccatagccgttacacaccatcggacgccgcatccaccacatttcccttcgctccggtttccactagcgctcaagtccccgccggctacttctcgtaaccttgtggctggatcaaaactcctccacttctcgcgtcgtcttccttctatcagatgctcatatactccgtcgt

SEQ ID NO: 126474 - DNA, 855 bp, Arabidopsis thaliana
  unsure (1)..(855): unsure at all n locations
gaaagctggcacgcctgcaggtaccggtccggaattcccgggtctacccacgcgtgcgcgcgctgttgcttcttcgaagaagcaaccttctctgttagatgaacactttgaagctgtatcagatgatgacgagaacagtgattctgatgcatcacagccttcagatgacgaggccgacgatggagacgcaactaggccaagcaagaaagcgagaactccgaagttgtatgaagtgaaagatgagcggcatgccgcagcttatcacaaccgcacttcactggctaaagaagatagtcttcctatgggcgagcgtgtcaaggctatagagaaccggcgtggcaactttggaggctcgaaagatatcaaattcggtcctggaggatcacgggagttttctttcaaggcgagagggtcatcaaagtacaaagaagatagagacgatgagtatgaagatgggcaaagaaacaagaggagaggagttcagtctcttggactgaaatcaacaaatattagaggcggtttcaaaggtagaggaggtggtggttttagagggaaaggaggcgccggttcccggggaaaaggtgcccgtggtggtgggcgtggaagaggccggcaatgataaatgtagcttttcaggggctttattagatttgaaaaatgtgtcacccactattgagaatcttgaaacttaattgatcacatatacaattttggaatatttttgacctggtcttcaatcagcacaacagaatttgcttaaaaaaaaaaaaaaaagnnnnnnnnnnnnnnnnnnnnnnnnnnnnnnnnnnnnnnnnnnnnnnnnnnnnnnnnnnnnnnnnnnnnnnnnnnnnnnnc

SEQ ID NO: 126475 - DNA, 721 bp, Arabidopsis thaliana
  unsure (1)..(721): unsure at all n locations
ctttctctctctttctccttaaaaactctaactttactcatctcatctccaaagtctcaacctttcttctctaatggagatctgcacttacttcaaatcacaacccacttggctcctcattctcttcgttctggggtcaatctcaatcttcaaattcatcttcaccctcctcagatctttctacatctacttcctccgaccatccaaaaacctccgccgatacggttcatgggcaatcatcaccggaccaacagacggaatcggtaaagctttcgcctttcagttagcccagaaaggtcttaaccttatactcgttgctcgtaacccagacaagctcaaagatgtctctgattccatcagatctaagtatagtcaaactcagatcttgaccgttgtgatggatttctctggagatattgatgaaggtgtgaaacggattaaggagagtattgaaggattagatgttgggattttgattaataatgctggcatgtcttatccttatgctaagtattttcatgaggttgatgaagagttgatcaataacttgattaagatcaatgttgaaggaactactaaagttactcaagctgtgttgcctaatatgcttaagaggaagaaaggtgctattattaatatgggttctggtgctgctgctccttatgcccttcttaatcccttttacccctgnttatgctgggggctaaaacggccggggnnc

SEQ ID NO: 126476 - DNA, 513 bp, Arabidopsis thaliana
  unsure (1)..(513): unsure at all n locations
nnnnnnnnnnnnnnnnnnnnnnnnnnnnnnnnnnnnnnnnnnnnnnnnnnnnnnnnnnnngattggctctagcccacgcgtcggagcatccatggggcaattgctctcatttcgcgtttatctgtctgctgaaacgcagaaagcttctccagggtcgtttaagcgaacccaaaagactcgaaaaccattttcgcctgatagaagaggtccggtggctccgtcgcggaaatctcagaatctgaatttggaaagtttctccacatagagctgtatctgcagtcagattgatgagaattgagtacggtggtgcttttgctgatcttttgaatgagaaaggaaaagggtctgggagcaatgagatgagttatgttgaaaggactatcggttttcggactcgcgatttggattgacccgagatcttagactggttacagatgttgttggaggaacaatacggtggaggaggtatcttgatcatttgattggttccctttgccacaacgaaagatcatt

SEQ ID NO: 126477 - DNA, 783 bp, Arabidopsis thaliana
cggacgcgtgggcggacgcgtgggtaaaaaggtcgagatttcttgatagcgcaatgaccacacagaccagagttcgaaccttcaaaagggaaatatataatttgtttcttagtttctcgagtatctaccacctcgagatctgaaaatctgattctacctttccattttctttctcaaaagtcgtggctttgagaatagttttttcctcttcttctcatcagactcggtttcctagttgactcattttcaagatctgggcatctgtcatttctttaataaaagctttctttttttatttatcccttttgttttcagctgctggttgcttgtagtaggtatagttttgggtggccttacttgcttttcagcaaaagctgggagattgagatttcttcttcttctctctctttagtctttgggatctgcgcatttctcagaaattatatgggactctcgaaagcatgatgctttttgttgtctcacttgtaatttgttcgggactttgttgctgaagaaaactaagcaatgtctgtagaaacatggttcatgattcagaagactactactagctcatgagttcactggtacttggaattaagatgattgatcagttcatcaactttgtaattcgacctcctagggctgagtatgatcctgatcagtatttgtgggagaaggagtttagcctcggtggcacaaagtgtaaaagacaagacttggaggcaacttacaaattcgaggggtcacactttgcgttgcagtcattatgttccctcatcttct

SEQ ID NO: 126478 - DNA, 535 bp, Arabidopsis thaliana
  unsure (1)..(535): unsure at all n locations
aattacccnangnttacaggncnggcctgntcngccaaaggggcaaaattgcaactgcccgaaggtgtacagattgcaaataaataatgggatccctaccaaaagttggtacgatggtccaactgatgatgggttgattactatacttcccttcttagagactttggctgttgctgatgatgtccggcctatcattggcaggagatttggtaacaaggaataagagtttccttctctttttttctatatacatcgagtgcagatcctgatttctctcctttggattttagttacaaattggcccttaattagttcctcatatctctttttaggtcgttaattaggtaaccaaagaataagctcgttgagtctagtgagaataagtttccttgcttgctccctttttttaatagaagacctagttgtgggcttaaatcttatgactttgctggttcttctctgccaagatagatcctagaaaatcttgcagtttgttacaaatgtacagttggttaagctgagataatggatgtgt

SEQ ID NO: 126479 - DNA, 356 bp, Arabidopsis thaliana
agcgtgatgctgaagatatctttgctgagtttttcggcgaatccggtgatgcttttggcggagggagtagcggaaggacacgtggagatggcggtgatggtggcggtcggagatttaaaagtgcagaagcagggagccaggctaatagaaagacgccgccgacgaacaaaaaaacgacgccgccggcgaataggaaggctccggctattgagagtaaattggcttgcacattggaggagctctacaaaggtgcaaagaagaagatgcgaatttctcgccttgttcctgatgattttggaaagccaaagacagtccaagagatattgaagataaacataaaaccaggttggaagaaa

SEQ ID NO: 126480 - DNA, 729 bp, Arabidopsis thaliana
  unsure (1)..(729): unsure at all n locations
cnnnnnnnnnnnnnnnnnnnnnnnnnnnnnnnnnnnnnnnnnnnnnnnnnnnnnnnnnnnnnnnnnnnnnnnccancgcgtccagctttcaataacaatatgctgcgtacttgtgctatttttaagatctatatgtcgatagatcaagatcacctctaaagttactcaagacgaatataaagaggaaagtgagaatgaagaccctgcagacgagcccaaagaaaaagattcaaatttgaaaccctttgcaagtttagaggaattggagaaaggaaggttacctccacaggatattctttcactccctatgttcaagaactacacagctgggaatccgtcggttgtactgtatatcaaaaaccttgccaaagatgttgttatcgatgatttctattacatatttgggtcacagtttgaaagcagcgaagtagctaaatcaagtcttggtgtgaggctaatgcaggaaggaaggatgagagggcaagcttttttgacatttccgtctgttgaagtcgcacatcgtgctctgaatcttgtaaatggttttgtgttcaaaggcaaaccaatgataatccagtttggcaggactcctggagcagccaagccaaacgaatgatgatgatatatataacatcaacggtttttgaagagtaggtgcaaattctttttgtgtatcatcatgtaactctttgactctcagtttaaagtcaataaaatatatcgctgcct

SEQ ID NO: 126481 - DNA, 834 bp, Arabidopsis thaliana
  unsure (1)..(834): unsure at all n locations
ccatcgcgaaaataaaaaatcagtgagagagatggcgaggtcgagaagaaagtacaggaactctagggctaaagttcgcgttgctcttcctaagaagaaccctaatatctttaaaccagctttcaacttccctcccaagctccgcgctctcatgggagacgatgtccctgaatgggacgatcaagctagcgttatccagaactacaaatcctttggcgtcatctctaaccctaatttgcttggtatccgagctcgtaccgaccatatgattcaggatgattccctcaacgttcctccacctgtagagccaccgactgatgatcctattgctaaggagttcgagcccattgattctggaagcgaacttgaggaagacgatcttaagacagcattggggaagcaaagaaaagatggaaagagtgctcctttacagccgcttaccactatgcaacgcacacatataaggcgtttggtggagaaacatggtgatgacattgagggcatgtaccgagacaggaagctaaactcgatgcagcattcggttgcaacacttcgaaagctatgtacgagatatcagatttacaaagacaagaacccgattttagtttcatgatgatgatgatgatctctgtatcctttgttcaattttgttataaacttgcaacaacactacaatggttatgaagtttctataaatcagaattcagtattttttataaaaaaaaaaaaaaaaagnnnnnnnnnnnnnnnnnnnnnnnnnnnnnnnnnnnnnnnnnnnnnnnnnnnnnnnnnnnnnnnnnnnacgggaattgcatcccaaaccggggggggggg

SEQ ID NO: 126482 - DNA, 472 bp, Arabidopsis thaliana
cggacgcgtgggcggacgcgtgggcctcgaccctttaatttctaatcaccgaccaaaattgatcggaaacctagagctcttcgtattgctccgccaccatgcatatccggcgccagatcttcgttaaatctcctgactgtcaaaaagtcgtcgctctgcaattggatcctgcgcaatctctattaactctttcgggtatcacttccttactcgaatcgtcgcagcgtatatcgttttcggcttgctcgattactctagatgggaagcttttgaatggctctacacggatccaagtatcgaagcttccttctgtatccatgctcactcttttccctcgcctccgtggaggtggaggagatggtggggcaacgggagccgagtctcgcgattgctatctcaatatgtacgcggagaagaaacctgacagggctgatcctaatgagcagaggctctccaaatggttgaattgtgc

SEQ ID NO: 126483 - DNA, 472 bp, Arabidopsis thaliana
attaaagaagatagatagagagagagagagagagtaaaaacctaaagggtgatatacttatataaaaattaatttaagattgtgattaagtggttcactatatttaagttactttgaggagctactaatcatgggtcatcactcatgctgcaaccagcaaaaggtgaagagagggctttggtcaccggaagaagatgagaagcttattagatatatcacaactcatggctatggatgttggagtgaagtccctgaaaaagcagggcttcaaagatgtggaaaaagttgtagattgcgatggataaactatcttcgacctgatatcaggagaggaaggttctctccagaagaagagaaattgatcataagccttcatggagttgtgggaaacaggtgggctcatatagctagtcatttaccgggaagaacagataacgagattaaaaactattggaattcatggattaagaaa

SEQ ID NO: 126484 - DNA, 533 bp, Arabidopsis thaliana
  unsure (1)..(533): unsure at all n locations
cgactcactattagggaaagcttgggtacgcctgcaggtaccggcccggatttccggggtcgacccacgcgnccggccgctcttgaaaaaatcgcagagtagagactagaaggagaagaagatgagagtgaagaggcagaagaaaaacaggagaaccgtgagattcttcacggtctgttacggattccgtcaaccctacaaagtcctttgcgacggcactttcgtccaccatcttgtcactaatgagatcactcccgccgacactgctgtctctgaactcctcggaggtcccgtcaagctcttcaccaccagatgtgtgattgcggagttggagaaactgggtaaagattttgcggaatctctcgaagctgcccagacgcttaatacagcaacatgtgagcacgaggaggcaaaaacagcagacgagtgtttgtcagaggtataggggtacaaaatactgagcatttcttccttggtactcaggacgcggagtttaggagaaagcttcagcaggagtctatagttcctcttgg

SEQ ID NO: 126485 - DNA, 868 bp, Arabidopsis thaliana
ttttaaaaaaaacactttcttttaggggcccttttttagggcaatgtgcccttcaaaactttccttgggataccttcacatcccttacatttttttctaacgggggggaattccctccactataactacaaactttccccccaatttctacgcaaaatagggaaattcctttggttgaaattatttgcccatttctttcgacaaaatactatattgggtttcaagttccctagggctttttcttggggcaatcatgggccccgcccttgaaacatttcggctagggctgtttcatttctcacaatgctttttagttcttaaaaaaaaggtttctgttggtgaaccccttttcaactccttctccgctgcacatatttcaacttgcctctctctgtggaatgcatcagctacgctcgctgaccttttcagctgattatgcgggttatttgagcacaccgatctcagccacgccgtgtcctgactagggcttcccctctcatgcctgggttttggctgttcgtatatgaacggtgcactagtttcagcaggagtggaggaatcacagtctgaaatgaaacccaatatgcgattgcaagcttcaggaaggcctatcaatttacttttcaaacttgccagcatcgcatcagcagcttgtctcagctgtttccctctagagtctttgcttgatgaaaatattttattgacatactccagttccttgcaaaagcgctcaaatttccattcccttgcaaaattcagaaacacttctttgacaaagccaaacatctctgagggatggttacaggcaacccagtgaaattgcatctcggcggacgggtggtcgaccggaattcggtcggtcttccgg

SEQ ID NO: 126486 - DNA, 637 bp, Arabidopsis thaliana
  unsure (1)..(637): unsure at all n locations
acaaggtttgttgagtctgttgaagcccatttccgtctcaacatcgatcctaagtacaatgaccagcagctgcgtgcaacggttgagcctgcctaagggaactggccagactgttatagtcgctgttcttgcacaaggtgagaaggttgatgaagccaaaagtgcaggggcagatattgtgggcagtgatgatttaatcgaacagattaaaggaggcttcatggagtttgacaagctgattgcatccccggatatgatggtcaaggttgctggcctgggaaagattcttggaccacgggggctcatgccaaatcccaaggctggtacagtcacagcggaccattccccagggntatttgaaggagttcaaagaagggggaaagttcggattcagggcccaggccaaaacctggggatttgttcacaattcccatttggggaaagttaatttttcagggggaggccctttttaaaaacttccttccaagcagttaattcgcgtggggccaaanagccaaggggctnaaggggtttcttgaaacggtccaatttctgnaatnggcctccnnaagtttncntgggggnttgcttagcncccttgggttttcancctttatgggctttggggatccttttg

SEQ ID NO: 126487 - DNA, 581 bp, Arabidopsis thaliana
  unsure (1)..(581): unsure at all n locations
ggagaactggccagactgttatagtcgctgttcttgcacaaggtgagaaggttgatgaagccaaaagtgcaggggcagatattgtgggcagtgatgatttaatcgaacagattaaaggaggcttcatggagtttgacaagctgattgcatccccggatatgatggtcaaggttgctggcctgggaaagattcttggaccacgggggctcatgccaaatcccaaggctggtacagtcacagcgaacattccccaggctattgaagagttcaagaaggggaaagttgaattcagagcagacaaaactgggattgttcacattccatttggggaaagttaattttaccagagggagaccttctccataaacttcccttgcaagcagtgaaaatcggtgggggccaaccaagcccaagggggctaaagggggtgtactgggaaaccgcccacatatgcccgccaatggggccttcccaccaagttgaccttagggggntggttnntctaacccccccctgggaccaatncgcaaccctttgaaatggggcccttttgggaccgggatcccttttacaaaaanaac

SEQ ID NO: 126488 - DNA, 1157 bp, Arabidopsis thaliana
  unsure (1)..(1157): unsure at all n locations
cactacttaggaagctgtccctgagtccggtccgattccggtcgacaccgtcgatgtggcagtgtgattantcgacagatagaggatgctcttgaagttgacaactgattgatacccgattgatggcatggtgcggcctgagaagatcatagacaccggggctcatgccatatcccacgcttgatcagacacagtgaacatgccccaggctatcgaagagtccatgatggggaagctagtactcatatcagacacaactgtgattgcgcacattccattggggaaagttaactttacagaggaagacctgctcataaacttccttgcagcagtgaaatcggtggagacatacaagccaaagggagctaaaggagtgtactggaaaagcgctcacatatgctcgtcaatggggccttccatcaagttgaacataagagagatgatagacttcaagcctcccactgcgaactaatcgacaacgccatttgtaaatggggtccttttgggagacgggcaatgccagtgtagacagagaagagaaaccccaagtctagtctgttagtaatcttttcacgcctcactgctttgtatcactttgatggccatttgcttcttgtcgttatttatttactattgcctattaaaatttggcaaggggctgtacatgtcaggacgcagaactctttagtactctctaaaagaaaagaccttacattgatctttaggttacatacgaggaggaggtttcttgttacattacatgtgatttactactacaaatattacaaggccagactctgcttcgtcatttccattttggtgagaagccctctcatctcttcctccattctcatcttcatttcataaaactctctctgccctctctgcattgcctctaactcctcgtacctcctcctccttctctcctgtgcatcctccatactcaacttccccattctccgattgtactcttcttctatcttctccttcttcgctattgctattcgtttcagtccctctgcttctcttcgtgcatcatcggcccgcccttggaacatttctggctctggctggcgtcattctcacaatgctctctagctcttcgaaacggggtcccttggggaaccccttttaaatccactccangggaanattna

SEQ ID NO: 126489 - DNA, 1097 bp, Arabidopsis thaliana
  unsure (1)..(1097): unsure at all n locations
gcgngcggaagcngggancccctagagcggtcgccctnngttttatttctttgcttcttgtcgaaatttatttactatggcctattaaaatttggcaaggggctgtacatgtcaggacgcagaactctttagtactctctaaaagaaaagaccttacattgatctttaggttacatacgaggaggaggtccctgcttacagtgcatgngaccnactactacaaatattacaaggccagactctgcttcgtcatttccattttggagagaagccctctcatctcttcctccattctcatcttcatttcataaaactctctctgccctctctgcattgcctctaactcctcgtacctcctcctccttctctcctgagcatcctccatactcaacttccccattctccgattgaactctgtttctatcttctccttcttcgctattgctattcggtttcagtccctctggttctcttcgtgcatcatcggaccgcccttgaaacatttctgctctgcttgcttcattctcacaatgctctctagcttttcgaaacgaggttcctttggtgaaccccttttcagctccatctccgctgcacatatttcaacttgcctctctctgtggaatgcataagctacgctcgctgaccttttcagctgattatgcgggttatctgagcacaccgatctcagccacgccgtgtcctgactagggcttcccctctcatgcctgggttttggctgttcgtatatgaacggtgcactagtttcagcaggagtggaggaatcacagtctgaaatgaaacccaatatgcgattgcaagcttcaggaaggcctatcaatttacttttcaaactaccagcgcgcatcagcagcttgtctcagctgtttccctctagagtctttgcttgatgaaaatattttattgacatactccagttccttgcaaaagcgctcaaatttccattcccttgcaaaattcagaaacacttctttgacatagcctaacatatatgagggatggttacaggcaacgcagtgaaattgcatctcggcggacgcgtgggtcgacccggaaattccggtgcggtactgcaa

SEQ ID NO: 126490 - DNA, 326 bp, Arabidopsis thaliana
ctctctgtggaatgcatcagctacgctcgctgaccttttcagctgattatgcgggttatctgagcacaccgatctcagccacgccgtgtcctgactagggcttcccctctcatgcctgggttttggctgttcgtatatgaacggtgcactagtttcagcaggagtggaggaatcacagtctgcaatcaacaggcaaagtatcggcagattgttacaaggaatatctatggcacatatatcacaagaatttaaccaacatgtgttcactgtgtgatcatctatactaaaccagactaatacccccatatttgatacccagataatgc

SEQ ID NO: 126491 - DNA, 807 bp, Arabidopsis thaliana
atttgacacaggaaataacaataatctagaaacaaagataaaaagtaattatcgtccctatggtatggactttaaattcagagttgcaactggtagattcagcaatggaatggttgcttccgattatttagccaaatacatgggagtaaaagaaattgtaccggcatatttagacccgaaaatacaaccaaacgatcttcttacgggagtatcttttgcatcgggtggtgctggctacaatcctactacatccgaagcagcgaatgcaatcccaatgctggaccaactgacatatttccaagactatatagagaaagtaaatacgttagtaagacaagagaagagccaatataagttggcaggtttagagaagaccaatcagctaatatccaaaggagtggcaattgtcgtcgggggaagcaatgatctgatcattacatattttggaagtggtgctcaacgactcaaaaatgacatcgactcttataccactatcattgctgattctgccgccagtttcgttttgcaattgtatggatatggagcaagacgtataggagtgatcggaacaccaccacttggatgtgtaccatcacaaagactaaagaaaaagaaaatatgcaatgaagagctaaactatgcttctcagcttttcaattctaagctcctccttattttgggtcaattgtcaaaaaccctaccaaattctacattcgtttatatggacatctacactatcatcagtcagatgctagaaactcctgcggcttatggatttgaggagacaaagaaaccgtgttgcaaaac

SEQ ID NO: 126492 - DNA, 476 bp, Arabidopsis thaliana
gaaaggctggtaccgcctgcaggtacctggtcctggaattccacgggtcgacccacgccgtccgacgatatcacgctctgaagcagaagaaaaggtaattctgaatgtctggaagaaaccggattcacagagatatccgagacagctatcatgatcatcgtgatttacctccggagagaccttttctccgaggccctccattgttacaacctccaccaccatctttgttagaagatcttcagatacaggagggtgaaatcagaaggcaggatgctgaaatcagaaggcttttgagtgataatcatggactagctgacgaccgaatggttctggagagagaactcgttgctgctaaagaagagcttcaccgaatgaatctgatgatttctgatcttcgtgctgagcaagatctgcaattgagggagtttagtgagaaaaggcataaacttgagcggggatgtcgcgctatggagtcg

SEQ ID NO: 126493 - DNA, 695 bp, Arabidopsis thaliana
  unsure (1)..(695): unsure at all n locations
nnnnnnnntactgactcactatatgggaatagctggtaccgcctgcaggtacctggtccggaattcccgggtcgcgcccacgcgtccggctcttatctctttctctcatggcctcaccacaagcaaccaaattgtctcttataatccgatctcaaaggttggcttgttgggagcactgagacatcaaacatggtttcttctttctttcactcttaaaaaaaccaatttagccctaaaaacctccttttagtttaatcccaaaagttcctcaaatctcttctattctctctctctctccattaaaacccttcacaagcaaaaagctttgagctttaaatgagtttaaggtcctgcaaaaactgggtttttcctcgtgtacttgttcatcttatctcctctgcataaacttcattgaagaaaaagtcttttttattttgttgatctcttttaattaagatccttttgggttttaatttattaatctccaagaaaaaaaatggatatgagaagccatgaaatgatagagagaagaagagatgacactggccacaacaatggtggtgttgttattagtaacatcattagtactaatattgatgataattgcaatgggtataacaacacacactcgtgtctcttgcaactctcagaccctagatcaccaccaatccaagtctccctcttcgttttccatc

SEQ ID NO: 126494 - DNA, 440 bp, Arabidopsis thaliana
cccacgcgtccgcccacgcgtccgcttgcaactctcaaaccctagatcaccaccaatccaagtctccctcttcgttttccatctccgccgcagctaaacccaccgtaagataccgtgagtgtctaaagaatcatgcggcgagcgtcggcggaagtgttcacgacggatgcggcgagtttatgccgagtggtgaagaaggaacaatcgaagctctcagatgcgctgcttgtgattgtcaccgtaatttccaccggaaagaaatggacggcgttggaagctcggatttgatctctcaccaccgtcatcaccactaccaccataaccaatacggtggaggaggagggagaagacctccgccgccgaatatgatgcttaacccactcatgcttcctccgccaccgaattatcagccgattcaccaccacaagtatggaatgagt

SEQ ID NO: 126495 - DNA, 460 bp, Arabidopsis thaliana
tcagatgttttcatccttcacaacaagtttcgttcaagtctgatccgatgttctcctctagctttctcagattgattcttttactctgtctcgtctcttcttccttctcctccaccgcttcttcctccaactccactgccgccgatcaaactctccggccgcaagaagagctccagaagctaacactgattagacaagaactcgacaaaatcaacaagccggctgtgaaaactattcagagctcagatggagataaaatagattgtgtttcaactcatcagcaaccagctttcgatcatcctctcttacatggacaaaaaccattggatccgcctgagataccaaaaggatatagcgaagatgatggatcatatgaaaactcccagctttggaggttttatccggggggggtcttggccggaaggtacgattccgataagaagaacaacggaacaagaca

SEQ ID NO: 126496 - DNA, 463 bp, Arabidopsis thaliana
gggaaaaatggcgaaaggagacgataatgtgcagaggaagaagaataaagtgacgaggaagaagatgagtaggaagaacgataccgccaccgtatctgctcgtatcgccgccattatcgccgccaagaaacgtcgcaagtctggcaaacgcagcatgtgtcagggaatgtgttttactcttcctacacttgaagatccattcaatgaaaggcaaggtaaagctgatattactaaaaagaagaagaaaaagaaaaaggtgaagagtagagaagacaagaaaccatctcctatgtctattgaaggtgttgagaagatggatggtccaccaaagtttctgatgttaaacttgaatgagattgagagctcatttcgtaaagatattacatacagtgaacaacatgataagtctttgtttactagtagttgggggattgagttctggaaatgttactcatctgggaat

SEQ ID NO: 126497 - DNA, 405 bp, Arabidopsis thaliana
tttaaagctgccagagaggaacaagaagttcatggtaaagaaactcaacagactcaagagagagatggagttgtttggtccgcaagctgttgtcagctaataccgcgagtatggagaagataaggaagacgattatctatggtggttggacattttattactaaaaagctcagttcgagcaggcacttatgcaagagatgctgactgtttgtttttaaccgaaaagagcttattgatgttatcagggctgtttaaagtgtatggggctatggtagattctggttttccggagcatgaaatcgcagcatccgacaaagaaaaggtgagtaatttggtaccactagttcctacacacggaatcatccaatcttctgaagcagagtattgtggtatttgttcaaatcc

SEQ ID NO: 126498 - DNA, 434 bp, Arabidopsis thaliana
caaaaatcaaaacttttactttttatttctcctctctggatcttcctcttcaaagctcaaggccattagggtttatctgagctccaaaatcaccctaattctagtgtatttctcagcaagcaagcttcttctttttttgtcctgggtaactgtgattgttgcaggatcttgtgtagaaacagatcacaagaagatgaatgataactcggtggtgcggctttgattatcttcagagattttagattctgtatccactctgttgcgatggggtcgtttgcaggcgcttgtgagattgtggaagagaaggatgatgaagtaagattgccaaaacattccgggagatatggtaaatcggttatgggatcatcaagtcaggatttggtggagcgtaagcaacgagagtatcatggttctcttgagtatgacattgatat

SEQ ID NO: 126499 - DNA, 552 bp, Arabidopsis thaliana
  unsure (1)..(552): unsure at all n locations
ttcnnnnnnnnnnnnnnnnnnnnnnnnnnnnnnnnnnnnnnnnnnnnnnnnnnnnnnnnnnnnnnnnnnnnnnnccacgcgtccgcggacgcgtggggccaaagagaagcttgtcttgaatctttagctacggttttgaagaataatcctgaagctgtttctgattttgttggacttgagtctgggaagtattttaattctgtgactgagttaacaaaggataggtatccgacgactaggctgctttcttgtctttgcttagttgtcatatacaacacttctccatcttatttcataaacatgggaaccaaatcaagtttgataactactctgcttgagcttcttaatgaccctggtcaatctggagatgatgctgccttgggtttatcctgtctgattgcggaaaaagaggatttacaacagttagcttacgaggccgatgcaatcaagaatattggttgagatcttgaagacaggtagtgagctccagtctaaacgtcttcagggtttgtttttgtctctagctgaattgtgctcaaagctagaggattg

SEQ ID NO: 126500 - DNA, 401 bp, Arabidopsis thaliana
ggttgtggcatttgcaacattcacgagtcatagattcgccttggctgcaatgaatgagctaaatggtgtgaaatttgatcctcaaacaggatcaaatctacatatagaactagctagatcaaactctagaagaaaagaaaggccaggaagtggaccttatgttgtgattgataacagaaacaaggaaatttctaagtctcaggatgaccagagtgatgaaggggatagcgatccagatgaggtgcaggaacctggaaatagcgattctccaaaggaaaacgatactaccaaaagcgaagcggattctgagccagatagtaaagcaccatctgctaatgggcacttagagaaagcatctgaaggaggttctggtgctcgagcttgttcgaccttgtttatag

SEQ ID NO: 126501 - DNA, 571 bp, Arabidopsis thaliana
  unsure (1)..(571): unsure at all n locations
ccnnnnnnnnnnnnnnnnnnnnnnnnnnnnccagcgnnnnnnnnnnnnnnnnnnnnnnnnnnnnnnnnnnnccacgcgtgcgcgagaagacgacagaagggggcccagaaaatcagagacagaagaagaagaaaagcgaaaaaaagcaaaacatgaaggcgacgacgaagactccgatccacgtggtgtggtcatgggttaggagacaacctccgaaggtgaaggcttttctcgccgtggtcactggcatggcggctttggttcttctcagattcattgttcacgatcacgacaatctcttcgttgccgctgaggctgttcattccatcgggatctgtgtgctcatctacaaactcatgaaggagaagacctgtgccggattgtcactgaaatctcaggagcttacggcgatatttttagctgttaggctgtattgtagcattgtaatggaatatgatatacataccattcttgacttggctactttgggaacaactctctgggttatatttatgattcgtttcaagttaagagctagttacatggaggacaaagacaactttcctctcta

SEQ ID NO: 126502 - DNA, 466 bp, Arabidopsis thaliana
accggaatggaagggccgacccagcccacccgtgcgaaggcaaacgaggcgacgaagaaggtatccatatttgaagactccgatccacgcgggttcgacatgggtgaggaggcagcctccaaaggtgaaagctttccttgccgtcgtatctggcatggcggctcttgttctcctcaaactcatcgttcacgatcacgacaatctcttcgttgccgccgaagctgttcattctattggaatctctgttcttatctataaactcatgaaggagaagacttgtgctggattgtcattgaaatctcaggagcttacggcgatatttctagctgtgaggctttattgcagttttgtaatggaatatgatatacataccattctggacttggctaccttgggaacaactctctgggttatatatatgatcccgtttaacctcaaaactacctacatggaagaaaaagacaac

SEQ ID NO: 126503 - DNA, 398 bp, Arabidopsis thaliana
ggaaactcggcaccacgaggtaatgtgtttggagtagttgatgatgagtctcatatctcccacaatagatgttaaagaagcagtggactgggttctacacgagactggggatcctgatatttcagtgcacatgcgaatgttgatgagcaaatctgttacacctatgcgtgcagcgataaactgtctagggaaagcaattaacagacttggcataccgaacccgagagtggttatagtgtctgacactccatctgtagtgaaaattatcaagacagatatcagcaccattgcacaggttctacattttgactataagcttttccgaggtgatatcgctcaacgtggccgcggtttaccaatgttagatttcagaataaaggattggggtcctgcaccga

SEQ ID NO: 126504 - DNA, 419 bp, Arabidopsis thaliana
cgtgaaaaaaatggaagatctatggaagagagcgaaatcgtttgcagaagaagcagcgaagaaatcacaaaccataacactacaatcatcttcaacaacattcgtcaatctcgtcaccgaaaccgctaaaaaatccaaagagttcgctctcgaagcttctaagaaagctgattcgatcaatgtctccgagttcgtcgccgagacggcgaagaagtcaaaggaattcgctgctgaggtttcaacgaaagcggatcagctcaaagtcgtagcattgaaacaagctgatcagatccagaatataaaatcgattgccgacattatacctggaggattaggaggatcaggatctggtggtggtggttctgagatttctgaatctgagcttgttagttttggtattactgatgatttgagagagt

SEQ ID NO: 126505 - DNA, 530 bp, Arabidopsis thaliana
atgatttgccggcactaatacgactcacttagggaaagccggtacgcctgcaggtaccggtccggaattcccgggtcgacccacgcgtccgtctcaaccttctcgtcttctttcggacaacaatgtcacaaaaagtctgatcctttctctttagatttggcttcgagaaatggctcgcgatcggcgggaaggtctggagatcaaggtggtgaatccaccggcggcggcgacaaacaatgtggctgtagaaacgtctccggcgacggcgacgaggagacggagacaacaacaacgagcttcgttcgctgagtttagaccgtttaagctttggtttccatggcttgttccagctatcgtggtggctaacattgcccttttcgccatttcgatgtttattaacaattgtcctaagaactcggcttattgcttagctaggtttcttgggagatttgcttttcagcctatgaaagagaatcctcttctgggtccttcttcattgacattggagaagatgggggctttagatgtat

SEQ ID NO: 126506 - DNA, 440 bp, Arabidopsis thaliana
cggacgcgtgggcggacgcgggggctctctcgttctttgcgtgttggaaagttcgaaacagagcctctgtaaattacgcgtaaagtttcaatctttattcacacaattcacacagctaatgtaagcatgagaatcttcagattcacgtcaatctcaccgcggattttgccgtcgaatcattactcaacattcccgttgaaacaaaacgtgtcttctctctcaccggcgaaatacattgcgggagctttacaagaacatatcaattctccggccccaaaagctggtaagaagatacacgcagatatcatcaaaactgggtttcaaccagatttgaatatatccatcaaactactcattcttcatttaaaatgcggttgcttgagttatgcacgccaagtgttcgacgaattacccaagccaacattatcggcttacaacta

SEQ ID NO: 126507 - DNA, 412 bp, Arabidopsis thaliana
ctcaaccatcgcatattcgccgccataagcagagagtttcacatataaacgaaaaattcccttcgagaagtctcaagtcgacgatatggagaacggagacattccagaggacgctaacgagcattgcccaggtcctcaatcagaatctgctggaaaatcagattcttgtgctggctgccctaatcaggaagcttgtgctactgctcctaaaggacctgacccagatttggttgccatagcagagaggatgagcactgttaagcacaagattctggttttgtctggcaaaggtggagttggtaagagtactttctcagctcagctctcgtttgcccttgcgggcatggatcatcaagtaggtctgatggacattgatatatgcggtccaagcatcccaaaaatgttaggactt

SEQ ID NO: 126508 - DNA, 435 bp, Arabidopsis thaliana
caaaaacagaggatgtgttttgtttattcttagtcatggtttctccattacatctagaattcccataagtgcttgtttcatcttgggttacaggtgctgggaattagatggtcatcaatcttttatgttgagagtgtagcaagagtgaaaaagctctcattaagtggattgttgctttacaagttgagaatagctgatcaattctttgttcaatggccacaactgcataagaagtatcctcgggctcactatgttgggtgcctgatgtaagctgattggaactctacttacacctagatatattacaaaaacttagaaagctacatagtgtacaccttctctttatatgcaggattgagttttaaacaatgaatttttgtaatcagctgttttgactttgttaatgacttaatgctatttcagtgagcttataat

SEQ ID NO: 126509 - DNA, 476 bp, Arabidopsis thaliana
ggaaacccggcggaccgcacgcgtccgctcttcttaatagtcaatcatatatcaaaaaatttaaactcttcttgatcaatggcttcttcttctgctgctatgtctcttgaatccatctctatgacaactctcaacaatctctctcgtaatcatcaatctcaccgcagttctcttcttggtttctcaagatctttccaaaaccttggaatctcatctaacggtccagatttctcctcccgatcaagatctactacttccaagaacctcaacgttactcgagctttcttctggaattggggcaagaagacctaaaactccataccaagtgagagccaagaactaaacgtgtatgagctcaacgaatgagatagaaacagtccatcagttcttaaactcggcaagaaaccaacagtagcttgtctcggagatctcgttccattcacaaacaaactctacaccggctatctcaagaaacc

SEQ ID NO: 126510 - DNA, 426 bp, Arabidopsis thaliana
atcttcgccacatcacagattttgttttcttccgtttctcgaaattcagtttcatcatcatcctctctggatttataaattttcaatctacctttcaatcgccgggggataatcgaaacccgatctgtgtaaaaaaaatgatgaaatcgacggcgagatttgcgtctgattgtcgttataatgatcacaaaagcataaaagcgtgacgtttccgcgtcttcgcgtatctcggaaactttaatccgtatctaaagagctaaatttgaagcgatctttctctttttcttttaatattgttttttttccttgaagcttgcctactttcgaagttattccatgttttatcttcaattctagatcatagtttttggaaatttaagttttagttttttttgttaagctcgatctggatttgccgatttgaat

SEQ ID NO: 126511 - DNA, 1288 bp, Arabidopsis thaliana
  unsure (1)..(1288): unsure at all n locations
cgtcgcccgcacaccattcccccgccgcccgccgtagtatcgccggntcctatacgactcatatagggaaagctggtacgcctgcaggtaccggtccggaattcccgggtcgacccacgcgtccgtacggctgcgagaagacaacagaagggggcacttcacaagcataaactctcatcgggagctagggttttagctgattctcttgtgacggaaccacaagaagagaagagaccaaaaggaggagccaaaatcctctctttctttggaattagggtttcctcaaaggaagtgaactgaaaatggtcgcggacaagagcaagaagtcgaaaattgaagagaaaggcgaagaagaaaacttggagcaaatcgacgcagagcttgttctctcaattgagaagcttcaggagattcaagacgacctcgagaagattaacgaaaaggccagtgacgaggtcttggaagtagagcagaaatataacgtgatacggaaacctgtctatgacaagcgcaatgaagttatccaatcgattcctggcttttggatgactgcttttttgagtcatcctgccttaggcgacctcttgactgaagaagaccaaaagatttttaagtacttgaactctctggaagtggaggatgccaaagatgtgaaatctggatactctataacttttcacttcacttcaaacccgttctttgaggatgccaagcttaccaagacatttactttccttgaagaaggaacaacaaaaatcactgcaactcctatcaaatggaaggagggcaagggcttgccaaatggagtgaaccatgatgataagaaaggaaataaacgtgcattgccagaggagagtttctttacttggtttactgatgctcaacataaggaagatgctggggatgagattcatgatgaggttgctgatattatcaaggaagatctctggtccaaccctctcacctacttcaacaatgatgctgatgaagaggattttgatggagatgatgatggtgacgaagagggagaagaagacgatgacgatgaagaggaggaagatggtgaggaatgatgggagcccaaagataacacattgctggcttgcttctataacagatgtgtaaagtttgtgttatgaggttctcaattttagcaatgatgagactaagctttctcttttggaatatttagtttatttactatcaatagctacattctgtttgtacgaaccatgtcatcatccatgtcctaaatcttgccatanctacaaaaaaaaaaaaaaaaaaa

SEQ ID NO: 126512 - DNA, 452 bp, Arabidopsis thaliana
  unsure (1)..(452): unsure at all n locations
ctttcttcttcccggagaaaatttggccctaaatcactttcccgggaaaatcaaactctggggaaagagttgaaacaatgtcacaaggcgatacagtaccgcttcatccatcgtctcaatcagacattgacgagatcgagaatctgattaacgaaagcgtccaatcaggtcccggaaccgttctcgccgctcgtccaccgagcccaaccagaccttcgattccagtatcttcttcttcttcttcttctccgtttatgcaatcgaatcttccaccgcttcatccgtcgtcatcagctcagaaagtgacacatgtccccgttcctccgcctcttccggcggtaagtaactccagcaattttcaaggagcgagtgtttttggatctccggctaataacggtnacggggcctgttttggntactgtnagngngattttnttggatcgngngnaatt

SEQ ID NO: 126513 - DNA, 499 bp, Arabidopsis thaliana
  unsure (1)..(499): unsure at all n locations
agaaacttccannnnnnnnnnnnnnnnnnnnnnnnnnnnnnnnnnnnnnnnnnnnnnnnnnnnnnnnnnnnnnnnnnnnccacgggtccgcgcacgtgaagaattctggcgtgaaatcagattgcaaccttcgtcaggatagtaataaaccttatgggaaagatttgagtgacgaagtgagtacagatagaagtagaatagttgaaacgaaaggtgggaaagagaaaggagattctcagaatgactcagaggatagaatgaaggaaaatgacttaaagtcagcagagaaagttaaaggcgttgaatcaaataaaaaatctactgatccccatgtaaagaaagactcaagggatgtagagaggcctcacagaactaattctaaggaagaccggcgtaaaagaaaagagagggaaaaggaagaagaagggtcaatacacaggcgggctgaaaactcgatcaaggacaaaagaatacgttctccaaccagtaatgaatcttc

SEQ ID NO: 126514 - DNA, 399 bp, Arabidopsis thaliana
ccctcgcgtccgcccacgcgttcgctccaatttcgcgtgatcattccctctaatttcggatttttgcatcttctccgatcatcttcaccactatgggtgcttcatcttctacagacgacaaagaatcatcggagaaacgagaaatcgaaagccttgctgcttcaaccggagctcttcctctgcttaaacgatccttctccaaactcgtcgattctcaaaccaatactgttccttttcaatccttgaagcaaagttttggtttgagctacgatacaattactactgaaggagagcaaaaagtttcagacttgtttcccaaattgttggagcatttaggatcatctttagtacatttgttcttcgtgcctgataaagaaggattgagttgggttgagtttg

SEQ ID NO: 126515 - DNA, 536 bp, Arabidopsis thaliana
gaaggctggcccgcctggcaggtcccggcccggatttcccgggtcgacccacgcgtccgcccacccgtccggggttgaacgacattggcaatcactaaacgaagagactggtggcatgaatgatgttctttatcagctatacagcatcactggagattccaagtatttgctgctcgcacatctctttgacaagccttgctttctcggagtcctcgcaattcaggccgatgatattagtggattccacgctaatacacatattcccatcgtcgttggatcccaacaacggtatgaaatcactggtgatctactccataaggaaatctcgatgttctttatggacatttttaatgcttctcacagctatgcaacaggaggaacatcagtcagtgagttctggcaagatcccaagagaatggcgactgcactgcaaactgaaaacgaggaatcatgtactacttataacatgctcaaggtctctaggaatctgttcagatggacaaaagaggttagctatgcagactattacgagcgcg

SEQ ID NO: 126516 - DNA, 660 bp, Arabidopsis thaliana
tttcattggagggctcagcagacaaaccttgagtatctattgatgttggatgttgatggtttggcctggagcttccgtagagaagctggtcttgatgcacctggagattactatggaggatgggagagaccagatagtgaactccgtggccattttgtcggtcactatttgagtgcaacagcttatatgtgggctagtactcataatgatactctcaaggagaaaatgtcagctcttgtctcagctctatcggaatgccaacataagtctggcacaggatatctctctgcttttccttccagttttttcgaccgctttgaagctataacacctgtttgggctccttactacaccattcacaagattttagctggtctgattatttctatggccgtgttcgtaatgtgataaggaagtacagtgttgaacgacattggcaatcactaaacgaagagactggtggcatgaatgatgttctttatcagctatacagcatcactggagattccaagtatttgctgctcgcacatctctttgacaagccttgctttctcggagtcctcgcaattcaggccgatgatattagtggattccacgctaatacacatattcgcatcgtcgttggattccaacaacggtatgaaatcactggtgatctac

SEQ ID NO: 126517 - DNA, 471 bp, Arabidopsis thaliana
  unsure (1)..(471): unsure at all n locations
aatccttcgatggaatttgagatcaatgaaagttagggtttttctttgagatttcttcacccagataagaaatgtcgctcgtgagaagatttcaaacaggtcgttctttattgaaaacagctggatcaagagaatcttcgtctcttccatttaggaatggaaatgagttctctttgattcaaattggagatgatttcagatttggttgttggagaagctatcattcgtctcgttgtcacgttcctgaagctcatggaaaaagtgcgtattcacgtttatatgaaggccacagcgtcaatacacatttgcttcgatctacaatgattgcagagtttttgccgtttatgaatgaaaaaaggtctgctacaacgcaagttaaggctccacctcagcttcagaaaacgggtgctggtagagtgtccatggtaagttctggatttgnatatgaaccctatgcgctccgggagaaaa

SEQ ID NO: 126518 - DNA, 437 bp, Arabidopsis thaliana
  unsure (1)..(437): unsure at all n locations
aaagtcttggtgatcatggttgtgagtacatgactggtggtactgttgtggtgcttggaaagactggtagaaactttgctgctggtatgagtggtggtattgcttatgtccttgatgtggacggaaagtttaacaccagatgcaaccttgaactggttgatttggataaagttgaagatgaggaggacaaaatgacgctcaaaatgatgatccagcaacatcaaagacacaccaacagccaacttgctcaagaagttcttgcagactttgagaatttgctgcccaagtttatcaaggtttttcccaagngatttacaaacggtgttttatcaagccatgaaacacgagnaggtntccaaggcaagcaatcgagcggnntttttagaaaagctttnncggggnnttgangggaaagaactccnggggggaaaanttcc

SEQ ID NO: 126519 - DNA, 609 bp, Arabidopsis thaliana
  unsure (1)..(609): unsure at all n locations
nnnnnnnnnnnnnnnnnnnnnnnnnnnnnnnnnnnnnnnnnnnnnnnnnnnnnnnnnnnnnnnnnnnnnnnnnnnnnnnnnnnccacgcgtccgcggacgcgtgggtcaagctcgacgaagatgtcttgcttgatttcatcaacttgctcactcgtccccttcgactcgaatctgactcgttcgaatcgtttcaccaaactgggttctgcagtttcatggcaatcttcctttcctaaactctccatcgaaatcggctctgttatctcatcccccattgtcaagaaggtaaagccgtctactttcgtagtccatgcacaatctctgaggttgtttcgtactttctcttgcgcgtatagtattgtgcttgtctgattttttttagcttagtgtgttcttatatgtttgagctcgttgttcagatttaggcaattgtaatttgtggtttacagtaaaaatctaggcttcttctagtgaatctttatgaacatgaaactagaaactcttaatgtgaataaaaatgtggggtttcttttttcatgatttgtgtttcttctcaggaagttcaatttgccatttaggcttgcgagtgattatcttcaaagcttatc

SEQ ID NO: 126520 - DNA, 826 bp, Arabidopsis thaliana
caaagatgtcttgcttgatttcatcaacttgctcactcgtccccttcgactcgaatctgactcgttcgaatcgtttcaccaaactgggttctgcagtttcatggcaatcttcctttcctaaactctccatcgaaatcggctctgttatctcatcccccattgtcaagaaggattcttttgtgcaagctgcgtggactcgaagatcacgaggtgaagcagcgaaaagacccaacaggaagtcatggaaacagagaacggacatgtacatgaggcctttccttctgaatgtgttcttctccaggaaattcatacacgctaaagtgatgcataggccaacaagcaaagtcatttcagttgccaccacaaatgctagagatataaggactaatataccgtctcttgttgataacgaagcgtgtagactcatcggtaagctcatagctgagcgttcaatggaagcagacgtcttatgctgtctcttatgagccaagaaagggagaaagaattgaagggaagctagggattgtaatcgatactattaaggaacatggcattatttttgttccttgattcattctctcttagaataaatgacttagcattttcattaccaagaagctctgtatcttgttttgatacctatgcagagcagaggagaaatcgttggtagagaatggttcaagaagacagagttgcttactaggtgttccatgaaatgccaatggggagaaagaatacgaaggagtagaaatattttaaaaatgcttatatatatttgtattgtatgtacacttatttcttcttgtcacaacacatgtatctaagc

SEQ ID NO: 126521 - DNA, 569 bp, Arabidopsis thaliana
ggtctttgtcttttgtcattttttgcttcgagctaagatcagtgaagagaaaagatgggaagatgtttaacgaagaaggtgtttttgattcagagtccgatcttgtttcttcatctcctgatctctttatcgtccggtgcagtgaaaccggatttgaaaggagtatgtgtttctaaaggagggaggtttccgccatatgagttggaagggaagcctcctaagtctgttggtaggggatccaaggatcttactctgtgccgggtgtttcgtaaaaagacttgttgttcttctgttcagactaacccggctttcgtagctgttagaaacctggctacttatggagaagctagtcaagaatgcttggagttgtttgagttattggagtgttcaatctgtaacccaaatgttggaattcaaccgggtcctcctcgtatatgcgcctcgttctgtgacagagtctttgaagcctgcaaagatgcatactttgccagtaatgcacttaaacgggtgattggccctgtggggtaaacgcggcaataatcttcattaggctcaaatgggatccatgg

SEQ ID NO: 126522 - DNA, 401 bp, Arabidopsis thaliana
tctagttaaactaaaattgcattttctaaatcctaaccaagataactgttagtattaaccatgaaattacataactacatacataagcatttggtttagcttttgaagtttcacactttctttaactttgctttgcattgttgttttctttttcaagtttgatctttctggcgttgaatttacttaaaaagctattgattactggtctggttaaatcaatcctttaactttataaagttgtgtcctttgtctttccctctcttttattcattgttcttttaattgtttgacctgatagattccaaagtaatttgatcatagattccaagatccaaattctaacgtataaaccatcttttttgtcccaagattattgaatgatcaaacgattagtctttgag

SEQ ID NO: 126523 - DNA, 1149 bp, Arabidopsis thaliana
  unsure (1)..(1149): unsure at all n locations
cttcggtagtgaagagtaacgctcctttggaagatgatgccaccttccaaccgaatcccaattctgtttaccaaactgaacatctatcatacttcaaatttgttggtcgcatggtggcaaaggcgttgtttgatgggcagcttttggatgtttatttcacccgttccttctataaacacatactcggtgtgaaggtgacctatcatgacattgaggcggtggatcctgattactacaagaatttgaagtggctattagagaatgacgtgagcgacatactcgacctcacatttagtatggacgcagatgaggaaaaacacattctttacgaaaagacagaggtgacggactacgagcttaaacctggaggacgaaacatacgggtaacagaagaaacaaaacatgaatatgttgaccttgtggccggccacatacttaccagtgctattcgccctcaaatcaacgctttcctcgaaggctttaatgagttgatacctcgtgagcttgtatcaattttcaatgataaagagcttgagcccctaatcagcgggttgcctgagattgattttgatgatctaaaagcaaataccgagtataccagctacacggtagggtcccctgttattcgttggttctgggaggttgtcaaagctttcagcaaagaagatatggctagatttcttcaatttgtcactgggacatcaaaggttcctttggaaggcttcaaggcactgcaaggtatttntggccctcaaagattacaaatccacaaagcatatggagccccagagcggctgccatcagctcatacatgttttaaccaactagacctccctgagtatcaatctaaggaacagcttcaggaacgcctgctacttgcaattcacgnagccagtgaaggttttgggtttgcttgaagaaagcttgtcgaaaccaacccccgtcaccttaagaatcagtgaaaccccatcaatccttcattcttttgactcctctgtacatatctcgnaggtttttanggcaggnaatggngaagagcttttgtttaagactgcaggatgnataggaatcgaagtggctattttttncttgncccntttttgctnggntttngcccnttttattttntngggtntntttttgncctnc

SEQ ID NO: 126524 - DNA, 514 bp, Arabidopsis thaliana
gcagattgcttgtggggatagtcattgtttggctgtcactatggaaggagaggtccagagttggggccgcaaccagaatggtcaacttggtctgggggacaccgaagattctctagtgcctcagaagattcaagcctttgagggaatacgaatcaaaatggttgctgctggtgcagaacacactgctgcagttacagaagatggtgacctctatggatggggctggggaagatacggaaatttgggattaggtgaccggactgaccgcttagttcctgaaagagttacctctactggtggtgagaaaatgtcaatggttgcttgtggatggcggcacacaatatcagtttcctactctggagcattgtatacttatggatggagcaaatatggacagctaggacatggagacttggaggatcaccttattcctcacaaactggaagcactgagcaacagttttatctcccagatttcgggaggttggagacatacaatggcattgacttcagat

SEQ ID NO: 126525 - DNA, 502 bp, Arabidopsis thaliana
ttcaactacagcctcactcaaccacgccacttctgcaagacctgccggagatactggacacgtggcggagctctccgcaacgtcccagtcggcggtggctgccggagaaacaggcgtaccaaaagcaacagcaacaacaacaataacagcactgctactagcaataacaccagtttctcctccgggaatgcatccaccatcagcacgattctctcctcccactatggaggaaaccaagagagtatcttaagccagattttgtctccggcgaggctaatgaatcctacttacaatcatctcggagatctcacaagtaatacaaaaacagacaacaacatgagcttgttgaactatggaggattgagtcaagacttgaggtcaatccacatgggagcttctggtggctcgcttatgagctgtgttgatgaatggagatcggcgtcttatcatcagcagtcaagtatgggcggtgggaacttggaggattcttctaaacctaatc

SEQ ID NO: 126526 - DNA, 619 bp, Arabidopsis thaliana
  unsure (1)..(619): unsure at all n locations
aaaaaattgtgtgtggactctttctctcttctttgctggttttgaggagaatcgtgtcggctaaatttgtgtcagacacaccacactctgattgcaaagtcttcctcttcttcttccaccagagacaattccatcatcatcatcaaatagacaagggaagaattcaatttcccctttctttattggcgcgaagatctttcacagaatcaatcaccaacgaaaaatcgagaatggatgtttgcttgagctattcatataatatggatgatgagattgctaagttcatcagaagagtgaatccaccaagggttgtgatcgataacgaagtctgcaaagatgttactgtcattaaggtggatagtgcgaataaacatgggatacttctggaagggttgttcaagttttgactgagcttaatctgactattaagaaagcttatatctcctctgatggtggctggtttatggatgttttcaatgttactgatcaagatgggaacaaagttaccgatgaaattgttcttgaatatatccgtaaatctcttggtcctgatgagtcttcttgcttcagtccatcaatgagatcaaccatngnggttaaacaatctgtcgactacact

SEQ ID NO: 126527 - DNA, 521 bp, Arabidopsis thaliana
  unsure (1)..(521): unsure at all n locations
atgatctccagctctatacgactcatttagggaaagctggtacgcctgcaggtaccggtccggaattcccgggtcnacccacggggtncgagaccgatcgtgtaagccggtcaaaccctgggtcatggcttatactgcgtcccggagactgtacctggagaccgtggggaagacttgaagcatggcgggaacgcggtggagccactgatggtctaggttacagattcgaactcatcccagacggatcaagcggtgcaggaatcgtgcttgcggaatcaaccataagttctcacagaggtgggaaattctcaatcgagttgggatcggtcgccttcttcatcgtcgccaacaagtgtggtgaaccgatcgagaagccgtagaggtgggagtagtggaagcggtggaggagcatccccggcgaatagtccgagaggggggaacggagattacggttacggattgggggccgtggaacgtgtacaaagggtttgtgatgtcancaagtgtggaaggggaaggga

SEQ ID NO: 126528 - DNA, 777 bp, Arabidopsis thaliana
  unsure (1)..(777): unsure at all n locations
cggacgcgtggggccgccagaggcttttgtaacccgcttgaaaaccacagttcagaaaacggaggatgaggattatgtagaagggagcgaaacaggatatcccgaggcatctggtaatccggttgatggtgcagcttccccgtcagctaccacaggctatgtcacaaagctagctgctgccccagctcctgtacccgatctgctangtgacctaatggggtcagataatgctgcaatcgtccctgtagatgaacccacaactccgtcaggtcgtccactgcctgttgtcctaccagcatcaaagggtcaaggtctgcagattagcgccccgcgtgcccgacaagatggtcaagtattctacagtatgctcctcgagaacaactcgcagtcacttcttgatggcttcatgattcagttcaacaaaaactcattcggccttgcagctgtcggatcacttcaggttccgcctctgcaacccggagcatctgccaggacaatgatgccaatggtattgtcccaaaacatgtctactggctccaccagctcggtattgcaagttgccgtcaaaaacaaccagcagcctgtctggtacttcgaggataagattgtacttaacgctcttttctcagaagatggtcggatggagcgcggaaccttcctcgagacatggaaatcgttaccggattcaaacgaggtgcagaaagaattccccgggataaccatcacgagcgtggagtcaacacttgatttactcgccgcatcaaacatgttcttcat

SEQ ID NO: 126529 - DNA, 498 bp, Arabidopsis thaliana
  unsure (1)..(498): unsure at all n locations
accacgcgtccgctctctaagactcatatcattacgtcatgagttcaatagcaagagaccgaaaggaacaaatggtgatccattcttcaatcgtcttgcttcaagaaagattcagacaacttcagagagcaagagagttaagagctgaacgagagctcctaaaccctaaacctaaccaccaagacaacatcttgcaatattacagcgaacccactagtttcggtttctttcagtttctacctataaactctcaaacatcttcgtcacagcagctcctatccctctccttatgctcacactccacctctgaatccattgaaaagccaagcttttgtcatcagtggccaaataaagatgacaagaagatgggtgggattgatcgatacgacgatgttgggttgttgacaagggntttnnaatcttttaaaaaccttnaaatanttngttcccncccaaccttttttgnangntctttaattnaaaaatgggtggatttta

SEQ ID NO: 126530 - DNA, 457 bp, Arabidopsis thaliana
ggtgcattcactaataatctgatttgggtgactccatataaccggtcagaacaatatgccggaggagttctaatttaccagagccaaggtgatgacacactacaagtttggtcagaccgggaccgttcgatcgaaaacaaggacatagtactgtggtacacactagggttccatcacgtaccttgtcaagaagattatccagttatgccaaccgttgcggctagctttgaacttaaaccagcaaatttctttgaatccaatccgattcttgggtctgctcctttcttcgaaaaagacttaccggtctgtagaccatttgcttcatcttgaccggttctgttctgactaatactctaatagtatacaagtagagaagatcaaatatccggtgtagccaaacacttgttgaagtttatttgccggtttttgcaataataacaaaacgtccaatatctgt

SEQ ID NO: 126531 - DNA, 519 bp, Arabidopsis thaliana
  unsure (1)..(519): unsure at all n locations
atgnnnnnnnnnnnnnnnnnnnnnnnnnnnnnnnnnnnnnnnnnnnnnnctgcaggtaccggtcccgaattcccgggtcgacccacgcgtgcgcccacgcgtccgcggacgcgtgggaaatttttctccatattacaaaagaactaaagaagatggatcagtcatcatcaacgttgctcataaaccagagaaagtcatcatcgtctccgactaggatcccacctaagcagaagaggaagtcaacgactacgcacaaacccatcaaagtccgttacatatcaaatccgatgagagtcgagacttgtccttctaagttcagagagcttgttcaagaactcaccggtcaagacgccgctgatctaccaccgtcgcccaccacttttaccgccgtagatctccaccgtccgtgtgagtcggagatgaacttagagccgttggatggagaggtccgtggagagtattattcaccgttggatgaggaagtgtttaatgctcctcagatgtcggcaggtctttctg

SEQ ID NO: 126532 - DNA, 500 bp, Arabidopsis thaliana
  unsure (1)..(500): unsure at all n locations
atgatctccnnnnnnnnnnnnnnnnnnnnnnnnnnnnnnnnnnnnnnnnnnnnnnnnnnnnnnnnnnnnnnnnnnnnnnccacgggtgcgggcacgcgtccggttgggacaaaggacaagagttggagagcatgaagctatgaggaagattaagaatgagtttatgacacattgggatgggctaatgacgaaacccggtgaaaggattctcgttcttgcagcgacaaacagaccgtttgatcttgatgaagctatcattaggaggtttgagagaagaataatggtgggacttccttcgattgagagcagagagaagatcttgagaactttgttgtcgaaagagaaaacagagaatcttgatttccatgagcttgggcagataacagaaggctacagtggaagtgatctcaagaacttatgcatcacagctgcttatagaccagttagagagctgattcagcaggaaagattgaaagatcaggagaggaagaagagagaag

SEQ ID NO: 126533 - DNA, 390 bp, Arabidopsis thaliana
  unsure (1)..(390): unsure at all n locations
ggcgtgtaaagttcaaaagagagagtgagcgaagggaactgggggaactctcacagtggcatgcacctgatggtagcctttgcccctctgctgttgatattaaacggaagatggaaatgttaccggttaagcaagaaggttactcagatggtccagccccgctaaaacttggaataaggaagaatcgtaatggcatttgggaagttagcaaacctaatacaaatggattatcttccagtaataggcaagaaaaggttgggtatcaggagaagaatattataccaatgagtagtagtgctactggaagtgganggagggtgaatgatgcaagcgtaaaccaggatgctattggaacttttgactttgtagccaacggcatggaacttgatt

SEQ ID NO: 126534 - DNA, 569 bp, Arabidopsis thaliana
cggggggcggggttaaagagtgggaaaaattaagttaagtgaagggggggttgggcccaaagctttttaggtttttggaaaaaggtttcccgttttaaaggttttgggttttttttttcaggggaaatttgtaaaaatataagcttccggaaaaaataataggtatttttttttatagaaaaggaaaagcttttttttactttttcaaaggggaaaagattggaggttatttaggtaatgtttctggaatcctaaggttgtgaaaggccggaatataatctgcttgcccaatattcttttgagggaaaagtttacatctactgggggagttcatggacttgcgccccacttaaacgctgaaggatgctttcccagtaatggtaaaaccccatggtgcattcagtatgtagtagacataggatttatgaatcaagatagtagtactcaagttttgtggatcaaaatttaaaactaatgctttctgaaacagtgaaacagatggtctattatgtgttgatgataaacggctattctcgtagacaatagagaagcttgatccacatgaaaaa

SEQ ID NO: 126535 - DNA, 508 bp, Arabidopsis thaliana
  unsure (1)..(508): unsure at all n locations
cnnnnnnnnnnnnnnnnnnnnnnnnnnnnnnnnnnnnnnnnnnnnnnnnnnnnnnnnnnnnnnnnnnnnnnccacgggtccgagaatgtcctcgatgggtttgctaatgagcattaccgcgtggtggctgttaaatgatgggtaaaatctagtttgatggaggttgtgtttggcactatgcttgttagtttcttgcatcaagttccccgttttacagcttttggcatcttttctgcaggggaaatctgtgaaacatgaagctcccggagagatgatatgtaattttttgtgatagacaaggccaaccttttcttacctctccaaggggtaagacttggagcttattcagtttatggttctggatcctatggctgggaagctcccactatatctccttgacccatattcttttggcggaaaagtttacctctactgggggagttcatgcactttcgcaccttcttaaaccctgagggatccttttcccaaaatgggaaaaagggggatg

SEQ ID NO: 126536 - DNA, 940 bp, Arabidopsis thaliana
ggcgctaaaaaaatgctcgcctatttaggcaccaaacttaaggaagaaggtgggggttcaacagaaagaatagtggtaacagacttgagagaagaagcggttgtttacatcaatggaactccatttgtgttgagagaattgagtaaacctgttgatacgcttaagcatgttggaataaccggtgcagtggtagaaagcttagaaacacggttaaaagaagatatattggctgaagttcgagagactggaggccgaatgctattgcatcgtgaagaatacagcccggcatcaaatcaatctcgggttattggatattgggagaatattcaaccagaaaatgtgaagacacctgcagaagtatatgctgctctgaaagatgaaaattacaatatatcttaccggagaatacctttaaccagagaaaaagacgcattagcttccgatgtagacgcgatccagtactgtaaagacgattccgctgggagttacttgtttgtatcgcacaccggttttggaggagtttcttatgcaatggctataacttgtctcctacttcaacctggtcagaacttcacagctacaccaaccacaaattcttctaccttagaagaagatgattcgccttcaggggcttgtgatgaagaagcgttgagtatgggagactaccgcgacatactgagtctcataagagtgctttctcatggtcctcagagcaaatcagacgtagatggaatagtcgaactgtgtgctggtgcaggacatttgcgagaagacatcgtttactacagtaaagagctgaacaaacttcctattacaaaagatgaaaaccgttcatacatcatggacatgggtgttaaagccttaaggcgctacttttccctggatacattaagatcatacctctattaccgttgcccgaaaaaaatgaaattcttggatt

SEQ ID NO: 126537 - DNA, 375 bp, Arabidopsis thaliana
ggcaaacattccggcgatatacaaagtcagcaatggccgttctctcctctgtagcttctctcatacccttctcttatggggcaacgagactgactagttcagcttcattagcctcaagaacttccggattcaatctctcttctcgttggaactcaacgagaaactcccctatgttgtatctttcgagagcagtgacaaacaacagtggcaccacagagatttctgataatgaaacagctccaaggacttactcatggcctgataacaagaggccaagggtgtgcattctacgtggtggctttggaggattgtacacagctttgagattagaatctcttgtttggcctgaagacaaaaagcctcaggtggttttgg

SEQ ID NO: 126538 - DNA, 292 bp, Arabidopsis thaliana
gcaatttctcatgaagacagtcaaaaaatctctttttgtcttctcaaatttaaacctcacctttaatatttctccttacttttgaagctgtaataatattcttgaatctattcctttctttctctttctcatgtttaatcggtgaaggctttactctgtttctttcatcatgtttcaatcaaaagccttaactttttctttagctctttccattacaagagacctctagcttcatactttttagaagaattctctctttttctcagtttagtctcaagatatggtttcaaga

SEQ ID NO: 126539 - DNA, 593 bp, Arabidopsis thaliana
acgactcatttagggaaagctcggtacgcctgcaggtaccggtccggaattcccgggtccccccacgcgtgctgtttttctttttttcctccctctcttgattaatgcaaaaccaaaaagagtcactctacatatccctcttgtgcataatggtgcaaacttttatgacagcaaagttgtttctcttccactctcgtcaccccactcccagcgagggctagcgttcatggccgaaattcattttggctcccctcaaaagaaacaatttcttcacatggatacgggtagcagcctcacatggactcaatgcttcccttgctccgactgctatgcccagaagatttatccaaaataccgaccagcagcttcaataacatatcgcgatgcgatgtgtgaagattcccatccaaagtccaatccgcattttgcattggcatcctttgccgagaatatggcccctaccagcagcgattgcttagccgataccaacatcaaaggaacactagcgcaagaaatgattacagtagatacacatgatggtgggttcaaaagggtgcacggtgtgtattttggatgcaacacgttaagcgatg

SEQ ID NO: 126540 - DNA, 818 bp, Arabidopsis thaliana
  unsure (1)..(818): unsure at all n locations
atgatatgccnnnnnnnnnnnnnnnnnnnnnnnnnnnnnnnnnnnnnnnnnnnnnnnnnnnnnnnnnnnnnnnnnnnnnnccacgggtggcggcacgcgtccgcacgagacgaagaatgagttcgtgggtttgctcttccgtaactcgaaacgtcgtaaagtcacatcctttatcattaaccaaacaccttgatttcccggcgacgattcggagaagatcagtcagctttccggcgacgattcggagaagatcagtcagctttccgataacatctgcgccgaaatttccgtctttgaaactccaaaagtctcaatcgtcgatccatgaaggagaagaagactcagaatcagccgtacaagccctcacgattccagaagagtggttgctcccttctagagccattgaggaatctgaatggttgagagtaactttgcacaaatggttggatgatgagtattgccctgagccaaccaatgtggagatcagtgaagtagctgcaaagtcttactatagttcactgctagagaaagaaagtgacatgggagagattttgttgaagatggctcaagatttaacttccatttcataccaagaaagcttccatggagctttcacatccgctaatgcagctataaatttgattgttgacagaatagaaaccggcctagtctagtctagtctagtgcagtctagttcacttgaagtttcaagaacagttttctttgtatattatgagttttgttacttcacttggtcaggtgcagggaaatctaaagaatttacagttgtgaaaaaaaaaaaaaaaagggcggccgct

SEQ ID NO: 126541 - DNA, 451 bp, Arabidopsis thaliana
aattttcaaaacatcaaccaaaaaacaaaaaaccaaaaagaaaaaacaaaataaaaacaagaaataatggagatgaagaacatctttgtggccctctttatctcggccgtgttagtgagctcagtctccgcggctacaatggagtctccagcaccatcaccaggtgcttcctctgcctccaccgtagcttttccggtggttggctccattgttgctgcatcactctccgccttcttggctcttctcttgcagtagaaagacaagagtcctcaaaatatgagaaggagatatataacaaaactctttttttgttctgattttgttccttagaatctatgatgacaaataacccattttgatgtataatctcattgtgtaagttattacactaatatatatgagtatatgataataataacactattttatcagatctaatgatatctggtcc

SEQ ID NO: 126542 - DNA, 202 bp, Arabidopsis thaliana
tgtagaccctctctaattggaaagggaacatccagctgaatcagatcagcttgttctacatgagtatcaatcctaccatggctcttcaggagtacctcctcatcgtcttcaacaagctcagatatatccatagatttgtatttgtctgtacgaaagaagtctatgatgtaagagttccacatgaagaagtgaattacagaag

SEQ ID NO: 126543 - DNA, 528 bp, Arabidopsis thaliana
  unsure (1)..(528): unsure at all n locations
nnnnnnnnnnnnnnnnnnnnnnnnnnnnnnnnnnnnnnnnnnnnnnnnnnnnnnnnnnnnnnnnnnnnnnnnnnnnnnnnncccacgcgtgcgagggtgtaaagcttcgaatctctccctttgcttcgtcatatatctaaatcaccccactcaagatttcaaattccctatatctttgtttttataaattctttctaattttattgtcacatataattgaagcctaataaatcacaccacactgtcttactctgtttttgtttcttctctactctgttttttttttttcccttcaacattgaagataaacttatcttttctctctcaaagactgaaactttatcaaaaggggctcatcggcttcatcattggtatctccatcttcatatacagaggtaaaagatgcttggcgtccatcaacaacagcgaacacaacagaatcaggctactggtttaatggggagggctatgatctgctgcatagggagggtttagggactggggatcacggtttttttatattcaaaa

SEQ ID NO: 126544 - DNA, 978 bp, Arabidopsis thaliana
  unsure (1)..(978): unsure at all n locations
attccttcttacctcttcaccatgcctttnctagtttctcttaacctacgccaaaaccatcttagtgaccctcttgagaatataaatnattctgcaacctctaaacttttaattttagacatggcttataaccttatgagtcatcgaatcctagaacctatctcaaaattagccaacctcatacaaattgacttatcttttcagaagacaccccccacgcgtgcgtgcacattcaactttgatttcttgctcttcaagtctctagtgcgtttggatctttccggaaatagtgtttcagtggttggtaccggttcagaaaatttgacacatctagacttgtcgagctgcaacatcaccgagttcccgatgtttattaaggacttacaaagattatggtggttagacatttccaataatagaattaaaggaaaagtgcctgagttgttatggactctgccttctatgctccatgtaaatctctcacgcaactcctttgattccttggaaggtacgccaaaaataatcctcaattcgtcgatttcggagttagatttgagttcaaatgccttcaaaggatcttttcctattattccaccttatgtcaacatcatggctgcatcaaataactatttcactggaggcataccacttatattctgcaaaagatatcgactcagtctccttgatctagcaaacaacaacttcagtgggtcaattccgagatgcttgacaaatgtatcactcggactagaagcgttgaaactcagtaacaacagcctcactgggagacttncggacatagnagatcgtttagtactacttgacgttggccacaaccaaataagtggggagctttcaaggtctctagtaaactggacaaccctnaagttctaaattntgggaggaanccacatcaacggcantttccctttttggctgaggtttnacgggnttgnatcatntnctgggcaaanagag

SEQ ID NO: 126545 - DNA, 496 bp, Arabidopsis thaliana
tttgacgcgtgggagactatatggcctcccattgctccatgagagtaatcctcctcagattctccaatggcgtctcttccagatccattctcaactccactaaccatcgtcttcttagtcttaccatgaccaacactctctcgtctctttcctcaatctctccccacactactacttcgcatttcacggctgcgtcacaacaatcagatgaccagaactgcttccgcaagcttcaactcagaaagatttcgatttcaactcctctttcgtatgggtcgtcgttcttccaaaatcgctggtcgaaagggcgctcaagattcaaagaaggcgaagctatactgtagaattggcccggaggttgtatctgctgtcaagaaagggggtccaaacccagtttcaaatacgactctagctactattcttgacaaagctaaagaactggatgtaccgaaagacattgtggagcgtaatattaagagggcttctgagaaggggc

SEQ ID NO: 126546 - DNA, 379 bp, Arabidopsis thaliana
agagttttcgatagcgatgacgacagcgatgatgagatccggtatttggaaaagttgaaatataagagagtctctgtgtgtaatgaggatactgagtctggaaggaagcagttgacgccatctgggattacaaatggagaaaattccggcaagaagaaagctgtgtccgaacaggcgtccgaagacatggattgtccggaggaaattgaaacggcgtctgatgaaaaagagattggtaatgataataagagggaatcaaccatgactagtcgtcagcgagcccttgcttctggcagatccagcgcgattgatttttcagatggattacctcctacatctagaagtaagattttaatcctttgctactgccacataaatc

SEQ ID NO: 126547 - DNA, 722 bp, Arabidopsis thaliana
  unsure (1)..(722): unsure at all n locations
gcccccngnggnatttttnngaaacctnnaagggttaaaatctcccttgaaggcgccctttggccgnactggggcttaaacacctgccccaagggcgcttctgaccgcctaaactnatcaaccactccttcccttgaggacaatatggagtttttgatttaaatgcatggatgatttatctatggaacagcaaaagttccagtattactaccggaacctgtctcgtcagcaagcacaacagcaagcctggctccagaagagaagaacggagaacatggctcgtaaatcagctggagaggagcctttaccagaagaggatccttcaaacccaatctttaaggcgatccctgaaccatctaggctagagagtttcctcatcacaaaccaagtctcaaacttctgtggccaaatcaatggagtggctggccagaacttcagcaggctttacctgaccaaagcattgcacgacaactgattgcaaagactacccaagtttttgttttttgagtcagaaagtgaaagacttggtggtagaatggatcctatatttgtttttcgtggatgtttttgtttttatttttgttgttgtgaagtaatttaatttacaagcttttcaaaaaaaaaaaaaaaaggagtctttattcttatgcataatgaaaaattattgttgttatgaaccnnnnnnnnnnnnnnnnnnnnnnnnnnnnnnnnnnnnnnnnnnn

SEQ ID NO: 126548 - DNA, 735 bp, Arabidopsis thaliana
gtttcccactccacatccaaaaaaacagtgtaataataatcataatcacctgatcaatctcttacataaaagctacagatctggtgttatacaatcatcaccgcaccaagttcctaaaggtttcgactttactgtttctattttcggaaagagagtgcaagattgaaatcgaagatgaaggcggcaacaaggccgatccacgccgtgacgacatgggttcgtcggcaaccaccaaaggttaaaggttttctcggtgttgtctccgccatgactgccctcgttttgttgagagtgattgttcatgaccacgacaatctttttgtcgctgctgaagctgttcattcccttggaatctccgtccttatctataaactcaccaaggagaggacttgtgctggattatctctcaagtcacaagagctaacagctctgtttttggcggtgagactgtattgtagttttgtgatggagtttgatattcacacgttacttgactcggctacattggtgactacactttttgttatctatatgatccgttttaagctcaaagctagttatatggacgacaaagacaattttgctatctactacgtcgttattccatgtgttgttctatcagtactcattcacccatcaacacatcatcatataatcaataagatttcttgggccttctgtgtttaccttgaagctgtttcagtccttcctcaccttagagtcatgcaaaacact

SEQ ID NO: 126549 - DNA, 441 bp, Arabidopsis thaliana
ctcactttagggaaagctcgtacgcctgcaggtaccggtcccgaattccccggtcgacccacgcggtccggtttcacgctatttggaaggattcaagcaactttggtgatatctatgacgaagatcacttcatatcaagccttgaaggttatgtgaaaatagtgagagatgttcctgatgagataatgactccttttagttacaatgtttcaagtattcctactgtgtcgtgttcaagcttgggctactgtgaaactactataacggggaagtttatccggttttaaacgaacatggggttattccgataactcctttcccaaatagattggccatgagtgttccaccctatatacaacttttgaggggcctagctaattacaaagcattggagttttcttcacctatatcaacactagctgagaagttagtcgatcggat

SEQ ID NO: 126550 - DNA, 514 bp, Arabidopsis thaliana
  unsure (1)..(514): unsure at all n locations
nnnnnnnnnnnnnnnnnnnnnnnnnnnnnnnnnnnnnnnnnnnnnnnnnnnnnnnnnnnnnnnnnnnnnnnnnnnnnnnnnnnccacgcgtgcgagttctctccttgagtatcttcttatcctattttccaaattccaaaacaattcacaaaatggctacatgctggcctgagccgattgtttccgtgcaatccttgtcccaaaccggtgtaccaactgtaccaaaccgctatgtgaagccggctcatcagagaccggtctttaacaccacccaatccgatgctgggatagaaatccctgttctagacatgaacgacgtttgggggaaaccagaggggctaaggctcgtgaggagcgcgtgtgaggagtggggtttcttccaaatggtgaaccatggtgtgacccactcgttgatggagagagtgagaggagcgtggccagagttcttcgagctaccgctagaggagaaacggaagtatgcaaactcaccggacacgtacgagggatatggaag

SEQ ID NO: 126551 - DNA, 446 bp, Arabidopsis thaliana
  unsure (1)..(446): unsure at all n locations
nnnnnnnnnnnnnnnnnnnnnnnnnnnnnnnnnnnnnnnnnnnnnnnnnnnnnnnnnnnnnnnnnnnnnnccacgcggtgcgcggacgcgtgggcaatgttaatggtttttctcctggtgattgggtcattccatctccaccttcttcagggacttggcagacttatgttgtgaaggaagagagtgtgtggcacaaaatcgataaagagtgtccaatggagtatgcagcgacgattactgttaatccattgacggctttgaggatgcttgaggactttgtgaacttgaattctggggattctgttgtacagaatggtgcaacaagtattgtgggtcagtgtgtcattcagttggcaagactccgtggcatcagtaccatcaaccttattcgtgacagggctgggtcggatgaagcaagagagcagctgaaagctctaggtgcagat

SEQ ID NO: 126552 - DNA, 356 bp, Arabidopsis thaliana
atcaggggatatataaacaagaatgagtgtccacataaataatccaactaacacatcagcataatcccaaccgaaacagcttctagagagagacaaaaaagaacagagtaactatctaaaactcaaaatgtgtgcacttgtccctccattatatcccaatttcggctggccttgcggagatcatagcttctatgaaaccgacgacgtatccaacacgtttcttgattttccgttgccggacttgacggtgactcatgagaatgtgtcgtctgagaataacagaacattactagacaatcccgtggtgatgaagaagcttaatcacaacgcgagtgaacgtgagcgtcgcaagaaga

SEQ ID NO: 126553 - DNA, 523 bp, Arabidopsis thaliana
  unsure (1)..(523): unsure at all n locations
agatacttccnnnnnnnnnnnnnnnnnnnnnnnnnnnnnnnnnnnnnnnnnnnnnnnnnnnnnnnnnnnnnnnnnnnnnnnccacgcgtccggggtgaatggacagagcataggtaggtactggccaactagtatcgctggaaatggcggttgtacagaatcatgcgactatagaggttcttaccgtgcaaacaaatgcctcaagaactgtggaaaaccttcacagacattgtatcatgtacctcggtggggggctaaaaccgagcgggaacatacttgttctgtttgaggagatgggaggagatccaacacaaatatcatttgcgacaaaacaaacaggaagcaatctttgtctaacggtgtcacagtctcatccaccaccggtggacacatggacttccgactcaaagatctcaaacagaaacagaaccagggccggttctttcggtgaaatgccctatctctactcacgtgatattttctataaaatttgcaagctttggtacacccaaaggtacttgcg

SEQ ID NO: 126554 - DNA, 695 bp, Arabidopsis thaliana
  unsure (1)..(695): unsure at all n locations
tcgaggtcgacggtatcgataagcttgatatcgaattcgcggccgctggcatcttgatggttactctttctgggttgttggaatggatggtggacagtggagtccagatagtaggaacgagtataacctacgcgatgcagtcgctcgctgcaccgttcaggtatacccaagctcatggacggctatattgatagcactcgacaacgtaggaatgtggaatctaagatccgagttctgggcgaggcaatacttaggacaacaattgtatttacgtgtgtacacaccctcaacttctctcagagatgaatatccaatccccaagaacgctcttctctgcgggagagccagtggtcgcagcaccagaccgctttgagctgggtggttagatatagaaaatgaccggagaagatggtcagccaaacccaagctgaccgcggttctttgaggcgggggttccttggtttttatacacattccttcatttttgctaaatgaattgagaagcagtttatggttaaaatcaggatatccaagtttggaacggtctcaagcccgaggggcggccccgaattcggccggccgcgcggccggaanttccntgaagcccggggggncccanggtnntaanggccnacccggggngcccaccttcnnnnnnnnnnnnnnnnnnnnnnnnnnnnnnnnnnnnggggagt

SEQ ID NO: 126555 - DNA, 820 bp, Arabidopsis thaliana
  unsure (1)..(820): unsure at all n locations
atgannnnnnnnnnnnnnnnnnnnnnnnnnnnnnnnnnnnnnnnnnnnnnnnnnnnnnnnnnnnnnnnnnnnnnnnnnnnnnccacgcgtgcgcgcacgcgtccgtcgacacatctgttatgcaagttgattacagaacctttgtggagattattttcgaaaattctgaggatattgtccagagctggcatcttgatggttactctttctgggttgttggaatggatggtggacagtggagtccagatagtaggaacgagtataacctacgcgatgcagtcgctcgctgcaccgttcaggtatacccaagctcatggacggctatattgatagcactcgacaacgtaggaatgtggaatctaagatccgagttctgggcgaggcaatacttaggacaacaattgtatttacgtgtgtacacaccctcaacttctctcagagatgaatatccaatccccaagaacgctcttctctgcgggagagccagtggtcgcagcaccagaccgctttgagctggtggttagatatagaaatgacggagagatggtcagccaaaccagctgacgcgttcttgaggcgggtttcttgttttatacacattcttcattttgctaatgaatgagaagagtttatgttaaaatcagtatatcagtttgtaacgatctcagctcgaggtctcattcttgattcttatattctttctttttctatggaacgaaacatttattcaatataattccacagtttcatcgtaaagcttattatcaaccccaaagggcaaccgctctagaggatccaagcttacgtacgcgtgcgtgcg

SEQ ID NO: 126556 - DNA, 498 bp, Arabidopsis thaliana
  unsure (1)..(498): unsure at all n locations
attgagggaccgggnctgaantncctgggntgcccactgngtccggtgtacacacccgtcaacttctctcagagatgaatatccaatccccaagaccgctcttcttccgcgggagagccagtggtcgcagcaccagccccgctttgagctggtggttagatatagaaatgaccggacagatggtcagccaacccacctgacgcgttcttgaggcgggtttcttgtttcacacacattcttcccccccctaatgaatgagaagagtttatgttaaaatcagtatatcagtttgtaccggtctcagctcgaggtctcattcttgattcttagaattcttcccttttttcctagggaacggaaacattttattcaaatataattccacagttttattgtaaaaaaaaaaccaaaacaaaagnnnnnnnnnnnnnnnnnnnnnnnnnnnnnnnnnnnnnnnnnnnnnnnnnnnnnnnnnnnnnnnnnnnnnnnnnnnacaat

SEQ ID NO: 126557 - DNA, 945 bp, Arabidopsis thaliana
  unsure (1)..(945): unsure at all n locations
nnnnnnnnnnnnnnnnnnnnnnnnnnnnnnnnnnnnnnnnnnnnnnnnnnnnnnnnnnnnnnnnnnnnnnnnnnnnnccacgcgtccgcccacgcgtccggcgaaggattgcatcaagtaatcgccgtgtaactaactacttttgcattcaccatcgctcttacgtttgaatctatccagatccaaagctcttcttcttcccggcaattctgagatctcattttcaccggcgacgagctttaatcggagaacgatgaagcagcttcacaagcaaatgagctcgaagcgtgatgaagaaaccattcccatgagccaatccagtccttactctcccaaaactttaaagcatcccagatctcttcccagatcgcttcactatctctttcgtgaacaacgactcctctttatcctcgtcgggatcttgatcggatccactttcttcatcctccagccttctctctctcgtttaggcgccgctgagtccacctcgttaatcaccagatctgtttcctacgccgtcaccgattccccgccttccaggtcgacttttatttccggaggcggccgaggtagaaccggtcgtgttcccggcggtatcggacggaagcgactgaggattgttgtcaccggtggagctggtttcgtcggtagtcatcttgttgataagcttatcggtaggggagatgaagtgatcgtgattgataacttcttcactggtaggaaggagaatttggttcatctattctcgaatcctaggtttgagctaattcgacacgatgttgttgagccaatcctccttnaggtcgatcagatttaccatttagcttgtccagcttcacctgttcattacaagtataatcnagtcaaggctatcaaaggcaaatgtaatggggnactctcaaatatgttggggccttncaaaaaaagtttggggcaaagtttttt

SEQ ID NO: 126558 - DNA, 625 bp, Arabidopsis thaliana
  unsure (1)..(625): unsure at all n locations
cagctannnnnnnnnnnnnnnnnnnnnnnnnnnnnnnnnnnnnnnnnnnnnnnnnnnnnnnnnnnnnnnnnnnccacgcgtccgcccacgcgtccgattgtattttctcttttagggattgtttttttaacaatttttgccttgccataagcaatacaaccatggcaaggatctctctgttgttctcattagcctttgttttagccctcggctcagtgttcctttccgtttccggtcacgctcctcccgtgacaccgagaaaatcagcatgtccaaaaacagtatccgaactccagaccttaccttttaccgaaatcactgagatcctaaaccgaaaagagcggtctgccccgaaaacccctgagttcaaggcaatgttcacaatgtgcaaaggctacgtgacatacctcgagagcctctacaagtttgagaatcccattgtagatgttttaggaattgccaagaccagatacaccctgatgaacaaggcaattcttgctgcgcaagctagtgttggcggtaaagtcaataagaaaacttctttgaagctaaagaaaagctatgctgatttgacaaaagggtttctccgaattaaagaaactattgtaaagatatcagccaaaca

SEQ ID NO: 126559 - DNA, 400 bp, Arabidopsis thaliana
cggacgcgtgggcggacgcgtgggatcgccgccaacgaacccatcctttgcctgatctgggagcagattgccattctctacaccggatcgcttgaagaccgctctgatgccgccgcctcgctggtatctctggcccgtgacaacgatcgctacacgaagcttatcatagaggaaggaggtgtggtgcctctccttaaactgctcaaggaagggaagcccgaggggcaagagaacgcagcgcgtgcgttagggttactgggacgtgatcctgagagcgtggagcacatgattcacggcggcgcttgttccgtcttcggcaaattcctcaaagaagggcctatgaaagtccaggcggtggttgcgtgggctacgtcggagcttgtgtccaatcaccccaagt

SEQ ID NO: 126560 - DNA, 365 bp, Arabidopsis thaliana
  unsure (1)..(365): unsure at all n locations
atatccgttttccgatttagggcaccaaattgaatcaaaatctccgcttcttcccaatttacgaaacttcacgaaaaatcttcttcggattcttcttaaccctttctctcaatttttcttccagagttttctaattgggcactgtttctcttcttcttcttcttcttcctccattgtaggcggtttcgcgtcttgtcaccgaatgatacattgtctcacgtgagattgtcagtcagttagtgcaatgtcaaaccttcattcatctctcaatggttcagcttcgaatttaccagatggttcgggcagatcgtttactgcttcttattctggacaatctggtgcaccgtctcnctcttttcatcata

SEQ ID NO: 126561 - DNA, 530 bp, Arabidopsis thaliana
ggaagaggcttcgcttacttgctgagaaaaaagctccaaactttctcttattgggtttttgatcagctccggagataaaaaaaaaaagtattttcttgaaatcgaaatctgatctccattgagagtcttgctacttgatttggattccgatttaaggttttctcgagaattcttttgctgcagttattagattttgacgagccgttgatctggacggagttccagatctccgggtcgtggtaccaaggaattagggttttagcacaaagttctcgtttttctgtgtattcgagggatgaaggagttttcgggtcgatgttcgctgctctaacatttggagtatgaagatgaacatgaagaaatttctcaaaaagcttcgtatcacgcccaatcaacgagacgatggtgaaggttcagtctctaacagaagcaataagtctagtgatgcagaaccatctccttctgattcattgaggtctcaagataactctgaattcaaaccctttttgggtttatcaaattggttaagc

SEQ ID NO: 126562 - DNA, 1061 bp, Arabidopsis thaliana
  unsure (1)..(1061): unsure at all n locations
nnnnnnnnnnnnnnnnnnnnnnnnnnnnnnnnnnnnnnnnnnnnnnnnnnnnnnnnnnnnnnnnnnnnnnnnnnnnnnnnnnnccacgcgtccgcccacgcgtccgaaaaaaaaaaaaaaaaaaaaatctttacttctttatataccaaagatcacaataatgtcacaatcatcaacaccgattcatcgtcatcttcaactcggtcttgatcttcgtctttctaccgacatctaatttgtttgtctgaagattcgtaaaaaaaatctctttgctttctattaaggaaaagaaaagtttgcgactttgattggtttcgatgaagcttcgacaaacacagggttttgtctgaatccttttggtttatttccgagagaatttgtgttttttactttaagggtttgaaagaagaagcaagaacataaatgggttgtgctggatcgacacagtctcaagcagatgggtcagtgaagaaaattaggaagccgaaaccgtggaagcatacccaaccgatcacgaaagctgagcttatgaaacttagagaagagttttgggacactgctcctcattatggtggtagaaaagagatatgggacgcacttcgcgctgctgcagaagctgacatatctcttgcacaagcaattgtggacagtgcaggagtcattgttcagaacacagatctcacagtctgctatgacgagagaggtgctaagtatgagctacctaagtatgttctaagcgagcctaccaacttggaggaagaaaattgatttaagatcaagaatattcgaaaagacaagaaaagaaaagaaccaaatgtaaatcttgtgtgtaagtagttacattaggattctctgcttttgtctatttaaacacttattaaaaagattgattcccacatctctctccctctgacttgtacttacttagattgcttctgaaatgctaaagacagttttttgggtttcaaaaaaaaaaaaaaaagaaaaaaaagggcggccgctctagaggatccaagcttacgtacgcgtgcatgcgacgtcatagctcgtctagagtnnaa

SEQ ID NO: 126563 - DNA, 617 bp, Arabidopsis thaliana
  unsure (1)..(617): unsure at all n locations
cccacgcggccgcccacgcgtccgcccacgcgtccgcccacgcgtccgactctgtgagctttatccgcttccaatggcgtcttccgccgcttctccttccttatctctactctcattcacctcgaagccaccttatccctccggctctcagcggctatttgcgtcattcagaacggacggtcttttcgcgcctttaacactgaaatcccgacgcggccgtggtatagtcgttaaagtagatgacgtcgatgctgatggaggtggagcggacgagtatgatatggatgatgaggaggtagaggaagttgacaacaagaaggactatgatgtcgagtatgaccccttggccgccgcgatagccgctgcaggcggtggtggtgatggagatatcgcttttgttcagagtaagagttttatatcgacacaaggattgggattcggatatggtgggttgattatcggataaacgaagatgacgtttcataaactcagcttaattggacctgtnatttctttttcaggaaaacctcctgatccagataattantgttantnattttcagaggggntnntgtnncnccccggttacaggtttttnctcaattnccgggggtctt

SEQ ID NO: 126564 - DNA, 458 bp, Arabidopsis thaliana
  unsure (1)..(458): unsure at all n locations
atgtatgccnnnnnnnnnnnnnnnnnnnnnnnnnnnnnnnnnnnnnnnnnnnnnnnnnnnnnnnnnnnnnnnnnnnnnccacgcgtgcggccagtactactcgtgatgtatctagtgcagtacatgccttcccttggcttctggctcatggacaaggttggaggaaagcgtgtggaggtcgcggaaaagaaaggcaacacatactcgtgggatttactgttcgggaagaagactaaaacaaactgaagctgattctctagaagatacacatagatgtggttggttgagccttagtccgtaaatgtggttggtgtttgtttgctagtttgattgttaaataactaccaaagcgtcgaaaaatgttttgttgccttgtgaggtgctcaataagtaagaaaagatgtgatcaaaaaaaaaaaaaaaaaaaaagggggggggcgttctagagggatcaagct

SEQ ID NO: 126565 - DNA, 609 bp, Arabidopsis thaliana
taatacgactcacttagggaaagctcgtacgcctgcaggtaccggtccggaattcccgggtcgacccacaggtgcgcttcttctccactattttcaatggctttaacattgtcaaccacaaagaccttcactaacataaactgctcaaacaatacttccaacataaccacctttaagcctctcaagcttcctcttttctggccatggcaaaaggtcaaaatgggtcctttaagtgtttctcctatgggttttgggacatgggcttggggtaatcagcttctttggggttatcagacttccatggatgatcagcttcaacaagcttttgaattggctttggaaaatggaatcaatttgtttgatactgctgattcttatggcactggtaggcttaatggccaaagtgagagacttttggggaaattcattaaagaatctcaaggacttaaagggaaacaaaatgaagtagtggtagctacaaagtttgccagcttatccaggaggttaacttcaggacagtttgtgaatgcctgcagagcttctttagaccggcttcagatagaccagctcgggattggacagcttcactggtcaactgcaagctacgcg

SEQ ID NO: 126566 - DNA, 864 bp, Arabidopsis thaliana
  unsure (1)..(864): unsure at all n locations
cactatagcgatagctggttcgcctgcaggtaccggtccggaattcccgggtcgacccacgcgtccgaaactcaacatggctagatccttgttgctctcgctaaccctcacattcctcttcgccggaattgtctcagctcgtgactggaacatcctgagccagctcaaaggaaccacaaccaccacgaagactagccaaaccggcgtcacatctttgaaagctcccaacctaaacggatactgtgagagctggagagtcaacgtggagcttaacaacataagggactttaaggtggttccacaggaatgtgtatggttcgtccaaaagtacatgacctcatctcaatacgaagatgacgtggagagagccgtcgatgaagccatcctctacctcggaaaaacttgttgcgagaagaagacatgcgatggcatggatgcttggatctttgacattgatgacactcttctctcaaccattccttaccacaagagcaacggttgtttcggtggtgagcaactgaacacgaccaagttcgaggaatggcaaaattcgggcaaggcaccagcggttccacacatggtgaagttgtaccatgagatcagagagagaggtttcaagatctttttgatctcttctcgtaaagagtatctcagatctgccaccgtcgaaaatcttattgtaagcccggttcccccacaagcttggtcttaacctcctttcggagggggaggaaggattgttgaaaaaggaagagttttgtgccattcaaaagnagttttttnggccantggcttcaaagnntttggnnccaaggttttgggggttatttggggnccaattgggccantttttttggttgccca

SEQ ID NO: 126567 - DNA, 876 bp, Arabidopsis thaliana
gccggaattttcgggtgcgactccacccgtacgcgatgaagccatactctacctcggaaaaacttgttgcgagaagaagacatgcgatggcatggatgcttggttctttgacattgatgacactcttctctcaaccattccttaccacaagagcaacggttgtttcggtggtgagcaactgaacacgaccaagttcgaggaatggcaaaattcgggcaaggcaccagcggttccacacatggtgaagttgtaccatgagatcagagagagaggtttcaagatctttttgatctcttctcgtaaagagtatctcagatctgccaccgtcgaaaatcttattgaagccggttaccacagctggtctaacctccttctgaggggagaagatgatgaaaagaagagtgtgagccaatacaaagcagatttgaggacatggcttacaagtcttgggtacagagtttggggagtgatgggtgcacaatggaacagcttctctggttgtccagttcccaagagaaccttcaagctccctaactccatctactatgtcgcctgattaaatcttatttactaacaaaacaataagatcagagtttcattctgattcttgagtcttttttttctctctccctcttttcatttctggtttatataaccaattcaaatgcttatgatccatgcatgaaccatgatcatctttgtgtttttttttccttctgtattaccattttgggcctttgtgaaattgattttgggcttttgttatataatctcctctttctctttctccaaaaaaaaaaaaaaaaaaaaaaaaaagggcgtccgctctagaggatccaagcttacgtacgcgtgcatcatacgtgatagatagtg

SEQ ID NO: 126568 - DNA, 455 bp, Arabidopsis thaliana
  unsure (1)..(455): unsure at all n locations
gaattncccgggtcancccactgcngtccggtaaactcaacactggctagatccttgttgctctcgctaaccctcacattcctcttcgccggaattgtctcagctcgtgactggaacatcctgagccagctcaaaggaaccacaaccaccacgaagactagccaaaccggcgtcacatctttgaaagctcccaacctaaacggatactgtgagagctggagagtcaacgtggagcttaacaacataaggggctttaaggtgggttccacaggaatgtgtatggttcgtccaaaagtacattgaccttcatcttcaaatacggaggttgacggttggagaggagcccgtcggcttgaaagccaatccctttcccccggggaaaaactttttttcccggggaagaaggtcattncnggttgggnaattgnnttncttttggtttnttttgaaaattt

SEQ ID NO: 126569 - DNA, 660 bp, Arabidopsis thaliana
  unsure (1)..(660): unsure at all n locations
caacatggctagatccttgttgctctcgctaaccctcgcattcctcttcgccggaatggtctcagctcgtgactggaacatcctgagccagctcaaaggaaccacaaccaccacgaagactagccaaaccggcgtcacatctttgaaagctcccaacctaaacggatactgtgagagctggagagtcaacgtggagcttaacaacataagggactttaaggtggtgccacaggaatgtgtatggttcgtccaaaagtacatgacctcatctcaatacgaagatgacgtggagagagccgtcgatgaagccatcctctacctcggaaaaacttgttgcgagaagaagncatgcgattggcatggatgcttggttcttttgacattgatgacacttcttcttttcaacccatttcccttaccacaaggggcaacgggttgttttcgggtgggtgagcaactttccacggcccaaggttcgggggattggcaaaaatttgggnaaggaacccagcgggttccacacaattggggaagggttttccctgggtctagggggccggggttaaaggtttttttgacctttctccggaaggggttttagcttccccgtggaanttttgggcggtccnagtggtaccnctttggggngttnaaaantta

SEQ ID NO: 126570 - DNA, 515 bp, Arabidopsis thaliana
  unsure (1)..(515): unsure at all n locations
atgatactccnnnnnnnnnnnnnnnnnnnnnnnnnnnnnnnnnnnnnnnnnnnnnnnnnnnnnnnnnnnnnnnnnnnnnccacgcgtgcgggaggatcaaagaagctatggcttccaatttctggacttcgacgcactacaaagagcttaaggacccacaagaggttaatgttgttcatcctcttgatgctcagagaggaatctctgttgaagatttcagactcattaagcttcatatgtctaattatatatcgaaactggcacaacacattaagattaggcaaagagttgttgcaactgcagtaacctatatgcgtcgtgtttacacaagaagagtttgacggaatatgagcctcggcttgttgctcctacatgcttggatttggcttgcaaagcaaaagagagtgtggtgcatgccaaacttcttgtcttctacatgananaactttatgcggatgaaaagtttccatttgagattaaagattttctggaaatggagatgaaggtcttggaac

SEQ ID NO: 126571 - DNA, 758 bp, Arabidopsis thaliana
gcaaaaactctctatttctctttcgccggagataatgggagaagggaaggcctccactctggttttcatcctcgtcgtcgctcttagtttagtagccttcggcttctccatcgccgccgagcgccgccgcagcatcgggaaatctattcaagacccaataacaaacacaacgttctgcgtttatgactctgatgtagccactggttatggagttggagctttccttttcctcctctctagtgaatcattgcttatgagtgttaccaaatgcatgtgttttggaagacccttagcccctggaagtgaccgtgcttggtctattatctatttcatctcttcgtggatgacatttctggtagcagaagcttgtgtaatagcaggagcgaccaagaacgcataccacacaaagtacttaagttcgcaaaccttttcgtgtgcatcattgcgtaaaggaattttcattgcaggtgcagtctttatagttgctactatggttcttaatgtctactactacatgtattttaccaagtccgtctcttcgccgcctgctcacaaagccaaccgctctagttccaatattggtatggcgggttatgcataaatgtcaaaaagaggaaatggttagtcatttgcattgtagatgtaagaaaggaaagagattgttgcattgttacaacacttggttactcttatatcttttgcttatatatctcttacttatttatgaaaaaaaaaaaaaaaaaaaaaaaagggcgccc

SEQ ID NO: 126572 - DNA, 773 bp, Arabidopsis thaliana
catcgactcacatagggaaagctggtacgcctgcaggtaccggtccggaattcccgggtcgacccacgcgtccgtacggctgcgagaccacgacagaaggggaattcagacacctgactcgtcttctcatcctacccccaattcaatattcgtcgccaatatgccgcaaagacactcgaagaacaacaatgatcttgcgtatttcacttacgacgagaagaagaagttaggttatggaactcagagagagagagattggggagagactcgatcaaaccctttgatgcttgttctctctgcttgaagcctttcattgatccgatgtgttgccataagggtcatgtcttttgcagagagtgtatacttgaatgtttccttgctcagaagaaagatatccaaaggaggcttgctgcacattcgtctcaaaagaagcaagataaggatgaagaagaagagaggctaatgttacaaaaggcgagagagctcgacgaatttgatcagcaaaaccatagtgcaatgcctcgaaacagtgacaagaatcacaacgaagataagaatggttttcatggggcaaacagtgtgaagacgacttcctttgaagaagaagcgcttaggacaatgaaagccttctggctcccatcagctacaccagcagcttcggtcagagtagatgctccagaaactcacacagtctgtccagagggcaaagagaagctcaagcttaagaacctctttgcaattcgtttcacagaagacaacagcgaagaggaaga

SEQ ID NO: 126573 - DNA, 523 bp, Arabidopsis thaliana
  unsure (1)..(523): unsure at all n locations
atgattctccnnnnnnnnnnnnnnnnnnnnnnnnnnnnnnnnnnnnnnnnnnnnnnnnnnnnnnnnnnnnnnnnnnnnnnccacgggtgcgggatgtgaacacatcaaatgattttaacaccaatccaaaggagacagtggtattagatgagaactctatggaatctgaagattcatcgggtgaagtatacgaaaccgggtgtaatgaaattacttatgcaattgaggaggatgaagaagatttttcagagagggaatatgtcgaaaatgtggagaatttctctaacataacctctactcctctacggtcacagccagaaagaatgcagaaattggagtctcgagcaaaaacacaatgtgtgtttgaagatgaggatctgagtagtgacagtgacaacaaacttccagaagctgagacttcaaaagaaggaaatgggttgggagagggtcatgttgtatctaacctagtcgagtcttttgaaaagaaaacctcgcatggggttatggttgagtgtgatgataa

SEQ ID NO: 126574 - DNA, 957 bp, Arabidopsis thaliana
  unsure (1)..(957): unsure at all n locations
nnnnnnnnnnnnnnnnnnnnnnnnnnnnnnnnnnnnnctgcaggtaccggtccgggattcccggttcgacccacgcgtccgtgggatactatcactctctcttgctccaagagataaccatgaagctcaggttcaatttgctcttgaacgtggaattcctgcgattctcgggatcatctctacgcaacgtctcccttttccttcaaatgcatttgatatggctcattgttcaagatgtcttattccctggacagaatttggtggaatctatttacttgagattcaccgtatagttcgacctggaggtttttgggttctttctggtccacctgtgaactataatagacgatggcgtggatggaacacaaccatggaagatcagaaatctgactacaacaagcttcagtcacttctaacctccatgtgtttcaaaaagtacgctcaaaaagatgacatagccgtgtggcagaaactctcagacaaatcttgctatgacaaaatcgctaagaacatggaagcttacccgcccaaatgtgacgacagtatagaacctgattctgcttggtacactccactccgtccttgcgtggttgccccgacacctaaagtcaagaagtctggtctcggatcaatcccaaaatggcccgagaggttacatgtcgcgcccgagagaatcggtgatgttcacggagggagtgcgaacagtttgaaacacgatgatggtaaatggaagaacagagttaagcattacaagaaagttttaccagctcttgggacagacaagataagaaatgttatggatatgaacactgtttatggaggtttctctgcggccctcattgaggatcccatttgggtcatgaacgttgtatcatcgtacagcgcaaatncgnttccggtggtcttnaatccngggnttatcggggccttncccangcntngntccgaaanttttnt

SEQ ID NO: 126575 - DNA, 688 bp, Arabidopsis thaliana
ataagctgcagattctatctttttggttggatatgtctctgtttgaagttatatatttatagttttgaattcataggatgtggtgatacgtttgtaatctcgtgccatatctttggtttgtcaaagagagtgtgttttaatgtcaatttctgggtaaccaagtttgagcttattccttttgattctgcccggctctctgattttttaaggtgagattcctaagcatgtcaattactttttttttttttttaacattcgcaattttcttgagttggtgacgttttcgagattttgttgattagtgcaagacgacaagtgatgaaaagatagagacaaagaaaggcttcaagtttgttgataactgctgtctaaagagttcgttcccttgagagattctgactctgacagaagagttcccccaaccggaagagaaattcaaagatcagaaaacggtgaaagatgcgacgacgaccaggaattggaggattacaaaaggccgcagctgctagggatcagtaccggttactaggagaaaatgtagccaagttacggactgatatgatgaaagaacagctctccacgttccgttcccagcttgaagagttcgctcgtaaacacaagaatgacattcgtaagaatcctgccttcagggctcagttccatgaaatgtgtgctaacattggtgtgg

SEQ ID NO: 126576 - DNA, 353 bp, Arabidopsis thaliana
gcaaatttctccgttcgagatcaattccgtcgagatctcaagctctctcactcgtagtaaaaaaatggcggcggtagcggcaccgatggcttcgaagccccgcggttctaaagctgaatcgttcgtagacaacaagcggagagaagatatccgattcgcgaacatcaactctgctcgagccgtctctgacgccgtccgtactagtttgggaccgaaaggaatggacaagatgatttccacggcgaacggagaggtaatcattactaacgatggagctacgatccttaacaagatggaggttttgcagccagcggcgaagatgttagtcgagctttccaaatctcaagattcag

SEQ ID NO: 126577 - DNA, 728 bp, Arabidopsis thaliana
  unsure (1)..(728): unsure at all n locations
nnnnnnnnnnnnnnnnnnnnnnnnnnnnnnnnnnnnnnnnnnnnnnnnnnnnnnnnnnnnnnnnnnnnnnnnnnnnnnnnnccacgcgtgcgagaaaaaagagaaaaaaatagtgaatcaagctgtctcgtagcagtctttatagatcaaacgataatcgaatccaacgacccattttttttttttttgggctctgatttcgtctctctttgttcttttcaccttttttttttgttttggttttgtctcttccgtttcattttgtgtttcttcaatctgatctaaagcttttgtctgaaaaaaagtgtcagactttctatgaagatgttgttggtcaatgggtgatttttagtttgtgttaaagcagaagcataagattacttggtgaatcgattacaattttgatttgattcagatatttgaagggttcttactagaatttgaattggggatctttgaattccgatcaggcttttagagaggtagggaacattgaattgagatctggggcaacttttggttttgttggggattagttgttttaagagatcgaagaaaggaggaaactttttgattcggtaaccatggatcgagtggttggtggtaagcctaaagcttggacgtgatactaggaagttggtacctcttggaggactttttctatgatgttatatgtcaatgctgtaaaaaaagtttctaatattcttgtaccttttgtagctagccag

SEQ ID NO: 126578 - DNA, 907 bp, Arabidopsis thaliana
  unsure (1)..(907): unsure at all n locations
nnnnnnnnnnnnnnnnnnnnnnnnnnnnnnnnnnnnnnnnnnnnnnnnnnnnnnnnnnnnnnnnnnnnnnnnnnnnnnnnnnnccacgcgtccgggcaatttggcaattacacagaactcacatcctcttcaaattagatttgggagtatcgatgttgtgaacgagacatcaagtggttcgttggctgttgaaaatagtgatgccgagttgagtggttcaaatcttgtggatgagatatcaaagggctctttggccgatgaaaatggtgatccagagctggatggtgctgttagctctgttggtaacagatcaacccagggatgcaacatggtccaccttgaacagatcattgaagatgccaaaagtaacaagagaaccttgttcactgtgatggagtcgattatgaatctgatgagagaagttgaacttcaagagaaggaggcagaaaaggcaaaggaagatgctagtataggaggctttgatactcttgacaaggtggaggagctgaagaagatgctggaacatgcgaaggaggcaaatnacatggctgctggagaagtttatggggagaggtcaattttnaccactgaagttaatgagcttgaaaatcgcttgatcagcttatcagaagaacgagacaactctctctctgttcttgatgagatgcgtgtagatcttgaaataagactagcgacacttttggggntaaaaaatnctgctnagcanggaaaacaggnaaangaagggtctttcacgcaaggcattttctgaaccaagnagcggtccatgggtgagggttttcccagnntcccaaggtttttccagcaggngggcagtgggaanctccncngnttccggggggttcccnttgggtccatgggccggntttttttggttnccctccaa

SEQ ID NO: 126579 - DNA, 612 bp, Arabidopsis thaliana
  unsure (1)..(612): unsure at all n locations
tgattctgccnnnnnnnnnnnnnnnnnnnnnnnnnnnnnnnnnnnnnnnnnnnnnnnnnnnnnnnnnnnnnnnnnnnnnnnccacgcgtccgggacagttgaagatacaatacgaatgttcatcttcgcttgtggatgtgaccgagcttgaaaaccaagtagagagtctggaagctgagctcaagaagcagtccgaagagttttcagagtctttgtgccggattaaagaacttgaatcacaaatggagacattggaagaagagatggagaaacaagctcaggtattcgaggcagacattgatgctgtcacacgtggtaaagtggagcaagagcaaagagctatccaagccgaagaaactctaaggaaaacgaggtggaaaaacgctagtgtagcaggaaaactccaggatgaattcaaaagactctctgagcagatggattcaatgtttacatcaaatgagaaaatggctatgaaagcgatgacagaagctaacgaattacgaatgcagaaacgtcaactagaagaaatgatcaaagacgctaatgatgagctccgagcaaaccaagccgagtacgaggcaaagctccacgagctttctgaaaagctgagtt

SEQ ID NO: 126580 - DNA, 894 bp, Arabidopsis thaliana
  unsure (1)..(894): unsure at all n locations
nnnnnnnnnnnnnnnnnnnnnnnnnnnnnnnnnnnnnnnnnnnnnnnnnnnnnnnnnnnnnnnnnnnnnnnnnnccacgcgtccgcgggatgaagtatttagaacgtgctgagctcaccaatttcactttccaaaatgatattctcaaaccgttcgttattatcatgcggaatactcaaagtcagaccataaggagcctaattgttgactgcatcgttcagatgataaaatctaaagttggaagtatcaaatcgggatggaggagtgtttttatgatatttacagcagctgcagatgacgaagttgaatcgatagttgaaaaatcatttgagaatgttgagcaagttattctggaacactttgaccaggtgataggtgactgcttcatggattgtgtcaattgtctcatcaggtttgccaataacaaagcttcagaccggataagcctgaaagctattgcccttctcagaatatgtgaggatcggcttgcagagggactctatacccggtggtgttcttaagcccgttgatggcaatgaggatgaaacttttgatgtgacagagcattactggtttccgatgcttgccggtctatctgatctcacatctgattataggcccgaagttagaaactgtgcttggaaggtgttgtttgatttgctaaatgaaaggggaaacaagttcttcacacctttctgggagagtatcttccattcgatcttgtttccaatttttgatcatgtgagtcatgctggaaaggaaagctaatatcttccggggatggtaaatttcgtgaaacaagcattcatttcctttcagctctctgcatctctttcttnnantacgggnttcaangnagggnttgtttnttnnctgccnccnctttaaangttt

SEQ ID NO: 126581 - DNA, 846 bp, Arabidopsis thaliana
  unsure (1)..(846): unsure at all n locations
tgatactgccnnnnnnnnnnnnnnnnnnnnnnnnnnnnnnnnnnnnnnnnnnnnnnnnnnnnnnnnnnnnnnnnnnnnnnnccacgcgtgcgcgtgactcttcttcaattcgaagaatcttttaaaccctaatcctctttctcgcttcatttctctcaaatctaacttcctccctaaattatctccgagatcgatcactagtcacaccttgaagctcccatcttcgtcaacctcagctttaagatccatttcctcttccatggcttcttctttcaaccctgaacaagctagagttccctctgctcttcctctcccagctcctccgttgaccaaattcaacatcggattgtgtcagctatctgttacatctgacaaaaagagaaacatctctcatgctaaaaaagccattgaagaagctgcttctaaaggagctaagcttgttctcttacccgaaatttggaacagtccgtattccaatgatagttttccagtttatgcggaggagattgatgcaggtggtgatgcttctccttcaacggcaatgctttctgaagtttccaaacgtctcaagattacaatcattggtggatctataccagaaagagttggagatcgtttgtataacacttgctggtggcttttggttccgttggagagctaaaaagctaagcattcgggaggtaccatttttttgatattagacaattccccggggaaggttaccttttacttggggtcccaaaaactcttactgctggagagacaccaacaatcgttgacacagatgtaggggcgtttggaataggcatctgttatgatatcaggttccagggagtagctatgata

SEQ ID NO: 126582 - DNA, 800 bp, Arabidopsis thaliana
gagacgaaggcgtttccggttctcttctctcgtcggagttctgaggtaaaaaaagaataaggagaagaagaaaagcaaaagcataaaagagagtagcaaagactgagaatggaaagcttggacactaattttcctgtgcgccatagaaaggtctcgtttgaaagtaagggaaacaagacagagattgtgatctgcagctatgaagatcatatccttatcatagcaacacagattggtgccatgggaactatattgcacgcaaggaaggaagaagggatgtctgttgaaccaacatttagtgtttcagtgatattcggaaagcgagacgagccaatgctgacagcaactgctcgaagactcattgaacacataagttctattgttccctcgaagcctctggttctctcacttggtctcaaagatcattcttcggagacgttgaaggaaatagtagcgccagtgattgagaatcgcctttggtaatacatattgttgtccatgttaaaaggagaacgagaagatgttttatgttttagtcttggttgatataattagcatggagttgtggaatcttttcttgtttatactgaaaacattgtttttgagataaaagttaacaacaaggacccatttttttcccccagaaacataattaaacaaaaggattttgtttaaaaaaaaaaaaaaaaaaaaaaaaaaaaaaaaaaaaaaaaaagggcggccgctttagaggaacccagcttacgtacgcgtgcatgcgacgtcatagctcttctataggacacgcaatccaaccgggg

SEQ ID NO: 126583 - DNA, 958 bp, Arabidopsis thaliana
  unsure (1)..(958): unsure at all n locations
cccttgagccatccctttcnttgcacccaggttgnccctggncctttntnccccccagggaggaagaagggattcttttgaccaccattagggttccagngtnttcggaangcgngncgnnccaatgctgacnagcaactgctcggaggncncnttgaccccattaagtctattgtcccctcgaagcctctggttctctcacttggtctcaaagatcattcttcggagacgttgaaggaaatagtagcgncagtgattgagaatcncctttggtaatacatattgttgtccatgttaaaaggagaacgagaagatgttttatgttttagtcttggttgatataattagcatggagttgtggaatcttttcttgtttatactgaaaacattgtttttgagataaaagttaacaacaagtacacatttttttcacacagaaacataattaaacaatagtattttgtttacatagcatatcataaaacacaaataagtaaaaaagaaaagtggggaaaacttccccaaaaataagaaaatcactgtagtagttgtcacataatataaacctgtcaaacaaattacacccaatagaaatataaagcacacaaatcttctctatttcttctttttgccttgaaagggaattttgtgtttttttaactcaagatccccagttgtatctctcagccttgtctcgatggcttttgagactcaatcatttctgtgtgttaatgcgttcaactgattctccaactgcccatttttctgcttctgtttctttagttcttctgttaggctggaaaagctttgttgtagtagctggctgggccggaggtccccccccgggggttcaggggggcngcaaanggaacggggnggcnaggggncaggtgntggaaggntnccagattggtagccaaacncccggggaaatttgggaaccgccnatntgggggtt

SEQ ID NO: 126584 - DNA, 523 bp, Arabidopsis thaliana
  unsure (1)..(523): unsure at all n locations
atgannnnnnnnnnnnnnnnnnnnnnnnnnnnnnnnnnnnnnnnnnnnnnnnnnnnnnnnnnnnnnnnnnnnnnnnnnnnnnccacgcgtccgatttttatgcgatttgcactaggtgggaagaacagtacggatagatctttgataacagaaataatgtgttgggtttcacagaatccacctccagctcatctcttccttatctctagtgatagcgatttcgcgaatgtgctacatagattgaggatgaggaattacaacattttgctcgcgtgctacgaagaaacgacgcttggtgtattgtgcagtgctgcttcgattatgtgggattgggatgctttagttagagggcaaaatccaactgctaaacattttaatcagccacctgatggtccttatcattcttggtatggtcactatacaactcctcttcttgacccatttgccacatctaccaataataagcagatatcttctactagtgtcaaaaccgtagagttgctccaattgggttcttctaagt

SEQ ID NO: 126585 - DNA, 400 bp, Arabidopsis thaliana
atcccaaggaaggctcttgtgatattactcttaagctaccacattctcttcctcgtattttcccatcagatcaagaaaatatggaaggttaccatacatatcgtgggggattctggaattacttcagcttgggaatggatgctcaagtatcttatgcatttcattcccagagaaaactgcacccggaaaggtttaaaaatcagctagttaatcagagcacatatctaaagcttagttgcacacaaggatggttttttgcctctctttttcacccttcttcacaaaacatagctaagcttgcaaaaattcagatttgtgatagaaatggccaatggaatgatcttcatattccccaaagcataaggtccatagtatgtgtgaatcttcctagtttttctgg

SEQ ID NO: 126586 - DNA, 890 bp, Arabidopsis thaliana
  unsure (1)..(890): unsure at all n locations
gaaatcgacctctccggcgactcgagtcaccgaacctcctcctgctgctacttcatctcttcgagcacaagctcctccgcttcctacatctgcagatcagagatcagctgagttaccttcgcctgctcagacagctcagatgactgcgcctccgtcgacagttaccacagatccgtcgtccaggggaagaaagcgagcgctggaagcgaatcttcagatcgagagctccaactactacaagatgcgtctccttgtcaaagatcttcgccctcacgttctcgaggttttacgaactccagacttgaggaactctaaggcagttatcgagattcaagagaagatgaagcttatgcttcaactgtacgaagagatgattggagagtctcccaaacgtgagaaaacagctaagagcgactctttatccaacggaaaggcgactactactactactactactactagtgtactgagatcatctgaaactgagaagcacagctctgatggagatggcgacaaggtggttggagggtcggcatttggctggaacttcataacctctggagggccaggcactgaacctgtttattctggaatgtcaaaggaagaatacagaagctctcacccaattatgcaagtggaggcagagcttgagttgcccaacacattctaagctttgttagtggtgtttgtataatattattcactttggtatccgttcatcccaatgttttatatgtatcaactgaaacaatggattagcttctacccatgaagccttaattagtacacaatatgcttaacaaaaaaaaaaaaaaaaaagnnnnnnnnnnnnnnnnnnnnnnnnnnnnnnnnnnnnnnnnnnnnnnnnnnnnnnnnnnnnnnnnnnnaac

SEQ ID NO: 126587 - DNA, 645 bp, Arabidopsis thaliana
accacgcgtccggcttcctagagcaaaggagaaaaaaaatggtgaactatgtgctcaaaatcaccgctgatctcgagaatctcactaatctccagccttccggtggctgcgacgattccaacttcccttacctcttcaagttgaaatgtgaaagatgtggagaggtgactccgaaagaaacatgtgtgactttgaatgagacttttactcctccgggaggtaggggtacttgtcatcttgttcagaagtgtaagttctgtggaagggaagggaatgtgactatgattccgggcaaaggtcgacctttaactctggaagattctgaggctggagaacatgcccctcttatggtgtttgactgtcgtggctatgaacccattgatttcggatttggtggatattggaaagctcaagctgaatctggaaccaaatttgatgagattgatttgtcgagcggggaggaattcacagagtacgatgagaagggagaatgcccagtaatgatatcgaatttccgtgcaagcttcagcgtcaccaagtgaagttggtctctgttgtctattttctgattccctacacacttggtgtatgtaaaaaccatggggattatcatttctcaagttctaataaaattctctttttact

SEQ ID NO: 126588 - DNA, 589 bp, Arabidopsis thaliana
  unsure (1)..(589): unsure at all n locations
nnnnnnnnnnnnnnnnnnnnnnnnnnnnnnnnnnnnnnnnnnnnnnnnnnnnnnnnnnnnnnnnnnnnnnnnnnnnnnnnnnnccacgcgtgcgcgtttaaggatttgctcttctgatatgtgagtcttctcaagagacttgccgatctttttctcccacaaggtgaccatttcgttcatcgataaaatgttgttaggaggactaatgtagagggttttgttcagagtccttagatcatccaccgccttgatcatgaggaacatttttgtcgccaaagatgatggccttgtctctagtatgagaaatgagaccagactcgaactgaagtaacgtacgcaagtaaaaaccggcagagcaattgctaacaacgtaagtgtatggtattccttcagcttcaatggctctcctgatctgtaccttccctgcaaataatgattttgccggctcaaccgcactggtcctctcaacgtctatcccaaactcagccggcaagaatctctgcaaagcaaaaactataaatctagtttggatcaaataccaaccttgacgttaccagcttctttaatggcggaaatgatcttggtttga

SEQ ID NO: 126589 - DNA, 483 bp, Arabidopsis thaliana
  unsure (1)..(483): unsure at all n locations
nnnnnnnnnnnnnnnnnnnnnnnnnnnnnnnnnnnnnnnnnnnnnnnnnnnnnnnnnnnnnnngaagcaaaataagagggaatattaagatgacatcttctatggtctcttccatggctctctttctccttcttcttcttgtgtttccgcatatggataaagcccttggcgcacaagaggaagcccagaaacaaaggattcctcgtttcagatgttctccacgaatccccttttgtacaaatccaaacctaccttctcctccgccccacaggtctttcaaaggcacactcgaacctggtcattgacttcactctagcttcgaatgcgtgtgaacgtgtgcatgtttcttacattgtgctttggtttgtggtttctatccttgtttatctttgcatgtgtttgtcatattttacagttttatcggaaccgtcgcttgaataaataaatttgcatgtccttttatgtttaaaaaaaagtataaaa

SEQ ID NO: 126590 - DNA, 542 bp, Arabidopsis thaliana
ttaggtgcactatagaagagctatgacgtcgcatgcacgcgtacgtaagctcggaattcggctcgagcacaaaagaaaaaaacacaagtttcctgattcctctcttctctgcgattttagctctagggatcgatttcggcgtcaaacgtcgtcgttttcgaccatctcctacttactactactcagctgcttctgccttctagggttctttctccgttcaccctccgccgcacgagttgtccagctccgccgcattcttctgtctcccagatcaccggctttaagcaaatccggctgcttttcactctaattcgtaaaccacttgtgggatttgagcatcttttacattctccaaaatctctgctttctagggttttgtgagttttggtgggatgagtagtgtgttcagtgatcagatcctgattgataagctcgctaagctcaatagcagtcaacagtctatcgaaactctgtcacattggtgtatattcaatcggagcaaagcagaattgatcgttacgacatgggagaaacagtttcac

SEQ ID NO: 126591 - DNA, 528 bp, Arabidopsis thaliana
  unsure (1)..(528): unsure at all n locations
cnnnnnnnnnnnnnnnnnnnnnnnnnnnnnnnnnnnnnnnnnnnnnnnnnnnnnnnnnnnnnnnnnnnnnnccacgcgtgcgggcttggtagactaaagaatgtagccggaaatgtgaatcagagttttgttcagtgcctccatttctgaggtatgggaagtactgtggactactttacagtggatgtcctggtgagagaccttgtgatggtcttgattcttgttgcatgaaacatgatgcttgtgtccaatccaagaataatgattatctaagccaagagtgtagtcagaagttcattaactgcatgaacaatttcagccagaagaagcaaccgacgttcaaaggtaacaaatgcgacgctgatgaagtgattgatgtcatctccattgtcatggaagctgctcttatcgccggcaaagtcctcaagaaaccctaactatttatatatattctcctatattgccaaggtacaatgggttcccctttttttccccctcagggacatttgtcttaatttatcaaaatac

SEQ ID NO: 126592 - DNA, 809 bp, Arabidopsis thaliana
tctatacgattcacttagggcaagctggtacgcctgcaggtaccggtccggaattcccgggtcgacccacgcgtccgtccagagttccgacaatggcttcagcatcagcgacagctactcttctcaaacccaatcttccgccgcataaaccgaccatcatcgcctcctccgtatctccgcctcttcctcctccacgtcgcaaccacctcctccgccgcgatttcctctccctggcggcaacatccacgcttctaacacaatcgattcagtttctagctccggcgccggtctccgccgctgaagatgaagagtatatcaaagatacgtcggcagtgatcagtaaagtaaggagtacgctttcgatgcagaagacagatccgaatgtggctgatgcggtggcggagctgagagaagcgtcgaattcttgggttgccaagtaccggaaagagaaagctcttctcggaaaagcttctctccgggatatatactcggcgttgaatgctgttaaaggcattatgtgagttttggcccgcgggctccgattcggcgaagaagaaggcagggttctcgaaaaaaggaactgctgaaaagctctacaagaggagaagaaaaaccgcagcgggccctcttctcattttctggtgatgaaattttttttccaaaaaggccaaccgatttttgagaaagaacctgaagggctccccgcttttttttcttcctggaaaaaccaatggccggcggataacgcctaattcatttcagaagaccttttaccctatggattcctttcccaaaaaaaaaaaaggggg

SEQ ID NO: 126593 - DNA, 802 bp, Arabidopsis thaliana
ctcaaacccaatcttccgccgcataaaccgaccatcatcgcctcctccgtatctccgcctcttcctcctccacgtcgcaaccacctcctccgccgcgatttcctctccctggcggcaacatccacgcttctaacacaatcgattcagtttctagctccggcgccggtctccgccgctgaagatgaagagtatatcaaagatacgtcggcagtgatcagtaaagtaaggagtacgctttcgatgcagaagacagatccgaatgtggctgatgcggtggcggagtgagagaagcgtcgaattcttgggttgccaagtaccggaaagagaaagctcttctcggaaaagcttctttccgggatatatactcggcgttgaatgctgtttcaggtcattatgtgagttttggtccgacgggttccgattccggcgaagaggaaggcgaggattcttgaagagatggaaacttctgagaaagctctcacaagagggagatgaaaaaactgcagtcaggccttcttctccattttcttgttgatgaaaattttattttcctaaaaatgccaatcgaattatatgagaagagaaacttgaattggctcgcctgctttttttttttcattcctgtaaaatacttaatgttctgcatgataattgcttaattatcattatcagagatacttatataacttatatcgaattccattttctcaaaaaaaaaaaaaaaagggcggccgctctagaggatccaagcttacgtacgcgtgcatgcgacgtcatagtctatctatagttcgtctcaatt

SEQ ID NO: 126594 - DNA, 471 bp, Arabidopsis thaliana
  unsure (1)..(471): unsure at all n locations
tgannnnnnnnnnnnnnnnnnnnnnnnnnnnnnnnnnnnnnnnnnnnnnnnnnnnnnnnnnnnnnnnnnnnnnnnnnnnnccacgcgtcgcggcgaaagcaaaactgccgataaaagttcgttaactcggaagctgaagcatgatgttatcgaaggagtgaatcaacttattcaagagattgctggttgtcatgagcagatcgctgaacaagctatagagcatatacatcaaaatgaggtgatcctaaccctgggtagctcaagaacagtgcttgagtttctgtgtgctgcaaaggagaaaaaaagatcttttcgtgtatttggtgccgaaggtgctccaagatatcagggccatctattagcaaaagaattggtagctagaggtaagcagacaactgtgatgaccgactctgcagtgcttgctatgatatctcgagtgaatatggatataattggagctcatgcagtgat

SEQ ID NO: 126595 - DNA, 521 bp, Arabidopsis thaliana
  unsure (1)..(521): unsure at all n locations
nnnnnnnnnnnnnnnnnnnnnnnnnnnnnnnnnnnnnnnnnnnnnnnnnnnnnnnnnnnnnnnnnnnnnnnnnnnnnnnnnnnccacgcgtccggaaaaaaatcagaagaaacaacagcaacaaggtcattttcttcttcttcttcatcttgtgatttgtttattgtttatgttctcttctagagatttgcgtcttattttgtaaaaaccaaagcttttctttttcataaatataatttatttcaacacttgcttactgttttttctctgtgaaaattgtcacggatccttcgtttttttttatatactcatagcaaaaataatctcatccccagatttcttacccatctatctatcttcttctctgtctcttaagggttctgggttttagctgcttgggttttatttggtttcgtttctcacttattggtttgtcttttccaagaacaggaacagtgaaaggttcggttttttgggtttcgatctgataatcaacaagaaaaaagggtttgatttatgtc

SEQ ID NO: 126596 - DNA, 409 bp, Arabidopsis thaliana
agtaaataatcgggatcaattgtagaagagctcatcgagaaaagagagaacctaaactttaaattcaattctgtattgttctcaaactcgaacccgaaactttaaatccttccttatttgttttctggagttcttgtttagaactgttttggatttgttttttttgaggagatgctttagttaactaggtttgcttcgagctgatcgctgtgtggcataaaccctaatttcgtggaaactgtgctcttttagaaccggtccagtgagtaagggaatccaattggtgaagatgccgcaagttaagatcattgctaaaaatttcatggacatggtggcgtcacttccagccatcaagcttgacaaactctacaacaatgtctttatctgcgaagccattctcaggtctttg

SEQ ID NO: 126597 - DNA, 899 bp, Arabidopsis thaliana
  unsure (1)..(899): unsure at all n locations
nnnnnacgcgcaannnnnnnnnnnnnnnnnnnnnnnnnnnnnnnnnnnnnnnnnnnnnnnnnnnnnnnntccacgcgtccgcccacgcgtccgtacggctgcgagagacgacagaagggggacacaaaaagtatggaacttcaagtccttgttcttcgtccaatcttcttcttcttcttcttcgtcttcttgacaattctacaacaatcctcttctgctcgggttcttacaatcaccaagcctgatagacatgactacgccgcaagtgctcgttggcttgtctctcagaattcttggggtgttcttagcacactatccgttgatcataaaggcgctcccttcgggaatgttgtatcgtttagtgatggtttacccgagaaaggtaacggtataccttacttttacttaacaacacttgatccaactgcaagaaacgcacttaaagaccagagagcttcacttgcaattagtgaatctcctcttggaacttgtacaagagatccaatgaatcctacttgctctaaactaacccttaccgggaaagttgctgatattgaaggaggatctgaggaagcagaagtagccaaaaaggctttattcacaaagcatccagagatgatggatnggcctaaggatcatgatttccgcttcnttaaactcgagatcatcgatatatttctcatcaattggtatggtggagctaaactatcactggagatgataccttcatgccagtcgatcaactcgcttcttttttaatactccaaaatcangcaatgggaagcagaaaagatttggatgacaataaagggtgactgttctgaatactcttgtttgacctataatattaatccttgaattccccgaaaaaaaaaaaaaaaaaaaacggcctttaagac

SEQ ID NO: 126598 - DNA, 967 bp, Arabidopsis thaliana
  unsure (1)..(967): unsure at all n locations
cccgccggnaccggnccggaanncccgggttgacccaggcgggggaacccctgcgagagacgacagaagggggacacaaagggggnggaacnncaagncccggggcnncggccaancnncnncnncngcttctttgtcttcttgacaatgctacaacaatcctcttctgctcgggttcttacaaacaccacgcctgccagttttgactgatgccgcaagtgctcgggggcttgtctctcagaaaacccgccgcgttctgagggcacgggggcgcgatcataaaggcgctcccttcgggaatgttggtatcgttgagtgaggggggtacccgagaaaggtaacggtatcccttacttttactttacaacacttgatccaactgcaagaaacgcacctaaagaccagagagcttcacttgcaattagtgaatctcctcttggaacttgtacaagagatccaatgaatcctacttgctctaaactaacccttaccgggaagttgctgatattggaaggaggatctgaggaagcagaagtagccaaaaaggctttattcacaaagcatccagagatgatggattggcctaaggatcatgatttccgcttctttaaactcgagatcatcgatatatttctcatcaattggtatggtggagctaaacctatcactgtagatgaataccttcatgccaagtcgatcaaactcgcttcctttttataataactcacaagaatcaagcaaatggtgaagcaagaaaatgtatattggatgaacaataaaaagtgtgtaactgtttctgtaaataactctttgttttggaccataatagatattaaaatctcttgtaaattcccccgnnnnnnnnnnnnnnnnnnnnnnnnnnnnnnnnnnnnnnnnnnnnnnnnnnnnnnnnnnnnnnnnnnnnnnnnnnnnnnnnnnnnnnnnnnnnnnnnnnnnnnnnnnnnnn

SEQ ID NO: 126599 - DNA, 592 bp, Arabidopsis thaliana
  unsure (1)..(592): unsure at all n locations
gcccccncgggatntgnccggttnggggggntncccgggaaggntccggtccccttcttttcnttccacncttggcccacttnaagnacccncttaaaggcccggngggctccccttgcatttgggaacccccnctgggacttgtccagggntcccaatggacccntccttgctctaacttaccccttacccgggaagttgctggatattggaaggaggatctggggaagcagaagttagccaaaaaggctttattcacaaagcatccagagatgatggattggcctaaggatcatgattcccgcttctttaaactcgagatcatcgatatatttctcatcaattggtatggtggagctaaacctatcactgtagatgaataccttcatgccaagtcgtaagtacattgcgtgaacccttttaaaaacatcggatcaaactcgcttcctttttataataactcacaagaatcaagcaaatggtgaagcaagaaaatgtatattggatgaacaataaaaagtgtgtaactgtttctgtaaataactctttgttttggaccataatagatattaaaatctcttgtaaattaccg

SEQ ID NO: 126600 - DNA, 671 bp, Arabidopsis thaliana
  unsure (1)..(671): unsure at all n locations
cacacgcgtccggagaagaataagattaaagttactctctcggtgtgggtatgacgacgaattgacttaaaattttcgttagtcatcttttgtcaatttcgtttcaatcatttttgacacaaaaagtatggaacttcaagtccttgttcttcgtccaatcttcttcttcttcttcttcgtcttcttgacaattctacaacaatcctcttctgctcgggttcttacaatcaccaagcctgatagacatgactacgccgcaagtgctcgttggcttgtctctcagaattcttggggtgttcttagcacactatccgttgatcataaaggcgctcccttcgggaatgttgtatcgtttagtgatggtttacccgagaaaggtaacggtataccttacttttacttaacaacacttgatccaactgcaagaaacggacttaaagnccagagagcttcacttgcaattagtggatctcctcttgggacttgtacaagngntccaatgaatcctntttgctctaaactaaccctacccgggaggttctgatattggaggagggtctnnggnagcagaagtagccaaaaagggttntttcaaagnatncagggttgtggttgcctaggccagnttncgttttaactgggcacggnanttcnacaatggtnggggngnc

SEQ ID NO: 126601 - DNA, 437 bp, Arabidopsis thaliana
tgtttatattttcaaaaagcaaatcgagttattttctctctcaattcatcccaaaccgtcgtaaccattctctttcgtttcgtttcgtttcttctcttttaaaaacctttcttcgaaaagatgacgatctctgttgagaagccgatttttgaagaggtttctgcattcgagaagagtggggacaatatcggagagttgaaattggacggaggattttcgatgccgaaaatggacaccaatgacgacgaagcttttttggctcctgagatgaatgcatttggccgccaattcagggactacgatgttgagagtgagaggcaaaagggcgtcgaagagttttacagattacaacacatcaaccaaactgtcgactttgtgaaaaagatgagggctgaatatggaaaattagataaaatggtgatgagcatttgggaatg

SEQ ID NO: 126602 - DNA, 917 bp, Arabidopsis thaliana
actgtctgtcctcactctctttcctctttctctcactaaagaaaaaactagcgatcgaagagaatcatcatcaagaagctactatcagagaaatcaaagccctacaacacaagaatcaacatgggagctgaagaagaaaccaataagacatatcctcattggctaaaacctctgctacgagaaaagttctttgtacaatgcaaattacacgcagattcacataagagtgaatgtaacatgtactgtttagactgttccaatggtcctctctgttctctctgcttatctttccacaaagaccatcacgccattcagataagaagatcatcatatcacgatgttataagagtgccggagattcagaagtttctggacataacaggagttcagacatatgtgatcaacagtgctaaggttgtgttcttgaacgagagacctcagcctcgaccaggcaaaggtgtgatcaatacttgtgaagtctgctatcgaagcctcggtgattccttcagattctgctctcttggttgcaagatctctggaatatcgaagaagaagagaaaggaatggacgaacaatctttcggattctgatgattcgtatagcagtacgagtttcggaaggctcaagaagaatgatgacattatgaataatagtttcacaccgtcaacaccgcctttatcagccgtgaatcgtcgaatcgcaaagcgaaggaagggaatccccgcatcgtgctcctttcggaggactaatcctagaatactaagaagtgggactgtatagtcctatggctaataaccatcactagtagtttcggcgcaccatatatgggttatacaatatttaacctataacgggattctaaaagccaactgtccaaataaaaagcttcaaccttcattaggcattggggtagcatc

SEQ ID NO: 126603 - DNA, 992 bp, Arabidopsis thaliana
  unsure (1)..(992): unsure at all n locations
cggcaggaccgggttcggatttccggggtcgacccacgcgtccgcgcagattcacataggagggaaggtaccaggtactgttaaaactgaaccaagggccctctctgttctctctgcttatctttccacaaggaccatcacgccattcagataagaggatcatcatatcacgatgttataggagggtcggagattcagaagtttctggacataacaggagttcagacatatgtgatcaacagtgctaaggttgtgttcttgaacgagagacctcagcctcgaccaggcaaaggtgtgatcaatacttgagaagtctgttatcgaagcctcgttgattccttcagattctgctctcttggttgcaaagatcttctggaatatcgaagaagaagagaagggaatggacgaacaattctttcggattctgatgattcgtatagcagtacgagtatcggaaggctcaagaagaatgatgacattatgaataatagtttcacaccatcaacaccgcctttatcagccgtgaatcgtcgaattgcaaagcgaaggaagggaatcccgcatcgtgctcctttcggaggactaatcatagaatactaagaaatggtaatgtatagtcttatgctaataaccatcactagtagtttcggggtacatatatgtatatatatatatatctataatggtatataaagcaatgtaaaataaaagcttaacatcatagtattgtgtagatattaaaggggtaaaaaatgttgggaagatgatagaatgaggcatgaaatgaatacttgtgcctgtatattttgagctcaatggacaaatatgtaaatgtagaatagtgttgtggacaagacaatagtgataagtatgtgatgaatgtgaatggaataaaggtcatttaaaaaaaaaaaaaaaaagnnnnnnnnnnnnnnnnnnnnnnnnnnnnnnnnnnnnnnnnnnnnnnnnnnnnnnnnnnnnnnnnnnnnnnn

SEQ ID NO: 126604 - DNA, 532 bp, Arabidopsis thaliana
  unsure (1)..(532): unsure at all n locations
nnnnnnnnnnnnnnnnnnnnnnnnnnnnnnnnnnnnnnnnnnnnnnnnnnnnnnnnnnnnnnnnnnnnnnccacgcgtgcgggcacgcgtccgcttccaggaagaacagacaacgagatcaagaacttatggaacactcatttgaagaaacgtcttttatctatgggtcttgatcccagaactcatgagccattaccttcatatgggttagctaaacaagctccatcttcaccaacaactcgccacatggctcaatgggaaagtgctagggttgaagctgaggcaaggctttctagagaatcaatgctctttagcccttctttttactctggtgtagtaaaaactgaatgtgatcacttcttacgcatttggaattccgagattggtgaagctttcaggaatctcgctccattagatgaatcaactattactagtcaaagcccttgctcgagggcaacatcgacctcatctgcacttctgaagagctcaacaaattcttggggagggaaagaggttactgtggcgattcatg

SEQ ID NO: 126605 - DNA, 805 bp, Arabidopsis thaliana
cgccccccctttgaaaacccgtagtgaccactgcggcccccccttgtggtcgactgtatcgataagcttgatatcgaattcgcggccgcggcggcggagacggtggattcctccaccgttaaattcggtacaccggaagcactggagtatgtacggtcgctcacggacgttggcgcaatgacacgtcttcttcacgaatgtatcgcttaccagcgaagcttagactcagatctcgacacgcttctatcgcagcggacggagcttgatcggaatctcgttcagcttcagagatcggcggagattctcgatatcgtgaaagcagatgcagatcacatgctcggaaatgttcgatcgacttgtgatctcgcggatcaagtcagtggcaaggtacgagagctcgatcttgctcaatctcgtgttaatgttactctctcccgcattgacgcgattgttgagcgagggaattgcatcgaaggcgtgaagactgctttggaatccgaggattacgaatcttgctggctgcgaaatttgtacagagatttctccaaggattgatttgcagtacaaggattctggttccgatcagagcgaacagcttcacgcgtcgaaggagcagcttgaaggtattgcgaagaagaagctcttggcagcaatagaccagagagatcatcctacaattttgagattcgtgagactgtattccccactgggaatggagacagaaggtctacagctttacggtggttactttgaaaaaggtcattgcgttgagaggcaagatggaatattgaaaatgttgctgagc

SEQ ID NO: 126606 - DNA, 787 bp, Arabidopsis thaliana
  unsure (1)..(787): unsure at all n locations
cccccctcgatgtcgacggtatcgataagcttgatatcgaattcgcggccgcgcggtcgcgggagattgaacaagacgatgcagcggcggagacggtggattcctccaccgttaaattcggtacaccggaagcactggagtatgtacggtcgctcacggacgttggcgcaatgacacgtcttcttcacgaatgtatcgcttaccagcgaagcttagactcagatctcgacacgcttctatcgcagcggacggagcttgatcggaatctcgttcagcttcagagatcggcggagattctcgatatcgtgaaagcagatgcagatcacatgctcggaaatgttcgatcgacttgtgatctcgcggatcaagtcagtggcaaggtacgagagctcgatcttgctcaatctcgtgttaatgttactctctcccggcattgacgcgattgttgagcgagggaattgcatcgaaggcgtgaagacttgctttggaatcccgaggattaccgaatcctgctggcgaaatttgtacaagagatttcccccagaattgatttgcaggnccaagggatcttgggtcccggtcaagaaccgaacaagcttcaacgcggccgaaaggngggaacctttaaagggaattcccnaanaannaaccccnttnggaggnaaatggccnngggggggnancccacaaatttttgggacccggggngctggatncccccctggggattgggncaaaaagggnnaacgttttnggtgggncccnttaaaaaggnnantccggtttc

SEQ ID NO: 126607 - DNA, 402 bp, Arabidopsis thaliana
ggtatcggtaccggtgttaggaaaatcaatccgtccaattcataattaatggcgaccaccggcgcggcggccaccaccgagattggcaatccagaatataaacagcctcgatcgatatttgacttgacggcggatttctttgactcgcgtcggctgtcgaatccttcggagactcaatcggcattcggaccacccaaaactttcgatccagaggaggcggaggaggataagagttccaaggacggcgtgattttggacagatggacctgtaatacttgtaaaattgagttcctgtctcttcaagatcaacgctaccacttcaagtccgatattcatcgccttaacatcaagctgagtgttgctggcaaggctatattaaaagaggaagatgttgatgagttg

SEQ ID NO: 126608 - DNA, 652 bp, Arabidopsis thaliana
  unsure (1)..(652): unsure at all n locations
atgannnnnnnnnnnnnnnnnnnnnnnnnnnnnnnnnnnnnnnnnnnnnnnnnnnnnnnnnnnnnnnnnnnnnnnnnnnnnnccacgcgtccggttctcttggattcacgtggatgacttggtgaacttaatttacgaggccctcactaatccatcttataaaggagttattaatgggactgcgccgaatccggttaggcttggggaaatgtgccagcagctaggcagtgttcttagccgaccatcgtggctaccagttcctgactttgcactcaaagctttgctcggagaaggtgccactgtagttctggagggacagaaggtattacctgtaagagccaaagagcttggttttgaattcaagtataaatacgtgaaggatgcactcagagccattatgcaataaggtgacacacataagcatctttgtaaaattggttttgatcacagaaaatccccagaaaaacaagatattcttttcttttcgtctctatatctttctttttgagtaaaactcgagaaatgtatttatggtaaaaagtgttttcggtgttatctcagaaaccagagatcccagatgtgttgaggatattataactcagacatagcatctttctcatctnnnnnnnnnnnnnnnnnnnnnnnnnnnnnn

SEQ ID NO: 126609 - DNA, 585 bp, Arabidopsis thaliana
  unsure (1)..(585): unsure at all n locations
tgatactccnnnnnnnnnnnnnnnnnnnnnnnnnnnnnnnnnnnnnnnnnnnnnnnnnnnnnnnnnnnnnnnnnnnnnnccacgggtgcggggatttcaaacaaacctttaccagctcttctacagcacggagagattcgtcggagatagcaaacatggagaagaaacgcgaaggagtaatcgaaggaatgagtcggatcgtatcagatccttactacttcctccatttcatggcctttttctcttacctcccgattcgtagctccgccgcaccgtacacttctcatcgactcttcgacagagaaatccaagcatttctagcgtttcttatgttttccgccattaagatggtgagggaggaaacatgggaagctttcgttgctgatagtttactctatgctaagatctttcttattgcggtttcgttgattatggattatcgagtggcggtctgggttagtatcatattttcaggtatatatctattagctcaacaaccagcatttagtaaactaggaactgcgaagaagctaacacctatgcagttggaggatttgttatcagaagggaacacaacaaaatact

SEQ ID NO: 126610 - DNA, 757 bp, Arabidopsis thaliana
  unsure (1)..(757): unsure at all n locations
aacacttctatttctccctctccttgtcacaaggaaagggcgtagaagaaccaaaacctaaacaaaagagcaataataactcattaaaaaaccaaaaccaaaaaaaaacaaaacgggtgtcaaaatgttattaatctttggtctcttgatcttagctatggtagctaaatccgtcaatgcaacctaccctttaaccaaatcttgcatcaacgggcaaggttgcatcggggaagacgatgagctcgaatctctaatggattcagagacaaaccgtcgtcaactcgcaagaggacgtcgttacattggctacgatgctctcaaaaagaacaatgtgccttgcagtagacgtggccgatcctactacgattgcaagaagagaagaaggaataatccttacaggcgtggatgcagtgccatcacgcattgctataggtacgctcgctaaatgatagagaggaagagatttgattcaacaacgtacgttcgtatcttcattcttctttcttgatcgttaatattaattgcctctccttacttccatcttttttttttttcattctttcttaacgtatcctatgttatacgtatgatctatatattcttttttgttctttatataatcatcatgatgcatataagcttttgattcattggtatatcacttacttttccttttaaaaaaaaaaaaaaaaaaagnnnnnnnnnnnnnnnnnnnnnnnnnnnnnnnnnnnnnnnnnnnnnnnnnnnnnnnnnnnnn

SEQ ID NO: 126611 - DNA, 652 bp, Arabidopsis thaliana
aaacagctacaatgtcaatctcaagagcttttctctgcttaatctttttcacattcgtcacttccccactcgtgctctgctctcgcgcccaaaactcgcagcagcatcagaagcaatagggaagaagcatgggaaagaacaggttcgttctccggcaatgcttgtttctgaatcccccaaggttgattcatcatcctccatgacacatattgatgaccctgcatcccccaagattgattcatcatcctccatgacacatattgatgagcctgcaacaaactctgcaatagccggttttttcaggtatagactcccattccagggatggcctttccacaagtatgctcctttcccaacggctacaccttcgaatccttccgttcctgtaacttcaacaccgtcttctggagctgctgctgctgaggaagaggaaaccgagaaggtgccttctgcgccaagcaaaggaaacagagatggaggcaatgcgtaatgaatcaagacaagatatgttttctactagaaccttattgtgttttaatgactgtggaatctttcctctagttttacatgttgtatcaaataaaatgtaccatgtattatatatgctatgtgacatttacatggaccaatgaaatgaatacaatttctcttt

SEQ ID NO: 126612 - DNA, 500 bp, Arabidopsis thaliana
  unsure (1)..(500): unsure at all n locations
atgatctccnnnnnnnnnnnnnnnnnnnnnnnnnnnnnnnnnnnnnnnnnnnnnnnnnnnnnnnnnnnnnnnnnnnnnccacgcggtccgcttcaaaacaaaaagaagaaccatctcttgttaaacactccaaaatcagctacaatgtcaatttcaagagtttatctctgtctaatctttctcacattcgtcagttccccacttgtgctctgctctcgcagcccgaaactcgcagcagcatcagcggcaataggggagaagcatgggaaagaacatgttcattctccggcaatgcttttttctgaattcccgaaggttgattcatcatcctccatgacacatattgatgagcctgccacaaagtctgcaatagccggttttttcaggtatagactcccattcccgggatggcctttcccccagggtgctcctttcccaatgggtacacctacgaatccttccgttcctgtgacttcaacaccgtcttctggagctgctgc

SEQ ID NO: 126613 - DNA, 525 bp, Arabidopsis thaliana
  unsure (1)..(525): unsure at all n locations
tgatactgccnnnnnnnnnnnnnnnnnnnnnnnnnnnnnnnnnnnnnnnnnnnnnnnnnnnnnnnnnnnnnnnnnnnnnnnccacgggtgcgcgcacgcgtgcgagaacaacaaaacagaggaagaagaagaagaagatgaagcttctggctctgtttccatttctagcgatcgtgatccaactcagctgttgggagctaggaacagatgcattaccgagcggtgggttcgtgaggacgaaaggtgttcagtttagtctcaatggctatccatattacgctaatggcttcaatgcctactggctcatgtacgtagcctccgatccatcccaacggtctaagatctccaccgctttccaagatgcttctcgccatggattgaccgttgctcgaacctgggctttcagcgatggcggttacagggctcttcagtattcccctggctcctacaacgaggatatgtttcagggtttggattttgcgttagctgaggcaagaaggcatggtataaagataatactcagct

SEQ ID NO: 126614 - DNA, 513 bp, Arabidopsis thaliana
  unsure (1)..(513): unsure at all n locations
atgttctccnnnnnnnnnnnnnnnnnnnnnnnnnnnnnnnnnnnnnnnnnnnnnnnnnnnnnnnnnnnnnnnnnnnnnccacgcgtccggggatagagatctanagagagagagaggatgggtcatcactcatgctgcaacaagcaaaaggtgaagagagggctttggtcacctgaagaagacgaaaagctcatcaactacatcaattcatatggccatggatgttggagctctgttcctaagcgggcgggtttgcagagatgtggaaagagttgtagattaagatggataaattatctaagacctgatcttaaacgtggaagcttctctcctcaagaagctgctcttatcattgagcttcacagcattcttggtaacagatgggctcaaattgctaaacatctaccctggaagagcagataacgagggcaagaatttctgggactcgagcattaaaaagaagctcatgtctcaccatcatcacggggatcatcattatcatctctttttcca

SEQ ID NO: 126615 - DNA, 472 bp, Arabidopsis thaliana
acgtaataaagtcattgactcagtgaacggcttttattataatcgtacaagacacacaaataagctcgaattgtagaacattcagttcctttgtgttgaacttaagaccctagagataaagatttggatcggacaaccttagaacgggcgtggcaacaagtggattctttagctccaacacgatcccaaacttctcctcgacctccactctctctccttgcggaattttccaatcaaaagaatgcaaaaacgtagcgagattgtaaagaacaaccctctcgcccatagccattcccacgcatatcctacgaccagacccaaacggtagataattgaagtcatttcctttgaagtcataagacatatccagaaacctgtcgggatcaaacttcagtggattctcccatacattcgggttcctatggattgcccacgcgttgatgaaaatttttgaattttagggatggtgaag

SEQ ID NO: 126616 - DNA, 500 bp, Arabidopsis thaliana
  unsure (1)..(500): unsure at all n locations
accacgcgtccggagagaaatgtacagacagctattaaagaagctgcacagaggaatgatatggtctctgctaaggcacttgctaaggaaattgtgagttcgagaagaacagtgaaccggttatatgagaataaggcacagatgaattctatatcaatgcatcttggagagagtgttgcgattgctcgaacagttgggcatttgtcgaagagcgcagaggttatgaagcttgttaataatctcatgaaggctccacagatggctgcaacaatgcaagaatttagcaaagagatgactaaggccggagttattgaagagtttgtgaatgaggccattgacaatgctctanattcagaggatatggaagaagagattgatgaagaggttgataaagtattgacagcaattgctggagaaaccgctgcagagctcccagtanctgttangaaggagaggataaaggtacctgcacagaaggcgaacacttcacgtgaggaaga

SEQ ID NO: 126617 - DNA, 678 bp, Arabidopsis thaliana
gggcgaagtaaggagtcgtaataaccctaaaaagcgtgccctctttttcgccgccggctaaagctatgaaggtttttaatcttgaccgtggaaacactctctctgatttcctcttctccggtgtcaccaactccaaggagctcttgaattcaatgcttgacggaagtctgaagctggaggtctcatttctcaatgcatcacttattccagacatttttcctctattggctgctgctcagaaagcacttatctccaaatcacgcgattccttatcaaccagaactcttcattctgagcttgtctacaattactcaggatctaagcacattacagaatcattgaaacgatgtgggatttctgagaacactacttacattctagctgcccggttcaatgcttctcccgttgagatggcgcagccggcgaaattgatcaccgggaaggagattgatttgggggaattggagacacatgcaaatcaagccaatatactaaagcattacaagataactagccaagagctcggaatttcctctctgggagatgccattgtttgtcgaatagctgcacgcaatgctttgtaggagtagacatcttttctttatgtcttttgtcaccaattatagttttcccctttataaacaaaattgacccccacgtttataattcgggccccag

SEQ ID NO: 126618 - DNA, 751 bp, Arabidopsis thaliana
  unsure (1)..(751): unsure at all n locations
gacctcccttgggttaacccggtncgtncnccgtgatgncttaaaccagatncatgggnngngtgtggggatgcccgtggtttncagcccaaggctggctaattagaccaaatcccacccnccccttgggggttagggtttccggataataacttagccagtttgcgtttttgagatgaagattcaaagctctttccgcagcttattatgattccctttagctgtatctccttatattcaagcttcgattgggtctaagtaacagaggtggttaatcgaagatcttttttctcttttgagattaatagatccgtattagatccttacttctgttttgtagttgttggaaaaattcagatgaagctaatcttcgagtttcattcgacttagtttcagtttccggcagaatcgatggcttcacggcgaaggatgatagatggaaaactttcgtctcctcaggttacatgtgtattcgatgctaacacgtgtctgagatatattagcttgatccaatcttcttctctaaatgtaatgttgggccagttggacttaaaatagtctctgtaaaccgttttatgttgttgggcttttgctcgttcgttgtatgttatgttcatcttaataaaatcgtcacttgtggaaaaaaaaaaaaaaaaaaaaaaaaaaaaaaagnnnnnnnnnnnnnnnnnnnnnnnnnnnnnnnnnnnnnnnnnnnnnnnnnnnnnnnnnnnnnnnnnnnnnnntatccatc

SEQ ID NO: 126619 - DNA, 596 bp, Arabidopsis thaliana
  unsure (1)..(596): unsure at all n locations
nnnnnnnnnnnnnnnnnnnnnnnnnnnnnnnnnnnnnnnnnnnnnnnnnnnnnnnnnnnnnnnnnnnnnnnnnnnnnnccacgcgtccgctctggccctctctctcttctctctctcaaaattttcagagagagaatcaaaccaaaattttcgacgacggtaaattgatgtcgtcggtgatggttgaattgccgtccggtgtagtatccggctttcgtctgacatatattggcttccacagcagtacatggtcggcccttgtctagcatcatcggctctttcagcggtgatggctagctcacggtgttaatccggcgtagttcggttttcttttccttttggtttatatcacggttacgtttcgaccgttgattgtctttagatcagaattcattgggtatgtgtgttggtgatggcgttggttttcagtccaagcttgcttaattagatctaattccaacctatcctttgagtttaaggtttacggataataattaggcagtttgcgtttttgagatgaagattcaaagctctttcctcagcttattatgattgcctttagctgtatctcttatattcaagcttcgattgggtct

SEQ ID NO: 126620 - DNA, 587 bp, Arabidopsis thaliana
  unsure (1)..(587): unsure at all n locations
nccggcactaatacgactcactanagggaaagcacggtacgcctgcaggtaccggtccggaattcccgggtcgacccacgcgtccgcgcacgcgtgggtttgtatcgcggaaagtaaacctagccgagcagatctacctctctctctcagtactcagagatggccaagtcgaagaatcacacggcgcataaccagtcggcgaaagcccacaagaacggaatcaagaagccaaggagacaccgtcacaccccaaccagaggaatggaccctaagttcctgaggaaccagaggtacgcaaggaagcacaacgtcaaggccggcgagaatgctagcgctgaagaataagtgttttgattatctgtgagacattttgaagtttttttttaatgaatttaagactttcttagacaaaggaaccaatttactttgcgcttttgatcatgtttacgcaattgtggtttgtgtactctcttatcctggccttaatttaatatcagcagttttctaatcaaaaaaaccaaaaaaaagggcggccgctctagaggatccaagcttacgtacgcgtgcatgcgacgtcataactctct

SEQ ID NO: 126621 - DNA, 445 bp, Arabidopsis thaliana
tttctaaagagtaaagaagcagaagatagaagaagaacaacaacacacgcgagaaatttcagatctttcctctctccgcatctccctttttgcatcctcgtgtaatcatcgtctaagaagaagaagaagaatccttttgcttgttgctttactttctctgcaaactttcgtatctttgcgtgtttgagaatctctctatctttctcggatttggagagttatcgaagagatcgtgtcacattaaggattgaagacaagtctttaatgcagagaaatcgtgtgaaaatggattcttaagccccacttttagttgcagatctggagctttttactgggtttctgctaatttatcgacaagaacaaaaaaaggtttgttttgtctcacaagtgatggtcgtatgactcacatgcatgtcctctgagctcgtttagcatcaataagctt

SEQ ID NO: 126622 - DNA, 928 bp, Arabidopsis thaliana
  unsure (1)..(928): unsure at all n locations
agaaatcaaaaccttgtaaggtttcttagggtttcaatcgaagcgggagagaaaatctcagaagagaagccatggatgaagctttgacgaacgcttctgcaatcggtgaccaacgccagaaaatcgaacagtacaaactcatcctctcctctgttctctcttccaacgatcttctccaagctcagagattcatcgatcacattctttccgatgatgtcccgttggtggtttcgaggcagcttttgcagtctttcgcacaagagcttgggagattagaaccggagacgcagaaggagattgctcaatttactcttacccagattcagcctagagttgtttcctttgaggaacaggcacttgttatcagagaaaaacttgcgggtttgtatgaatcagagcaggaatggtcaaaagcagcacagatgttgagtggaattgatctggattctggaatgagggccgttgacgacaacttcaagctttcaaagtgtatccaaattgctcgtttgtatctcgaggatgatgatgctgtaaatgcagaggcttttataaataaagcttctttcttagtgagcaatagtcagaatgaagttttgaatttncagtacaaggtctgctatgctagaattttggacatggaaagaaagnttttagaggctgcacttcggtattacggcatatctcagattgagcaacgccaaataggggatgaagngnttgatgaggatgctttagagcaggcccctatcagctgctgtcacatgtacccctattagccttgngcttggccccagcggtcccggggtccttgcaactttnttcaaaggtggccgttnnnccaggttnagggttntccnnnccccagaagggttttctggaanggtttaaggggnccccgggtttttcccttccnggggcctnggcccct

SEQ ID NO: 126623 - DNA, 587 bp, Arabidopsis thaliana
cggacgcgtgggcggacgcgtgggctgcaaaaaaaaaaaaaaaaaattcttcttttatggcattaaccccttttgtctcacgaattatctgacctctgtatcggtaagccacctttacggtgtctctccgtcgccacagccaccgtagctgacgccatcgccgctctcaaatcctctgacgaaccgttcctcaccgtatggagctgtaatcacgatgagaaaacagatgataatgataagtgtgagtgtttgggtaagatctgtatggctgatgtaatctgttacctatccaaattcgacaacaatgttttgtctctttcctctgctttcgacgcatctgtctctgttcttcttcccaaatctcgtgccctcgtcgtccatgttcaatcttcttgcagtttgattgaagctattgatctgataatcaaaggagcacagaatctgattgttccgattcatacgaaatcaatcacaaagagaagacaacaacaaaaacttctgaaacgaaacgtcgtcgtttcactcaccaacgcaacttcaacaacccacaaaaacagccgagaattctgctggatcacacaagaaga

SEQ ID NO: 126624 - DNA, 821 bp, Arabidopsis thaliana
  unsure (1)..(821): unsure at all n locations
atgannnnnnnnnnnnnnnnnnnnnnnnnnnnnnnnnnnnnnnnnnnnnnnnnnnnnnnnnnnnnnnnnnnnnnnnnnnncgcccacgcgtccgcccgcgccgtcaggttcgactccttccttccttgcagcaaaaagcaatccgccgtcgagcttcgttcgtctctcagaagaagctgcaaatatggcgacagcgtatcaaccaatgaaaccagggaaggctggtttggaagagccactcgagcagattcacaagatcagaattactctctcctccaagaatgtcaagaacttggaaaaagtgtgtactgatttggttcgtggagctaaggacaagagactgagagttaagggtccagtcagaatgcccaccaaggttctcaagatcactacccgtaaagctccttgtggtgaaggaaccaacacatgggacagattcgagcttagggtacacaagcgagttatagatcttttcagctctcctgatgtggtcaagcagatcacctccatcaccattgaacctggtgttgaagttgaggtcaccatcgctgactcgtagatcaacccttctgtggctttggtatctcttttcaaattctcttaagaaacaatcttcttttcccgtaacgacattccttttgagttaaaaaaaaaacaaatgttttgttgtagtgaaacccaagttcttatgttttcttaatttaatagattttgaattttttaaaaaaaaaaaaaaaaaggaaaaaagggcggccgctctagaggatccaagcttacgtacgcgtgcatgccacgtcatagctggtctatagtgtnnnnnn

SEQ ID NO: 126625 - DNA, 783 bp, Arabidopsis thaliana
  unsure (1)..(783): unsure at all n locations
tccttaaatagagggcttcaactaaaaaggggaaaatcttgggtacggccctgacagggtaccgcggttccggaaatttccccggggtcgaccccccaagccgttccgcccccaattttaacacaaccgcaaaaaatcctctcccggcttaaaaacgagtgataaagaggtgtaacaaaacatggcgtatgaaccgatgaagcccacgaaagctggtttggaggctcctctggagcagattcataagatcaggatcactctctcttcaaaaaatgtgaagaacttggaaaaagtgtgcactgatttggtccgtggagctaaggataagagacttagagttaagggaccagtgagaatgcccactaaggttcttaagatcactaccagaaaggcaccttgtggtgaaggtaccaatacttgggacaggtttgagctcagggttcacaagcgtgtcatcgatctcttcagctccccctgacgttgttaagcaaatcacgtctatcaccattgagcccggtgttgaggtcgaggtcactattgctgactcttagacacttgttccaaaaccgcttcaaaagaatgtattttatcgtttctggtcctccatttttgttcgcaaccttgtttcttgggttttgatagttctgaggtggtttttgtctatcgaatttttttcatctattagaggccgtaatgaaaaaaaaaaaatanaaagggcggccgctgtacaggatccaagcttacgtacgcgtgcatgcgacgtcatagctcgtctatagtgta

SEQ ID NO: 126626 - DNA, 502 bp, Arabidopsis thaliana
cggaacggaaggtccggcgccagagcgacgcgttcgagcgatatgaaccaatggaaccagtttaggttggtttggaagagccactcaagcaggttcgcgaagatcaggattactgtctcctccaaaaatgtcaagaaccttgagaaagtgtgcactgatttggttcgtggagctaaggacaagagacttagagtcaagggaccagtgagaatgcccactaaggttctcaagatcactacccgaaaagctccctgtggtgaaggaaccaatacatgggacagatttgaacttagggtgcacaaggcgagtgattgatctcttcagctctcctgatgtggtcaagcaaatcacatccatcaccattgaacctggtggtgaggttgaggtcaccatcgccgactcgtagatcgactctcttacttctgtttttgctctttctcttttaagaaacaaatgttttgttgtactgaaaactcaagttcttttgttttcttaattgaat

SEQ ID NO: 126627 - DNA, 475 bp, Arabidopsis thaliana
  unsure (1)..(475): unsure at all n locations
ccggaaattncccggcgtcgtacccacgacgtccgaagccaaggcatgagttcaccgagtcccttggtggtgaagaaatcgcaagtggttatagtgaaaccctcaaaggctacacctgatgtctctctttctctctccacactcgacaacgatccttacctcgaaaccctcgccaaaaccatctatgtctacgctccaccatccccaaacgaccacgtccacgatccagcttccctttttcagcaagctctctctgacgcccttgtctattactaccctctcgctggaaaacttcaccggggatcccacgaccatagactagagttgaggtgcagtcccgcggaagggagtccccttttgttagggcaaccgcagactggaattttttttttccctaaacttttttnnanggncatgggccattgctttaaaccaattggnacctttnnaatnagggtngnccnttttgggggtt

SEQ ID NO: 126628 - DNA, 465 bp, Arabidopsis thaliana
tgaaaaccacaagaagatgtgtctgacaacttcagagccaccattcccagacactgacacaccaactatgagatctgcttcgtaccatatcaaacataaatctaagacacaaacccatcttcgtatccttaatctcaccaggaggagaagattactgaaggaacagaaggagatggagatgaggaacttgaagcttttcgtagagaatcaaagcatcatacgagagaatgaagctttaaaaaagaaagctcttcttctccaccatgaaaacaatgctctgtttgctctgcttcacccaaaatactcccctgtttcaacctccttgcttcagtgatcttcgtgaactttgtttattgattcttctcgtcttcttctttccttttccaacctttaatggtactaaaataaaatcaaactaatgatttatgggtgatttactcttctatgaaagctttgattattctt

SEQ ID NO: 126629 - DNA, 793 bp, Arabidopsis thaliana
  unsure (1)..(793): unsure at all n locations
tgatacttcnnnnnnnnnnnnnnnnnnnnnnnnnnnnnnnnnnnnnnnnnnnnnnnnnnnnnnnnnnnnnnnnnnnnnnnccacgcgtgcgctagtttccgggttctgtaaaaaaggagatacttcaggagcagctaagatggttaaggagatggaagagagagggattaaaccgtcgaaagtaacatacacgatacttatcgacacatttgctcgttcggataacatggagaaagcaattcagcttcgaggctatcaatggaggaactaggattagtcccggatgttcatacctatagtgtattgattcatgggttttgcatcaaaggtcaaatgaatgaagcatctaggctttttaagtcgatggtcgaaaagaattgtgaaccgaacgaggttatatacaatacgatgattcttggttattgtaaggaaggtagttcttatagagcattgaagttgcttaaggagatggaagagaaagagttggctccaaatgttgctagctacagatatatgattgaagttctttgtaaagaaagaaaatcgaaagaagctgagcgtttagttgagaagatgattgattcagggattgatccatctacttcaatccttagtttgatctctagagccaaaaacgattcacatgtaagctcaaaataatgattagagcagttttaattttaaaaaaaaaaaaaaaaccaacgctcaaagnnnnnnnnnnnnnnnnnnnnnnnnnnnnnnnnnnnnnnnnnnnnnnnnnnnnnnnnnnnnnnnnnnnnnnnnnnnnnacaat

SEQ ID NO: 126630 - DNA, 511 bp, Arabidopsis thaliana
  unsure (1)..(511): unsure at all n locations
gannnnnnnnnnnnnnaatacgactcatatagggagagctggtacccctgcaggtaccgggccggaattcccgggtcgacccacgggtgcgcgcacgcgtgcgaaaatcataatccacttttatgtgatcgagaaagagattctaagcccagaaaacaccaaaaccttccattttcattggttcccatttttttttctttgtagctcgaattctctgctgccactactcgtaagtgaaattggaggggggaatagatctttgggtgcttctgtagtctcagaatggcagcttatgtttctccctgtttaactcctccggattctcgggtactcactgttcttagaaagagtgtgttacctgatcatcatctaggcacgagggttggttgcttaagaatgagtgaaggtactactaaaagatatcggggtggtgcttctcataagtacgagtcttcgtcaatcagaaactctttgaattctcatagtacaagccatttccaaagccaagact

SEQ ID NO: 126631 - DNA, 603 bp, Arabidopsis thaliana
  unsure (1)..(603): unsure at all n locations
nnnnnnnnnnnnnnnnnnnnnnnnnnnnnnnnnnnnnnnnnnnnnnnnnnnnnnnnnnnnnnnnnnnnnnnnnnnnnnnnnnnccacgcgtgcgcggacgcgtgggatcgaattagataatgccactccaaaaaacgttactttaccttacctatctcgctgacgtcagatcccaccgttagagcttacacttgtaacgccgtttcctgcattttccacaagcaaggtaaaaaaaagctttgtgcagagagagagagaagaagaaaaatgggtttgcttacgaacaagattgagagagaagagctaaagccaggagatcacatctatacttacagagcaatcttcgcttattctcaccacggaatctttgtcggtgggtccaaagttgttcatttcagacctgaacacaaccgccatggattcatcaacatcatcaatatcatcatcttcctctgaagatatctgttccatatttcctgattgcggtttcagacaaccggacagtggagtagtcctttcttgcttagactgtttcctcaagaacggctcactctactgcttcgaatatggagtcagtccatcggttttcctaaccaaagtccg

SEQ ID NO: 126632 - DNA, 571 bp, Arabidopsis thaliana
  unsure (1)..(571): unsure at all n locations
ccnnnnnnnnnnnnnnnnnnnnnnnnnnnnnnnnnnnnnnnnnnnnnnnnnnnnnnnnnnnnnnnnnnnnnnnccacgcgtgcgggttttttcctagagacctctgctgcaatggcggggatcataagccctagccctacggctctttatttcaccagtaatgtcggtgggaggcgactgaaagcagtgagctgggcgggaaagagtgtctccgggaacgttatccgccggagaagcttgagaattgctgcggagctgaaattcgtgaatgcagaagaagcaaaacagttaatagctgaagaaggttactcggtggtggatgtaagagacaagactcaattcgagagagctcatataaaatcttgctcccatattcctctcttcatttacaacgaagacaacgatattggcacgatcataaagaggacagtgcacaacaatttctcagggctcttctttggtttacctttcacgaaagtgaatccggaatttcttaaatctgttagaaacgagttttctcaagacagcaaacttttacttgtttgccaagaaggtctcagatctgcagctg

SEQ ID NO: 126633 - DNA, 579 bp, Arabidopsis thaliana
  unsure (1)..(579): unsure at all n locations
atgannnnnnnnnnnnnnnnnnnnnnnnnnnnnnnnnnnnnnnnnnnnnnnnnnnnnnnnnnnnnnnnnnnnnnnnnnnnnnccacggcgtgcggtacaaattccatttcgattttaaaacttttgagaagacgatatacaataatgaacggaacatcgtgggctgaccagtgggacaatagcggcgactctgccaaaggaggccgaatcggcagcggcgccgtcgtgagaagcagcggaagtggagcaacgtcaaacacgaccaagtacaaggagaaaatgggacaagggttagacaaaaccaaagctgtagcttcttctggttttaagaagctcaagactggttctgctattggttttcgttgggtcaaggacaagtatcacaaaaccacacacaaacaataaagatttctgtaaactcctttgtatatgagtattagtaatttattcacttgccaaatactgtattatgtctgatctatatttttctaagcttgtttgatttgaatgctttgtttactgtggtaaattgttccagtttgggtgggttcatggattacccaaattgtttttctcttt

SEQ ID NO: 126634 - DNA, 1020 bp, Arabidopsis thaliana
  unsure (1)..(1020): unsure at all n locations
actgagcaacacaaaactggcgaaccaacgtgactctaacgaagaaaccggcaatggccagtatcactacaatgccgaagaaataacaagaatcataaacgagccagaatattatcccccgggttacaacttgtctaccaccgcaatttcaaacatggtgtctatgctgactaatgttgtctctggtgagaccgaaccctcggcatctgcgacatggacgatgggtcataagagagaaagagaagagttttctttgcctcctcaaccattgattaccggttcagctgtgactaaagaatgtgaaagctcaatgtccttggagaggccaaaaaaatatagaggagtaaggcaacgaccatggggaaaatgggcggcggagattcgagacccacacaaggcgacacgtgtatggcttgggacattcgagacagccgaggccgccgcaagagcctatgatgcggcagcacttcgctttagaggaagcaaagcaaagcttaatttccccgaaaatgttggaactcagacgattcaacgaaattctcatttcttgcaaaactctatgcaaccttctctgacatacatcgatcaatgtccaactctattatcttactctcgatgtatggagcaacaacaaccattagtaggcatgttgcagccaacagaagaggaaaatcactttttcgaaaaaccatggaccgaatatgatcaatacaattactcctcttttggttaactaacatattgtcaacgctttgtatttctacttattcgatctaccaattttttctctcccaatacaacttcagtctgattattgccttcttagatatgtcttcgaatgttatgactatacatgggtgtatataaaatttgtgatcaaagtcttgtaattagcgtgtgnnnnnnnnnnnnnnnnnnnnnnnnnnnnnnnnnnnnnnnnnnnnnnnnnnnnnnnnnnnnnnnnnnnnnnnnnnnnnnnnnnnnnnnnnnnnnnnnnnnnnnnnnnnnnnnnnnnnnnnn

SEQ ID NO: 126635 - DNA, 871 bp, Arabidopsis thaliana
  unsure (1)..(871): unsure at all n locations
nnnnnnnnnnnnnnnnnnnnnnnnnnnnnnnnnnnnnnnnnnnnnnnnnnnnnnnnnnnnnnnnnnnnnnnnnnnnnnnnnnnccacgcgtgcgcgcgtgagaacgttacgtctcatcttcaaaagtataggctttacctcaaaaggatgcagggattgactaatgaaggtccctctgcttcggataagctcttctcttcaacacctgttcctccacagagcttccaagatatcggtggcggtggcggtagcagcggtaatgttggagtgccgattccgggggcgtatggaacgcaacagatgatgcacatgccagtttatgcacatcatatgggtatgcaaggatatcatcatcaaaatcataatcatgatccttatcatcagaatcatcgtcatcatcatggagctggtggaaatggtgcgtttgagtcaaatccttatatgatgcagcagaataagtttggatccatggcttcttatccttctgttggaggtggaagcgcaaatgagaattaaaaagagtctatagatggattcaatgggggaggaagagataggtgagcttgttattgctcgtggaactgataattgattgtcaagtttctgtttttttaagtacagtacagttataattcttactcgatttgatcgaaattttcatcaagtttctgtcttttactataaatggtatacaataaagtcttaataatcacttgtttggtgatgttgacagagttaatataatcaactaagttgaatttggaaaaaaaaaaaaaaaaaaaaaaacccnanannnnnnnnnnnnnnnnnnnnnnnnnnnnnnnnnnnnnnnnnnnnnnnnnnnnnnnnnnnnnnnnnnnnnnnntacaat

SEQ ID NO: 126636 - DNA, 461 bp, Arabidopsis thaliana
gtgaatcttccggtccataaccaaggaaagcattagtatacttataattatggagttgacaagtatgacattggggctggttttggtcactttggtattgcggtcgatgatgtggcgaaaactgtagagcttgtgaaagccaaagggggaaaagtaagccgggagcctggtcctgtcaaaggtggcaaaactgtaatagcattcattgaagatcctgatggttacaaatttgaactcttggaaagaggtcctacaccagaacctctttgccaagttatgctccgtgttggtgatctcgatagggccataaagttctatgagaaggcttttggaatggaacttctgcgaacaagagacaacccagagtacaagtacacaatagccatgatgggatatggtccagaagataaatttcctgtcctagagctgacatataactatggtgtcactgaatatgataa

SEQ ID NO: 126637 - DNA, 647 bp, Arabidopsis thaliana
ctgcaagtaccggtccggaattcccgggtcgacccacgcgtccggaagaaggaagacatggcagagactacgtgggtccacctccagctccacttctagacatggctgagcttaagctctgggctttctacagagctatcatcgcagagttcatcgccactctcctcttcctctatgtaaccgtagctacagtcattggccacaaaaaccaaaccggtccttgtggcggtgttggtttactcggcattgcgtgggcctttggtggcctgatctttgtcctcggctattgcaccgccggtgtctccggaggtcacatttaacccagctgtggcaatttggtctgttcttgggctcggaaagtgtcgctccctacagcagttgcttacatggtggctcagtgtctcggagccatttgtggagtcggactcgagaaggcctttatgatgactccatacaaacgtctcggaagcggagctcacaccgagtctggtggctatagcaccggaactgctcttggagcggacattatcggctcatttgtctgggtttacactgtcttgtctgacactgaccccataagaagagcccgtgactctcacgtccgggggtaggcttcgttacctataagatttgctgtggccatggtg

SEQ ID NO: 126638 - DNA, 507 bp, Arabidopsis thaliana
  unsure (1)..(507): unsure at all n locations
cannnnnnnnnnnnnnnnnnnnnnnnnnnnnnnnnnnnnnnnnnnnnnnnnnnnnnnnnnnnnnnnnnccactgtttgcggccgcgtccgaatctttttagtgagagagaaatcttagagctgagctaagaaaaatgtcaaaagaagtgagtgaagaaggaagacatggcaaagactacgtggatccacctccagctccacttctagacatggctgagcttaagctctggtctttttacagagctatcatcgcagagttcatcgccactctcctcttcctctatgtaaccgtagctacagtcattggccacaagaaccaaaccggtccttgtggcggtgttggtttactcggcattgcgtgggcctttggtggcatgatctttgtcctcgtctattgcaccgccggtatctccggaggtcacattaacccagctgtgacatttggtctgttcttggctcgtaaagtgtcgcttccctagagcagttgcttacatggtggctcagtgt

SEQ ID NO: 126639 - DNA, 418 bp, Arabidopsis thaliana
gtccgaccacgcatccggagccatcaacagtcgttggcgaatcgcatccaatggatgtcgaggagccacttgagcagaagacatctgttggaggtggggatgacagcaatgctgcaaacgcagatatgatcaaagaaaataatattatcgatgcaggcgactcagaaaagttgaatttagatagaagttctggtgatgagtctatggaggatgagccggagacaaagcaatccgagtcaattacatctgatgataagagtgcaaaaattgaaatgctttctaaggaggaaagccgtgctgatatggatgcggggaaagggaaatcccctgaaaataaaagtcacccactggtggcttctgacaaaagaaagcttcctgctaatgatcaagaagctgttggaaacaatgaacctgcaaa

SEQ ID NO: 126640 - DNA, 765 bp, Arabidopsis thaliana
  unsure (1)..(765): unsure at all n locations
ncnnnnnnnnnacgactcactttagggagagctggtacgcctgcaggtaccggtccggaattcccgggtcgacccacgcgtccgcgcttcacaatcccaacgcacctctctctctatctctcacttcttcttcttcctctccctcttcaccaatgccacgtaaccctagattctgcttcttcctcttccttctttttcactcctctcttttcttctccatcccctgtttttccatagacgaacagggtctagctctcctctcatggaaatctcagttgaacatctccggagacgctttatcttcttggaaagcctccgaatcgaatccttgtcaatgggtgggaatcaaatgcaacgaaagaggtcaagtctcggagatacaactccaagtcatggattttcaaggtccgttaccggcgacgaatctccgacagataaagtctctgactttgctcagcttaacctccgtgaatctcactggttcaatccctaaggagcttggagacttgtcggagctagaagttcttgatttagctgataattctctctctggtgaaatccctgtggatatcttcaagctcaagaaactaaagattctgtctctcaacacaaataatctcgaaggtgtgattccatcggagttagggaatctcgttaacctcatcgagctcactctcttcgacaataaactcgccggagagattcctagaaccatcggagaactcaagaatctagaaatcttccgtgcangtggtaacaagaatc

SEQ ID NO: 126641 - DNA, 592 bp, Arabidopsis thaliana
  unsure (1)..(592): unsure at all n locations
nnnnnnnnnnnnnnnnnnnnnnnnnnnnnnnnnnnnnnnnnnnnnnnnnnnnnnnnnnnnnnnnnnnnnnnnnnnnnnnnnnnccacgcgtgcgctttctctcactttctctattcatgcgacccaaaaaatggaatctttaatgagactcgtcttagttctgtttccgttcttcgtcgtcttcttcgtacctcttgatcacgtttcttcagaatctatcagcagagcaaattttccagatggatttgtattcggaacagcttcttcagcttaccagttcgaaggagctgtgaaagaaggaaacaaaggagaaagcatatgggacactttcacgaaggagaaaccaggaaagatactggatttcagcaatgcggatactacggttgatcaatatcataggtttcacaatgacatagacctgatgaaagatctgagaatggatgcttacagattctctatatcttggtcaagaatattccctaatggaacagggggaagtaaacccagatggagttaagtactataacagcctaatagatgctctnttagccaaaggaatcaaaccttatgtgacattgtatcactgggatct

SEQ ID NO: 126642 - DNA, 705 bp, Arabidopsis thaliana
gcgcagagagagctaaagctacagtgtacagaagaaaatgagaggactctccagaaactccggcgcggcggcgatattcgcgattctactcattctcgccgttcataactggtccgtcgccgtatcttctcaatccaccgaattcgccggagatttccctccattcgaaacagagtgccgcggtacaattgccgagtgctctgtttccgccgccctcggagacggaggagatctattctacggcggaggagaaatgggagaggagttcgagatggactcagagatcaaccggcgcatattagctacgaggaggtacatcagctatggtgcgctgaggagaaacacaattccgtgctcacgtcgcggcgcatcttactacaattgtcgacgtggcgctcaggccaatccttactctcgtggctgcagcgccatcactcgctgccggcgctcatgaatctatcactgtcagtctcactgtaattcttttttcttttctttttctgatatataatttttcagaaatttctcttttcttttgttaccggtttatatttctaagttcattgcggattattagagtttcatacacatgtaaatgtttctgggaatttatctctgttattgatgtaagtttgtttacataaaccagcaaaaaaactatggaataaatacattataattaatagtatcatcactcataagcgg

SEQ ID NO: 126643 - DNA, 566 bp, Arabidopsis thaliana
  unsure (1)..(566): unsure at all n locations
atgannnnnnnnnnnnnnnnnnnnnnnnnnnnnnnnnnnnnnnnnnnnnnnnnnnnnnnnnnnnnnnnnnnnnnnnnnnnnnccacgcgtgcgagaatatttacctagagaggatcatgaagggttgcagcttagatcttcacctatctccaatggcctctacgcttcaatcttgtcatcaagattctacagttaatgatcgttcttcaaccataagatctaaggaaatcaatgcattttatagtgggagattaagtgagtacgatcttgtagagatccagatgagagcaataatagagatggcgagcaaggatcgtgaagtaacagcgttagagttagtgccggtgagactggaatcaccgttaggatgttcggtgaagagatctgtgaaaaggttcttggagaagaggaagaagagaagcaaatcttttacacttacacctaattacacctcaagtacttcctcatcatcctcctctcttcataatttctaatcataattttattatgttttccttctagttatcaatcaaaacaaaaaaatctttgtttctttcttttttctt

SEQ ID NO: 126644 - DNA, 893 bp, Arabidopsis thaliana
  unsure (1)..(893): unsure at all n locations
caatggcgaattcagagtcctcctcctcaccagtaaacgaagaagagaacagccagagaatctcaacactccatcaccaaaccatgccttccgatttaactcaagacgaattcacccaactctcccaatcaatcgccgagttccacacgtaccaactcggtaacggccgttgctcatctctcctagctcagcgaatccacgcgccgccggaaacagtatggtccgtggtgagacgtttcgataggccacagatttacaaacacttcatcaaaagctgtaacgtgagtgaagatttcgagatgcgagtgggatgcacgcgcgacggtgaacgtgataagtggattaccggcgaatacgtctcgagagagattagatctgttggacgatgatcggagagtgactgggtttagtataaccggtggtgaacataggctgaggaattataaatcggttacgacggttcatggttttgggaagggagaagaagaagaaaggatctggaccgttgttttggaatcttatgttgttgatgtaccggaaggtaattcggaggaagatacgagattgtttgctgatacggttattagattgaatcttcagaaacttgcttcgatcactgaagctatgaaccggaacaacaacaacaacaactcttctcaggttaggtaatgatgaaatttgggggaaagaaaaatgtttctaaattgggggagttttaatttttattttgatttgtaaaacgttttttttcttctcttgaattgtaatttccttgtttgattttatggttatgttttattttttaaaaaaaaaaaaaaagnnnnnnnnnnnnnnnnnnnnnnnnnnnnnnnnnnnnnnnnnnnnnnnnnnnnnnnnnnnnnnnnnnnnnnnnn

SEQ ID NO: 126645 - DNA, 419 bp, Arabidopsis thaliana
ttaagaccagaacttattgactctgttatcaaaccaatgcttgacttcttacgtgaaactggttcaagacttatgatcaatgtctatcctttctttgcttatgaaggaaactctgacgtcattcctttagattatgctttgcttagagagaatccaggaatggttgattctggtaatggtttgagatactttaatctcttcgacgctcaaatcgacgccgttttcgcagcaatgtcggctttaaagtacgatgatatcgaaatcattgtcacggaaactggttggccgtcgaaaggagatgagaatgaagtcggagctactctagctaacgcagcttcttacaacggaaacttaatccgtcggatcttgacacgtggaggtacaccgttacgtcctaaagcagatctaacggtctatct

SEQ ID NO: 126646 - DNA, 457 bp, Arabidopsis thaliana
accacaaaactgatcgggagataagagcggtaaaaaccaccgagtcacgactcagtgactcaaatcgttcttcccacacaaaaaaaatggttactgcgacagcatcaactccattttcactctcgtcgtccgtggttttcacgcgccgtcgtaatttcaaacgttttccagtttgcgccagtctttctccggaggtttctcctcttctcagagcagctcatcacactgtggataattatgtaaagagtgggatgattattggtttaggatctggagaagcttcagattttgctatacgttatttgggtcaacaacttggttctggttctttacataatgttgttggtgtaccaatgtctgctcgaagtgcgagtgaagcagcaaagtatggaatccccttggaatattaccgggatggtgttcagattgattttgcatttcatgatgctgatgctgt

SEQ ID NO: 126647 - DNA, 405 bp, Arabidopsis thaliana
tgttttgtctttcaatgttgtagttggacgggactttgttgtgcctgcatactcaaaggtttccctacttcaacagccaacgacagaagacagtgatgaagagctggaatatgctgatagtagcagcgggactgcggatcatttgtcaggcctaaatctgcaaatggagtccaaagcatctgagcttggtcctgatggagcaggttacatatgggaagtatgtgaaggggctcatgatgaggagtggaagcattctgttgcaccaatccccaaggataaactttctgagattactcaggccatagacgatgatgacacagatgatgaaagtgtcgtcccgacttctggagagttgaaatctgatgctgatagtattaacactgatgtgaatgatcccaatgatga

SEQ ID NO: 126648 - DNA, 634 bp, Arabidopsis thaliana
  unsure (1)..(634): unsure at all n locations
ggttncctttctccgccgttttnttgatttggcggtaccattccccggnacacttnccctgntccccnagtntatcgctcccttggggaagctggtccccctcagtcccgtccggattcccggtcgccccaagataaggaaaccatgtctgtgtcagcgatctttggtaccggaatcgtcaccgttgctgcttctccggttctccgccaatttcaagttccaaaattgggtaatggaggaggattagggatggtgatagagtgttcgtcgaggccacagaagaaatcgacggctcatcacaggaagacgaggccgaagaagactcagccttgggacattaagagaaagcctactgtttacgctcctcttcctcctcttccggcggaatggagtccgttcactctcgcttctgacgacggtggtgctgccactgctgcgggagatttggtttcaggcgctgcctagttggtatgagttatctgctgatttggttgtaatctacgtttgagaacttttgttgttgtttactgtgttttcagttttctgatgtttgttgttgggtttgtttgtgtttgattggtgaaatgaatggaccaaatttgcggtttataaaagcttcaaccctttccccccc

SEQ ID NO: 126649 - DNA, 452 bp, Arabidopsis thaliana
gacttttgttgagaatgctgatgtctatttgcatggaatcaaaggctttgaagaatttgaagtgagtcattctgtgaatccttttcttcctgagacatctaagggagaagaatgtgaaatagatacacttactgaggcagagaatttaggaattaagcctgaaggcttaagtattggctcagaggtttcttcatcagacaagcttctcgctggagacaaaactgaacctcaaggccaaaccgatttggttgcggtcaaggaatttcccagtgcagagaacatactgatatctaagattaactctgaagatatcggaatgaaagctgaagagggtaaatcatcattagggaatgcacaaactgttgaatcagaaaccttgagagtttctctacctgctgtagattctgtagttggtgactcaaatgctgatatgagcagtgcagcgaacaaaa

SEQ ID NO: 126650 - DNA, 410 bp, Arabidopsis thaliana
atttatctctccactcacaaatattttgatttgttttgtaactgtttctctttctctggagctttcttcttcttcttcaataatcgatttaggtttttcaaagctaagtgtttgtgttgtgataatgactagtagcgaggaagtagttgaagtgacggtggttaaagcacctgaagctggcggaggaaagttatcacgtcggaagattcggaagaaagacgccggtgttgatggtttggtgaagtgggagagatttctcccgaaaatcgcgcttagagttttgctcgttgaagctgatgattctactagacagattatcgctgctcttctcaggaaatgtagttacagagttgctgcagtacctgatggcttaaaagcttgggagatgctaaaaggaaagcctgaaagtg

SEQ ID NO: 126651 - DNA, 495 bp, Arabidopsis thaliana
  unsure (1)..(495): unsure at all n locations
tgannnnnnnnnnnnnnnnnnnnnnnnnnnnnnnnnnnnnnnnnnnnnnnnnnnnnnnnnnnnnnnnnnnnnnnnnnnnnccacgcgtgcggggaactccacaaagactcgatttttatagacggagataacagtagaagcgatttcaggcgagagacaatcaatctgatgaaagctcttctaaatcctgaatcttccttttgtctttcttcgatttcttcctcacagatcaagaggtctttacacggggacggattgagttcttcatgtctccggtttcctttaaccgattttgccggacgtttacggcggcggaagctcactggtggggtgtgtataaaggcagttttggactctgcaatgatggagcagttagggcttaaggaatcagatgttaagaatccggctttatcttctacttatcggggatcggggattccgaagccaaaccttactggtcttgatgctcaagctagggtttggccggtcccactc

SEQ ID NO: 126652 - DNA, 519 bp, Arabidopsis thaliana
  unsure (1)..(519): unsure at all n locations
cagcgtcnnnnnnnnnnnnnnnnnnnnnnnnnnnnnnnnnnnnnnnnnnnnnnnnnnnnnnnnnnnnnnnnnccacgggtccgcgcacgcgtacgatttctttccttatcgatttttctctccgcgaattgttcgttgttttcttctggcacctgattctcatcttctttcttgtggaatctgggttttgttgcggagttttcgaggttcctcattcgttgcttctgttgaaactctcttttttttttgggtggtttactttgtttttttgttgttgttgctttcaacctttaaatgccctaattttgaggttctagttgtggtttttaagattaggagcagaagccctttcgactaaagttcatgttagctgcaatttgctgaagtattcacagttttgttctgttggaagctctatgtgtttccttctgtgattgaaacacagagagaatgattttaccaaagcagtattgttgcacacactcgccgagctgccaaggcaccaaaaggccatttaaa

SEQ ID NO: 126653 - DNA, 627 bp, Arabidopsis thaliana
ccaaatcacaacaaagacccacaaaattcttttttttttcctttttcaaatcccattaataaaaaccttaccaacccatgaagtaaagtaaactcctttcttataaactctcttttgttctttttttttcaacttcatcagtctcttaactcaccatcacaagaacaagaaagatgaagagaggatacggagaaacatgggatccgccaccaaaaccactaccagcttctcgttccggagaaggtccttcaatggcggataagaagaaggctgatgatgacaacaacaacagcaacatggatgatgagcttcttgctgttcttggctacaaggttcgatcttctgagatggctgaagtagcacagaagcttgaacaacttgagatggtcttgtctaatgatgatgttggttctactgtcttaaacgactctgttcattataacccatctgatctctctaactgggtcgagagcatgctttctgagctgaacaacccggcttcttcggatcttgacacgacccgaagttgtgtggatagatccgaatacgatctcagagcaattccgggtctttcggcgtttccaaaggaagaggaagtctttgacgaggaatctagcagcaagagga

SEQ ID NO: 126654 - DNA, 641 bp, Arabidopsis thaliana
  unsure (1)..(641): unsure at all n locations
tggatctaacccgacccgttaatccacttgtggaggcttttgacaccgctgctgagattagtgctcgccgtgccacggagcctatttacgctgtttggaaaacgaagcgtgtgttgaacgtgggaagcgagaggaagcttagggaagcgatcaggaccgtgcacgtgttggtctctgagattgtcagagctaagaagaagagtcttgagatcggaaccggagcagaagcaaagcaagatcttttgtcgaggtttctagccgccggccacaacggcgaagcagtgagggacatggttattagttttatcatggcgggaagagatacaacgtcagcagcgatgacgtggctgttttggttgttgactgagaacgatgacgtggagcggaagattttagaagaagtggacccgttggtgagtttagggttagggtttgaggatttgaaagagatggcttacacggaggcttgtctatgtnaagccatgaggctatatcctccagttttcgtgggcctctaaacatgctgcaaacgncgncggttttncctgattgggcancgtttcaagaggaggnggcaaaagtgcccnttttncccctaacgggnnttggnaggtttngnnnccntttttggggaccgggtt

SEQ ID NO: 126655 - DNA, 808 bp, Arabidopsis thaliana
  unsure (1)..(808): unsure at all n locations
gctacacatatgacaaacacaagaaagcaccaaaagaccacatatccttccaatggccccccttcaacgcaccatctcggatatttcacaccacatttcaatagacaacactctaacaaaagaaccatctccaaccgcaaccgcaacaactttgttatccttatcagcgatatccgaagtggaagatgcaaagtgtgagtgttgtggcatgtctgaagagtgcacgccggagtacatacaccgtgtgcgttcaaaattctcagggaagctgatttgcgggctgtgcgaaaaagcggtggagggggagatggacaagatgaacaacagtgaagtgctgatggacaagcggcgagaagaggcagtgaaggtacacatgagcgcatgttcccggttcaacaggctaggccggagttatccagtgttgtccaagcagaagcggttaaggaaatgctgaaaaagaggtctaagaagatggttggagccaccaagcctgaaaaaggtggcctcgctaggagctctagctgcatgccggctttagctaaggagcttaaagatcgtaccttggttaattagcttataagtatactcacgtacacgtatgttatgttcatatatagatttgaatttacatgcagacggagatgtgtattaagtgagttatatatgtagttaaaaaccgaatggaagttttacgtgtgtaaattgtaatgtataatatttnttcgtcaaaaaaaaaaaaaaaggannnnnnnnnnnnnnnnnnnnnnnnnnnnnnnnnnnnnnnnnnnnnnnnnnnnnnnnnnnnnnn

SEQ ID NO: 126656 - DNA, 488 bp, Arabidopsis thaliana
cacaattatttggaagagaaggcgtagaatcgattcagaatctgtgaattacgaatccatagagagaaaggttttgcatttgcaacctttctcaaattgggttctgtgcatttccttgcactttggataataggaactaaatctctttctctggttcatcaatggcggatcaaacgaagaagagatacgttacaagcgaggatttgaaaaaacacaacaaacctggagatttatggatttcgattcaaggtaaagtttacgacgtttccgattgggttaaatctcatcccggaggcgaagcagcgattctcaatctcgccggccaagacgtcaccgacgcgttcatcgcttaccatcccggaaccgcatggcaccacttagaaaagcttcacaatggctatcacgtgagagaccaccacgtgtcagacgtctcacgtgactaccgtcgtttagccgccgagttctccaaacgcggcctcttcgacaaa

SEQ ID NO: 126657 - DNA, 524 bp, Arabidopsis thaliana
  unsure (1)..(524): unsure at all n locations
tgannnnnnnnnnnnnnnnnngactcactatagggaaagctggtacgcctgcaggtaccggtccggaattcccgggtcgacccacgcgtgcgcgggtgacattggcaagtacattcagatatgacaaagataggactgatgcagaagtagctactattgaggcggctatgctacgtgaagccatagagaagaaacaattagatcatgaccatgtcctgtacatattaggaacgcgtagtatctatcgggggaggagaaacttttggtgcttacaagaagaattatggggtcacaattgataaggatgttgatggatgtccaggagatgctgatctgagaagtctattgaaggtggcaatcttttgtattgatactcctgagaaacactttgcaaaggtggtaagagattcgattgagggttttggaacagatgaggattcgttgacgagggcgattgtgacgcgtgcagagatccatttgatgaaagtaagaggagagtatttcaacatgtataatacaagcat

SEQ ID NO: 126658 - DNA, 756 bp, Arabidopsis thaliana
  unsure (1)..(756): unsure at all n locations
nnnnnnnnnnnnnnnnnnnnnnnnnnnnnnnnnnnnnnnnnnnnnnnnnnnnnnnnnnnnnnnnnnnnnnnnnnnnnnnnnnccacgcgtgcgtgctttgagaattctttgcattctttacagttctttgatcagctcggaggcgtgttctcaatagtgaaacgggtaatgacacaaggggctctacacgatatcagacagttgcaatgtatgcttagaaacctcacaagcaatctcacattccaagaagcttatgacatgacaggaaggattctcgggatcaccgtttgctccccaagaaagcatgaacctcctcggtgtcttaactatttgacttcgcctcatgtggttatatggagcgcagtgactgcttcttgtgcttttcctggtctctttgaagctcaagagctaatggctaaagatcgaagtggagagatcgtaccgtatcatccacctttcaatttggatccagaagtaggcactaaatcatcatctggacgccggtggagagatggtagtttggaggttgatttaccaatgatgcagcttaaagaactgttcaatgtcaatcattttattgtgagccaagccaatcctcacattgctccattactgcgtctaaaggatttagttcgagcttttggtggttgtttcgtagataaactagcgcatctagtggagtttgatggcaaacattgatgcacccaggtttttattgcttggttattctctatggtttaatctaaaatccttttt

SEQ ID NO: 126659 - DNA, 557 bp, Arabidopsis thaliana
agctagaagccagcaaggaacgatggagattattacggcatcatcatcatcatcatcatcattgtaattcgtaatcatatctgcttttggaatttcttcacggataagaaaaaaggatatcgacaatttcgcttttgctttcaaaatctcattctatcactttgtgccttttttagccatcgcgaaaaacctctgaatcgcatcccttgattttctgggtttgtgactttgtgtagtggaaattaggcttgttgtttgatttcgctacgagaaaatggacaagtacgagcttgttaaagacatcggtgctgggaattttggagtggcgaggctcatgagagtcaaaaactccaaggaactcgttgctatgaagtacatcgagcgtggacctaagattgatgagaacgtggcgagagagattattaaccacagatcacttcgtcatcccaatattatccggtttaaggaggtggttttgacaccaacgcacatcgtcattgctatggaatatgctgttgccgggagctattttagcgtttttttgcgctggagaatca

SEQ ID NO: 126660 - DNA, 559 bp, Arabidopsis thaliana
  unsure (1)..(559): unsure at all n locations
aataaaaaaataagagccatcgtgacttcgagagaagaagccagcaaggaacgatggagattattacccggcatcccatcatcattcatcttatcatcccatttggaacaattaggctgtgtgtgttgtgtgatttcgctttacgagggaaaatgtgaccaagtaccgcgagcttccgttaaagacccatcggtccgctgtggaattttgtgaggtgtgcgaggcttcatgccagagtcaaaaaccctccaaggaaccctcgtttgctttatgtaagtacatcgagccgttcggacctaccagatttgttgagaacccgtggcgaggaggagaaattattataccccagatcactccctcgtcatcccannatattatccggtttaaaggagnggtggttttgacaaaccaacgcacatcgccatttgctatggaatatgnctgctggcggtgaggctantttgagcgtatantgtagcgctgtgaagattcaagtgaggatganggcaggatacttttttccagcagctntatctcaggagtcagctattgtcatgct

SEQ ID NO: 126661 - DNA, 527 bp, Arabidopsis thaliana
  unsure (1)..(527): unsure at all n locations
atgattctccnnnnnnnnnnnnnnnnnnnnnnnnnnnnnnnnnnnnnnnnnnnnnnnnnnnnnnnnnnnnnnnnnnnnnnnccacgcggtccgcgaaatcaagacaacgacatggttactacgtttgcttcgagatctcattctctctctgttccatttcttctataaagacagtcctcatcttcatcttatctgcaaatgcaaattcgtctgaaacctgattattccttcttcatcgcctcttcctcaacgatggcttcgacttcttctttgggaccttctacactactctcttacggttctccttctcgtcagtttcctgattttgggttcagattgatttcgggtcacgaaagtgttcgaattccatcattccggcgatttcgggttcactgcgagtcaaaggaaaaagaagtgaagccgtcttctccatttcttgaaagctcctcgttttcgggagatgctggtttgcgctctagtgaatggaaggctggtcctgatatttggagatcatctgcaaaaaagat

SEQ ID NO: 126662 - DNA, 481 bp, Arabidopsis thaliana
  unsure (1)..(481): unsure at all n locations
tgattactttnnnnnnnnnnnntctatggcaaaggcagactttttccgatccttcaccgtctcggatttagttttctnaccattgaagatctaattttcctacctttctccatgagacgctttcctttaggtctcggggtgctgattttgcttcaccgccgttcgtggtaaggagtattttggttttgtttccttttgtgagagtttctagtctcagatctgttgattctatgtttgttttacactttgtatttctggttttgaatatcaggattatgagtccggaaagtatttcttcagatatgatgtatttgtagcttgggttttttcccctttagtttgatcttgtattcgggagttttcatttgcttgccgactttaatctctacaaggattgtttccttgtcggcctttgtaatcatgtgactctaaattttatcaaataaatccttattctacttnnnnnnnnnnnnnnnnnnnn

SEQ ID NO: 126663 - DNA, 1093 bp, Arabidopsis thaliana
  unsure (1)..(1093): unsure at all n locations
atgannnnnnnnnnnnnnnnnnnnnnnnnnnnnnnnnnnnnnnnnnnnnnnnnnnnnnnnnnnnnnnnnnnnnnnnnnnnnnccacgcgtgcgcgggccttgcatgagataaccttttccacagaagacaagcctaaactcctttttcagttaactgccttgcttgctgagcttgggctgaacattcaagaggcacatgctttctctacaactgatggctactcactagatgtttttgttgttgatggctggccgtacgaggaaacagagagacttaggatatcattggagaaagaagcagcaaagatcgagttgcagagccaaagctggcctatgcagcaatccttctctccggaaaaggaaaatgggcaaacaggtgccagaacgcatgttccaatacccaatgacggaactgatgtttgggaaatcaaccttaaacacctaaaatttgggcataaaatagcgtctggttcttatggagatctgtataaaggtacatactgtagccaggaagttgctatcaaagtcctaaaggccagagcgtctagactcagatctagagaaagagtttgcccaagaagtctttattatgaggaaagttagacacaaaaatgttgttcagttcattggtgcttgcaccaagcctccacatctgtgtatcgttacagaattcatgcccggtggaagtgtatatgactatctacacaagcaaaagggcgtctttaagcttccaactttgtttaaagtagctagatatatttgcaaagggatgagctacttacaccaaagtaacataattcacagagatttgaatgctgccaacctcttaatggacaagaatgaagtggttaaggttgcacactttggggtggctatagtgaaagcacaaactggagttatgacagctgacactggaacatatctctggatggctccacacgtgatagaacacaagccatattatcacaaggctgacgtagtcagctactggattgtgttatgggagttatttactgagaagcttccagatgaatacatgactccgttacatgcaccaatctgggttgtccaaaaaggattaaagccaacaata

SEQ ID NO: 126664 - DNA, 525 bp, Arabidopsis thaliana
  unsure (1)..(525): unsure at all n locations
nnnnnnnnnnnnnnnnnnnnnnnnnnnnnnnnnnnnnnnnnnnnnnnnnnnnnnnnnnnnnnnnnnnnnnnnnnnnnnnnnnccacgcgtgcgagacagcattattgattttcagaagacttacgaggctcagtcaaaatctgatacagataaacttattgcagatttaactaacctagtctcaagtcacattcgtcgccaacacgaattggttgattcaagactccataactttaaagatgccgtctcttccaacaaaactttcttggacgaacatgtctctgctgttaataatctgacgaaagacgcaaaaagaaagtgggagacattttccatgcaagctgagaatgaagccagagaaggtgctgatttctcggctgcaaaacattgtcgaatggagttactgcttcagcaatctgtgggtcatgcggaatcagctttcaaacactgcaagagtactcatgaatctctaaaggagatgaccagtaagcaagtcacagatgtctcttcacttggtaggtctgc

SEQ ID NO: 126665 - DNA, 522 bp, Arabidopsis thaliana
cagcactatacgactcacttagggaaagctggtacgcctgcaggtaccggtccggaattcccgggtcgacccacgcgtccgcccacgcgtccggatttcaaacgatcaacaaacatttttatcataatcataatcagaaaaaagtgttaaactttctcgtgagtttatatactctgctaacaatgctgtttataatggtttttggttgtttcttaagtttctgtttaaatttcggattcttctatctggatcgttgttgttagcttctcaacatctaaaaagatggattcttcttactcctttgccttggggacaagtagttctattttgccaaaactcagtttcaggaatgtagagaacagattttatggtgagaagaacaacaacaatggtttgtgtaaacgttttggatcagatttgggctccaggaagtttaggaatcaaaagttcaagcacggtgttgtttacgctgttgccacttcagataatccaaaaaaggctatgacagtaaagacttccatg

SEQ ID NO: 126666 - DNA, 419 bp, Arabidopsis thaliana
gcgtccgcgacgaccatcggcggagttccggtggtgattgctcagtctcggaggattccaacgagcctgagatgcttctctgccaccgcaaattctgaccttcttcgctcccagcttgatcggcttcacgcggaggcagagtccactcgtgccaaagcaaacagtaataggttgagacttttgagattatctgaggctgcagagaatctacgggaacaagcagctgtcaatgttcgaacagggaaagagaatgatgccagagatctacttcttcagaagaaaaaagttatgcaagctttggacaaggctaaagctcgtatcgagttgctcgatacgctttcttccaaacttaacgaggcaatatctgtcaaggaaacacagctgataggcaatatatctttggatctcgaagaggatgg

SEQ ID NO: 126667 - DNA, 564 bp, Arabidopsis thaliana
  unsure (1)..(564): unsure at all n locations
gattaannnnnnnnnnnnnnnnnnnnnnnnnnnnnnnnnnnnnnnnnnnnnnnnnnnnnnnnnnnnnnnnnnnnnnnnnnctttttttttttttttttttagtagtaatgagagacaccttctttatcagtcacatgggttgcaaaaagaaacaaagcccaagtttgagttttacacttactcactcaccataatctctggttctttctttactcagtttttcttagatgaaaagattattatacatacacaaatccataggccttttcagtaacggcgtacactagttgtcgatagaagtactcggctctgtttcttccctctcttaccgggctctttgacggttggtgccattggtgttgttgttcttgaagctacactcgcaaaggatgttatgtttgtgtttcttgcacctgtgggttgcgtttgaagacttcactgctgcctgctgctgctttgaacgtttgttggctcgtaatccagggttgggggatccnngacaagcngngnaaacgagcctngcaaannggagaaggaanttccccnccanggtggnggggctaa

SEQ ID NO: 126668 - DNA, 522 bp, Arabidopsis thaliana
  unsure (1)..(522): unsure at all n locations
nnnnnnnnnnnnnnnnnnnnnnnnnnnnnnnnnnnnnnnnnnnnnnnnnnnnnnnnnnnnnnnnnnnnnnnnnccagtgtgtgcgaagaaacaaagcccaagtttgagttttacacttactcactcaccataatctctggttctttctttactcagtttttcttagatgaaaagattattatacatacacaaatccataggccttttcagtaacggcgtacactagttgtcgatagaagtactcggctctgtttcttccctctcttaccgggctctttgacggttggtgccattggtgttgttgttcttgaagctacactcgcaaaggatgttatgtttgtgtttcttgcacctgaaaccatgtttagaggtcatccgagaatcctatttagaatttgcagagctaaaaacaggggttacctggggttgcgtttgagacctcactgctgctgctgctgctttgaacggtggtgggctcttattcagggttggggagtctgaacaccttaaaaacccaccttg

SEQ ID NO: 126669 - DNA, 613 bp, Arabidopsis thaliana
atgatactccagctctctacgactcactattgggaaagctggtcacgcctgcaggtaccggtccggaattcccgggtcgacccacgcgtggcggagaaaacaaaagagttatacagagagaaaacgtgaatagagagatcactgtacttattgggttttgatctttgatggctccactgagtccaagagtagtggtgaaggtggatttgaagaagaagccatggcagcaggaccagccattgcacaatagatggcatccggagataccaccagtagcagaggtcaaggctggtgagtttttccgggtagaaatgattgatgcaatgggaggtgttatcaaagacaatgactctgcaagcgatatcaagaacctagtcctaactactactcatcacctaagtgggccgattagggttgtagatgaggaaggtgttgcagctaaagcaggtgatcttcttgctgttgagatatgcaacttgggtcctcttccaggagatgaatggggattcactggttcgtttgatagagagaatggtggcggtttcttgactgaccatttcccttgtgcgaccaaagctatttggtactttgaagggatctatgcctactctcc

SEQ ID NO: 126670 - DNA, 333 bp, Arabidopsis thaliana
ggagtccaagagtagtggtgaaggtggatttgaagaagaagccatggcagcaggaccagccattgcacaatagatggcatccggagataccaccagcagcagaggtcaaggctggtgagtttttccgggtagaaatgattgatgcaatgggaggcgttatcaaagacaatgactctgcaagcgatatcaagaacctagtcctaactactggttgtagatgaggaaggtattgcagctaaagcaggtgatcttcctgctgttgagatatgcaacttgggtcctcttccaggagatgaatggggattcactggttcgtctgatagagagaatggt

SEQ ID NO: 126671 - DNA, 451 bp, Arabidopsis thaliana
  unsure (1)..(451): unsure at all n locations
ccggnccgaattccggggcgcccacgcgtccgaaaacgttgtgcagattgattctgggtttatcagttccttaccaccataagtcttggcaggcttctcttggtctaagtgaatttggagttatgcttctgtcagcacttttaacttcagtgggaatcaatcttggcctctgttttctcttcttcactttgtattcaatattgagaaagcagcctagtaatgtcactgtatacggtccacgtcttgttaaaaaagatggcaagtctcagcagtcaaatgagttcaacctcgagaggcttttgcctactgctggttgggtcaaaagagcattggaacctaccaatgatgaaatcctctccaatcttggcttagatgctttggtcttcattcgtgtctttgtcttcagcataagagtgtttagctttgcatctgtggttgggatcttcatact

SEQ ID NO: 126672 - DNA, 533 bp, Arabidopsis thaliana
  unsure (1)..(533): unsure at all n locations
nnnnnnnnnnnnnnnnnnnnnnnnnnnnnnnnnnnnnnnnnnnnnnnnnnnnnnnnnnnnnnnnnnnnnnnnnnnnnnnnnnccactgtattcgggaaaatcaagaaaaatggtatcgtgtcgcatcgaggacttattacgtatggcgagagagctcaaaccaaaagatcaccgcctcgactgattcatcttttctcctgattcttggcaggcttctcttggtctaagtgaatttggagttatgcttctgtcagcacttttaacttcagtgggaatcaatcttggcctctgttttctcttcttcactttgtattcaatattgagaaagcagcctagtaatgtcactgtatacggtccacgtcttgttaaaaaagatggcaagtctcagcagtcaaatgagttcaacctcgagaggcttttgcctactgctggttgggtcaaaagagcattggaaccctccaatgatgaaatccctccccatttttggttaaaccctttgggcttcattcggggctttggcttcagggtaattg

SEQ ID NO: 126673 - DNA, 260 bp, Arabidopsis thaliana
tctatttgtacaatcaagttggaggatctagaggccgggcttcgagttttctcgcagtgaaaagaaacttctgatggctaataattggttagtattacaaattgtattgattcaattctttacatcatatattctttatgtttttgtccccctcaagatcttgtaggaggagaggctttggtttcaacttccattgtttgatcaaatctatttctgttgtataaaactatattgatattttgtcttttcacttttctcat

SEQ ID NO: 126674 - DNA, 497 bp, Arabidopsis thaliana
atacgactcactttagggaaagctcgtacgcctgcaggtaccggtccggaattcccgggtcgacccacgggtgcgcgacgatgctctcaatctcgcagctgccgagtttctcgttaaccaccgccaaatctcttcgttatccttcttctccttcgtcgtctctctctatcttcttctccttcttccctaaggtttctaatttcgtcagagcaagttccggaatccccaatttggtcgcctgtagtccgacagagattatcatccccagagttaataacgccggactcagaatcgaggagatagtagacgccgcgaaaggcaaaattcgtcttgattcatggatctcttctcgtatcaatggcgttagccgagctcgtgtacagtcgagtatacgattgggactcgttaccgtcaatggtcgtgtccttgataaggtttcacacaatggcaaatctggtgatgagggtaattgtacgatatcagagcttcaacctttg

SEQ ID NO: 126675 - DNA, 660 bp, Arabidopsis thaliana
atgattcgccgaggcgtatacgactcatatagggaaagctggtacgcctgcaggtaccggtccggaattcccgtgtcgacccacgcgtccgcagctcttgaaggtgttgcaatggaactggaggattcattgttcccattgttgagagaagttgatataggaacagatccaaatgaagtgttccaagatgtggagtgggctattctgattggagcaaaacctcgaggccctggtttggaacgtgctgacttgttggacatcaatggccaaatctttgctgagcagggcaaagctctgaacaaagctgcctctcctaacgtcaaggttcttgtagtgggaaacccttgcaacaccaatgccttgatttgtcttaaaaatgctcccaacattcctgcaaagaacttccatgccctcacgaggttagacgaaaatcgtgccaaatgccagcttgctcttaaagccggtgttttctatgacaaagtgtctaatatgaccatatggggaaatcactccacgactcaagtgccagactttttaaatgccagaattaatggccttcctttgaaagaggttattacagatcacaaattgttataaaaaggattcactttaagtgtgcataaataaaggttggtttttatttattaattggttctatcc

SEQ ID NO: 126676 - DNA, 898 bp, Arabidopsis thaliana
  unsure (1)..(898): unsure at all n locations
ccgnnnnnnnnnnnnnnnnnnnnnnnnnnnnnnnnnnnnnnnnnnnnnnnnnnnnnnnnnnnnnnnnnnnnnnccacgcgtccggtaatctcactttcacagtttgtgtctgtgcgataatggccatggcagagctctcaacccccaaaacgacgtcgccttttctcaactcttcgtctcggcttcgtctctcttcaaaattgcacctttcaaaccactttcgccatcttcttcttccacctctccacacaacaactcccaactccaaaatctcttgctccgtttctcaaaatagccaagctcctgttgctgtgcaagaaaatggattggtgaagacgaagaaagagtgttatggagtgttctgcctcacctatgatcttaaagctgaagaagagacaagatcatggaagaagttaattaatattgcagtttcaggtgctgcaggaatgatttctaaccatcttctcttcaaacttgcttcaggggaagtatttggtccagatcaacccattgcattgaaactgctaggatcagagagatcaattcaagctcttgaaggtgttgcaatggaactggaggattcattgttcccattgttgagagaagttgatataggaccagatccaaatgaagtgttccaagatgtggagtgggctattctgattggagcaaaacctcgaggccctggaatggaacgtgctgacttgttggacatcaatggccaaatctttgctgagcagggcaaagctctgaacaaagctgcctctcctaacgtcaaggttcttgtagtgggaaacccttgcaacaccaatgccttgatttgtcttaaaaatgctcccaacattcctgcaaagaacttccatgccctcacgaggttagacgtaaatcgtgccaaatg

SEQ ID NO: 126677 - DNA, 522 bp, Arabidopsis thaliana
  unsure (1)..(522): unsure at all n locations
nnnnnnnnnnnnnnnnnnnnnnnnnnnnnnnnnnnnnnnnnnnnnnnnnnnnnnnnnnnnnnnnnnnnnnnnnnnnnnnnnnccacgcgtgcggacaattccgtcccctctctctctctctttccgcagctcgccggatctcctttgtcttcttcccctgggttccgtttagctcaatccctttttaggaaagactccgtggctcgatcctagtcttggcgatcgcctctaccctttttgactctattcttcttcttcttcattcatttcccctcttattcattgcctttagggtttcttacacgatatgagctaaatacgattttgatttcaccctaagctttcttctattgcttctcgtcgttgcagggttttcttaaatggaaacgcccggcgccagtcatgattcatttaggggttctcctcgtagaaactccatcctctctgcttctaacatcatccaggcccctatttctaccttggtagagtattcgggtctctttcgagctaggccaagtccta

SEQ ID NO: 126678 - DNA, 563 bp, Arabidopsis thaliana
  unsure (1)..(563): unsure at all n locations
aaaactcttgttcctcttcctcttcaacgtgaacacttctatttctcagagaacattcacctatatgtntttcttcaaggagaagtcttcctctttccagttcagatgaacactcttcagatgccttgtgccttattgatccagattcgaagtacccaactttactctctagacctttttcatggcagccactcccacacacttctctgtctcccatgatcctttttcttccacgtctctccttaatctccaaactcaagcgatctttggtcccaatcacagtttaaagacaacccagttgagaattccagcttctttcagaagaaaagctacaaacttgcaagtgatggcttcaggaaagacacctggactgactcaggaagctaatggggttgcaattgatagacaaaacaacactgatgtatttgacgacatgaaacagcggttcctggccttcaagaagcttaagtacatgggatgacgttggaacactgcacagatctgggcagcatgcttcaagctccaaagtttctggtgactgcatgtgcagactctagagtttg

SEQ ID NO: 126679 - DNA, 621 bp, Arabidopsis thaliana
  unsure (1)..(621): unsure at all n locations
cgccccaagagcattctcaagcccatggggcggtcaaccgtagacttggaccggaatggcaaggccttgttgctagggacggcgggagccatggagaacatagcagcgttaaaggtggccactgtgatggttttgtccgggtttgggtggatggccccaagagcattctcaagcccatgaacgccgccgcatctcctactcacgactctagaaagcaacagaggtttgccaaatccaggcctaggagagtctccatcaatctccccgacaacgagatcagccgccagctcagcttccgggaggatccacagcactctcccctcaggcccggcgagatcggtctccggagcaccagaacggctctggaagtgctgagtgagctagacgcagacgtgctggctcttcaagacgtcaaggcggacgaggctgaccaaatgagaccgctctccgatctngctgcggcgctggggatgaattacgtcttcgccgagagctgggcgccggagtacggnaacgccattctctctaagtggcccatnaaaagctccaaatnttctaagaatttttcgaccacactgattttcanggaacgtntttgaaggcgngcatagaaggtttccc

SEQ ID NO: 126680 - DNA, 836 bp, Arabidopsis thaliana
  unsure (1)..(836): unsure at all n locations
tnatggaatttggggaaaaaacccagttttgaccatccggtcccaaattaaacattcggaagaaacatttgatttaaagaaaaaagaactttaaagagcccaaagggggttaatgaaccggggcggggtcaattgggccaaagggcgtttacaaaatggccgaaaactttgttcttggagaaagtgacttttgataaggctggtgctttccaaaccccaatctatcccggtaaagatagtagaccttgcccttgtctcgtccttcctctcctccgacaccactttgtccgcgccggctatcaaaatcctgcaagctccacgtccgacaaggcaaggttgttcagaatcacatccctcggcgccagctgtctgaatcccgccaggaatgtcaggtactccttctccgtcttcttcttcgggttatagaattcgctgtctgttccgtttgtccccttctccaccttcgacaccagcctctccttccacccttccggcacatcgtacacgtactccgccgatgtcttcctgtctgaattccccccgtatcctccgtagttcgccgcgctcgccgccgtcccgtagtaaattttgtacgtctggttcccctcgcctgccgccggcagcaccggaaccatagtcagcacggaagtcgcggccaacgcggcggccagggaggtgcctagacgtgatgctatcgcctttgggacgatcggcgttctggtggcggagataacgggagatgccaagaagattttcgtgcggacgcgtggctcgccattatactnnnnnnnnnnnnnnnnnnnnnnnnnnnnnnnnnnnnnnnnnnnnnnnnnnnn

SEQ ID NO: 126681 - DNA, 629 bp, Arabidopsis thaliana
  unsure (1)..(629): unsure at all n locations
ggncaaaggnaatttgcctaacnanatgcttantttatttaaaccctataattaggaatttgatgaataattaaaggaatcacaaaaacaaaacctccagtttatgtatcccatcctcggtcctctccccaaattaaatacatttcgacaagcaaacattgaaatttcaagaagaagagacagtcttgaaggagtcgcgaaggtgggttaatgtatcgtggtcgcggttccactcgggcgcgcaggggcgtttacgaaatgggcgtagagcttgttcttggagcaagtgactgtgatcaggctgtgctttccaaccccatctatctcgtacagatagtagacctgccctgtctcgtccttcctcttcctccgacaccacttttgtccgcgccggctatcaaatcctgcagctccacgtccgacaaggcaagggtgttcagaatcacatccctcggggncaantgtctgaatcccgccaggaatgtcagggnanccttctncggcttcttcttcggggtnanaaattcgctggntgttcggctcgtggcgnatnctgaagccggggggnncncnagttcnaaanggcgnaaccggggggggcccactttntccctaggagggaattcngt

SEQ ID NO: 126682 - DNA, 658 bp, Arabidopsis thaliana
tttaggacgcactatagaagatctatgacgtcgcatgcacgcgtacgtaagcttggatcctctagagctgtccgcccttttttttttcttttttttttttggaccacaaaacaaactccagtttatgtatcccattctcgttctcaccaaattaaatacatttcgacaagcaaacattgaaatttcaagaagaagagacagtcttgaaggagtcgcgaaggtgggttaatgtatcgtggtcgcggttccactcgggcgcaggggcgtttacgaaatgggcgtagagcttgttcttggagcaagtgactgtgatcaggctgtgctttccaaccccatctatctcgtacagatagtagacctggcccttgtctcgtccttcctcctcctccgacaccgactttgtccgcgccgggctaatcaaaatcctgcagctccacgtccgacaaggcaaggttgttcagaatcacatccctcggcgccagctgtctgaatcccgccaggaatgtcaggtactccttctccgtcttcttcttcgggttatagaattcgctgactgttccgtttgtccccttctccaccttcgacaccagcctctccttccacccttccggcacatcgtacacgtactccgccgatgtcttcctggctgaattccccc

SEQ ID NO: 126683 - DNA, 924 bp, Arabidopsis thaliana
gcgtccgaaacaaaggtattgaaatacaattaattaatagattctgtatcacgcatatacccttagtactaaaatattaagaatttaattcatataataacatataattcgtctatatctatatatacataaaagagaaagaacatgttgattatatcaaaattatagaacaataaggaattttaacttatcatggggaaagacaccattgctgatataataacctctatacgaaatgctgacatgaatagaaaaggaacggttcggataggatcgactaacatcacggaaagtattgttaaaatccttttacgagagggttttatcgaaaacgtaaggaaacatcgcgaaaacaaccaatattttttgattttaaccctaagacatagacgaaataagaaagaatcctacaaaacgattttaaatttaaagagaataagtcgaccgggtctacgaatctattctaactctcaacgaattccacgaattttaggcggaataagaattgtaatcctttcgacttctcaaggtataatgacagaccgagaagctcgactaaaaagaatcggcggagaaattttgtgttatatatggtaatccttctaatataaaaattagatatctgtaacttacaatttgtgaaaaaagggggttgtgtaataccacccctgttcaaaaaagtttcggatgttttacttcgaatgaaattaaagaaaaaatgaattaataaaagttttctttcttaatcacttccgaacggcatggttcgattttgtttagatactaaagatttttttttcgttcatgcttttgaaaggattcgacatatttttgtataggtatacctataggataaaaaggtaaaaattttgagtaagttcttacgtataagttaataaggggacagccattttgtagactcca

SEQ ID NO: 126684 - DNA, 472 bp, Arabidopsis thaliana
cttcaatccccttttttttttcgtttcgtcgtttgttcgttttctctatcgctctcgttcatctacgcaatctctctcactaggtacagttttaaatgggtaagaagaagtcagacgagagtgctgctaccacaaaggtgaagccaagtgggaaagatgcttcgaaagattctaaaaaagagaaattgtcagtctcggctatgcttgcaggcatggatcagaaagatgataaaccgaagaagggctcatcatctagaaccaaggctgctccgaaatctacatcttacactgatggcatagatcttcctccttctgatgaagaagacgacggtgaatctgatgaggaagagagacagaaggaagcaaggaggaagctgaagagtgaacaaaggcaccttgagatatctgtgactgataaggaacaaaagaagcgagaggcgaaagaaagattagctcttcaggctgcagagtc

SEQ ID NO: 126685 - DNA, 825 bp, Arabidopsis thaliana
  unsure (1)..(825): unsure at all n locations
nnnnnnnnnnnnnnnnnnnnnnnnnnnnnnnnnnnnnnnnnnnnnnnnnnnnnnnnnnncaaacacccacgcgtccgaagctcctagaggaaatctgagagcggtggctcttatcgccggcgataacaacgtccgaggctgtcttcaattcgtacaagacatttccggaactactcatgtcaccgggaagatctcaggactctctcctggcttccatggatttcatattcactcttttggtgataccacaaatggctgcatctctactggacctcacttcaatccattaaatcgagttcacgggccaccgaacgaggaagagcgtcatgctggcgatttgggtaacattcttgcaggatcaaacggtgttgctgaaatcttaatcaaagacaaacatataccgcttagtgggcagtattccatactcgggagggcggttgttgtgcatgcggatcctgatgaccttgggaaaggagggcacaagcttagcaaatcaactggaaacgcaggctcgagagttggatgtggtatcatcggacttcaatcatctgcggatgctaaactatagcttttgagatcaacggacagagccacactcagtttttcatcagtagatgtacattagagatcatcgtacgaagtgacattgtatattgacatcctgttactttttaagacatgagttataatgtaaaccagaacgtaatttccagttttcattggaaaagnnnnnnnnnnnnnnnnnnnnnnnnnnnnnnnnnnnnnnnnnnnnnnnnnnnnnnnnnnnnnnnnnnnnnnnnnnnnnnnnnnnnnnnnnnnnnnnnn

SEQ ID NO: 126686 - DNA, 385 bp, Arabidopsis thaliana
gtcagctttatcagagaaagtttcccccattggtgaaaatttgtaagagatggacaaggaaaaggagcaaactttggagtggaacgaagcacagaagatagatataagcgttgaccttttggctgcagccaagaaacaccttctcttcctcggagctgttgatcggaaccgttgtctctacgatggccctgcactccaaagagccatctacagatacaatgcttattggcttcccttgcttgctcaatacaccgagtcttcttctatctgtcaaggaccattagtccctcctcttgactgtgaatgggtttggcattgccacaggcttaatccggcgaggtataagactgattgtgagcaattctatgggagagttctggacaat

SEQ ID NO: 126687 - DNA, 767 bp, Arabidopsis thaliana
  unsure (1)..(767): unsure at all n locations
nnnnnnnnnnnnnnnnnnnnnnnnnnnnnnnnnnnnnnnnnnnnnnnnnnnnnnnnnnnnnnnnnnnnnnncttattttcgatccgcgcgtgcgaaaaatatttgtgttatcattattttctatttacgtcctctcatcagcggctgaaaaaaatacatcattttctgcgctttttgcttttggtgattcagtcttagatacgggaaacaataattttcttcttactcttctcaaaggaaattattggccatatggtttgagttttgactataaatttccgacgggaagattcggaaatggaagagttttcaccgatatagttgccgaaggtttacagatcaaaagacttgtaccagcttatagcaagattcgtcgcatcagttctgaagaccttaagactggcgtttgttttgcatcaggtggttcaggaattgacgatcttacatcccgaacactgagagttttatcggcaggtgaccaggtaaaagactttaaagactatttggagaagctaagaagagtagtgcaacgtaagaaaaaagtcaaagaaatagtttcaaacgctgggtttcttttttctgaaggaaataatgatcttggatactttgtcgctcccgcacttcttcgatgacagtccacaacaacatacaccagtagaatggttgtttggaccacaaagtttctaaaacatttatacgatcttggagcgagaaaatttgcggtgatgggagtgatgcctgtgggatgtttgcctagccatcgagcc

SEQ ID NO: 126688 - DNA, 516 bp, Arabidopsis thaliana
  unsure (1)..(516): unsure at all n locations
nnnnnnnnnnnnnnnnnnnnnnnnnnnnnnnnnnnnnnnnnnnnnnnnnnnnnnnnnnnnnnnnnnnccaggggtgcgggcacgcgtacacccacgcgtccgggaaatggaggagttaagcgatagtttaaaccatgtaagagggtttatgtacgagaaagatgtgacgtatatggatttcctaaaccgagttcgaaccggagagctaaacctgaaatccaaaggccaatgggatgttccacatccatggcttaatctcttcgtaccaaaaactcaaatctccaaatttgatgatggtgtttttaagggtattatcctaagaaataacatcactagcggtcctgttcttgtttatcctatgaatcgcaacaagtaagtttaactcgatattgcaaaatttactatctacattttcgttttggaatccgaaattttcttacaggttaatttatgcggggtttttaggggggaatgatcggatggtctgccgcttaccccgggaagaggtttttttgc

SEQ ID NO: 126689 - DNA, 581 bp, Arabidopsis thaliana
ggaaaagattagggtgaatgtggtacccaatgcaaggtctggtgttgcggctttcagagatagcaggatgttcatgggaaatgatgatacagagtcggattcatcccatggctatgatgatgaggaggagagaaatcgcttaatgcggaacaaatcttctgtctcagttggtgggttgaataattctcattttccaatactcaaatccagacaagatattaaaaagagcaaatccagaaagaaagatatgcaggagaatgaattgcttgatggacggagtgcgtacttgaaatatttaggcgtatctggagaacacatctatgcgccagggacagagaagcactccttcaagtcaaaacagaagggtaagatgcgtgacaggagtcccttagagaacttttcctctcgagattttgaagatggcccgatcacaagcttgagtgagtttcaggacagaaacaacaggaaggagtttttcaggtcaaacaggaatagccagacaagagagcaaatgattgatagaacactatttcagagaccatctgcaaaaccaaatttgtctgggagaaaaagagtctttg

SEQ ID NO: 126690 - DNA, 761 bp, Arabidopsis thaliana
  unsure (1)..(761): unsure at all n locations
annnnnnnnnnnnnnnnnnnnnnnnnnnnnnnnnnnnnnnnnnnnnnnnnnnnnnnnnnnnnnnnnnnnnnnnnnnnnnccacgcgtgcgcgcgtctttgcctttcgtctcttctctgctcgccgatcgttactccgtcgaaatcaccatggcgccaaagaaggataaggttccaccaccgtcatcaaagccggccaaatctggaggtggaaaacagaagaagaagaagtggagcaagggaaagcaaaaggagaaggtgaacaacatggtgttgtttgatcaaggcacttatgacaagcttctcactgaagctcccaagttcaagctcatcactccatcaatcctctccgaccgtatgaggattaatgggtctcttgcgaggagggcgattagggagctaatggcaaaaggtttgatcaggatggtctctgcacactcgagccagcagatctacactcgtgccaccaacacctaaaaagcgtgacctttcaatggtttggttctcgactcttttcttggtttttgtcttttgatgtatacattaatcatcagaactcttatagttcttttttggttctcgttactttgtgctccagaacctctttagaatgttgttttgagatattgtctctttaatcggagttgctttttccccnaaaaaaaaatattttaaacccccaaagcttaagggcggccgctctagaggatccaagcttaggtacgcgtgcatgcgacgtcatagtcttntagagtggacctaa

SEQ ID NO: 126691 - DNA, 429 bp, Arabidopsis thaliana
tcgtataatctcaatttcaacctcttaagtctctccaaagtcccataaaccctaaaacaatgtcgagacgtttcaatccgttagaagatccgccgagtgcttcttcaagcgacgaagaaggtaaagaaatcgcacgagactcttcttcggatgatgaagatgacgtttcctctgaaaacccatcacctttgaagacgactctcgacgccgtttccgattccgaatctggttcggatgaagaaaccgattcagactctgaactcgagaagaagaaagatcaagttgtgacgaatcctgtggatgtgaagagggctaagaaggtgaaaacctccgagaaatctggggctaaacgttctcttgaagtggatgaagcagcagtgtctatggatgtgaagagggctaagaaggtttcaggggaagaggagaaga

SEQ ID NO: 126692 - DNA, 325 bp, Arabidopsis thaliana
cgcgtccgaggacgcgtgggctccaatggcgcctcagcttctctcctccagtaacttcaaatctctctttgactctgtcgatacgttcctcttcgactgcgatggtgttatatggaagggtgaaacgctcatcgatggcgtctcccaaactctcgaccttatccgttctaagggtaaaaatgttgtctttgtgaccaacaattccgtaaaatcgaggaggcaatacgctgaaaagttccgatctttgggtgtcacttctattactcaggatgagatcttctcttcgtcatttgcggcagctatgtatctcaaagtcaataacttt

SEQ ID NO: 126693 - DNA, 323 bp, Arabidopsis thaliana
tgcttcaaaggcaagaccgttacaaatctgacaagataagaatcatctatacaactgcactaaatgttcttggtaaatcaaggaggcctgtggaagctctcaatgtattccacgctatgctgttacaaatttcatcatatccggatatggtagcataccgttcaattgcagtcacacttggacaagctgggcatatcaaggaactcttctatgtgattgacacaatgaggtctccacctaaaaagaagttcaagccaacaacacttgaaaaatgggatccccggcttgaaccagatgttgttgtttacaatgcggtgctcaac

SEQ ID NO: 126694 - DNA, 303 bp, Arabidopsis thaliana
gccaggcgtccgtactcttgaacatcatccagcccattctatctggggtagcaattggagcagggatgcagagtatggtagcattagtgaacttagcatcttattatgcaattggtgttcctttaggtgtcctccttgtttacgttttcaattttgggattaagggactctggtccggaatgttggctggagttggtatccaaacgttgatattgtgttatgttatttacaaaactgactgggaattgggggttaagaagacaaacgagcgtatgagaacgtggactctaaatttacctgctg

SEQ ID NO: 126695 - DNA, 648 bp, Arabidopsis thaliana
  unsure (1)..(648): unsure at all n locations
nnnnnnnnnnnnnnnnnnnnnnnnnnnnnnnnnnnnnnnnnnnnnnnnnnnnnnnnnnnnnnnnnnnnnnnnnnnccaggcgtgcggaactactaaacaacactcacaccaaaaagacgacgatggtttcgtttcgcttccctttctcgttttctcagcccccgcgtgccaccacgtcattctccggattctccatttccgctgtcgctgtctccgtcaccgttggcgccgcagccgccggagctgcgatcgcggcgtcccggaatcccagccatccgattctagagtgggccttctcctctcaccgttcgtctctttcaccatggggatctataactctagcagacgaatccgttgtcgaacctaagaccggtttctcgtttcccgcttcaatcggagattcccggcgattactcggcgtcggcctgaggaagaagagcttactgggattgaagaacatcgatgtctacgccttcggcgtgtatgctgattgtgatgatgtgaagaaacttgtgggagacaagtacgcaaatcttccagcttcagagatcagggggaacaagtcattcatggatgatctcatgggaagccgatattaagatgacgataaggctacagattggctacggcaaactcaacatccgatcc

SEQ ID NO: 126696 - DNA, 721 bp, Arabidopsis thaliana
  unsure (1)..(721): unsure at all n locations
cagctaccatacgactcactttagggaaagctcgtacgcctgcaggtaccggtccggaattcccgggtcgacccacgcctccgccggggtttgtcaacagttgtttgtgataacaaagctcattggccgaaccaaaaacatactactgccgcctttgtagccagcaatggttctcagtccagcgtttcaaccaatcctttgaaggaaccagagggtttgcagcccgtgtggtgccaagtctgccagatcagctgcaacagcaaggttgcatttgcaagtcacacatatgggaaaaaacaccgacagaacttggaatcacaatcagccaagaacgaaactatgtctactggaccaggcaagctttctaaagattatggagaaaaaacgaagaaagtatcatgcaaaaaccaaaccacatttgattctcaactgaagagtcagaaccattataccatggcgaaggagcttgtagagaaggcatttgtctccgcatttgagcatgtctccgcattggagcagttcagtattgttgactcaaggacaatccgngaagncaccgnccaagaaaaagaagcaacaaaggngcagacacttgtaaagatggatggtaaatgggtttcgaggggaccngaagntaaagtgggattttaccccngggaaaacctttggggtggcncttngngcagttcngtatttncctcaaggggtnttccccggggng

SEQ ID NO: 126697 - DNA, 376 bp, Arabidopsis thaliana
tgttgatcgatattttcagttaacaaacaaaagcccaaatggcgcgtaatcggagtgtcctaattttgtcggcggacacttcattctaataaacggcggcagaaaatgaactctctgttcaccgccttccgccgcaacctcctcttaaaccctaatcctcaccgcaacttctttcttcatagattgttatcatcatctcgccgttcatccccgctcattcccgtcgagcctctcatccagcggatacagtcacccgccgtacccgattctacatgtactccaccgcaacaaaacaccgtctcgaaaaccgatctctctactatatcgaatcttctcgagaacactaatgttgttccccggtcgagtctcgagtcag

SEQ ID NO: 126698 - DNA, 1089 bp, Arabidopsis thaliana
  unsure (1)..(1089): unsure at all n locations
cttctttctcaaattagcttttctttatcgtcttcctcaagcgtgagattcgttgtggatatagtttttctccttgattctctggttctttccatgatccaattttaagggtttcacggcttcgtttttttgggtatatctagctctatcgttcgtggtggttttctttctggatcaaagttttctgagatctctgcgatttctgggattcgaaaattggagaattagggcttttttacggtaacagggtttcgaagagcataagataagaatgccttcggtgccctctaagcttcttcctctcctgtctttgattccttcgttgactccttatcattctggtttgagttctaatcgtttgaaacctcttgaaaagtgtgattggcgtggtaatcttagttaacatttcctttccttcttctctcctttttaccctttcttctctcgccctcgtttacttcttgagattttcttagctcgatttgatctttggtgctttaacttctggcggtgtttgatttgcagcacaaaaagttactactactactgtgattaccttgtactgttagttggatatgagctctgtttgtggtaagttggatttcaaagatgcagactttgacatctctacttcgagtcccacacaatgttctaaaggctcggagcatacctcgtttactggctctgaagattctcaggagtctgatggagatgaaactggttatatagacccaactgtgaatgatgaaaccgctgttcaggatttcggcaaatctgttttaagtcctaactcttctgatgatgaagacaaggatgagaaccttatgactcagacaccaattggtcctatcccagccataaaaggcagtcgagagaagtttggcttgtcactgaggaagtcgagtgtttcatggggggctgatgtgtatgaacctccttccctcggtagcctcccacaacagtcacacgaggcaggaacagcagcagaattccagggcaaggcaccccaggagccggaagaaaggccnaagntaanaaacctcccncggggggancnaagnagagaagtttcgaaanagngggaattgt

SEQ ID NO: 126699 - DNA, 509 bp, Arabidopsis thaliana
  unsure (1)..(509): unsure at all n locations
cggacgcgtgggcaacttcatcgtctttttcagttcaacaacttcatcgtctttttcagttcaacctccgacatctctcgtctccaggtgattgatcccatcgaagggtctatggaagagaacaacaagcgccgggagcgattccgactctaattccgtcgaagattcacaagactattacgaaccgatctcagccgtcgatttatataactccaacgacgatgaagaagacagttatcttccgatcggtggagatggtctctctaacggccattgtatgattccggatgcagaggtaggaatctnttctattagtataaacgntaacacagacagcgaagaagagacaagagancgggacttngaccngngatccgtagagcggtttttaggagggacgnaccggcggagaagatnnnccgttaatttgggggngaattccccttaggggttattgnggcaaatncgggccattttatttccctngancgggtncttatttggncncc

SEQ ID NO: 126700 - DNA, 463 bp, Arabidopsis thaliana
taccggtatttcatggctggacccacgcgtccgcccacgcgtccgctcattttgttttcttttctcgcacaactaaaaaaaaagaacattggaagcttcttcttcctattcttcttctgccaaacaggaatcggtccttctttgcgcacaagcaaaaatccaagagacatcgagatatgagagagatctcgatctcgacgattactctttcatggtcgcatcttctactctgcgcttcgatttgtcgccacttcttcttaggtatatctggtgatcccaatagttcaagtactggagcaaaggctgaatctcatacttcttccagcaaaacaggcacgagagtgatctttagactgctcgggtttggtgctgtagcgggactttcgttcttcttgtacaaactgtggcaaaagaagaaaagagatgagcagtatgctcggctattgaaactgtttgaggaaga

SEQ ID NO: 126701 - DNA, 635 bp, Arabidopsis thaliana
  unsure (1)..(635): unsure at all n locations
ccgtcacttgattctctcttccttcatcaatcaatctcgtctcctggaaaacattagggagcctctcagatcctcaagaaaaccctaaatcaaaagtcgagatcgatggcgtccttcgctcgccgtgccatgagcttagctcagatcccatctgctcgtatttcctctggagccgcttctattggtcagcgtcgttgcctcgccggcgccgctgatcaccatggatctaccaaggttgacttctggaaacagcccacgaacccaggaaactggaaagaggagcattttgtgcttatttctctgtctggctggggcttacttttctacagtggatacaagctcgccactgggggaaaaaaagagacgcctgtggagagtacacaatgagtttcattgtcaccaggaagaccttttatggagagacctctcattctcatgcactttgttttcccttttagcagattgtgactggtcttgtgtttcattttgaaaattatttgctggaatcaacttttcggagatcttgntgnntgtctgcaaattgggntnaatttctttgnnaagnttttggtgttttcataantatccnnatggtttgaaaccagnccagggntttaanggaaaatcaattgtct

SEQ ID NO: 126702 - DNA, 750 bp, Arabidopsis thaliana
  unsure (1)..(750): unsure at all n locations
atgatactccnnnnnnnnnnnnnnnnnnnnnnnnnnnnnnnnnnnnnnnnnnnnnnnnnnnnnnnnnnnnnnnnnnnnnnccacgcgtncgcccacgcgtncgcccacgcgtncgcggacgcgtgggctggaaacattagggagcctctcagatcctcaagaaaaccctaaatcanaagtcgagatcgatggcgtccttcgctcgccgtgccatgagcttagctcagatcccatctgctcgtatttcctctggagccgcttctattggtcagcgtcgttgcctcgccggcgccgctgatcaccatggatctaccaaggttgacttctggaaacagcccacgaacccaggaaactggaaagaggagcattggatacaagctcgccactgggggaaaaaaagagacgcctgtggagagtacacaatgagtttcattgtcaccaggaagaccttttatggagagacctctcattctcatgcactttgttttcccttttagcagattgtgactggtcttgtgtttcattttgaaaataaaaagcatcacttttgagatctgatgatgtctgcaatggataaattcttgacagttttgtgtttcataaaatcctatgtttgaaacagacaggatttaagcaaatcattgtctccaaaaaaaaaaaaaaaaaaaaaaaaaaaaaaaaaaaaaaaaaaaaaaagggcggccgctctagaggatccaagcttacgtacgcgtgcatgcgacgtcatag

SEQ ID NO: 126703 - DNA, 519 bp, Arabidopsis thaliana
  unsure (1)..(519): unsure at all n locations
acaaggnctagcccanaccnnttnccgnattnccctngncccnctctnnttggccagcgtcgntccncnccggnnccgcttacccccatggatctnccaaggttgcttctggaaaccagcccacgaacccaggaaactggaaagaggagcattttgtgcttatttctctgtctggctggggcttacttttctacagtggatacaagctcgccactgggggaaaaaaagagacgcctgtggagagtacacaatgagtttcattgtcaccaggaagaccttttatggagagacctctcattctcatgcactttgttttcccttttagcagattgtgactggtcttgtgtttcattttgaaaataatttgcatcacttttgagatctgatgatgtctgcaatggataaattcttgacagttttgtgtttcataatatcctatgtttgaaacagacaggatttaagcaaatcattgtctcactacgtatgttgatatatgctttcgagctatttccttcaacc

SEQ ID NO: 126704 - DNA, 323 bp, Arabidopsis thaliana
  unsure (1)..(323): unsure at all n locations
nnnnnnnnnnnnnnnnnnnnnnnnnnnnnnnnnnnnnnnnnnnnnnnnnnnnnnnnnnnnnnnccacgggtgcgggtgccttgttgtggccattacatatgttggccaaaaagcttatctacaagaaaattcattcgtctattgggatatcgaaggctggtattagcggaggtggtagtttacccattcatgttgacaagttttttgaggccatcggtgtgattctacaaaatggttatggtttgacagagacctcacctgttgtctgtgcacggacacttagctgcaatgttcttggctcagcttggcatccaatgcatggt

SEQ ID NO: 126705 - DNA, 1024 bp, Arabidopsis thaliana
  unsure (1)..(1024): unsure at all n locations
tacgactcactataggggaagctggtcgcctgcagtaccggtcccgaatttccgggtcgaccacgccgtccgccacgcggtccggaagaagcttagcttataatcgaatctaagccgtttcgggaaattctgtttgtaggtgacaaaatcctcttatagggttattcttagctatgaatttcctctgcaatttctttttttccccgccaaaatttctcctgaagcaaatgtagctttttacttgctgaactagggttttgttcgattttgttcctctttcctcgctgattttgtcggaatttctgggtttgggaagagaaattggagtcgttattgattgaaatgaagaagcttttaggaggtccgggaactgtgtgtggtctgttactgagaatcggacaatgtgcttcagctgctgcttcaatcggcgttatggtctctgctaaagagttctctgttcacactgctttttgctacttgattgcgtcattgggtcttcaattgttgtggagctttgggctagcatgtcttgatgtttatgctctcaggggaaagaaagatctccaaaaccctatcttggttagcttattcgtcgttggtgattgggtgacggcaatgttatctcttgcagctgcatgttcatcagcaggagttgtagtcttgtatgaaaaagatatcaagtattgcaatactcaaagccaatatccatgtcttaggtatgaagtagcggtggcgctttctttcgtcactgggatccagatggcggtttcttctcaggtcacattttggatcttagcctcggtttagttagtttcgcaaagaactcccaactttttcttcttcttggaatgttgagacatctttgtagcttttgatgacgttaacaatctgcttctaatcgaatctatcaatgtttcttgcaaaaaaaaaaaaaaaaaagnnnnnnnnnnnnnnnnnnnnnnnnnnnnnnnnnnnnnnnnnnnnnnnnnnnnnnnnnnnnnnnnnnnnnnnnnnacattccgca

SEQ ID NO: 126706 - DNA, 978 bp, Arabidopsis thaliana
  unsure (1)..(978): unsure at all n locations
atgaactccnnnnnnnnnnnnnnnnnnnnnnnnnnnnnnnnnnnnnnnnnnnnnnnnnnnnnnnnnnnnnnnnnnnnnnccacgcgtccgcggacgcgtgggtgatgattcatttgcgctagttgatgcattactcgctgatcgcaccaaccttatagagcacaaccctaagatttgtatggagattggatgcggaagcggatatgtcataacttcacttatacttcttcttcaaaacgaagttcctggtgttcattatctcgccattgacactaacccgatagctacaagagtgacaaaagaaactctagaagcacatggagttaatgctgatgttatctgcgcagatttagctactggtctagagaagagacttgctggctcagtcgacgtgattgtggtgaatccgccttatgtgccaacacctgaatatgaagttggaatggaaggtattgcctctgcttgggcaggagggggaaaatggccggacagtcatcgataaaatcttgcctgtggttgatcttttgctatcagaggaaggatggttctacttagtgacattaacttcaaaatttcccagcagaggatttgtcttgatgatgagaaagaaaggttatgcctcgcggagcgtcgttcagagatcaacagaagaggagaatctcgttatcctaaagttctggagagacaaggatgaggagagccaggacaaagagacatcatcatcatcgtttgtttcgcagttttcgaaatccttatcttcgcttatggagaaacaatggcgctgatactacaaagatggctagagatctcataagcatgctttgtttaaccaagaattctctagtgttttaatttttatgaaaatcatgttttgtgttggtggtgtagtcgtaacagtgatttgatttagtggggttattggttagtggattttaactgatgtgaaactttgattttcaattccacattatgtgatat

SEQ ID NO: 126707 - DNA, 525 bp, Arabidopsis thaliana
  unsure (1)..(525): unsure at all n locations
cccnnccagattatgtcgnttcctggatgngncaatcgaggtgcttcncgtgtggnatctgttatgtcangngccccgtaaattttcnggatcnccactgatagcttgtctatcttccagacagttcgacttattccagagctcttgattgttgnttgtggaagagacattcacccggtaactcccgaggtccgtcagtttgtcaagtcccttggcatgaaactagaaacagttgattctagaaatgctgcatcaacgtacaacattctgaatgaagaaggaagagtcgttgctgcggcattgcttccatatggagttacatcctaaagaaaactaacaactcgagctctggctttctaaactgtaaatggtttttgagaccttccgaaaataaaccgaatttcatcggagtttttattgcgtttgagctatataacaaacgttgtaacatggtgcgactttatctcgcatttctcatccttccaaagatataatatctccagnnnnnnnnnnnnnnnnnnnnnn

SEQ ID NO: 126708 - DNA, 618 bp, Arabidopsis thaliana
  unsure (1)..(618): unsure at all n locations
atgatctccnnnnnnnnnnnnnnnnnnnnnnnnnnnnnnnnnnnnnnnnnnnnnnnnnnnnnnnnnnnnnnnnnnnnnccacgcgtccgcgcgagtctcgacggctgcggaaatcggaaaatcacgattgaggactttgagctgccacgaagatggcgatgaggttgaaatcaatggcgactttgccgaaattgattcaaagtatgagaaaagaagttccgaagcattctaatcctgttttgccctctctgagacgagctttttccctctatgatcagatcaatctcattgacaatgttcctgaagaccagcttcgcttccaagaatttaatgatacgagtttcactgtgaatggagtcaaatacgaaggtagcttactctgtgttgggaatctgttaatgtcatggagtcctcgtaaattttcagagatcaccactgatagcttgtctatcttccagacagttcgacctattccagagctcttgattgttggttgtggaagagacattcacccggtaactcccgaggttccgtcagtcttgtcaacgccccttggcattgaaactagaaacagttgattctagaaatgctgcatcaacgtacaacattctgaatgaa

SEQ ID NO: 126709 - DNA, 697 bp, Arabidopsis thaliana
  unsure (1)..(697): unsure at all n locations
atgaactccnnnnnnnnnnnnnnnnnnnnnnnnnnnnnnnnnnnnnnnnnnnnnnnnnnnnnnnnnnnnnnnnnnnnnnccacgcgtccgcggacgcgtggggtccgaaaaatctgacaaggatgaagcaatcaagtgtcgtcgatctgttacttcttctcctggcgatcgctcttcttgcgacgccggcgttctccgatctggttttatccaaagtcgaacgtcgtatcgatgtgacttcacagattgctcgtgttactaagacccttaaggttgtaaattctggctctgaatcagtttctgagtttgctttgacattcccaaagtttcttggtaacaacttggcttatctatcggttgctcctagtgagggaaaggggaaatctaaacgaactttagtgaatctctctgtgagagaagctgatcagaaaggtttacctgattcaattagtggttactcagttgcattacccaaaccactgagtaaaggcgatactttgacgctggaggtagttgctgcattcaccaatgttcttcagccatttcctgaaaagataactcggggtgaaacccatcttgttatgctcccagaaggcgcacaatttctctctccttacgcggttgagtctcagtcattgtctatcaaactaccgaatgccagaatcgaatcttacaccaaattcgagaatacaaagct

SEQ ID NO: 126710 - DNA, 631 bp, Arabidopsis thaliana
  unsure (1)..(631): unsure at all n locations
gtatgnnnnnnnnnnnnnnnnnnnnnnnnnnnnnnnnnnnnnnnnnnnnnnnnnnnnnnnnnnnnnnnnnnnnnnnnnnnccacgcgtccgcggacgcgtgggcggacgcgtgggttctggaactggagtccactgtttaagcttcactgtctctgaatcggcaaagctttagaagaaaatggcatcaggaggtaaagccaagtacataatcggtgctctcatcggttctttcggaatctcatacatcttcgacaaagttatctctgataataagatctttggagggactactccaggaactgtctctaacaaagaatggtgggcagcaacggatgagaaattccaagcatggccaagaaccgctggtcctcccgttgttatgaatcccattagccgtcagaatttcatcgtcaagactcgtccggaatgagaaaataataagttcaatgctttgattttcagaataagatgaacgatgacgatgttttctaaatccgagcttgtactaaataacaatacattacaacacggtttgcgtaactaaacccaaaactaaagnnnnnnnnnnnnnnnnnnnnnnnnnnnnnnnnnnnnnnnnnnnnnnnnnnnnnnnnnnnnnnnnnngaccta

SEQ ID NO: 126711 - DNA, 519 bp, Arabidopsis thaliana
  unsure (1)..(519): unsure at all n locations
atgatactccnnnnnnnnnnnnnnnnnnnnnnnnnnnnnnnnnnnnnnnnnnnnnnnnnnnnnnnnnnnnnnnnnnnnnnccacgcgtgcgcgttctcgccggacatgctagaagataacaatccacacccaaacttacccagagagacaatctctgattcacgtccactacaattaccgaatctctccgaagccaccgatcacctacgctagtttcagtggcaattcgaagcttccaatgagtttgttctgtaattcaatcgaaaccctttatccaaaaccattcctttcacacaaatctcacttctttaccttctccaattccaaattccaaaaccctaaattcacaagcttcccacttcgtcaccaatggcggatcgaatcatgtctgaaatcagcatcttcatcagaaatcgatatggtaagaaacaaagaaggtatctttgcaccaaaggagaagaaagttgtagtcttatgggacttagacaacaaaccaccacgaggtccaccatacgaagc

SEQ ID NO: 126712 - DNA, 380 bp, Arabidopsis thaliana
cgccattgttacccaattttgctctgaattctattaagtctcatcggaattattcaaatgccttccataaatttcgaaatgacagagcgtggagctatggtggtatcggcttctacctgttacgttccttttcgatgtcctcaagcaagaaaagattttgctttcgtcgagccgagtaagaagctaaaccctaatcgtgtattgataaagcctccggtttacacgtattctccggcactgacggcggcgaaatgtaacatttttgattacgcggaaactggtgagaatttggtcggcgataagcaatttgtgcggtggtttcgtgaagcttggccttatttgtgggctcatcgtagctgtaccttcgtcgttactatctc

SEQ ID NO: 126713 - DNA, 626 bp, Arabidopsis thaliana
  unsure (1)..(626): unsure at all n locations
nnnnnnnnnnnnnnnnnnnnnnnnnnnnnnnnnnnnnnnnnnnnnnnnnnnnnnnnnnnnnnnnnnnnnnnnnnnnnnnnnnccacgcgtgcgagtaacgagatctagcacaaactcgtagtgtggtgtagaagaagacaaaagcaaggagcttcataataaaaccctagagatatttgtttctccaatttcaaaagacgagacgtgaagaagacgatcgaagatgaacattttcagattagctggtgatatgactcacctagccagtgttcttgtcttgcttctcaagatccacaccatcaaatcctgcgctggtgtttcattgaagactcaagaactctatgccattgtctttgcgacgcgttatttggatattttcacgagttttgtgtctctgtacaacacctctatgaagttggtgtttttaggaagttctttttcgattgtgtggtacatgaagtatcataaggccgtccacaggacttacgacagagagcaagataacgtttcggcattgggtccttgtgcttccttgctttctcttagcncttttgntacatgaaaagttaccttcttnaggattgtgncgcctcattgacttgaggctgtgcaaatacccagctgct

SEQ ID NO: 126714 - DNA, 626 bp, Arabidopsis thaliana
gatccgaagaggaaatcccgggttcaagaagcgcttaattactatttgatcgagtcatccgtcgcacttttcatctccttcatgattaacttgtttgtgactactgtctttgcaaaggggttttatggaactgagaaagctaataacattggcctagttaatgctggtcagtatcttcaagaaaagtttggaggcgggcttcttccgattctttatatctggggtatcgggttgttagcagccggacaaagcagtacgataactggtacatatgctggacagtttataatgggcggttttctgaatctccggcttaagaaatggatgagggcagtaataacaagaagctgtgctattgtgcctacaatgattgtggcaatcgtgttcaatacttctgaagcttccttggatgttttgaatgaatggctcaatgtccttcagtctgtacaaattccttttgctcttctccctcttctaaccttggtatccaaagaagaaattatgggagacttcaagattgggcctattctccagagaatagcttggactgtggctgcacttgtaatgatcatcaatgggtatcttctgttggatttctttgtatcagaagtcgacgggtttctgtt

SEQ ID NO: 126715 - DNA, 535 bp, Arabidopsis thaliana
ccgcgatcgagaaagacgtaatttgatcatcggagtaaaagatattgttcgacagtgggactcccgggaacgaagatggcgatggcatcattcgggcagctaaatctcgaggaacctcctccaatctggggatctcgcagcgttgattgctttgagaagctcgaacaaattggtgaaggcacttacggtcaagtttacatggctaaagaaatcaaaactggtgaaattgtggctctcaaaaagatacgtatggacaatgaaagagaagggtttcctataacagctattagagagataaagattctgaagaagcttcatcatgaaaatgtcattcagctgaaagagattgtgacttcaccaggtcgggacagggatgaccaaggaaagccagataataacaaatacaagggtggcatctacatggtttttgagtacatggatcatgatttgactggactagcagatcgtcctggactgagatttactgttcctcaaattaagtgttacatgaagcaattgcttaccgggcttcact

SEQ ID NO: 126716 - DNA, 700 bp, Arabidopsis thaliana
tcggggaattttcagtggtactttaagtgacctcttcaacaactttgtcggcaccagaagcttcagtgaagttgtagcagaagcaaagcaagcaggtttcacagaaccagatccacgagatgatctatctggaacagatgttgccagaaaagtaacaatccttgccagagaatcaggcttaaaattggatcttgagggccttccagtccagaatcttgtgccaaagccgttacaagcttgtgcatcagcagaagagttcatggagaagcttcctcagtttgatgaagaattatccaaacaaagagaagaggctgaagcagcaggagaagtcttgagatacgtaggagttgtagatgcagtagagaaaaagggaacagtcgaggtgaaacggtacaaaaaagatcatccgtttgctcagctatcgggtgctgataacatcaatcgctttcacaaccaaacggtacaaagaacagcctctgattgttcgtggacctggtgctggtgctcaagtcacagccggtggaatcttcagtgacattcttcgccttgctttctatctcggggctccgtcttaaagcacactctacatgctagcatatgtattttggatttcagagattttgatttctatagatgataccaaacttcaaggtaataaaacattctaggaaaaaatctcaataaagactgttggtattag

SEQ ID NO: 126717 - DNA, 468 bp, Arabidopsis thaliana
  unsure (1)..(468): unsure at all n locations
ccgactagccgaatccgccatgaactctgtgtagttgtcgagnnccttggaaacgtccctggactcttgaaattaccgagctcttctctgaagaaaattgctcaagttgttgtgccgaaacgttacgggaaaggggattatgtggttcgtgaagatcaaacttgggatggatgttattttattttgcaaggagaggctcaggtttccggaccagacgaagaagataaccgttccgaattcctcttgaaacagtatgattacttcggcgttggtttatctgggaacgttcattcagcagacattgttgctatgtcccagcttacgtgtttggtgttgccgcgtgatcactgtcatttgcttgagactaattccatctggcaatcggatacgtcacttgacaaatgctctttagtggaacgcattttgcaactcgaccctttagaattgaatatcttcacggggatcaca

SEQ ID NO: 126718 - DNA, 567 bp, Arabidopsis thaliana
  unsure (1)..(567): unsure at all n locations
gacaacttccagcattgtactattaccattttttttatagaaaaagatgaacttcactttagagcaataacaatccctcgagtctcccctatataaagattccaactctttaacgattcatctattgaaaaccccccctccccaaaaatatcagatatctcaaacaatgtcttcagtttttggatctgtccatatcttggccatgatagccatacaactcctccttatacacagtgtttcgtctctgaaccttacaaatgcgtatctgcaccacaaatgcagcaacactcaaggaaaatataagcaggggagtgcgttcgagaaaaatctcaacttagtcctcagtaccatcacctcgattggaaattttcgtgacggtttccgctacaccgaagaaggtgaggatcccaataacgtctttgtcatgttccagtgtcgcggcgactcctactggtccaagtgccccccttgcattagcaccgctgtctctgggcttcgtaggagatgtccaagaaataagggagcaataatatggtatgaccaatgtctnttaaagatatcttcagg

SEQ ID NO: 126719 - DNA, 821 bp, Arabidopsis thaliana
gcgagctcatgaggctgaaacgaaaatccgctcttgtagaaagagaacaagagccgtccaagaaaccacggctggggaaaagttcgaaaagggaaaatgtatttgctgtgctatgttcgacactgagccatgcagtgcttacgggtaagaaaagtccaggccccgctggatcagcagcccggtcaatagtagcgaaaggagctgaggattcaaaaagtagtgaagagaataatagcagcagttcagatgatgagaatcataaggatgatggagtatcgagttctgaacatgaaacatcagacaatggaaagctaaatggggaagaatctctggtagtagctccaaaatcatcacctgaaatggctgtaaatggatcctgagattttaacactctggactctttagttgtggctggggatggaaggcactctcatgggtgcaaataaaaccttcagagtgcagactgagacatgataaaccgcaaaagaaaagctttgggcaaccaaacggaggaagaaatgtatagtgagccccatttgagaggaggtaacgggttcttcgtccgtagtgtttgcacccgttttttttaataatattcatctttgaaaaaacttagcagtctctggtctggtcaattgcatattgtaagacatggtctatcagcaactaactcttcttaattcaagttcctaatggtttcctttaaaaaaaaaaaaaaaaaaaaaaaaaaaaaacaaaaaacaaaaagggcggccgctctagaggatccaagcttacgtacgcgtgcatgcgacgtcaatagctcatctagagtgtccacc

SEQ ID NO: 126720 - DNA, 508 bp, Arabidopsis thaliana
ttgaggaagaggtaagagagcttggtgataagttaaaatctgcagacattgcgaactttcagcttcaagttgtgctagagaaatcgaatgccgaactactctctgccagatcagccaatgttcatttggaacatgaaatagctaatgtgaaggttcagaaggagaaagagcttttagaagcaatgctgatgatctccatcatgcaaaatgaaaaatctgaattatctaaggcagtggagggtttagaatgtagatacaaggaagctaaagcgatagaagaggatagggataagcaggtcttgagactccgtggagattacgatgagcaggttaagaagaatagtcattcgaacgaagctaatctgaaattggaagctgacttgatgaacttactcatggaactcgaagaaatcaaagtggagaaggaaaatctgaaccaggagctttttacagaaaggaatgagattgaactatgggagtctcagtctgcaacattgtttggagagtt

SEQ ID NO: 126721 - DNA, 1036 bp, Arabidopsis thaliana
atgattctccaggtctctacgactcactattgggaaagctggtccgcctgcaggtaccggtccggaattcccgggtcgacccacgcgtccgcggacgcgtgggaaaatacccatctggttatttattacgcatagatctctctcttctctctttctctatttagattacttaaagcagagaggtccgaacatcatcaatcaaacccattcacaactactacgacaatggactacgaatacggaggaggagagtactgtcggagaggacacgtgccagcttttggaagctgggattggaacgacgccgttccattcactcagtgtttcgagacagcaacaactcaacaaccagcttttcttcactatgcttcttaccctcaagatcgtgatctttacctcgccggtgatctctacgacaaccaccaccttgtagctccggccgttatcattgtccctcgtcgccgggctaaagtgggtcaagaaccagcggagaagaagagaaatgtctcgaagcagcaacacaactataagacggaggcgcgtgagtttaacgcgccggtaagctgtccaacaccggttgtgaagcggaggatgaaggcaccaaagcctgtggatgaagacttgtacaaagtttccccacaacttctctcagtcaaatccaaaaggaaaagaggaggaggtgggtttgggtgcatttcaaggtgttttttgccaacacgggtgctttgaagaaacaagcgtgagagacttgagtcagaagaacactttgtttttttttcttttctttttctaatcctattatatatatcaaaagactatgcttgtgagagtatgtatttatgaatgcgtaggaaaaaaaaagatgaatgctaaaagatagtagaccaatgtagcttttgcgaaaagtttagctatattatattaattaaactataaatgagacttggttttgcaaaaaaaaaaaaaaaaaaaagggcggccgctctagaggatccaagcttacgtacgcgtgcatgcgacgtcaaagctcttctat

SEQ ID NO: 126722 - DNA, 1061 bp, Arabidopsis thaliana
gattcgtttattgaattcaagaaccaacggaaacgttcatcacaagtctccgaaactagctctattcgcaacaaacgtcgcaaattcggagttcgacagagctaaatccgcaggatttgcagatacggtaataatgaaaccgttaagagcaagcatgattggggcgtgtctgcaacaagttctcgagctgagaaaaacaagacaacaacatccagaaggatcatcacccgcaactctcaagagcttgcttacagggaagaagattcttgtggttgatgataatatagttaacaggagagtagctgcaggagctctcaagaaatttggagcagaagtggtttgtgcagagagtggtcaagttgctttgggtttgcttcagattccacacactttcgatgcttgcttcatggatattcaaatgccacagatggacggatttgaagcaactcgtcagataagaatgatggagaaggaaactaaagagaagacaaatctcgaatggcatttaccgattctagcgatgactgcggatgtgatacacgcgacctacgaggaatgtctgaaaagtgggatggatggttacgtctccaaaccttttgaagaagagaatctctataaatccgttgccaaatcattcaaacctaatcctatctcaccttcgtcgtaatccaatcttccggcgagtttttttctccccgcagccggaagaatggactgcttctgctgatttgattgggatacaatatgcattttggtttctgtacatatagtaggttcacaatctagagattttgaaggttttttttaatttctcacttaagtaatgtagcttgccatgactagtgtatgttgttaaacgacgacgtctaagatggttcagtgttgatcttagcgtaagtattaatcccatgggaatcggttgtactgtatcagatttggttagtcgtttaaacattgtaatgttctaataatcactttttcataaaaaaaaaaaaaaagggcggccgctttaaaggatccaagcttacgtacgcgtgcatgcgacgtcatagttctttaaa

SEQ ID NO: 126723 - DNA, 505 bp, Arabidopsis thaliana
tttcggacgcgtgggtttgcttcttcgtcttcttctctctttaggttcttcaagttcgcaatcctggtttgggtttaggacaaatcagagaagaagatgatgtttggtttagagaaaacgatgactttggagcatgaaattctgaaggagaatcatgagactctgttgaaagattatgagagtcttcaggagaggattaagcatgctgaggaagcttatgaggctattaagttgcatcatgagaacaaagctaaggagcttgaagtgagtaacaaacgcttgcttgaggaatgtatgaaagagagaagggagaaggctaaggttaggaagacttttgaggagatgaagaagacaatggagagtgagagaactgctattgttgatgagttgaagtcgaagaatcaggagcttttgttggggaagaagaaagaggaagaagagttagtgaagatggagaataagtatgttgagttagctgagaagtttgatgttgttgaaaaggaat

SEQ ID NO: 126724 - DNA, 668 bp, Arabidopsis thaliana
  unsure (1)..(668): unsure at all n locations
cnnnnnnnnnnnnnctcactatagggaaagctggtacgcctgcaggtaccggtccggaattcccgggtcgacccacgcgtccgcggacgcgtggggtgggaaagtctggaaacagctgtatctaactttttcccttttctctatgattctgttgtgaataatgcagagccgccgtgagctcaggcgccaccgtaacgaagaacaaacctgaaggagaaaaataagccatgggatgtgcggcgtccaagctcgataacgaagatgctgtacggcgttgtaaggatcgccgccgtctgatgaaagaagctgtctacgctcgtcatcatctcgccgccgctcacgccgattactgccgatcgcttcgtatcactggatctgctctttcctcattcgcctccggtgagcctctctctgtatctgatcaaactccggctgttttcctccatactccccctcctccgctttctgaacaatctccggctaaatttgtccctccacgtttttcgccgtcgcctgctccttcttctgtttatcctccttcgacgtctcctttccgtcgcagttctaagcagccttcagtcatgtccacctcttccaatcgacgccggaaacagcaaccaaaacctagactgcctcatattctctcggagtcaagtccttcttcttct

SEQ ID NO: 126725 - DNA, 517 bp, Arabidopsis thaliana
tctctcttgttgaccttctaattatgccatctccgattatcgatttttgtagagcaatcgtattttatcgaagcccttgtttctggttttagtctcttgtctgaaatcaatctcaaaaaggttctgttttttcggggaaatgtgcagcttttgattgtttcattttccgattgtttcagaagaactggaatcgccgtaaagttcgaatttttttttgttagattgtacaaaagggtgttgtgattaaggaagaagaagaagaagaagataaaaaggttttttttttggctgttgttgtaatctgggaaagtttgggattttgtatcgatctcagatggtgaaaagacgaagaagtgtgattgttttggggatatgattaaagaacctgaattgttctggtgttgagaataagaaactatgtggaaacagattctaagtaagcttcccccaaaaagtcttcaaagcacgaacatcgtggacgtgaacacggtggccattcttcttcatcttctcatac

SEQ ID NO: 126726 - DNA, 470 bp, Arabidopsis thaliana
  unsure (1)..(470): unsure at all n locations
atgttctccagctctaatcgactcacttagggaaagctggtacgcctgcaggtaccggtccggaattcccnggtcnacccacggctccggaagaacgccagcggcgatggcgacggtggcgccgatggcgcgtcagttaatgtcggagatgaacctgattcgtttggtggtcgaataggatctccgaggaggatattcttgttctgcttggcgtttcgtgtggtaaatgcattgttgattcagacttatttcaatcctgacgaacattggcaatcacttgaagtagctcaccgcaccatatttgggtatggttatatgacatgggagtggaaaagaggaatacgaagctatttgcatccaatgttgttcgcattcttgtataaacttctacaagttactggccttgatactccctacataaggatcaaagccccacgtcttatgcaatccatattttcagctattgggga

SEQ ID NO: 126727 - DNA, 826 bp, Arabidopsis thaliana
  unsure (1)..(826): unsure at all n locations
accaacctgatttcacagctccatctggagaatcactgaggcaagtagagtttcgaatggttcagtttctaaacgggacagtctcaggagttgcagagaagcttaggtcagattattcttccactacgaatcacaatgaaactcatgagcgtgatggtggtgtgtcacttgcttcgactaactgggacttactacacaagcatcgtcccagtcttacaaggaagaaatctggtaaaagcaggcttcaagtgatgactaatcacgaacctgacgatggaaactccccaagggaagaagttaatcataatcacactgacctaagtgattcgtcttccttaatctcgaattgtgtcggggttttcacgcattctttgcctataaagtgtcttttaaccggaatcctcggttgcagtccggtaatgactcataagatctgtgtagaagactcttcagtgactgtgttacaacattcatggagaaacgggtggcagatcaaacgaatgaatgatactgctcatcttagattggtgtaactttatttaccgataaattatttggaaaaacgaggattcatatatgtttacaccatgaatctgcacaagctcaagaacaaaggttcggcagataatgaaatgccacggcctctttgtaatgttttgtctgtgacatgaggaaaaaagataaacaaaatggattcattgattttgatttgaaatttgttcttgtctgatnnnnnnnnnnnnnnnnnnnnnnnnnnnnnnnnnnnnnnnnnnnnnnnnnnnnnnnnnnnnnnnnnnnnnnnnnnnnnnnnnnnnnnnnnnnnnnn

SEQ ID NO: 126728 - DNA, 527 bp, Arabidopsis thaliana
ccaagccatccggcctgcactgtgtttaaaccgatcgagccctaaatgtatcggtgactgatgagttaatgagaccgcccccccgcaacggttcaacaaaacggaccttcttcatcttcttccccaacaattactcaattctaaaaaggaacgatctttcgaaaacagataatggtgaaagcagtggttggagaagatactagacttacttctgttgaagatcgtctctctcactcagctattcctgctgaagtgggtcttgtgatagggaagcttagctctgttctggatcgtggatttgtctttgatttgattcctacaccaagtaacgatgatggtgaaccagcatgcgcggttttggagaccaaagatgataaaaggaagccttctaagtctaaatctcagtcatctgagtcgtcttctttatcgattgattcagattgggttgcagaacatgctcgacaggtatcgagaaatgctgtgggtggcatgaaggttgttggtatctatgtatgggctagtgacat

SEQ ID NO: 126729 - DNA, 505 bp, Arabidopsis thaliana
  unsure (1)..(505): unsure at all n locations
agctcccatacgactcacttagggaaagctggtacgcctgcaggtaccggtccggaattcccgggtcgacccacgcgtgcgcggacgcgtacgcccacgcgtccggtttttccggttgtccatcggcgttggagcttgctgctttatggggacttgatttggagcaagggaggaaagatgaagagaatcaagttccgatgatggcgatgatgatggataatttcgggatgcagttggattcttgggttttgggatctaatgaattgattgttcccagcgatacgacgtttaagaagcgtggatcttgtggatctagttgtgggaggtataagcaggtattgtgtaagcagcttgaggagttgcttaagagtggtgttgtcggtggtgatggcgatgatggtgatcgtgaccgtgattgtgaccgtgagggtgcttgtgatggagatggagatggagaagcaggagaggggcttatggttccggagatgtcanagagattgaaatg

SEQ ID NO: 126730 - DNA, 891 bp, Arabidopsis thaliana
  unsure (1)..(891): unsure at all n locations
cnnnnnnnnnnnnnnnnnnnnnnnnnnnnnnnnnnnnnnnnnnnnnnnnnnnnaaacaaaggaactgggtttggagataagaagtgggaacttgaatggcttccttatccacttccgttgtagcttcggcttcgtcgcgtttatggaatcctgctgcctccaacggcaagatttgcgttccttctgcttcgctttctctgcgtacgggttgtagacggagttcgtcctctctcacttcttccgcttcttcgcaattgcttcattgctcgtttctctcgtcgcctgtttccctagcgtctccattttctggtttgtccattgcgtttgatctcagcagtcaaactagtggactgaatggccagagacgcagaggccttgtggttagagctggaaaagctgctctgtgtcaaactaagagaagcagatcaagaaaatctctagctaggactcatggtttccgtagaaggatgaggaccactagcggtagagcaaccataaagcgtcgacgtgccaagggacgttggaacctctgtcccaagtccaaccctagcagcggcaaacgggcttgaagtttgtttctctcttcactctatctgtaatcttgtttcatgtgctttttttccaccagaagatacaatgagaaacatggttcgttgagctcttttctgcgttttaactctcttgcatccttgattcgtttataaatcaatgttcttggaattcatcacatgtactactatactacttgcttcattgaatttgttactactcgaaaaaaaaaaaaaaaaaaaggnnnnnnnnnnnnnnnnnnnnnnnnnnnnnnnnnnnnnnnnnnnnnnnnnnnnnnnnnnnnnnnnnnnnnnnnnnnnnnnnnnnnnnnnnnnnnnnnng

SEQ ID NO: 126731 - DNA, 750 bp, Arabidopsis thaliana
agaattccggggacaactcacccgtccgtcaaccaccctgatttcaaatctccccaagcacaacaatggcgaaatcaatgagatgcaagagggtgaagagattgagagcaataagaagagaaatagtggagaaggaatcattcactctaacgagagaagacgccaaatccgccgctattgaagccgcactcgctgctccgaagttaccagttcgtcaagccccagtttctccgtttatggaagttgcgacgccttcctctgagtctgcatctgcctccactacaatcgccaacgatagtgatgaggaaatggatgatgagaagaaaaacaagtcgctaaaacctattgggaagaagttgaagaagaagtttaagctggggatgaagaatcgtcgtagtaagggtgtccttcgaggcaaacgaaactaaaactggtcttggctttcttctactgggtttgttttctacttgcataatttatgttctctcttaattttggggttcttcaatgtcttagaatatagcatcttttgtactgtgttttttccatgagtttcagtactatagaaaccctaaaaacgtgatcgcgtcttgtggaaatatgatttctttggcttgttcttttcgtgggggggcgttctaagaggaaccaaagccttacgtccgcgtggcattgccaacgttcataaccttgtgctttttggggggggcgccttaaatcttcaaatttcactttggccccggggaggat

SEQ ID NO: 126732 - DNA, 522 bp, Arabidopsis thaliana
  unsure (1)..(522): unsure at all n locations
atgannnnnnnnnnnnnnnnnnnnnnnnnnnnnnnnnnnnnnnnnnnnnnnnnnnnnnnnnnnnnnnnnnnnnnnnnnnnnnccacgcgtgcgagattctacaccaaaagcttaaccagatttttcccaagaaaaaacccatccatgaaaccatcatcagcttcaagattttctttaactttctcacactttctcacactctactgtcttctcacacaaacacatgtagctcaaggatctcatcaatggcaatcaccaatcaaaaccgccgtcgttttagtgttggagaatcgatctttcgatcatctcttaggatggatgaagaactcagtaaacccgacaataaacggtgtaacgggtcattcgtttgaagctgttgagcaacaagtattcgggtctgggccgggtcagatcccgtccatgatgggtttcgttgagcaagcgctttccatgccgggaaatttgtcggagactgtaatgaaaggctttaggcctgaagctgttccggtttatgctgagctg

SEQ ID NO: 126733 - DNA, 414 bp, Arabidopsis thaliana
gacacaaattctacaccaaaagcttaaccagatttttcccaagaaaaaacccatccatgaaaccatcatcagcttcgggattttctttaactttctcacactttctcacactctactgtcttctcacacaaacacatgtagctcaaggatctcatcaatggcaatcaccaatcaaaaccgtcgtcgttttagtgttggagaatcgatctttcgatcatctcttaggatggatgaagaactcagtaaacccgacaataaacggtgtaacgggtcaagaatgtaacccggttccgaattctacacaaactatatgtttcactagtgatgctgagtttgtggatccggatccgggtcattcgtttgaagctgttgagcaacaagtattcgggtctgggccgggtcagatcccgtcca

SEQ ID NO: 126734 - DNA, 364 bp, Arabidopsis thaliana
aaactctctctccgtcttcaatggtttacacgatttcaggcgtacgttttcctcatcttccatcgattaagaagaagaattcgtctcttcacagtttcaatgaagatctcaggagaagcaacgctgtctcattctctctgaggaaggactctcgttcttctgggaaggtttttgctcggaagccatcgtatgattctgattcgtcttccttagctaccactgcatctgagaagctccgtggccatcagagtgatagctcttcatctgcctctgatcaagtacaatctcgggatactgtctctgacgatactcaggtgctcggcaatgtagacgttcagaaaactgaagaagcccaggaaacaga

SEQ ID NO: 126735 - DNA, 707 bp, Arabidopsis thaliana
aatctcttcaccgaaacatcttcaaccttcaataggagaaaccaattctcaattgctacaaaaatataaatattttgaaaaatgaaactggagctggtgttcataccatcacctggtgacggacatctccggccattagtggaggtagctaagcttcatgttgaccgtgacgaccatctctccatcaccatcatcatcatccctcagatgcatggatttagtagcagtaactcttcttcttacatcgcttctctctcctctgattctgaagaacgtcttagctacaacgttctctccgtccctgataaaccagactccgatgacaccagaccacattttttcgattacattgataacttcaagccgcaggtcaaagccacggtggaaaaacttactgacccgggtccaccagattcgccgtcgcgtcttgctggattcgtggtggatatgttttgcatgatgatgattgatgtcgctaatgagtttggtgttcccagttacatgttttacacatccaacgcaacgtttcttggattgcaagttcatgttgaatacctttacgacgttaagaactatgacgttagtgacctcaaggactcggacactactgagctggaagttccttgtttgactcgtcctttaccggttaagtgtttcccctcggttctattaaccaaggagtggttaccggttatgtttagacaaac

SEQ ID NO: 126736 - DNA, 501 bp, Arabidopsis thaliana
  unsure (1)..(501): unsure at all n locations
annnnnnnnnnnnnnnnnnnnnnnnnnnnnnnnnnnnnnnnnnnnnnnnnnnnnnnnnnnnnnnnnnnnnnnnnnnnnnccacgcgtgcgcggacgcgtgggcggacgcgtgggtttttttctagtcttggtgacttaaaaagctcctaggcaccgaaatcgagacactctcgacaaccatgctctctgacgccgggggtggttccgattgccggcgtcgggacttatcaactcccatcaaccttcatgtgttctatataagctttatcttcattgaatcttcctccgttatctcaaatctctcaaaatatctaaatctccttttttatgtgagcttcttcactgaaagttttctttgtgacggaagagtatatcgatgctctattggctccgatctgactcagatcttggatgcatctctgtcttcgaacccaaaacaagaaaattcacaacagtccaacagctcctcttctcaaacatcagagcaagacttcatcagct

SEQ ID NO: 126737 - DNA, 542 bp, Arabidopsis thaliana
  unsure (1)..(542): unsure at all n locations
caaaagcactctaaattggggtgaaaaagcattaccaaacaccaaataaatatgtctgatctgaataactcatcatcactcattctaataactttgattttggccacatcagttctagtctccgagagccgggtcgcaagaaaagacttgggtttggaccttggagggatcggtgctggtataggcataggcataggtatcggtggaggtggatccggatccggagctggtgccgggtctggatccggaggaggaggatcaagctcttcttcctcatctagctctagttcttcttctagctccggtggtggtggaggtgatgcaggatccgaagctggatcatacgccggatcacatgccgggtctggttcgggaggacgttccgggtcaggccgtggaagaggaagtggagaaggacggggtcaccgtggagaaggtgaaggagaaggggtnaaaggtgaagaagtgatnccgtaacggnaagntaccgtnaagccgtganattgtgagaattgtgtgcacactnataaaaattcntctgc

SEQ ID NO: 126738 - DNA, 422 bp, Arabidopsis thaliana
ctcatagccgtcgtcgtcgtctctgtcgttcttatttcaaaaaaaaaaaaaaaaaaaggagacaaagaaaaagtaaagagaagtgcgctctctcttactctcagcgattttacaaaatatcagccatctccaaattacagagttctttctcaaacccaggttatcattttccaaagtttgaaggtgtgttcctgtccctgcagagatggcttggtacttatgaatgtgtttatactaatcactaaactcggggattttggctgtataatcaagaatttcatttattaacattgtttggccttgaaagcggtgaggataaaccagagctcaaaacgggtgcactctgttgtattgtggcctcaaggccactggttacaacataatcttcaccccacagcggaagggatattcctcaatcaagt

SEQ ID NO: 126739 - DNA, 428 bp, Arabidopsis thaliana
cacttttcatgatcccgaggacatcttagaccccaaatgttcttcgtcgatgttctttggaaactggttcctctatacgggtgcggatcagaaacaaaggctctctcagcaacagagtccattttgcagatagttcctgaggcaatggctgctacttcatctaacgtcctttgcaatgctagcgagtcagatccttgtcgtgatgattccgctgcatttctacttaaatttgtagccattgcttcgattctcttagctggagctgctggtgtaactataccactcattggcaggaaccgtcgtttccttcaaactgatggtaatctctttgtgactgctaaagcttttgcagctggtgtgattctcgccacgggttttgttcatatgttggcgggtggcactgaagctttgaagaacccgtgcttacc

SEQ ID NO: 126740 - DNA, 419 bp, Arabidopsis thaliana
accacgcgtccgcggacgcgtgggcggacgcgtgggcgccaatcccacatggccctaacctctttcttctgcatcaaatgtcaaccgccaccctcggcggcggccctcctccacctccgggccctatccctacctatataactagcctcggccttggctactccatagccatagctctaggtttcctcgttcttatctccacaatcattctctcttcttacatctgttgccgcgcctcacgcctccgcttctctgcctccgccgcaaacgcaaacgcaaacgcatcgtttagcgaccgtggcgttatcgtcccaagaatcatattcgtagctgaagacgacgatcttgagtctggaaacgacttctttggaggacttgatcattcagtcattaaattcttaccctaaattccattttac

SEQ ID NO: 126741 - DNA, 991 bp, Arabidopsis thaliana
  unsure (1)..(991): unsure at all n locations
nnnnnnnnnnnnnnnnnnnnnnnnnnnnnnnnnnnnnnnnnnnnnnnnnnnnnnnnnnnnnnnnnnnnnnnnnnnnnnnnnnnccacgcgtccgtgtagctcttcctctcgtaatttcctcttcttcttctttcagacagaagcttgcctttgtccgaatttagggtttccatttttctttccgttcttccttcaatcaaatactcgaaaccctaatctcttcttgatcaggccttgtcgatttactgtcccttgtatcaacttaaggttcatgtctgatcttgaagttcaagtccccactgcctttgatccgttcgctgatgcaaatgctgaggactctggggcgggaacaaaggaatacgtgcacattcgtgttcagcagcgtaatggtagaaaaagcttgacaactgtccaggggcttaagaaagagtatagctatagcaagatacttaaagaccttaagaaagaattctgctgcaatggcaccgtcgtccaggactctgaattaggacaggttattcagcttcaaggtgatcagaggaagaacgtatctacgttccttgttcaggctgggcttgtgaagaaggataacataaaaatccatggtttttgagcaattctagagatactccttgttcagcttgtatttacgggatcagccagtcccaaaaggaatttataaaccattacttaaatgtattaatgcttttattatgtattgtgtcaaaaaaataatctaatagtttgcttatgagcgtatatataaatgtatcaacttttggtatgcatttgtacttgtagtgtgagtttatcaataaaatttgctttgtgatgaaaaaaaaaaaaaaaaggannnnnnnnnnnnnnnnnnnnnnnnnnnnnnnnnnnnnnnnnnnnnnnnnnnnnnnnnnnnnnnnnnnnnnnnnnnnnnnnnnnnnnnnnnnnnnnnnnnnnnnnnnnnnnnnnnnnnnnnnnnnnnnnnnnnnnnnnn

SEQ ID NO: 126742 - DNA, 503 bp, Arabidopsis thaliana
tttaggaccactatagaagatctatgacgtcgcctgcacgcgtacgtaagctcggaattcggctcgaggcctttgtccgaatttagggtttccatttttctttccgttcttccttcaatcaaatactcgaaaccctaatctcttcttgatcaggccttgtcgatttactgtcccttgtatcaacttaaggttcatgtctgatcttgaagttcaagtccccactgcctttgatccgttcgctgatgcaaatgctgaggactctggggcgggaacaaaggaatacgtgcacattcgtgttcagcagcgtaatggtagaaaaagcttgacaactgtccaggggcttaagaaagagtatagctatagcaagatacttaaagaccttaagaaagaattctgctgcaatggcaccgtcgtccaggactctgaattaggacaggttattcagcttcaaggtgatcagaggaagaacgtatctacgttccttgttcaggctgggcttgtga

SEQ ID NO: 126743 - DNA, 508 bp, Arabidopsis thaliana
atactccaggtccctacgactcatttagggaaagctgctacgcctgcaggtaccggtccggaattcccgggtcgacccacgcgtgcgggatctgttactaaaacaaagtcgctttactcagatctgaataagaagaagaagaagaaacatagttgaagtctctgttaatatgtcttcaacaacaacagattctacagaattgcaaaatctgatcaaactgtttcaaaattgccaaactcatcctcgtcaacattttcctgcaaaatcttcagctgtattagtttgtctataccaagaacacagagaagacaaaaacgagctacgcgtaatcttaaccaaacgatctactactctctcttctcatcctggggaagtagcattgcctggaggaaaaagagaccaagaagataaagatgatatagctactgcggttgagagaggctcgtgaagaaatcggtttagatccttctcttggtacaatcatttctggtcttgaaccatttggtaa

SEQ ID NO: 126744 - DNA, 538 bp, Arabidopsis thaliana
  unsure (1)..(538): unsure at all n locations
catctgtnagaaatgtgatggacatgagagccgtttatggaggttttgcggcactctaagagatctgaaagtgtgggtcatgaatgtggttccaatagattcaccagacacacttgcaataatctatgaacgaggactctttggtatctaccacgattggtgcgaatctttcagtacatacccgagatcatatgatctccttcacgccgaccatcttttctccaaactcaaacaaaggtgcaatcttactgcggtgatagcagaagtggatcgtgttttgagaccggaagggaaactgatagttcgagacgatgcggaaacaatacagcaagtggaaggcatggtgaaagcgatgaattgggaaggttcgaatgacttattctagggaaaagaaggtttnctctcttttcaaaatcaatttggggccccttaagtggaanactcactttacgntttcggtttagaagccttctnaagnccccnttttttgtcggtaaaanctcttttacncntanancctttttgnnggcgctttttt

SEQ ID NO: 126745 - DNA, 382 bp, Arabidopsis thaliana
agggaaactgatagttcgagacgatgcggaaacaatacagcaagtggaaggcatggtgaaagcgatgaaatgggaagttcgaatgacttattctaaggaaaaagaaggtttgctctctgttcaaaaatcaatctggcgacccagtgaagtggaaacactcacttacgctatcggttgagaagacttacttcaagtcccactcttttttgtacgtataaaaacactcttattaactccatatcatccctttttttgttggttcgtcttttaggaagttctttttttttagctgttgagtcatttgtttgtactattcgcacatttttgtgttcttgaaggtgaagaactctattgaggttctttggtaaagttagattacacc

SEQ ID NO: 126746 - DNA, 488 bp, Arabidopsis thaliana
  unsure (1)..(488): unsure at all n locations
ctcnnnnnnnnncgctcaacatgcaagtgcactatatatcgttctctgcttatgcagattacgcgcccacgcgcgcgtgcacgcgtgcgctcatgcctcctaacatcatccttgttcacggtgaagctaacgagatgatgaggctcaaacagaagctcttaacagagtttcctgatggaaacacaaagatcatgaccccgaagaactgtgagtcagtggaaatgtattttaattctgagaaattggcgaaaaccattgggagattggcggaaaagacacctgatgttggcgatacagtaagcgggattctggtgaagaaagggttcacttatcagataatggcacctgacgaactccatgttttctcacagctatcaacagcaactgtaactcagcgaattacaatcccgtttgtaggagcttttggtgtgataaaacatcgcctggagaagattttcgagagcgtgggaattttcaacagatgagga

SEQ ID NO: 126747 - DNA, 481 bp, Arabidopsis thaliana
cgcctgcaggtaccggtccggaattcccggggggacccacgcgtccgcccacgcgtccgcccacgcgtgcgtacggctgcgagaagacgacagaaggggctctcgagagcagaaacagagtcaccggtaaactcatctccggcgacataaaaacacaaaagttcatatatttagattctggtgattctctgctctaatgggtcaatctcaagtttctctctttcttcttctaattcttgttttcatctatggagtttcctccaccactttcaccatcgttaaccagtgtagctacaccgtctggcctggacttctctccggcgccggaacctctcctttacctacaaccggattctccttaaaccctaccgagacacgagttatcccgatccccgcagcttggtccggtcgtatttggggtcgtactctctgcacacaagacgcaaccaccggaagatcacctgcatcaccggggacgggg

SEQ ID NO: 126748 - DNA, 578 bp, Arabidopsis thaliana
  unsure (1)..(578): unsure at all n locations
gannnnnnnnnnnnnnnnnnnnnnnnnnnnnnnnnnnnnnnnnnnnnnnnnnnnnnnnnnnnnnnnnnnnnnnnnnnnnnccacgcggtgcgcgtctgctcagaagtgggattatatcggttgtgtaagggctcatacacatgatatcagggctctaactgttgcagtgccaataagttgggaaggttccattccagataggaatgcaaaagtaacaagtcctaaacagcgcaggaaggagccggctggtttcagttaccataaatgggcacatttgggggttccgatgctcatttcagctggtgatgatgccaagctttatgcatactcggttcaagagtttactaagttccctccacatgatatatgtcctgcgcctcagagagtgcccatgcagatggtacataatacagtgttcaatcagacttctcttctcttggttcaggattcttgttctttagatattcttcgtattcacataagcaatgattctaggggggcgggtctccactaagccattggttcgtgttaaaagtaaagatgctcggaagatcatatgcagtgcaatttctaacaca

SEQ ID NO: 126749 - DNA, 531 bp, Arabidopsis thaliana
  unsure (1)..(531): unsure at all n locations
nnnnnnnnnnnnnnnnnnnnnnnnnnnnnnnnnnnnnnnnnnnnnnnnnnnnnnnnnnnnnnnnntctcatcatcatcttctctatgattcttcagaaaacgatgcaatcaccatttcttcatctctgtaaaagcttcacttcttcttctccactttcatgtcacaaccacaatatatgctttggatttcataatgctctgttatctccttcaatctgcaatttccagcgacgaaacaatgtcaacgggagaaaaatcgttgcgcagggatcaagactaaacgacggaaatagccgtccggcgggaaacaaagggaaagtaagtctgaaaggtaacaaagagaatatatggagcgttgacaacgaaatggcggagaaggataagcgtaaggtgaagccaaaaggaagaaaaagcgggaagagattaggtggaggaagaaagggtaaattcggtagagttttggtttcagggacgatgttgatcgaatccgaaactgttcttcaaactcaggagcctgtgataaaaccaggt

SEQ ID NO: 126750 - DNA, 835 bp, Arabidopsis thaliana
  unsure (1)..(835): unsure at all n locations
ttgaattgcctggcactccgcggtaccggtccggaattcccgggtcgacccacgcgtccgaatcgaggagaagaagaaaagggaagatcgggaattgggaaactgagaagtcaaaaaggcaaatgcgagtggaggagattgagttttagaattccaatgtcttgggctgctcctgatgatatcttcttctccacttctcttgctgcttacctagacaagaaacttcttgtgttgcttcgtgatggtaggaaactgatgggtctacttcggtcctttgatcaatttgctaatgctgttttagaagaagcttatgaaagagtcattgtgggtgatctctactgtgatattcccttaggtctatacattatccgtggagaaaatgttgtcttgattggtgaattggacgtggaaaaagaaggagcttccagctcatatggttcaggttccagaagcagagataaaaagggctcagaaagcagagaaggaagaaatgcttttaaagggcacaatgcggaaaagaatggagttccttgatctcgattagggcattttcctatgtgttgcagcattgtagaaactagaagatctcaagatggaggatacagaagatccttaaacgtcataatgttagttgatgtgtgtatgtgtggatgacattgatgaatcctcagaacttagtcgttgcagatcctctgctctgtttatggaatgaaattgttgagcctgttctttactggccatttatttgatcaaaaaaaaaaaaaaagggcgnnnnnnnnnnnnnnnnnnnnnnnnnnnnnnnnnnnnnnnnnnnnnnnnnnnnnnnnnnnnnnga

SEQ ID NO: 126751 - DNA, 550 bp, Arabidopsis thaliana
  unsure (1)..(550): unsure at all n locations
nnnnnnnnnnnnnnnnnnnnnnnnnnnnnnnnnnnnnnnnnnnnnnnnnnnnnnnnnnnnnnnnnnnnnnnccacgcggtccgccgccgcgtgcgaacgatccatagatctcaagtctctctctcttagtgaataaattagggttcgttgattctctgttcttaagctcagtaatcgaggagaagaagaaaagggaagatcgggaattgggaaactgagaagtcaaaaaggcaaatgcgagtggaggagattgagttttagaattccaatgtcttgggctgctcctgatgatatcttcttctccacttctcttgctgcttacctagacaagaaacttcttgtgttgcttcgtgatggtaggaaactgatgggtctacttcggtcctttgatcaatttgctaatgctgttttagaagaagcttatgaaagagtcattgggggtgatctctactgggatattcccttagggctatccattatgccgtggagaaaatggtgccttgattggtgaattggacgtggaaaaagaagagcttccagctcatatggt

SEQ ID NO: 126752 - DNA, 525 bp, Arabidopsis thaliana
  unsure (1)..(525): unsure at all n locations
aatgatctccnnnnnnnnnnnnnnnnnnnnnnnnnnnnnnnnnnnnnnnnnnnnnnnnnnnnnnnnnnnnnnnnnnnnnccacgcgtgcgctctctctctctctctctcgccgttactctctgctctgccgccggcattctctccgggatttggagtttgtgtacaaaaagactgttgttggaatgtgcaaatgagacaatattggaaatgttatttgcagcagaaggaggaggattcttctctgcgtcagcttctggttatagcaatggtttagctcttcttctattaggtcaaaagactgaacaaaaaccaatcaaagtttcatcacaatggaaccattatcatttagttcttgaagattctgataccgggtttcggttagattcgtctaagaattggctctcttctgcttgcacttctctcatatgttttggtcgaaaatccgaaagactggaaagcgagggggaagaaagatgaggcaccgagtgtggaggactataataactggggaaggcactaatagg

SEQ ID NO: 126753 - DNA, 586 bp, Arabidopsis thaliana
  unsure (1)..(586): unsure at all n locations
atgatctgccnnnnnnnnnnnnnnnnnnnnnnnnnnnnnnnnnnnnnnnnnnnnnnnnnnnnnnnnnnnnnnnnnnnnnnccacgcgtccgctagaaatagaattaatctcagctattttgtcttaacgactctttattgtcccgacacacgaaaatggcgtctcttagccaaatcaccctgccacgcgcgccgtcgtcggagattggcctcttacgccgtcgattggagcggccgatcatcagaacccggatcggattcaacggccggattgcgagcgtattgactaacgcaggggaccaagcggtgtcggtaaaagcgagtgtgagccagaaggtgattgaagaggaagccaaagttattgtgggtacctacgcgcgagctccagtggttctctcgagtgggaaaggttgtaaattgttcgaccctgaaggaaaagagtatctggattgtgcatctggaatcgctgtgaatgctcttggtcatggagatcctgattggcttcgagctgtcactgagcaagctggtgttcttgcccatgtcagcaatgtttattacacgatccctcagatagagctcgcaaaacg

SEQ ID NO: 126754 - DNA, 400 bp, Arabidopsis thaliana
cgtccgaagacactctggaagaaccctaaagcattttcctcaatcgttattggggttttacgaattcgacatctgtttctgactccgccggatggctagatgggatcagattttctccttacctgtgcaaaatcctaccttgccagaattttcttctaccgatcttgtctggtcaaaggttgaaggttaccgggacaatatagataggttagccctcatcccatatactagggtggatgattttgtaagaggtgaatgctcgaataaagattgtcctacaagtttccatgttgaagctagacgacggaaagccaaaggaaaaaaatataagccaaaggtggatggcatcttggagtatattctgtattggtgttcctttggaccggatgacaataggaaa

SEQ ID NO: 126755 - DNA, 1168 bp, Arabidopsis thaliana
  unsure (1)..(1168): unsure at all n locations
ctttagggaaagctcgtccgcctgcaggtaccggtccggaattcccgggttgacccaggcgtccgcccacgcgtccgcgagtttagagattcttggaacaagaattggtatcaaaccttcaccagttgtagcagcgttctcttcaagaggaccaaattttctgtctttggagatcttgaaaccagacttgttggctccaggagtgaatattcttgcagcttggactggagacatggcaccatcgagtttatcatctgatccaaggagggttaagttcaatatactgtctggaacttcaatgtcatgtcctcatgtaagtggtgtagctgctttgatcaaatcaaggcatccagattggagtcctgcagcaatcaaatcagctctcatgacaactgcttatgttcatgacaacatgtttaagcctcttacggatgcatcaggagcagctccttcatcgccttatgatcacggtgcaggacatatagatcctttaagagctacagatcctggtttggtctacgacattggacctcaagagtattttgaatccctctgcactcaagatttaagtccatcacagcttaaggtattcccaaaacattcaaacagaacctgcagacacactcttgccaagaattcgggaaacttgaactacccggcgatatcagctntgttcccagagaacacacatgtaaagctatgcccttagaagaacagtgaccaatgttggtcctcacatttcaagctacaaggtttctgtctcgccattcaaaggcgcatccgtaactgtccagcccaaaacactcaacttcacttcgaagcaccagaagctttcctacacggttactttcaggacaaggttccggatgaagaggcctgagtttggtggtctagtgtggaagagcactacacataaagttcgtagcccggttatcatcacatggttgcctcctctgtagaacaacaaccaatgtttgagcaatcctaatgtttttagttccacaaataaaaattccttatgtaatgggagctattctctagatcaatgctttggcatttataaaacaaccatatgttcttcttaaaaaaaaaaaaaaaaagggcggcacgctctagaggatccaagcttacgtacgcgtgcatgtgacgtcatagatcttctatagtt

SEQ ID NO: 126756 - DNA, 668 bp, Arabidopsis thaliana
  unsure (1)..(668): unsure at all n locations
ctcactatttggaaagcgggcacgcctgcagggaccgggccggaatcccgggtcgaccacgcgtgcgcagatttaagccatacagttaaggtatcacaaacattcaacagacctgcaaccactcttgcagaatncgggaacttgactacccgcgattcactttgtcccaagacacaatgttaagctatgactttatagagcgtgccaatgtgggcctcacatttcaaagcctacaaggtttctgtctcccctttcaaaggcccatccgtaactgtccagcccaaaacactcaatttctcttcgaagccccaaaagctttcctacccggttactttcaggacaaggttccggatgaagaggcctgagtttggggggctagtgtggaagagccctccccataaagttcgtagcccggttatcatcacatgggtgccccccctgtaaaacaacaaccaatgtttgagcaatcctaatgtttttagttccccaaataaaaattccttatgtaatgggagctattttttagatcaatgctttggccttttttaaaaaaaaaaaaaaaaaaaaaaaaaaaaaaaaaaaaaaaaaaaaaaaaaccaaagggcgaccgctctagaggatccaagcttacgtacgcgtgcaggcgacgtcataactcttctgatagt

SEQ ID NO: 126757 - DNA, 626 bp, Arabidopsis thaliana
gctctatacaactcactatagggaaagctggtccgcctgcaggtaccggtccggaattcccgggtcgacccacgcgtccgtgcaggtacaatgaagtgatacaaagctggcaactttgtttcaattgggaacaagggtttgactttcaggtccacacggttcgcactcggatactaacagacatggcttgggtcaccatgaaggcatacctgaacgtggatggtggtccattcctaataaccaatgtgttcgagttccacaatggaaggtggcacatggttcatcatcacagctcagtgatgctcatcgatgatcaacaagttgttgttcattgatgaatgatgataatatcttttagttttggtttccttctcttcttttattttcatggggacaacaaataaagaagaagaaagaaactgcatattggagaaattggcttattagatttttagtggttattatttagttttaactacatgtactgaatgttctatttttttttttttctcagttgctgttgaatggttggtctaattattactttttcctaatttcaaaaaaaaaaaaaaaaaagggcggccgctctagaggatccaagcttacgtacgcgtgcatgcgacgtc

SEQ ID NO: 126758 - DNA, 1122 bp, Arabidopsis thaliana
  unsure (1)..(1122): unsure at all n locations
aacgacaagcctcaattgcttgctgctgtaaaatttatagcgcatctagtaaaccagcaagtcgctgaggagatcatagcacttgagttagttaccatacttctgggagacccaactgatgacagtgttgaggtggctgttgggtttgtgacggaatgtggtgcaatgcttcaagacgtttcaccaagaggattgaatgggatttttgagaggtttcgtggtatactgcacgagggagagatagataagagagttcagtatttgattgaaagtctctttgctactaggaaggcgaaatttcagggacatccggccgttcgtcctgagctagatcttgttgaagaaaaatattcgcatgatctctctcttgatcatgaaattgatcctgaaactgctcttgatattttcaaacctgatcctgatttcgtggagaacgaaaagaaatatgaggcgctgaagaaagagttactcggtgacgaagagtctgaggatgaagatggctctgatgctagttcagaggataacgatgaggaggaagatgagtctgatgaagaagatgaagaacaaatgagaataagagacgaaacagagactaatcttgttaatcttagaaggacaatctacctgaccataatgtccagtgttgattttgaagaagcaggtcacaaattacttaaaattaagcttgaaccaggtcaagagatggaactatgcataatgctcctggaatgttgctctcaggagagaacatatctgcgttactatggattgttgggtcagcgtttctgtatgatcaacaaaattcatcaagagaattttgagaaatgctttgttcagcagtattccatgattcaccgtcttgagacaaacaaattgcgtaacgtggctaagttttttgcccatttactgggcacagatgctctcccctggcatgtgcttgcctacattcgnttaaccgagggaaggcactacttncctcatctcggatcttcattnagntccnaattnccggggatttgtcaagaccactttnggggtttaggnttncttaatgagngggttnaagggtcnancaatncangggtcccttgnatccntntttccccaagggtatncaaagac

SEQ ID NO: 126759 - DNA, 993 bp, Arabidopsis thaliana
  unsure (1)..(993): unsure at all n locations
atacgactttctatagggaaagctggtacgcctgcaggtaccggtccggaattcccgggtcgacccacgcgtccggtgcgtctccaattccagtttccgccgccgaagctaaatttcttcaggcttcatagaagaagaccgaacatggcgagacgtaaccgtggggtgacaaggcgcgaaaggccgaacctactgatcacggtgactcctggtaccggcaaatcgacgacggcttctgctctagccgaagccacgaatctccggtatatttgcatcggagatctggtcaaagagaaagaattctaccatggctgggacaatgagctcgagtgtcacttcatcaacgaagactcggtgattgatgagcttgacgatgctatgatagaaggagggaacattgtggactaccatggcttggacttctttcctcagcgatggttggatcgcgttgtcgggctcgaaccgaaactccgttttgttgaaccgttacgaataggggttattcaggaaccaagcttagtaacaaccttcaatgcgaaatgtatcaagtcctactcgaagaagcacatgacagttatgatgaggaaattgtcactgaactacaaagtaacacaatcggggatatttctacaatgtctccactttgacggttggattaatgcatggcaaccctgatgatcatcatattggaatctgatgaccatgctctgaatcgatcctgggtgcaatttggttactgagattctgaagcacataattcaggttatggatgctttactgtgatatttaatgaaaagaagaagcttctaatcttttaattgtctttgggaaactttacaattgggggaaaacttgaatggtctgataattatgataagaaacttaatctgggtccaaaaaaaaaaaaaaaaaannnnnnnnnnnnnnnnnnnnnnnnnnnnnnnnnnnnnnnnnnnnnnnnnnnnnnnnnnnnnnnnnnnnnnnnnnnnnnnn

SEQ ID NO: 126760 - DNA, 460 bp, Arabidopsis thaliana
tacactcatataggaaactgcccgcctgcaggtaccggtccggaattcccgggtcgacccacgcgggcggggaacaagtaaactgaagaagccgattgttcttctcactatcgcactattgagctctgtcttcttcttcgcattcttcttcctaaacaaatctgacgtatcatctacctctgctttacggaaccgagactccatggctcgaaccttcatcttatggcttcacgggctaggtgattccggacctgccaacgaacccatcaaaacacttttcaggtcccaggagtttagaaacactaagtggctcttcccttctgctccaccaaatccagtctcttgcaattatggtgcagtgatgccttcttggtttgacatccctgagcttcctcttactgcgggatctccgaaagatgaaagcagtttgcttaaagcagttaagaacgttcatgccatt

SEQ ID NO: 126761 - DNA, 555 bp, Arabidopsis thaliana
  unsure (1)..(555): unsure at all n locations
nnnnnnnnnnnnnnnnnnnnnnnnnnnnnnnnnnnnnnnnnnnnnnnnnnnnnnnnnnnnnnnnnnnnnnccacgcgtgcgagacataccactcaccgtaccaaaaagattagaccaacaaaaaaaaaaaaaaaaaggaccagctcagatgagtctggagtttccaagtttaaaacctctctacctcgatttgagcaaatcctgatttactctcatcctcatcatctctcatcatcgagattcatagtctcttttgccgcttggattcttccaaggttagtgagctgctatggcaactcatcagcaaacgcaacctccttccgattttcccgctcttgccgatgaaaattcccagattccagaggctactaagcctgctaatgaggttcagcaagctaccatagctcaggatcctccaacatctgtgtttaagaattctgaaccaatacgggaggatcaaattcagaacgctatcaaattcctttcgcacccgagggttagaagctctcctgttatacataaaagatcttttcttgagaggaaaggtctcactaa

SEQ ID NO: 126762 - DNA, 348 bp, Arabidopsis thaliana
agagaacgagagaggcggccatgggaggaggaatgggtgcgttttggggaactcgagtgatggaattagtgaagaagcacgattccggtggtcttctttggaagcggatcaagctaacccctactcgtacagccaatgccaaaacccgcctccgtcgtgtttggcacaatgaggctgttcgaagggcgtgtggggaatcagatgcaccagattcgccgggagctagcaacacaaaaagctctagcaatgcggtgaaaaatgcgtaaggccgaaaagaagctagtcctagtttgtgaggactcgtagatcaagtctctgtcgttacctgattttacaaaaataatattt

SEQ ID NO: 126763 - DNA, 913 bp, Arabidopsis thaliana
  unsure (1)..(913): unsure at all n locations
aggagaaaaattgaattgcactggccgtccgcggtaccggtccggaattcccgggtcgacccacgcgtccgcaaaacccaaatcggaacttaaaccaaaagacaaacaaaaacgccgtcgtttcacgatgctttcttcttccccaaccttcttcgctactccatttctctcttcttcttcttcttcttctccgtcgttctcttctacttcaccaccgtcacgcatttcccggatctcgccgtcgctttctacaaccaccgcgtcctacacctgcgccgaagatctaccgagattacgccaaatcccgcagcgattttcagcaaccgcgtctctctacgagatccttgaaattcccgtcggctcgacgagtcaagagatcaaatcagcttaccggcgactagccaggatctgtcatcccgatgtagcgagaaatagtcgggataactcgtcggcggacgatttcatgaagatccacgcagcgtattgcacgctttcggatcccgagaaacgcgccgtttatgatcggaggactcttcttcggagtcggccgttaacggctggatacggcagttacggtggacggaattgggaaaccgatcagtgctggtagcgagttgactcgatgtgtcgagttggtccaaaaccattgaattggttgtaattagagcaaacccagagattctgggtggttgtgccacgtaggatcaacacggtttatcgtgccacgtaggatctgtcgcgttgttagcctttgtatccataattagtaagtagtctgtatttagtatttaccatctaataaagaaaataaaaatttatgtnnnnnnnnnnnnnnnnnnnnnnnnnnnnnnnnnnnnnnnnnnnnnnnnnnnnnnnnnnnnnnnnnnnnnnnnnnnnnnnnnnnnnnnnnnnn

SEQ ID NO: 126764 - DNA, 407 bp, Arabidopsis thaliana
cgaactctctcctctcttaaacttatagacaagaatcaatcagtcacacgtctataccacgatttgctcacaaaatctttggcttccaccaaagattataagcagagatcattcacttactcgtatcaatagatcaaatcttcatcacaatagaagaaatggttttagagacggtttcaaagacggaaccaccaccgttgcttggacctcgtatctccttctcatctgatttatctgacggtggagatttcatctgcatcacccccgtaatgtgtaaggaagatgtcgtcaaagggtcagtgaaagtctccgactttgagttcttgtcgtcggaaaatgtgagtccacagagaatgcttaccgccgatgaactcttctccgaaggtaaattgcttcctttttggcaa

SEQ ID NO: 126765 - DNA, 558 bp, Arabidopsis thaliana
gttttattccaactacattatagggaagagctggtccgcctgcaggtcccggtccggatattcccgggtcgacccacgcgtccgatcagggattcaggaagagaagcagagaaagaaatggagataacactgaacagtggcttcaagatgccgatcgtcggcttaggagtatggagaatggagaaggaagggattcgagaccttatcctcaatgccatcaagatcggctatcgccatctcgactgtgctgctgattataggaatgagaccgaagttggtgatgctcttacagaagcattcaagactggtctggttaagagggaggatctcttcattacaaccaagctatggaattcagaccatggccatgtcattgaggcctgcaaagacagtctcaagaaacttcaacttgattacctcgatctcttcctcgttcattttcccgtagcaacgaaacacaccggagtagggacaaccgatagtgctttgggcgatgacggtgtattggacatagacacgaccatctctctggaaactacatggcacgacatggaaaag

SEQ ID NO: 126766 - DNA, 843 bp, Arabidopsis thaliana
tttccgttcgcagtaccggaccggaattcccgggtcgacccacgcgtccgataagacgcctctggtgttatccccaatgtcgtcactccacgctaccgtgagcctcccactgttctccaactcaaaccacaaaaagctaacgtgcgcagctacattatcacctccgccatggaaacagagccggcgagttatctccgtctccttttttctctcccgtctcctcctcctccctaacgatgctatggctggtggcttaatggataaattggataaatacgtcaagaggaagaaacttgatccacttgaagcatatgtaccaccagtgattctagctcagttacaaatccaggatcttgagggatttttgaatgtggagaaacctgaatttgaggcgtgtagacgccaattgcggtctggtcctgctagctctcttcgtgtaaacattcgagctgttgctcagtatgcttcagatgatggtttctccaaaaccgccactgatgatgttgatcgatgtttaagagcattggaagaactggattcggtgtttctacgtgcgtcgaggaaagattcaaatgcaactgttggattgatgaagtcacagcttggaacagcgttaaccgcactggacagtcttctacaaacagatccttctcaagtgcttgataaagggaaagctatggtggaaggctacagatcaagcatttgaagaagatgccggaagggatgatttagaatcctttgagataaaggaggcttcaggcccatacttgtgagagggggaggccacaggactattacctttcaaaaaacagtggttaatcttacagcattgggattcaaaaa

SEQ ID NO: 126767 - DNA, 841 bp, Arabidopsis thaliana
  unsure (1)..(841): unsure at all n locations
agggaagcctgcgtttgctcctaaaaaagctaacgctagtgtagttatgtttgttggattacaaggtgctggaaagacgacaacttgtactaagtatgcttattatcatcagaagaaaggatacaaaccagctttggtttgtgcggatactttcagggctggtgcgttcgatcagctgaaacagaatgctaccaaggctaagatccccttttatggaagctacacagaatccgatcctgtgaaaattgctgttgagggagttgataggttcaagaaagaaaagtgtgatcttattattgttgacaccagtggtcgccataaacaagcagcttctctctttgaagaaatgcgtcaagttgctgaagcaacggaaccagatcttgttatatttgttatggatagcagtattggtcaagctgcatttgaacaagctgaagcttttaaggaaactgtatctgttggagctgtaattattactaagatggacggccatgccaagggtggtggtgctcttagcgctgttgcagctacaaaaagtcctgtgatattcatcggaacaggagagcatatggatgagtttgaagtgtttgacgtcaaaccatttgtcagccgtctcttaggaatgggtgattggtctggattcgtggataagctacaagaggtagtacctaaagntcaancagcctgaaccttctggaaaaagctctctcagggtaactttacggttngaattatgtccggccagttccagacantctgancatnggnccncttaaggnnggtttcnaantccncctggantaggnntnaaanntccgaagccattggantanacctgggg

SEQ ID NO: 126768 - DNA, 1010 bp, Arabidopsis thaliana
  unsure (1)..(1010): unsure at all n locations
gctctcatacgactcactattnggaaagctggcacgcctgcaggtaccggtccggaattcccgggtcgacccacgcgtgcgcggacgcgtgggcggacgcgtgggcttccatcaacttgacccacaccgaaagaaaaagagaagaagagagactttttttcttgggcattcccaagttttcttttttcttcctcttaacactttttttgtgggtatttccctaaaaagaaaactttatttttgttcttagtaaatctgcttttaaattttataaaaatgggaaactgtttgatgggaggaaacaacgttgagaaaatggttaaagaagaagaagtaatgaagaaagaatacaagagaaaagatcgtaaagtaaagatagttttgagaagagatgagttagagaaactcattctttttcagctaaatgccaatggtaacgtcgacggcaagggagaaacaactttggcttcttttggtgactttctaagggagttagaggcggagagatctgcgggagaagcggctgcaaaggcggctgaggaagaggaggagtctcgtcggagatgtcgtaagtggaggccctcgttggaaagaatcactgaatggcctgaagaaacactttcgtaatctttttctttaatcctttctttttcgttttagagatcttgaagtcttttatttttcttatgaaaatgggattttttgtgggggagtttgcccttttgctgatttttttccctttttttaccgagggatattttttcatctgagattttatctcagtgtgtttgagatcagcaaaaggcttatttaccccagagaaaatcctcagaaaaaacgaaattatgtattcattttcgtctttcatgtaaggttcaatttgtcatcataaataaatattagtagtttagtataaaaaaaacaaaaaaggnannnnnnnnnnnnnnnnnnnnnnnnnnnnnnnnnnnnnnnnnnnnnnnnnnnnnnnnnnnnnnnnnnnngatcaatcg

SEQ ID NO: 126769 - DNA, 845 bp, Arabidopsis thaliana
ctaccggtaacaaattctggagctccaccccggtggcggccgctctagaactagtggatcccccgggctgcattaatttctggccgcttccttttccctcccctaattgtgacacccaaggacttttggaaccaaactctatttcgaaccagcgttgcatttgatatcgggaattatctttctttggtggtctcattgcacctaatctggaactgaaggtaggacttggaggaacctcttatgaagattttataaggagcttacatctacccttgcaattaagccaggtagatccaattgtggcatctttttctggcggggccgtgggagtcatttcaaccttgatgctaatcgaagttaacaatgtttaaacaacaagagaagaagaggtgcaaatactgccttgggactggatacttgccatgcgctcgatgctcagctagtggtgtgtgtttgagcattgatcccatcacaagacctagagctacaaaccagcttatgcaggtcgcgaccacaaaaagatgtctaaattgttccggcgcaggaaaggtgatgtgtccgacatgtctttgcaccgggatgggtacagctagcgagcatgacccccgctttgaccccttcgattagaaaaacagtggcctcctttgaaattggtccttgcaaaagctaagccaagcctatgagaactgaggagagccaaacctcgtcatataaatgttttacataataaaagtaattacataataaaagtaacattaaaatttttaacttttgtctatagtaaacatggggcggccgcgaattcgatatcaagcttatcgatacacgtcgacatcggggggggt

SEQ ID NO: 126770 - DNA, 752 bp, Arabidopsis thaliana
  unsure (1)..(752): unsure at all n locations
annnnnnnnnnnnnnnnnnnnnnnnnnnnnnncttaaaaaaattatccgaagaagacgatagacagcaaaaagcgttgggcgagaagaagacgacgtgcttctcttctgctactcctcatcgccatcatcttctactttcttctccatctacttccaaatccctgcttcgatttccctcatcttatctgaaacctagccccagtcttctcttccatggctcatctcgctctctcctctcctgttcagacggcagcaacaaccgtcctcctccctccggtgacaccgtcccaaataacttctgtatcattgagggatcagagacagttcaagactttgtgcagatgcagcttcaggaaatccaagataacataaggagtagacgcaataagatatttctcctcatggaggaagtgaggaggttacgtgtgcagcaacgtatcaagagtgttaagccatcaatgaggacagtgagctcgaggctaccgagatgcctgagatcacatcttctattcctttcctcctaatgtgacaccaaagactttgaaccaactctattcgaccagcgttgcattgatatcggggaattatcttctttggtggtctcattggacctaatctggaactgaagtaggacttggaggaaccccttatgaagatttataatgagctaacttctacccttggcattaaaccaggaggatccattgggggcatttttttctggggggcccctgggaggtattttaacccc

SEQ ID NO: 126771 - DNA, 629 bp, Arabidopsis thaliana
aacaaagcagatttgcttcttctcgattctttgcaatttgcatgcattgctcatcaaaaaaattcctttctgggttttgttggaaaatagctgtataacttcaaatgttgaaactttgcttttcttcttcttctcttttggtcaaattttgtgttctctctagagcaaaaccctaattctctcaattctactcaaaattaatatctcttgcttccttgagaaagataaagatttgtgtttactaaggttgaggaaatgataatagcaaagcaatatcgttgcattcactcggcgacttgtcattgcacgaaaggacatcttagcgaagaagtattgtttcttatggttcagcatctaaactggaaccctaatgtgattgccactctatcttgtgtttgtaaatggtttgatgatctcgctaagcggttattgtggaaagaattctgtagagctagagcgcctaagatgatgagtgaccttcaatctagtggtagccatagtgttgatgggagttggagagcactagggaaacttttgatttactgctctggttcaagcaaaggtggactctttaatgatgttcaaatctctggtcattttgttcacagaacccgcttctctagaacatc

SEQ ID NO: 126772 - DNA, 510 bp, Arabidopsis thaliana
  unsure (1)..(510): unsure at all n locations
tacgactcatttagggagagctggggcgcctgcaggtaccgggccggaattcccgggtcgacccaccggtncgggggacatgaagcagaggcagcaatgctagtgaggaagcagaaaacatatgctcttttagatgctgatgatgatgaagacgaagttgttgtggagaaaaaatcttcagtttctgaatctagaaaatcagataagggcaagaaaaggtttagaaagaaaagtgggcagtcagatgaaagtgatggcgaggtggccgttagagaggatagtagacacgttagaagaaaggtttctgaagaggatgatggttctgagtcagaagaggaaagagtgcgtgaccaaaaggagagagaagaactggagcagcatttaaaagatcgtgatactgcacggacacgaaagctaacagagcaaacgttgtcaaagaaagagaaagaagaggctgttcgaagagcaaatgctttggagaaggatgatttatattccttaaggaaagtg

SEQ ID NO: 126773 - DNA, 383 bp, Arabidopsis thaliana
ctcgaatgaggggtctaggggctcggctcttaaaactcttatcgccgctaaaactctctacccatcgcagagcctctctaaaggttatcttcatgatctcactcaatacatatgtttcgttactatatgtttttgcttctgattgtcgttattctgtaatcgtttagagtcgtttatggtttcccccattttgtctgtaatgtccatgctctgtttctttacagtttcctctccggcttgttagatatcagtttagttcctgatttactgagaaaccaagcttctgagcttaagtatgttcgggttctgacgttgattgagaaatattataaactggttttcaagtttatttctttctggaatttcttttgtagtctgattat

SEQ ID NO: 126774 - DNA, 470 bp, Arabidopsis thaliana
  unsure (1)..(470): unsure at all n locations
nnnnnnnnnnnnnnnnnnnnnnnnnnnnnnnnnnnnnnnnnnnnnnnnnnnnnnnnnnnnnnnnnccacgcggttcgggatcacacgagagaaaaaccaatggcttgtattcacatcgaatcatcacatccacctgcatggaagacacactctgtccaagagaacaaaccagcaaatgctgatgatatatcgaacacaaccttaccagaacaccacgacggtggcgacgggggaatccaagaaacgtgggccgcgattggagattctggcggcagaggaggaggctatttcgccggagagagtaggaagaagctggagaagaagaagagccaagtgttgcttgagggatacgcgttggatgatcaagatgatttgacgagagccaagagtttgacggatgatgatcttgaggagcttaaaggttgtttagatctagggtttggttttagttacgatgagatccctgagct

SEQ ID NO: 126775 - DNA, 578 bp, Arabidopsis thaliana
  unsure (1)..(578): unsure at all n locations
catacgactcatttagggaaagctggtacgcctgcaggtaccggtccggaattcccgggtcgacccacggcgtncgcgtttccaggaatggttgcatagttaatatgactgctgatgggaagtccctcacaaacacggaaaaatatgttggaaaatttcttgatttactccctgaaaatccgtctggtgaactcgtcacttgggatgctcgacttcctttgagaaatgaagctatagtaataccaacccaggtgaactatgtgggaaaagcgggaaatatatacagcagtggctacaaacttgatgggagttcatatgttatatcaaagcatattagtaacacatggttatgggatcgtgttcgtgtaagtggtggtgcatatggaggttcctgtgattttgattcacattcgggagtattttcgttcttatcttaccgtgatcccaacctattaaagactctagacatatatgatggaactggggatttcttacgtggcctcgatgtcgatgaagacacccttaccaaagcaattattgtgacaattggcgatgtcgattcataccaactccctgat

SEQ ID NO: 126776 - DNA, 554 bp, Arabidopsis thaliana
  unsure (1)..(554): unsure at all n locations
nnnnnnnnnnnnnnnnnnnnnnnnnnnnnnnnnnnnnnnnnnnnnnnnnnnnnnnnnnnnnnnnnnnnnnnnnnnnnnnnnnccacgcgtgcgcgcgcgtccaaagattcttccttttccgattccgatgaaaaggaattttgggttttaggaaagttcgattggttggtttggaaacatctccctaacacacgcagcaaacaccttcgttgtttacggagacagtcactttttgtatatatggattcgaatcaatcgatgcggctcctcagtgcttggattggtcaaattggtgatcttggtcttaatttgctatggcgttttatacacattgttgtgagcttatggtacattgtctctggcatatttgaggcaatagaaagctatgccataacgttaggattgaataaaaagtacggttccatcgatcttgagaaactccggtgtctagctgttgtagtggacatcgaagcagctcaagatgttgccaatgttgttgagcttttgcaatggctaaccaccattggggttaaacaagttggtctatttgactc

SEQ ID NO: 126777 - DNA, 732 bp, Arabidopsis thaliana
  unsure (1)..(732): unsure at all n locations
atgnnnnnnnnnnnnnnnnnnnnnnnnnnnnnnnnnnnnnnnnnnnnnnnnnnnnnnnnnnnnnnnnnnnnnnnnnnnnnnnccacgcgtccgcggacgcgtgggctcaattttcatttcaatcaatcaaaaccattcggcaaaatcaaataatctttttcttagttcgaatttaatttcccaagagaaaaatgtcaggccgaggaaagggaggaaaaggattaggaaagggaggagccaagagacatcggaaagtactcagagacaacatccaagggattaccaaacctgcgattcgtcgtctcgcgagaagaggaggcgtgaagcgtatcagtggtttgatctatgaagagactcgcggcgttctcaagatctttctcgagaacgtgattcgtgacgccgttacttacacggagcacgctcgccggaaaactgttacggcgatggacgtcgtttacgctctcaagagacaaggacgaactttgtatggattcggcggctaaatcgttcggattgcaatttcggattttgtaaactcttcaatttcagcatctagggatttcagatttgtaatttctcagttaaacgatgaatggattggatnaaannnnnnnnnnnnnnnnnnnnnnnnnnnnnnnnnnnnnnnnnnnnnnnnnnnnnnnnnnnnnnnnnnnnnnnnnnnnnnnnnnnnnnnnnnnnnnnnnnnnnnnnnnnnnnnnnnnnnnnnnnnnn

SEQ ID NO: 126778 - DNA, 748 bp, Arabidopsis thaliana
  unsure (1)..(748): unsure at all n locations
nnnnnnnnnnnnnnnnnnnnnnnnnnnnnnnnnnnnnnnnnnnnnnnnnnnnnnnnnnnnnnnnnnnnnnnnnnnnnnnnnnnggccggcccacgcgtccccgttcttcttcttctacagacatcaatttctctcgagataaactaaatcttcgctgaaaaaatgtcgggtcgtggaaagggaggaaaaggtttgggtaagggaggagccaagcgtcacaggaaggttctgagagacaacatccaaggaatcaccaagcctgcgattcgaagattggctcgtagaggtggagtcaagcgtatcagtggtctcatctacgaggagactcgtggcgtcctcaagatctttctcgagaacgtgattcgtgatgctgtcacttacaccgagcacgctaggaggaagactgtgaccgccatggatgttgtctacgctctcaagaggcaaggaaggactctttacggattcggtggttaattagagtttttcagatccgcgtttgtgttttctgggtttctcacttaagcgtctgcgttttacttttgtattgggtttggcgtttagtagtttgcggtagcgttcttgttatgtgtaattacgctttttcttcttgcttcagcagtttcggttgaaatataaatcgaatcaagtttcactttaaaaaaaaaaaaaaaaaagnnnnnnnnnnnnnnnnnnnnnnnnnnnnnnnnnnnnnnnnnnnnnnnnnnnnnnnnnnnnnnnnnnnnnnnga

SEQ ID NO: 126779 - DNA, 528 bp, Arabidopsis thaliana
  unsure (1)..(528): unsure at all n locations
atcaattaaatcttcaaatcgaaaagtttccgatagatttattcaggttcctttagaaaatgtcaggtcgtggaaagggaggcaaaggtttgggcaaaggtggagccaaacgtcatacgaaggttctgagagacaacatccaaggaatcactaaaccggcgattcggagattggctcgtagaggtggagctcaacgtattagtggtttgatctacgacgagacacgtggcgttctcaagatctttttggagaatgttatccgtgacgccgttacttacactgagcacgctcggaggaagacggtgactgctatggatgttgtttatgctcttaagagacaaggaagaactctctacggattcggcggctgggggttttttaattgtngntttttggtggtttctacggttaattaagggatggtaaattttccagaattttggtgnttaaacttccggaaaaaatttaaanggcatttgaagggtttgtttttgcaattncgtgannnntttnaagggcntttnttnc

SEQ ID NO: 126780 - DNA, 468 bp, Arabidopsis thaliana
agtagcgaaaaaaagaaatctaattctctcgagaaaatgtctggtcgtggaaagggaggaaaaggcttgggtaaaggaggagccaagcgtcacaggaaggttctgagagacaacatccaaggaatcaccaagcctgccattcgaagattggctcgtagaggtggagtcaagcgtattagtggtctcatctacgaggagacacgtggcgtcctcaagatctttctcgagaacgtaattcgtgatgctgtcacttacaccgagcacgctaggaggaagactgtgaccgccatggatgttgtctacgctctcaagaggcaaggaaggactctctacggattcggcggttaatcagggtttttcaagatttgtggtttggagatctgtttcttggaaattagatttttggaaattttaaatgtacggtttttttatttaatgttaaccatgtattttattttcctatttttt

SEQ ID NO: 126781 - DNA, 473 bp, Arabidopsis thaliana
gaaagtttcttgttacaaaaatgagagctattcaaactcatgtgataaccttctgcatgttagtcatcatcgtaacatcatcaacaagagcccaaaagagtcctcatgtgcctaacaaccatgaactttctatcgccatcgaagaaatggagaaagcaaattacttctcttttgtgatgctcatcaacatgttaccatccgtaaatcctcgattcttagccaatgtcacattcttgatgccaaaggacaaaaccctttctacatcaaacattattaatcaacaagattcggttaccgagttcttgcttcgccactcaatcccttcttctcttcttttcgagcaccttaatctcatccccaatggctccattgttccttcctctttaccacattacaccctcgagatctccaatggtggaagatcaaactactttctcaataacgtcaagattataagccgcaacatatgtagc

SEQ ID NO: 126782 - DNA, 484 bp, Arabidopsis thaliana
aatatcagtgttttattaattgattggtgtggcgaaacaaatccgtcgttttgctccgttgatcggcaggtgatcaccagaagcctcgtcaccgtctctttctctcccccctttttcatgacgccgccgagaccaccgtctgggcgagtaaggtcgctgcgtgattattcttcggaatcagaaaagatggatggtaccggtagttgggacacgcttgaatggaccaaactcgattcaacttcagggtcaggttctttctcgaatttgagttgcttgctggaatcggagagggtcatcgtcgagggttatggagttgtgcttattaacaccgatgaggcaggaacccttttggtgactaatttccgtattctttttttgagtgaaggaaccagaaaagtcattccacttggtacaattccattggcaactattgagaagtttaacaaaatggttctgaaagttcaatcaagtccccgtcagtctg

SEQ ID NO: 126783 - DNA, 506 bp, Arabidopsis thaliana
  unsure (1)..(506): unsure at all n locations
attggngcaaacccagccttcaagtatgaaacntccgccacggttgtccagtccaagttccaagatgtccccaatggtgaatatgtagatgaagaaatggaggagcagttttatgatgccacggactcatcatctggagaagaggatgaggaggaaagcgatgacgatgatgaaaatcaggacaataaggagataaaagttaaactgaagaatgtttcatgggcaatcgctagcttatctttgaagcgacctaaagctccaggcgcaagtaatgtattagacgctagtgttgatcctgtgagtatcgatccaagtcagttccaaggatctctgcgcaaaggaaatggtgataaggactcaaattgctggaattctcctagtggcatggggtttatgatcaggggaaagacctacctaaaagataatgcaaaggtgatgggtgggcagccccttctaacacttatttccagtggattggttcaaagttgatagtgctgtagacaaca

SEQ ID NO: 126784 - DNA, 507 bp, Arabidopsis thaliana
  unsure (1)..(507): unsure at all n locations
nnnnnnnnnnnnnnnnnnnnnnnnnnnnnnnnnnnnnnnnnnnnnnnnnnnnnnnnnnnnnnnnnnnnnnnnncccacgcgtccggcgatcaaacaactaaattaaaaaaaaatcttgagagattcttggaacacaagaaaaacatgaaacctagaatgtgtttaatcttgtttattgctttaatgagagtaatgtcgattgtttctgctcagtcgagttgcacaaatgttctaatcagcatggcgccgtgtctcagcttcatcactcaaaacacttctctcccgtctcaacaatgttgtaaccagttggctcatgttgtccggtattcttctgagtgtttgtgtcaggttctcgatggtggaggttctcagcttgggatcaatgttaatgagacacaagctcttgctttgcctaaagcttgtcatgttgaaactcctcctgctagtcgctgccatagtggttcttcggttaattcacattcagaacatggaaatggatcaaaaaca

SEQ ID NO: 126785 - DNA, 472 bp, Arabidopsis thaliana
cttagaagtttccccatgaaatccgagaagattcaaatgtaaattcagcctccgattcatatattttgctcaccggaaacttcagatcgagctactgcaatttgcggatcgtgtttttttttttctttcaattcacggtgtatttatctcgggagaagaagaatggatactttcacggcggaggatctgtcgacgatcggcggaatagcgacagtatcgctccttcactcgtttattccgacgcattggctacctttctccatcgtcggacgtgcgcagaaatggacgctttcgagaacactcctcgtcactgcatttggagcagtcctacatgttatatccacttctctccttggtataacagcaatcacaatggcgaataccatcgctggtgaagagactgttcacaaacttgcttcccttttgcttgtatttctcggtggaagctatgttttgctgtttttgcttggta

SEQ ID NO: 126786 - DNA, 518 bp, Arabidopsis thaliana
  unsure (1)..(518): unsure at all n locations
gannnnnnnnnnnnnnnnnnnnnnnnnnnnnnnnnnnnnnnnnnnnnnnnnnnnnnnnnnnnnnnnnnnnnnncgtctcgcccacgcggtgcgcccacgcgtccgcggacgcgtgggtgtcggtgtgttcttcgtcttcttcttctcagaaaacatggattgttaacgggatcttggccggaacagcgattgcagccgcaatcggcgcacgtgcttatctgggtcgatccaagaaattccggagccgggtcgtcggaatcattcccgcacgttacgcttcctctcgattcgagggtaagcctctcgtgcaaatcctcggcaaacccatgatccagagaacttgggagaggtcgaagttagctactacgcttgatcatattgttgtagccactgatgatgaaagaatcgcggagtgttgtcgtggatttggtgccgatgttatcatgacttcagagtcttgcagaaatggcactgagaggtgcaacgaagcgctagaaaagctggagaagaagtatgat

SEQ ID NO: 126787 - DNA, 515 bp, Arabidopsis thaliana
  unsure (1)..(515): unsure at all n locations
ggtcccatacgactcactttagggaaagctgctacgcctgcaggtaccggtccggaattcccgggtcgacccacgcgtncgcggtaatcaaaattctccggcgagaaatttccattgagattttactctctctctctctctcttcttcactctctaccaaaggctctcgtctcagatatgaagatttctcaagctccgatctctgttttcggactcttcttgctctccactggggggcctcaccatctctcactgggagctccgattacatgctctggtataggtccaatgaaacacagaaacgagatgctatcaatttcggattttggagctggcggtgacggcaagaccttgaacaccaaagcattcaattcagctattgatcggatacgaaactcccataacagtgacgaaggaactcttctttatgtgcctcggggggggtatttgactcaaagcttcaatcttccgagtcacatgactttatacctcggcgggggggctgtttttaaggc

SEQ ID NO: 126788 - DNA, 493 bp, Arabidopsis thaliana
gcctgcaggtccggtccggaattcccgggttgacccacgcgtccgacccgcgtccgaagagatctctcgttcgtttggttcccggtaaggccggcgagaaaaagttcacattgaatctaccagaaaatttccttccatttcactccacgagttttcacctctcttgtgtaatctctcaacggcgggctgcctcatgtctggggggggctgaggccccttggcctctgctattttaccggaatccgagaatttttgatcagatgtagttccacaaataggttagttccaacagtgttgacggaacgaggacggccaatttctggtttaaatgggagtttggaatttagcatagaaattccgggttatggattcgtgaatcgacctaaggtttccatgaaaggaggcccttaagatcatgttctggtctcggaatcctgtgtttaccgcccccaacctgggcttaccgtgcttgggtagtacattggctggtttg

SEQ ID NO: 126789 - DNA, 528 bp, Arabidopsis thaliana
  unsure (1)..(528): unsure at all n locations
gatacttcnnnnnnnnnnnnnnnnnnnnnnnnnnnnnnnnnnnnnnnnnnnnnnnnnnnnnnnnnnnnnnnnnnnnnnnccacgcgtgcgtgagaagagatctctcgttcgtttttttcccggtaaatccggcgagaaaaagttcacattgaatctacgagaaaatttccttccatttcactccacgagttttcacctctcttgttcaatctctcaacgtctctccctcgtttctcgttttcgctttttccccttttcctcttctattttaccggaatccgagaatttttgatcagatctagtttcagaaataggttagttccaacaatgttgacggaacgaggaaggcgaatttctggtttcaatgggagtttcgaatttagcaatagaaaattccgtggttatggattcgtagatcgatctcaaggtttccatgaaaggagtccttcaagatcatgttctgtttcgaaaatccttcgtatcacgccaccaacctcgtctccaccgtcttcggcttctacatgcgct

SEQ ID NO: 126790 - DNA, 506 bp, Arabidopsis thaliana
ggggagcacgtacgcctgcaggtaccggtccggaattcccgggttacccacgggtcgggcaggcgtacaaacacgcgtccgcgagatcatctagaagatgatgttcacatgtcatttggaagtatgttgttacgaggcctttgttctggtgaagctgatggtgatcttgagacatgttgcagagctgcaagcattctttctcatgttggcgggggcgatcttcggcgcaaggaaaaggctttgaaaatcgtacttgaatcaccgatgccgtccatgggaactccagagcctctctttcagaggattgtcagatacctggctgttgcttcttccatgaaaagcaaagagaaatcaagcgcactgggggaaatcatatattcaacagatcattttaaaactgctggtgacatggactgttgattggcccactgcagttcagtgctttttagattcccgccaccacctaacgtttttgctcgagctggtaacagacccagctgcaacag

SEQ ID NO: 126791 - DNA, 524 bp, Arabidopsis thaliana
  unsure (1)..(524): unsure at all n locations
tacgnaggtcgnacggtcatcgcatcaagtcttgnatcatcgtaattacgncggccgcttagtaacaaaagtttcttctttcttctctcccgagaggcctctcgctgttcattgaagttctcttagaattttctatcaccttgtatggttgtgtaatttgcaaaacagacaacaatggttgagcgtgggaagaggactcacaatcgtttcagagacaacaacaatgacaacaaccggaatcaaaggagaagactttcttacgaatccgaagaaaaaaagatcgataacaaagacgatctcgttgttgtttacagaatcttatgcccaagtggtgtcatgggaagtgttataggcaaaagtggcaaagttattaacttgattaggcaagaaactagagctaggtcaaagttgttgatccttttccaggttgtagcgaaagngtcattacggtcttttnctcggtttcggngangaaagcaattttggncattgggtntagtgattgggttnccctgtccctntga

SEQ ID NO: 126792 - DNA, 813 bp, Arabidopsis thaliana
gcaaatatgatggatcaacggctgagaagaaaaagatcttagaaaaactccgtgttcgtggtgccgtagctataaacttaagaccagcaacaaagatagaggatttggctgatatgatggcgaagggttcaaagtgtagatggggaaacttcataggaacggttatatttccgttgtgggtgaaatcagagaaagatccgttggagtacattcgacgagccaaagctacgatggataggaaaaaaatatctctggaagctttttttttctatggaattattaaattcaccttgaaattttttggaggaaaggcagtagaagcttttggaaagaggatattttggtcacacatcattggcattttcaaatgtgaaaggtcccccatgaagaaataagtttttttctccatccgatttcatatatcccaggaaggccattagttggagcccaagctctcaatacccttttataaactacgtagccaagattgtcatcaatctagctgttgcccaccaccgattcaagatcctaatcgactatgtgatgatatggtggaagcacttgagatcatcaaatctccactactaggggaaatatttccgaaaaggcccccccccaacacatcacatgatgtttgatcagggttatgtaatatatacctatatgaagttttgtattcgcaatgaatttttttatggagtatatacccaaaatattggttaagtgtaagtttgtttgttaaaaaaaaaaaaaacacccgcgcccccgctctagaggatccaagcttacgtacgcgtgcatgcgacgtcatag

SEQ ID NO: 126793 - DNA, 434 bp, Arabidopsis thaliana
acccacgcgtccgtgcgattctgctactctggagaaaggaagacgaatgattagttaaagaagaagaagaggagtcttgcgatagaagaagatttttgcgatatcttcatagaaggaagatggtcttatctcaaggctctgcatctctctccttttctcatccataggtcatgcgtccatgagcaattggcataatacgtaattgtcagatggtatactacaactgtggacaagagtgtatgtttttcagtgtggcagtgttggaaaaagaagcaatgcgaggaggcacacctcttcacttaaagagcaaaatcgatgagctgatcaagagtctcttggatttgtgcttctgtacttcttacgaggaagatttagagattgtggaaaacaatttgaaacattttgaagagaagcccacttgagagatactacca

SEQ ID NO: 126794 - DNA, 486 bp, Arabidopsis thaliana
  unsure (1)..(486): unsure at all n locations
gacngcttnagggaccgggccngaattccccgggtggcccactgcgggccgccaatcagaagagaaaacgatgaccgagaactgttctactgagagctctgacgaagaataagttcgtcgcctctaatgctcctcgatctatatccatttccatcaccagtctctctagatgcattagcactctgattctagcagaacatgagagtggtacaatcaaacctcagacagtgagtacagtagttgcagctaattcattaggtgagagctcttcaatttctttgttattggctggttctggttcttctcttcaagaagctgcttctcaagctgcctcttgtcatccttctgtttccgagggtacttgttgctgattctaataaatttggagtacctctttagctgagccttgggctaaaattgggttgactttgttccggcaacaaggggggttcctcaaaaatttttngnttccccnnggtcatttng

SEQ ID NO: 126795 - DNA, 1113 bp, Arabidopsis thaliana
  unsure (1)..(1113): unsure at all n locations
accggactttccgggtcgacccacgcgtccgttacgatttgcttagaaaggagaagacatctggagcaacaggatttacaaaagttattatctttatcgatttctcttcttcctagacccaacagacgaagagaatttgttgttggttgtctctggtctcttcgtctaggttttttttgggttattaaagatggtgaggatcgtgagaagttgtttacagtccatgttaaagctcgtgaattctctaattgggatggttgggattgctatgattctctacgctgtttggctgattaggcaatggcaagaacaaatgggaaatcttccttttgctgattctgatcaccctgttccgtggttcatttattcatttcttggtctcggggccattctctgtgttgtcacttgtgccgggcacatagcttctgaaaccgtgaatggatgttgcctttacttgtatatgggattcatagtcttgctaactatggttgaaggcggtggtagttgccgatatctttctaaaccgtgactggaaaaaggactttccagaggatccaagtggtgctttccaccagttctctaagttcatcgagtcaaacttcaagatttgcaagtggataggtctctctattgtctgtgtccagggtctatcagttttaatagccatgttgctcaaagctcttggacctcacccctcaccgaccattatgatagtgacgatgaatacaatgtaagcacagttgcactcctgcaggatgctcgtcagccgcctccatacgttgttggagaacccatgtatggagccaaaccgggagcttggacagttagattaatgaaagggcaaaccggtgagaggtgaaaacaaagaaactcgtagaaccaaatggcaaagcagagtctgctctttccatgtgtgcatttactttggcttcttattgcatctctttctttcactatttatctcttgtaaatgttgaatacatatatttgggatgttcttacatattaaagactatgtgatgtatgataaaactccaaaaaaaaaaaagttgaccnnnnnnnnnnnnnnnnnnnnnnnnnnnnnnnnnnnnnnnnnnnnnnnnnnnnnnnnnn

SEQ ID NO: 126796 - DNA, 662 bp, Arabidopsis thaliana
ctatatggttgagaaggagaacacgtataatgtgatctaacaaaactcaagttattagattcaaatttatagcgtggtagaagaacaaaatcattcatgccatgtattttgtgatgttgttttctggatatatagattgaatgacataatggtaataagttgtggcaactcttacttttattttccttgtctgtccctgggagttttgggatgtttgacgtttgttggtggaaataggtgttgagaagggatcaaaagatccacagcaagataaagttggggtgataacaatagaccagctacgcacaattgcagcagagaagctacccgacctgaactgcacgaccattgaatccgctatgagaatcattgcaggaactgcagctaacatggggatagacattgcccctccgattcttgaacccaaaaagaaagcagttttattgtaaaagcctggttggtcccttctattccataatgccttattcgtttcaaaggtgtaattttccccacatgacgcttaagagagttcagatataatgatgcaacaatgtatgtgttttttttgttttaaaaaaaaaaaaaaaaaaaaaaaaaaaaaaaaaaaaaaaaagcaagggcggccgctctagaggatccaagcttacgtacgcgtgcatgcg

SEQ ID NO: 126797 - DNA, 688 bp, Arabidopsis thaliana
  unsure (1)..(688): unsure at all n locations
nnnnnnnnnnnnnnnnnnnnnnnnnnnnnnnnnnnnnnnnnnnnnnnnnnnnnnnnnnnnnnnnnnnnnnnnnnnccacgcgtccgaacagataaaatcaaatttgagagatctactactaaatctaacttaaagcattgtactttcttttatctcattctcctttgctctgctttcttctggtcaacccccacgagattccttcttatgtgattgtaaagagaagatttttcagagatgggtctcttcgaatcggtgaaatcaatcgattgggaacaagaatcgttcccaacttatcaagatttagggtttttgcctctctttgcagtgttcttccctacaattcgatttctacttgacagattcgtcttcgagaaattggcaagtcttgtgatctatggaaggatgagtacgaataagagtgacaacataaaagacaggaagaaaaatagtccaaaagttcgaaaatttaaagaatcagcttggaagtgtatttactatctatcagctgagctacttgctttatctgtcacatataatggaacccttgggtttcaaaatacnctctacttttnggntttggncccggggtcannatttggcctgaccaacccaattgaggttgaagtttnagtttttnnaaanggttccgnctnggttntanncggnccccnnnatccggtggggg

SEQ ID NO: 126798 - DNA, 739 bp, Arabidopsis thaliana
  unsure (1)..(739): unsure at all n locations
cctgcttgcttttatgcactggctagaaactgggactcttctcgtgcataccgaagctgaagaaaaacttgggttgaacagtttggagtttggattggagacagaagattatctcactggaatttgtttcatgtcaaacgatttgcctaggtacgtggttaatcgagtgacagcaggagactatgactgcccaagaaaggtgatgaatttcctgacagatcttcatgcagcctttcgcatgctcaatctcaggaacgatttcctgcgcaagaaattcgacagtatgaagtacgacctaagaagagtggaagaagtttactatgatgtcaagatccgaggtttgatttccggcggagatcctcctggcgtccaagcagtccaaggccaatcctaaatgtcctcggctctttttaagtttttatgtataactttgtttagctagcatgaaaacgtcaaggagtgttcttctctaaaccaaaaacggcaaggaaaatagagagactgtagtttttaggtgtagtttgcaattactgaaaacggcaagtattccttttgtgggccttgaaagcccacattttagtcacaactttactgttatccgaagtcagcagcttaatagtataacagtagatgttcatgaaaaaaaaaaaaaaaagnnnnnnnnnnnnnnnnnnnnnnnnnnnnnnnnnnnnnnnnnnnnnnnnnnnnnnnnnnnnnnnnnnnnnnnnnnnngaatccg

SEQ ID NO: 126799 - DNA, 454 bp, Arabidopsis thaliana
accacgcgtccgcccacgcgtccgcggtcgcgggggatgagtttaagatggagagaacttgtgcggccagaccaaaatctccagaatgtcaaaggcccagagacagatgttgccatttttagggacgctcggatatgtgacaaaaagcttagtgataacaaggttagctacggagttttctttggaaatcaaaagcatctgccatcacgcgtcatgaagaatataatggaggtcgagaaaacccaagatagaaatgaaaagtattggttacaagaagcccatgttcccctatacttgatcaaagaatttgaagagagcttgcatagagtacaaatgccttcttcaaccaagaagccatccaagaaattatcaaagcttcagagaaagcagctgaaagcttccctcatggacatattttcatatatagcctcaaggagggacaagatggagaaat

SEQ ID NO: 126800 - DNA, 940 bp, Arabidopsis thaliana
  unsure (1)..(940): unsure at all n locations
caagggcttaattaatgtccaaggcaaacgtcccttccgcgtcccccggtctactttcgttggttcgggtcaatatgcggctcactggaccggagataaccaaggaacatggcagagcttgcaagtgtctatctcaactatgttgaacttcggtatatttggagttcccatggttggttcagacatttgtggattctacccacaaccaacagaagaactctgcaaccgttggatcgaagtaggcgcgttttacccgttttcaagagatcacgccaattactactcaccaagacaagagctttaccaatgggacacagttgcagactcagctcgtaacgctcttggtatgagatacaagatccttcctttcctctacactcttaactacgaagcgcatatgactggtgcacccatcgctagaccgctcttcttctcattccctgaatacaccgaatgttacggcaacagcagacagttcttgcttggaagcagcttcatgatatctccggttctcgagcaaggcaaaaccgaagtagaagcattgttcccaccaggttcttggtaccacatgttcgacatgactcaagcagtagtgtccaagaacgggaaacgtgtaactctcccagctcctttgaactttgtgaacgttcatctttaccaaaacactatcttaccaatgcaacaaggcggcgttgatttccagggccgcaaggacaacaccgtttaggctcggcattgctttncctgcangggntttttgaaggtaacggcaccgggaaacttttnttgnngnaggcgggnttccggaattaagctngggaatggcagccncggacggtgctttttnggttnggtcggaaagggcattanggtttngccaagttaaggaggaagtttntttngaaaggntgggnttanaagaggttttggcnagggggaa

SEQ ID NO: 126801 - DNA, 1227 bp, Arabidopsis thaliana
  unsure (1)..(1227): unsure at all n locations
atgatacgcgagctctatacgacttacttagggaaacctggtacgcctgcaggtaccggtccggaatttccgggtcgacccacgcgtccggggacacagttgcagactcagctcgtaacgctcttggtatgagatacaagatccttcctttcctctacactcttaactacgaagcgcatatgactggtgcacccatcgctagaccgctcttcttctcattccctgaatacaccgaatgttacggcaacagcagacagttcttgcttggaagcagcttcatgatatctccggttctcgagcaaggcanaaccgaagtagaagcattgttcccaccaggttcttggtaccacatgttcgacatgactcaagcagtagtgtccaagaacgggaaacgtgtaactctcccagctcctttgaactttgtgaacgttcatctttaccaaaacactatcttaccaacgcaacaaggcgggttgatttccaaggacgcaagaacaacaccgtttagcctcgtcattgctttccctgcaggagcttctgaaggttaccccaccgggaaactctatctagacgaagacgagcttccggaaatgaagctaggaaatggacagtccacgtacgttgtcttctacgcttcggtcggaaacgggacaatgaagatgtggtcacaagttaaagaaggtaagtttgcattgagcaaaggatgggtgattgagaaagtgagtgttttgggacttagaggagcaggacaagtgtctgagattcaaatcaatggaagtccaatgacaaagaagattgaggttagctcgaaggagcatacctatgtgattggtttggaagatgaagaagagaacaagagtgtgatggttgaggttagaggacttgagatgcttgttggaaaggattttaacatgtcctggaaaatgggtatcaattaatttacatgtgagagttggtaaactattgaggaggagaatgagattatttaaaaaaaaagggtaatgttttgttcttctccatttcggattataagaaagaaaaaaagaattagaggtttggttttagattgtgtctctgtctttttattaaaagatgctttagtctgaataaaatttgaagcagaagaatggcggccgcgaaatacatgcagcccgggggatcccctagttttagaacggccgccaccgcggtggagctccaggttttggtccctttagttnnnnnngt

SEQ ID NO: 126802 - DNA, 675 bp, Arabidopsis thaliana
  unsure (1)..(675): unsure at all n locations
tatgnnnnnnnnnnnnnnnnnnnnnnnnnnnnctactttagggaaagctcggtcgcctgcaggtaccggtccggaattccgggtcgacccacgcgtccggtggtcacaagttaaagaaggtaagtttgcattgagcaaaggatgggtgattgagaaagtgagtgttttgggacttagaggagcaggacaagtgtctgagattcaaatcaatggaagtccaatgacaaagaagattgaggttagctcgaaggagcatacctatgtgattggtttggaagatgaagaagagaacaagagtgtgatggttgaggttagaggacttgagatgcttgttggaaaggattttaacatgtcctggaaaatgggtatcaattaatttacatgtgagagttggtaaactattgaggaggagaatgagattatttaaaaaaaaagggtaatgttttgttcttctccatttcggattataagaaagaaaaaaagaattagaggtttggttttagattgtgtctctgtctttttattaaaagatgctttagtctgaataaaatttgaagcagaagaagtgttacttcaaaaaaaaaaaaaaaaaagggcggccgctctagaggatccaagcttacgtacgcgtgcatgcgacgtcaagactcttctatnngcgacctaannnnnnnn

SEQ ID NO: 126803 - DNA, 628 bp, Arabidopsis thaliana
gagcttctgaaggttacgccaccgggaaactctatctagacgaagacgagcctccggaaatgaagctaggaaatggacagtccacgtacgttgacttctacgcttcggtcggaaacgggaccatgaagatgtggtcccaagttaaagaaggtaagtttgcattgagccaaggatgggtgattgagaaagtgagtggtttggggcttagaggagcaggacaagtgtctgagattcaaatcaatggaagtccaatgacaaaggaagatggaggttagctcgaaggagcatacctatgtgattggtttggaagatgaagaagagaacaagagtgtgatggttgaggttagaggacttgagatgcttgttggaaaggattttaacatgtcctggaaaatgggtatcaattaatttacatgtgagagttggtaaactattgaggaggagaatgagattatttaaaaaaaaagggtaatgttttgttcttctccatttcggattataagaaagaaaaaaagaattagaggtttggttttaaaaaaaaaaaaaaagaagggcggccgctatagaggatccaagcttacgtacgcgtgcatgcgacgtcatagtaatctatagtgcagttcaagaa

SEQ ID NO: 126804 - DNA, 713 bp, Arabidopsis thaliana
  unsure (1)..(713): unsure at all n locations
aaanntttncccccnggctttaggtccccccggaccttttgccgagcgccccngaattacctgggaatgcctncccntccttgcttctccctcggccggaaccggccatgagattggccccagttaaccaggtnagttccnttgcccaaggatggtgattgagaaagtgatttttgggncctagaggaccgggccagtgtctgngatccaatcaatggnagtccnatgncaaagaagattgaggttagctcgaaggngcatacctatgtgattggtttggaagatgaagaagagaacaagagtgtgatggttgttgttttaggacttgagatgcttgttggaaaggattttaacatgtcctggaaaatgggtatcaattaatttacatgtgagagttggtaaactattgaggaggagaatgagattatttaaaaaaaaagggtaatgttttgttcttctccatttcggattataagaaagaaaaaaagaattagaggtttggttttagattgtgtctctgtctttttattaaaagatgctttagtctgaataaaatttgaagcagtagaagtgttacttcattggcttatttacttctttgtttttaatttttttataattaattattaagggcggcccgttctagagggttcaagcttactaacctcgtgtttgcgacgtcattactcttttatagtgttacctaaaattaa

SEQ ID NO: 126805 - DNA, 676 bp, Arabidopsis thaliana
  unsure (1)..(676): unsure at all n locations
ttngctcnttccaaccttttccatcacagcgttttccaggccnagacaccctttccccgcattcttcccncngnctntgaggtcccccccnggaacttttttgccnaancggctccngaatgancttggaattgncngtccccttcnttgcttcctcccctcggtcggaacccggaccattgaagatgtggtcaccaagttaaagaaggtaagtttgcattgagcaaaggatgggtgattgagaaagtgagtgttttgggacttagaggagcaggacaagtgtctgagattccaatcaatggaagtccaatgacaaagaagattgaggttagctcgaaggagcatacctatgtgattggtttggaagatgaagaagagaacaagagtgtgatggttgaggttagaggacttgagatgcttgttggaaaggactttaacatgtcctggaaaatgggtatcaattaatttacatgtgagagtgggtaaactattgaggaggagaatgagattatttaaaaaaaaagggtaagtgttttgttcttctccatttcggattataagaaagaaaaaaagaattagaggtttggttttaaaaaaaaaaaaaaaaaaacaaagggcggccgctctagaggatccaagcttacgtacgcgtgcatgtgacgtcatagatcttcta

SEQ ID NO: 126806 - DNA, 838 bp, Arabidopsis thaliana
  unsure (1)..(838): unsure at all n locations
gaangccgggggcgttcccacgcaaattgaacccgttaaccggcgacccgaaacaatgacccggtccgtcagtttccctctcttcctcttcgccgttgtactctccctctcttcttctctcctcgccgacgatcccaaaccaatccgccgtgaggtctacgaaggaggtaagatatacgacatcagccatcgttacacgccggagattccagcttgggaatcttcggaaggattgggaaagacgttcctgcgattagccgcgagtatgaagaatggatcattcgctaacgtatcggagatgaaactatctgttcactctggaactcacgtggatgctccaggtcacttttgggataattattacgatgctggttttgatactgattcgcttgatctccaagtcctaaatggtcctgctttgttggttgatgttccgagagataagaacattactgctgaggtaatggaatcacttcatatacaaagaggagttcgtcgtgtgctctttagaacatccaacaccgacaagcggcttatgtttaagaaagagtttgattcaagctttgctgggttcatgaccgatggggctaaatggttggttgagaatacagacatcaaacttattgggcttgattatctttcatttgctgcttttgagggatcacctgcaacacacagggttatacttaaaggacgggggtataatccccagtgggaagccnctngaagcttgggattggtgttgnaggttaggnaccatacctcgggttcaattgctttncccncttgnggatttngtttgggncngangggnnccccccnccaaaggtncaatntt

SEQ ID NO: 126807 - DNA, 621 bp, Arabidopsis thaliana
  unsure (1)..(621): unsure at all n locations
acgcgtccggtaggattattatttattagctgaggtaatggaatcacttcatatacaaagaggagttcgtcgtgtgctctttagaacatccaacaccgacaagcggcttatgtttaagaaagagtttgattcaagctttgctgggttcatgaccgatggggctaaatggttggttgagaatacagacatcaaacttattgggcttgattatctttcatttgctgcttttgaggaatcacctgcaacacacagggttatacttaaaggacgggatataatcccagtggaagcgctgaagctggatggtgtggaggtaggaacatactcgcttcattgcttaccgctgagattagttggagcggaaggagcaccgacaagatgcattctcatcaagtgattcagttcttcttcttcttcttctgtgtaagttgttcagtataccaaactgataatgaataatatgcttcttactttacaagatctcagaacccatgaagcagatgtgatgattcagtttgtaaaaggaagcatacctttataaacgtgtgaatgtattatgtatgacagtatatttgtaattctgaaggacatgataataaacctagactgaaacnagcgaat

SEQ ID NO: 126808 - DNA, 958 bp, Arabidopsis thaliana
  unsure (1)..(958): unsure at all n locations
cgnnnnnnnnnnnnnnnnnnnnnnnnnnnnnnnnnnnnnnnnnnnnnnnnnnnnnnnnnnnnnnnnnnnnnnccacgcgtccggtttctgcagaggaatttgactgtgtatcacgtagcattcagtgctctcgctgatctgaaggatgtaaaagcaacggaagctcttcttgagatgcttaagaaagacggaaaagatactgacacttactgcatgctacaaatcatgaggtgctatctacattcgcaagactttgagaatggtctcaaactgtttcaagattacatgagcgcagacaaaatccctgccatggaactatacacgacgcttatagaaggagctatgacaggatacaccgataatggaatgaagattgctcaggacactctgatccaaatgaacgaacgcaatttcttcttagacccaagaactggaagcaatctgttactcaaagccgctggtgaaaagacgggagggtacacagttgcaaatatgatatgggatctgatgctagctcggaatattctaccaacactagctgctgttgaagcttactacaagggcttgaaagaacgcgaaataccagaggatgatccgagactgatgttagtgacgcgaacatacaataacttgcggcttagggaagggacattacctaataggcgttaaagcaaagggaccaagaggaagaaagatggtatcatggcttcttcgttttctacttctatttgcttattgggatctctgtgaaccatctgggtattttaaaaccagttcgtttagatgaataaggaaatttcacctagatgatgactggatattattctgatttgatttcaattacttaaccaaaaaaaaaaaaaaaaaaaacaaagggcggccgctctagaggatccaagcttacgtacgcgtgcatgcgacgtcaagatcttctatagtnnnnnnnnnnnnnnnnnnn

SEQ ID NO: 126809 - DNA, 494 bp, Arabidopsis thaliana
agcttgtcaatggcagttcttttaccaaatctaaaagcattgcttcagatttgtcatctttaagttcaatgcaatctcgagacatcgtggctgttgctagttcaaagacaaatcttggtctgtctcaagaaacaaagctgaaaactaatgcagatagagatccggtttcgtcaaatcttataatgtggaagcctgaagtaaaagattcagtcgagaagacgaatattcaactatcttcttcagatgtttcttcaagcaagaaggttcccgaggttaaaaaactcgaaagtgtatcgttagtgaagcaagaagataagggtttgaacaaaccaagcaagaagcttatagaggccgagagtgtattgttagtgaagcaggaagataagggattgagcaaaccgagaaagaagtttacagaggctaaaacccccgagagtgtatcgttagtgaagcaagaagagacgggtttgagcaaaccggaaagaaagcctaaa

SEQ ID NO: 126810 - DNA, 923 bp, Arabidopsis thaliana
  unsure (1)..(923): unsure at all n locations
aatgannnnnnnnnnnnnnnnnnnnnnnnnnnnnnnnnnnnnnnnnnnnnnnnnnnnnnnnnnnnnnnnnnnnnnnnnnnnnnccacgcgtccgctcaattcatatacaaagagtagtgtgtttttagtggaggaagaatcagattcaaaagccaaaatcaaagcttggtgatgggatctggagctggcaatttcctcaaggttcttctcaggaacttcgatgttcttgctgggcctgtggttagtctcgtttatcctctatatgcttcagttcaagcgattgaaactcaatctcatgctgatgacaaacaatggctaacttattgggtcctttattcattacttacactcatcgagctcacattcgccaaactcatcgaatggttaccgatatggtcatacatgaagctgatcttgacttgctggcttgttattccctactttagtggcgctgcttatgtctatgaacattttgtgagaccggtgtttgttaaccctcggagcattaacatttggtatgtgccaaagaagatggatatcttcagaaaaccagacgatgtgttaacagctgctgagaagtacattgcagagaatggacctgatgcttttgagaagatcttaagccgggctgataaatcaaaaagatataataagcatgaatatgaaagctatgaaacgatgtatggtgagggttatcagtactaagagaaatttgaaaaagcttttaattttagaatgtgtgaagcaacttcatgtctttgttgtttgtttatgcttcctttttgtggatctctctcgtgtaaaaaagttgctaattaaaataaagatgctttctgctccaaaaaaaaaaaaaaagcaaagggcggccgctctacaggatcccagcttacgcacgcgtgcgtgcgaagtcatagctggcctat

SEQ ID NO: 126811 - DNA, 1129 bp, Arabidopsis thaliana
  unsure (1)..(1129): unsure at all n locations
agagcccaaaacaacaacaacactcggagactttttagggctcatccccgaattatcagtgcaagtggatcgaattaaaccaaaatcaaaactaagcaacctaactaaccatatcttccgatttctcttatctctctgaagccacaaatctccagattcattcgtcgtctcggttaaggttagacggagaagaagatacaacaaatatggcggttagtatgaaacaaatgtcgttggtcgtctctgctttgggcgtcttatcctttgttttgggagttatcgccgagaacaagaagcctgcgtctgggactccaataagtggaaaaggagtagttatctgcaaatacccatctgatccaactgttgccttgggatacctttctgctgcttttctccttgcctgcactgtagcaggatacaaatccttgttcatctcttacaagggaaagtctgttcctaactctgtcttgttcaaaagcaccagcttctctgtgttcttcaacattgccttgataacatctggactggccttgtctctgttgctctggccaaccattacagaacaacttcacttgacccgtaatgttcaccgaaacttagaaaccagttgccccccggctaagaccggtctgcttggtggaggtgcctttgtgtctttggactcgtgccttttctggttgggtgctctgatgctcgcttgataacgcccgtgaagaccattttgatgaagttgcaagcagaagcatcgatgggaactcttcctccagggatgtgaatctcaagattgatgcttgagagaatgatatgcttttattggtattggggataagaagggtttttcatttgttttctacttggttgattaggaaaataataatttggttcttctggtggttttttttttttttaatgattggctagaatgttatgaaacccatctctgcaccttgatgcattgtgattcataagctggatctgtgtaaaataatcttttggttatatctcttacatttgacataattgatatgagaaagcccttccnnnnnnnnnnnnnnnnnnnnnnnnnnnnnnnnnnnnnnnnnnnnnnnnnnnnnnnnnnnnnnnnnnnnnnnnnnnnnnnnnnnnnnnn

SEQ ID NO: 126812 - DNA, 741 bp, Arabidopsis thaliana
  unsure (1)..(741): unsure at all n locations
caccgcccaaaataaaaaaaaaaaaaaaaaatcctttttttctcttcttgagagagagaaagagagagggagacaagtttgttctggataaaaagacaattcatttctattttaattgtctgcaaaattctcacgggccatcggagagaggagacagaggtggtgctgcacaagaatccttcctcctatatcctacaagactttggaatgggaagagaagttgttgaggtgcttatggaccgaaacgccgacgtttcaagcgctagagttcatgttgctcctaagatagctgcagaggagactgatgaggaatttgaagtcaaagaatgcacagaggagaagtctctttctgagaatgcaccaaatgttggatctgctgagagagttggagctcagaaatcacctaaaacccgtaatggaaatgctaaagtttcagagcagcaggatgctcctcttctcgcggtgaggaagccattgcaacccgagaacaagaagcatattgatgacgnagataattgctccattgcttcttccgttgcaacttccatgaggatgggtaagtctggattgacttatggaagtgctccaacgnttaggagtgctcaacgtgcttngaaacgcaaggagtattnccaaagctcgtggggaaaaccaagcgctttaagcttntaggaccgngctttancagaggcaaaagggtnaccaagaggagcntttagnancttngaaggatttnantgc

SEQ ID NO: 126813 - DNA, 354 bp, Arabidopsis thaliana
tgtttttggtcactctgatgctttcagtttccatggttttatgagaaaatatcattgattatggttgcttctgagattaaatccccggtgagtgtccccgagactccgggaagctcctctgtgcatcataggaagcagttgagtgtgttcttcatagaatcagataacagacgtcttgctcttggccgtggctataccggaggaaccactcccgttaacatccatggcaaacccatcgccaatctttccaaaaccggtggttggatcgcagctttcttcatttttggaaatgaaatggcagagagaatggcgtatttcggactctcggtgaacatggtggcgttcatgttctac

SEQ ID NO: 126814 - DNA, 414 bp, Arabidopsis thaliana
tttaacgattatggccaccgatggcgagagtatctcgatgtcgttggcggtggctacctgcgtcgcgatggcactattctacgttttgatcctttacgttcccaccgtgatactccgtctcccgtcggcttcttcttacaccgaattcatgattcggcgattcatctgcgcggccatttgtactgtagcatctctcgtcttcacagcttttatacttccgataaaaagctgggaggcctcttatatacttggagtttatggcataaggaaagatcatctgtggcaaggagtggtgtatcctcttctattgacctcgctcgtttatgctgggtctttggtgttgaagttgtttactctcctggaatcatggaaggaaaatggcggaggatgtagttcctttaattacatcagaag

SEQ ID NO: 126815 - DNA, 826 bp, Arabidopsis thaliana
ggcccacgcgtacgctcttcttcttcttcttcttcctcgcgacgcgttaatggcggcttcgttctcactcacgagcttcatctccttcatctcaccattcaaatctcaaactaaacctacaccaccaccaaatctcactcttccttctccaacaatctcccaaaggcgaagaaatgatctcgctatcgaatcaatggcggtcgaagaaacttcctcaaccgcttcttcactttcctctgagcttgcttccgtgatttgtccctcgcttgcttactccaacacactcttcttcagttctggatacaatgtgcaagtgtttgttgaagataatgagtcagaggagaggcttgtgaatcgatttaggagagaagtgatgagaactggtgttatacaggaatgtaagaggagaagatactttgagaataaacaagatgagaagaaacgtaggactcgtgatgctgctaagcgtaataagaaaaggcgtcctcaagcaaggtttactcaagaaacaagagaagaagcagcagcagcaactaagagtaagaaaaaagatgaggaagaagacacctgggagatgcctggtggagatgtaccttcttgaaacacgattttagtatataaaatctccggtcttttgattaaatttcgtattatcccgtttttattacttggtacattgtgagttggaaatgtgtttactgcatattataacttgcttctagtattgagttctcttaaaaaaaaaaaaaaaaaaagggcggccgctctataggatccaagcttacgtacgcgtgcatgcaacgtaatagctcgttgatagtttccc

SEQ ID NO: 126816 - DNA, 836 bp, Arabidopsis thaliana
  unsure (1)..(836): unsure at all n locations
gcgaacgaatttctcttcttcttttttttcttctttgttacacganaatggcggctacaaacgcacgcacgtttttaatatgctggggggcaccaaacaaatctcaaactaaacctacaccaccaccaaancncactcnnccnncnccaacaancncccaaaggcgaatttttttttttttttttttatcaatggcggncgaagaaaccgccgcaaccgcttattcactttcctctgagcttgcttccgggattgggccctcgcttgcttactccaacacactcttcttcagttctggatacaatgtgcaagtgtttggtgaagataatgagtcagaggagaggcttgtgaatcgatttaagagagaagtgatgagaactggtgttatacaagaattgtagaggagaagatactttgagaataaacaagatgagaagaaacgtaggactcgtgatgctgctaaggtaataagaaaaggcgtcctcaagcaaggtttactcaagaaacaagagaagaagcagcagcagcaactaagagtaagaaaaaagatgaggaagaagagcaagctgggagatgcctggtggagatgtaccttcttgaaacacgattttagtatataaaatctccggtcttttgattaaatttcgtattatcccgtttttattacttggtacattgtgagttggaaatgtgtttactgcatattataacttgcttctagtattgagttctcttaagggcatcttcatttgttttataatgtctaaaatcagttgcatttgttggggctctccatggatgctattgttaatctgattcagtgctatttctctaaa

SEQ ID NO: 126817 - DNA, 445 bp, Arabidopsis thaliana
gtctcctccacgcaattacctcttctcactctcagacattttgtcaaacagatggtgctcgtttctgaatcagcttaagaactaacaaggagacagacactaagcttggtttttctctccgattagacggaggaaaaagtgaaaacgaggggcttagacgagtgatgtgatagagatggaaggagttgagctagaattagaaagaagaagcaagttcttgaacagtttgatacagaagaagaaggctaaagaacagcaagatcagaaagatgagttcaatgttcgtgttagggcttcagatatgcctttgcctcaacagaacagagcctttagtttgtcgcgtgagattttgaatgctactccagggaaggctgataacaaaagactcgctcatgccctaaaaaaggacttcgattcagcctacggcccggcatggcactgcatt

SEQ ID NO: 126818 - DNA, 547 bp, Arabidopsis thaliana
  unsure (1)..(547): unsure at all n locations
cgnnnnnnnnnnnnnnnnnnnnnnnnnnnnnnnnctttataaaagcttatcgctaatttgacagaacactagaacagttctctctttttgtcgacagtcttcttcttcttcttcttcttcgattggatctggaactgaactcaaattgggaagaattttgacatggaggaggaccggtgttcgatcaaggatgatgcaactcaattgataggtaacaccccaatggtatatctgaacaacattgtggatggttgtgtagctcgtattgcagctaagcttgaaatgatggagccttgctctagtgtcaaggagcgaattgcttatggtatgattaaagatgcagaagacaagggattgattactcctgggaagagcacactgattgaggctacctctggtaacaccgggattggtttagccttcatcggtgcagctaaaggttacaaagtggtcctcacaatgccctcatcaatgagccttgagagaaaatcatcttttagcattaggtcggcggtcccctaacantcctgnaagngtnaggatatgc

SEQ ID NO: 126819 - DNA, 332 bp, Arabidopsis thaliana
cccacgcgtccgcggacgcgtggggtgacgagcctcttgttgtttttggttatcagattgatgatcggacggttcttattggtttatcggttttgacggttgtgatgcttttgttgactcacgctacttcgaatattctgggatctttgttaaccgccgccgtgttggttctgattcatgcggcggttagaagaagtgataatttgtttcttgatgaagaagctgcggcggttactgaagcttcagggctgatgtcatacccttcgtcgtaaatccaaaaatttgttttttttttttttgtatgttactgagtttggtgcgatttgagaaaa

SEQ ID NO: 126820 - DNA, 814 bp, Arabidopsis thaliana
  unsure (1)..(814): unsure at all n locations
nnnnnnnnnnnnnnnnnnnnnnnnnnnnnnnnnnnnnnnnnnnnnnnnnnnnnnnnnnnnnnnnnnnnnnccacgcgtgcgctctgtgcgagctctctcctctcatcaatggaatctctcatcaatcccagccatggcggaggaaactacgattctcactcttcttctctcgatagtctcaaaccaagcgtactagtcatcattctcattctcctcatgactcttctcatctccgtttccatttgcttcctcctccgctgtctcaatcgctgtagccaccgctccgttctccctctttcatcttcctcttccgtcgcaaccgtaacttccgattcccgacgattctctggacatcgagtctctcccgaaacagaacggtcctccgtgcttgattcgcttccgattttcaaattctcctccgtcactcgccgatctagctccatgaattccggagattgcgccgtttgtttgtcgaaattcgaaccggaggatcagctccgtcttcttcctctctgttgtcacgcttttcacgccgattgtatcgatatctggctagtctctaaccagacttgtcctctctgtcgctctcctctcttcgcttcagaatctgatctcatgaagtctctcgccgtcgtcggntcaaacaacggcggaggagaaaacagctttccgtctcgaaatcggatccatnagccgtcgtcgtcaaaaaacgattcagaatccggttgagcagaatgaacttactaaacgggtcgtcgnttanataggngcgcgggatcagaattnagggaaattaacgngaaaaggagngggg

SEQ ID NO: 126821 - DNA, 499 bp, Arabidopsis thaliana
  unsure (1)..(499): unsure at all n locations
gaaggttgcagctgctccggtgtccattaaggcggtggcggcgtctgcggtgcatcccgcgtctgaaggagggaagaggattgtggcgtctccttatgctaagaagttagctaaggagttgaaggttgaattggctggtttagttggaagtggaccgatgggaaggattgtggctaaagatgttgaggcggctgctgctggaggaggagttcaagctgctgttgctgttaaggaggtagtggcagctcctggtgtggagttgggatcggtggttccttttacgacaatgcagggggctgtgagtacgaatatggtggagagtcttgctgttcctacttttagagtcggttacacgattagtacggatgcccttgatgctctctacaagaagattaagtcgaaaggtgtgacaatnacggcactcctagcaaaggcaactncacttncnctggcgaaacatccagttgtaaactcgtcctgtagagatggtaacagtttt

SEQ ID NO: 126822 - DNA, 511 bp, Arabidopsis thaliana
ggaaagctggtacgcctgcaggtaccggtccggaattcccgggtcgacccacgcgtccggggacgcgtgggattttacaaaatagagagaataatgaaaaaaccctagcctgccccgccgtggaggagaattacaccacgacgagctcgtaatcgccgctgggtttctatgtttacatcgctaagagattaaccatcgagcgtgatttggtattggggttaggtaaatttggggatcaagcgaacagtatcatttggaaatgacgaaagtagttgctaagaggaagacgccttctgaactgagaggagaacaattgaaacggactgcttttgtggaccaagctaaagaaccttttgatgcattgcctccttgcaaaagtgcttgagagagaaaatggggtcaaggaaatcagtagctttcggaagaatccaaaatacattgggatgcgcgatggatgaaactgtttcctgggcaaaaagcgctaggccttggatgctctctggcaaaggaa

SEQ ID NO: 126823 - DNA, 699 bp, Arabidopsis thaliana
  unsure (1)..(699): unsure at all n locations
atgactnnnnnnnnnnnnnnnnnnnnnnnnnnnnnnnnnnnnnnnnnnnnnnnnnnnnnnnnnnnngaccacgcgtccggccacgctgcatatttgcagagctcgagattctccttccctatacaactctcatctgtaatcgatacagatggcagcttcatcagcttgtcttgtgggaaatggtttgtcagtgaacacaacaaccaaacagaggttaagtaaacatttttccggcagacagacaagcttttcttcagtgattaggacatctaaggttaatgtagtgaaggcttctttggatgggaagaagaagcaagaaggaagaagagattttctcaaaatcttgttaggaaatgctggggtcggtttggttgcaagtgggaaagcaaatgctgatgaacaaggtgtttcttcgtcgaggatgtcgtattctaggtttctagagtacttggataaggatagggtgaataaagttgatttgtatgagaatgggactatagctattgtggaagctgtttctcctgaattgggtaaccgggttgagagagtacgtgttcagctaccgggtttaagtcaagagcttctacagaagcttagggctaagaatattgattttgcagcacataatgctcaggaagatcaaggttctgtgttattcaacttgattggtaatcttgcttttccggcgcttttgattgg

SEQ ID NO: 126824 - DNA, 888 bp, Arabidopsis thaliana
  unsure (1)..(888): unsure at all n locations
gccnnnnnnnnnnnnnnnnnnnnnnnnnnnnnnnnnnnnnnnnnnnnnnnnnnnnnnnnnnnnnnnnnnnnnnnccacgcgtccgctctttctttatatgcatgtttggaagcgtttctacgcgaagagcctttggtacctgacgaaatgtggttctgtccacaatgcaatgaaagaaggcaggcaagcaaaaagcttgatctgtggaggcttcctgaggtcttagtcatacatctaaagagattctcatacagcaggtccatgaagcataagttggaaacatttgttaactttcccattcatgacttagatctaacaaagtatgtagccaacaaaaacctatctcaacctcaactatatgagctctatgccttgaccaaccattatggtggtatgggcagcggacactacactgcacatatcaagcttttggacgacagtaggtggtataacttcgatgatagccatatatcacacataaacgaagatgatgtgaagtcaggtgctgcatatgtgctcttctacaggaggaagtctgatgcaggcggaaaaatgacataagtctgctcaaaacgacaatctccgaggttccagtagtaatctctacacagctgtctgcaacttggaacccataagagtgacaattaggtttagatctattgtaaattagtggagttgggttctgagtagtttaattaacagagatgaatattgtctctccttctctgtcagtttctgtatagattgtgtttggcataatagcagtactgttattgtcactgacacataaaaaaaaaaaaaaaaaagggcggccgctctagaggatccaagcttacgtacgcgtgcgtgcgacgtcatactcttctatagtnnnnnnnnnnnnnnnnn

SEQ ID NO: 126825 - DNA, 710 bp, Arabidopsis thaliana
agttattgagcaatagtctaatgttccttcctctgctggctttggctttaaccgcagtttcgtcgcttaaatacagcagaaatgacttccctccaggctttgtctttggctctggcacatcagcttatcaggtggaaggagctgctgacgaagatgggagaactcctagcatttgggatgtttttgctcatgccggacactccggagtagcagctggaaatgttgcatgtgaccagtatcacaaatacaaggaagatgtgaagctcatggcagacatgggattggaggcttacagattctctatatcctggtcaaggcttttaccaagtggaagaggaccaatcaatcccaaggggctacaatactacaacaatcttattgatgaattgatcactcatggaatccagccacatgttacattgcaccactttgatctcccacaggccttagaagatgagtatggaggttggctcagccaagaaatcgtgagagacttcacagcttatgcagatacttgcttcaaggagtttggagatagagtgtcacattggactactataaacgaggtcaatgtgtttgcccttggagggtatgaccaggggattaacaaccgcctgctcgatgctctcctccatttggacttaattgtaccaaaggaaactcttccattgagccttacattgccgtacacaacatgttgctcgcacacg

SEQ ID NO: 126826 - DNA, 511 bp, Arabidopsis thaliana
  unsure (1)..(511): unsure at all n locations
tataatatcacaggcggattcagacaaagatagacgtttgactttggcagagatgattgagcatccatacgtcttctacagtgccattttcgatgaagatgacactgatgatgattatggtttccacgatgaattccgctagttttataatttaggaataaacaacatcaggctcagttcaatatatcctcaaggaacattcctcacaaaacagagtccagcacgaatctctctcacgtagatcatctggtgatttagaagttagaagagtatttatgattctgaacagctaaaagaaacatacttttctttggatcttgttcaatcaattatagatggctttctccatttctgtatgtttaatttaacacctttgaagctcaatcttttataagcaaagctctatgaagtaaacagntgttatgcaaaaaaaaaaaaaaaaagnnnnnnnnnnnnnnnnnnnnnnnnnnnnnnnnnnnnnnnnnnnnnnnnnnnnnnnnnnnnnnnnnnn

SEQ ID NO: 126827 - DNA, 762 bp, Arabidopsis thaliana
  unsure (1)..(762): unsure at all n locations
ctatacgactatattgggaagctgggacgcctggcaggtccgggtccggatttccgggttcgaccaacgccttccggccacacgctaaaacacacaaacaaaaaaacaactcttcaagaacatatacatttaatatttatataaacaaaaaagaatggatcttgatttaatacaagatctgcccatcttgaatttcccaccagccatcaagatccgagccaacaccaacagagatgatgacggcggcggctgcaccactcccacttcttccgaccacaagattcctcccaccacagccaccactcctcctcctccaccgcagaaaccccgtccaccttccacaccgtcgtctctcggcatcagatcttgcaagagaaagcttatgacgtcattgtccaagtatgagatcatcgtcaacaaagatgagatcgagcggttcttctcctctgtttacaaccaaacgatggcgtcatccaccacgacggctatcacggtggccaagcggcgaagaagtttccgttcttgttcacgaagatgatcaataattggacgtttcattaaaggttccataatttcgaatagctttttcgatttttatttatttttatgtaatgtttttatcaactttacacgtcgacccactctataaatatacatgtgcgatcgatcgatggaaaaaaaaaaaaaaagnnnnnnnnnnnnnnnnnnnnnnnnnnnnnnnnnnnnnnnnnnnnnnnnnnnnnnnnnnnnnnnnnnnnnnnn

SEQ ID NO: 126828 - DNA, 892 bp, Arabidopsis thaliana
cttttgattgggcactcgggcccccccctcgaggtcgacggtatcgataagcttgatatcgaattcgcggccgcctttttctgggttttgttgttcttctttgactttatgggttcttttgttttagatttaggctcctacagatctgcttaaatctctgtgatcttgtctcttaattcttctgtttacccgtaatttccggaggattctcttcttgcttttccctgagcttctggatttggtcagagaagccttaagttcaaaaggatttggcttttgaagattggtgttaattaagcttctgggttttcatcagtttgtctaaaagtgagtggagtctctcatcttagtctgaagctcttttttttggatttgagcatttctggtttgagaagaatcttgtggaaaccaaagagaaatgtcgtttcgaggcattgttcaagatttgagagatgggtttgggagcttgtcaaggaggagtttcgattttaggctctcgagtcttcataaagggaaagctcagggttcttcgttccgtgagtattcgtcatcccgtgatctcttgtcgcctgtgatagttcagacaagtagatgggctaatcttcctccagagttactctttgatgtgatcaaaagattagaggaaagtgagagtaattggcctgcaagaaaacatgttgtggcttgtgcttcggtttgtcggtcttggagagctatgtgccaaagagattgttttggggcctgaaatctgtgggaaactcactttccctgttttccttaaacagccagggcctcgtgatgcaatgattcagtgtttcatcaaaagggataaatcaaagctaacatttcacctttttcttttgttaagtcccgctctattagtggagaatgg

SEQ ID NO: 126829 - DNA, 507 bp, Arabidopsis thaliana
  unsure (1)..(507): unsure at all n locations
nnnnnnnnnnnnnnnnnnnnnnnnnnnnnnnnnnnnnnnnnnnnnnnnnnnnnnnnnnnnnnnnnnnnnnccacgcgtccggaaagtaatgcagctgaaagtcgttctcctatatgtcatcttccatcagaatctgttggagaaggtcacctaagtaatgatgagatgggagttgatgtaggaacaccggacaatgtagaatcagggatgactgggagaagcaacgaagatgaaagaactctgtccaagtctcttagttttggattgattctgaaaaagttgatcgacctgggtaaagtggatgtgaaggatgtggctgcagagattgggattaatcctgatgctttgagggctaaacttacggacggagacttgttacctgatttactaggcaaagtagttaaatggcttagccagcatgcacacttgggttcttcggataaaggcaaaaatttaaaacgtaagaccactactaaatctgagcgtcgggcagctatctgtactgaa

SEQ ID NO: 126830 - DNA, 547 bp, Arabidopsis thaliana
acgactcactattgggaaagctggtccgcctgcaggtaccggtccggaattcccgggccaaaaccaaacacagaaacaaaaatctaaatttctttcttggtctgctttcaatatggctcctctacctatttcttcgattagagttgggaaaatagatgatgttcaagaactcataaaatccaaaccaaacaaagttccagagagattcattagagaagagtatgagagaggagtcgttgtgtcgtctcttaagactcatcatcttcatcatcagattcctgttattgatctctctaagctctctaaacccgacaatgatgattttttctttgagattcttaagctctcacaagcttgtgaagactggggatttttccaggttataaatcatgggatagaagtggaggttgtggaagatatagaggaagtggcttcagagttctttgatatgccattggaggagaagaagaagtatccaatggagccaggtaccgtacaaggttatggtcaagctttcatattctccgaagatcagaaacttgattgg

SEQ ID NO: 126831 - DNA, 287 bp, Arabidopsis thaliana
aatttctcaatctcttcttcaacttttttttttaacgatggcttcagaggatcaatcggcggcgagatctaccgggaaggtgaactggttcaacgcttctaaaggctatggtttcattactcctgacgatggcagcgtagagcttttcgttcatcaatcttcaattgtctccgaaggttaccggagtttaaccgtcggcgatgcggttgagttcgctattactcagggaagcgacggtaagactaaagccgtcaatgttactgctcctggtggtggttctctcaaga

SEQ ID NO: 126832 - DNA, 540 bp, Arabidopsis thaliana
tttttaggccagtttcaatagaaaatcttcgggcctttcaaaaccttcaagtggttaatttgcagttttttccccccacccccaggaggtagcgaaatgccacatagagacccagattgtgtgcctcccccccaagggaggatagagtcaagcttcgcccatttagctgttcataaaccaaggagccaaacccatggtcccaatgaagaagaagaagaagaagaagaagaagaagatggtaatatcaatgggaaccggagactatcttggcctccttctgtaaaaaagagtagcgtttaaacagttgcttttgtctttgcttgagctttttaacacccctcgtgttttgtttcatcagcattagtgttctttatggatttacttatttctatttgatagtctttgagtgaaacttaaaccacgtgtatattttgttaacactggttttcatggtccatgtgactatcatacaaaaaaaaaaacaaaggccggccgctctagaggatccaagcttacgtacgcgtgcatgcggcgtcatag

SEQ ID NO: 126833 - DNA, 707 bp, Arabidopsis thaliana
  unsure (1)..(707): unsure at all n locations
nnnnnnnnnnnnnnnnnnnnnnnnnnnnnnnnnnnnnnnnnnnnnnnnnnnnnnnnnnnnnnnnnnnnnnnnnnnccgcgcgtgcgcggacgcgtgggtttatatataacaatctggatccgccaccgtcgaattaatctccggaaagctcgtcgaaagatgtcgatgggaggcgacacgacgtgggttgggaagaagccgatcagacgcatcggtggattatctgatgctctctctatcgcctccgatctcggtttcgccgtcgctcctcctccgtcgcaggaagaattacaaagctttgcgtcttcgaatggggaaagaggtgatgatttgataagggtattgagagagttatctgttgttcaaaggaaaattgcagacttgcaggtcgagcttcaagggaggaaggatgataaaaatgtggcgcatttgactcatgttggtgaaatgcaaaagaaaatcgagactttgtcaaggattactcaaatattgaaagatgttatacaaaacaaggatcgcattattgctcgtctccaacaacaccaggaggtaacgaaatgacacatagagactcagattgtgtgactccacctcaagggaggatagagtcaagcttcgacgatttagctgttcataaaacaaggagacanaacaatgatcaaaatgaagaagaagaagaagaagaagaagaagaagatggtaataac

SEQ ID NO: 126834 - DNA, 451 bp, Arabidopsis thaliana
cctatttcctattatataatctctccgaccatcataatttgaccgttggagaacattactacttttcgcaaaagaagggaaaaaaaaagagagagataaagctctcttcgattcttttgcaatcttctctcctacggttgtttcaatctccgaccaaaccgtgctttcgaatagaacccagaaatggcatcgccacagagtaccaaaaccggtttgaatcttcccgcagggatgaaccagacttcgttgcgtttagaaacgttttcgagctcatttcgtgggatttcgagtttatcctcgccgtctaaatcgacttgcagcgacagattcataccgtgcagatcttcttcgagactccacgctttcgatctgcaggataaggaaccgactaccccggttaaagagggagggaatgaagcctattctagacttttgaaatctgagcttttcg

SEQ ID NO: 126835 - DNA, 650 bp, Arabidopsis thaliana
  unsure (1)..(650): unsure at all n locations
nnnnnnnnnnnnnnnnnnnnnnnnnnnnnnnnnnnnnnnnnnnnnnnnnnnnnnnnnnncccacgcgtccggaccccgcggcttcacttgtttctctcccaaagtttcttcatcatccttgcgataaagaaaacaacaatcggctgtttcgtttcgatccaaagatgagtgaagaaactaaagataaccagaggctgcagcgaccagctcctcgtcttaacgagaggattctctcatccttgtcaagaagatccgtagctgctcatccatggcatgatcttgagattggacctggagctccacagattttcaatgtggttgttgagatcactaaaggaagcaaggtcaaatacgagcttgacaaaaagacaggactcatcaaggttgatcgtattctctactcatcagttgtgtaccctcacaactatggttttgttcctcgcacattgtgtgaagacaatgaccccattgatgtcttagtcatcatgcaggaacctgtgcttccgggttgttttctgcgtgccagagccattgggttaatgcctatgattgcccagggtgaaaaagatgccaagatcatttcagtgtgtgttgttgacccttcaaaggctccctgcatnaaggcttcnnctaccggtttttgaaanntc

SEQ ID NO: 126836 - DNA, 568 bp, Arabidopsis thaliana
  unsure (1)..(568): unsure at all n locations
caggaacctgtgcttccgggtttttttttgcgtgccagagccattggattaatgcctatgattgaccagtgtgtgttgatgatcctgaatataagcactaccctgccatcaaagaacttcctcctccccgtctctctgaaatccgtcgtttcttcgaagactccaagaaaaacgagaccaaggaagttgcagtgaatgattttctgccatctgagtctgcggttgaagctatccagtactcaatggacctctatgctgaatacattctccacaccctgaggcgttgaagcttctcctcagaagatttctgcagcatctatgtttctgttacttttcattgataataagaagcatatgatcctaattgatattacttttatctctgcatttttcttccttatcatttggtccttctgtaatttcgttttaaagaccctttcttggcattgaaatttttggtttaaaaaaaaaaaaaaaaaaaaaaaacaccaagcnnnnnnnnnnnnnnnnnnnnnnnnnnnnnnnnnnnnnnnnnnnnnnnnnnnnnnnnnnnnnnnnnnnnnnnnnn

SEQ ID NO: 126837 - DNA, 607 bp, Arabidopsis thaliana
  unsure (1)..(607): unsure at all n locations
gggggacaccncaacnggncatnntaccccnggttttnccccttggcngccccaaaccggaagaccnccagaatnggnggggaaccancccttaaggggttattccccgagtccaatgagagggatgaagaggaagcaaatgggttaggaacccacatattgaattggacttctggaggaagcagaggatccactcgaacccgggaaggcagtgggaagagtggtgggtctcgtcaccggttttattatcatcaaggaggtggtggttcgtatcatgcccgacgaaagtaacttcatccggtttagggggaaaatttgataatcttgcctgtgtcaaaagcggtaatagttggctttttgctacggctgaaaaggacaattcacaagaaatctcatgagtttctgtgacaaaagttgatgtattcgacttcacattctgtagtgttggttaagtaaatctctgtgtgtgaccctttttgtccagcttggttaaatcttgcatttaatgattatttagcatcattcacaaaaaaaaagggcggccgctctagaggatccaagcttacgtacgcgtgcatgcgacgtcaannnnnnnnnnnnnnnnnnn

SEQ ID NO: 126838 - DNA, 647 bp, Arabidopsis thaliana
  unsure (1)..(647): unsure at all n locations
acgaggtagaccggcattgaacatgacaataccgatgagtgtttttgaaggatctggaaaagatcatcatcattttgggcgggtagtaggtgaaaacggtgaagaagtgttggatgaagagaatggagagcaaagagaggttcaagtgaaggtcctagtgaagagaggaaacaaacaacaaacaaggcaaatgctaatcccgagtgattgtgctctagtgcagagcacaaaacagaaagaagctgcagaattggaagagaaacaagacataaagaggttagtactcgagtacaatgagagggatgaagaggaagcaaatgggttaggaacacagatattgaattggacttctggaggaagcagaggatccactcgaaccggggaaggcagtgggaagagtggtgggtctcgtcaccggttttattatcatcaaggaggtggtggttcgtatcatgcccgacgnaagtaacttcatccggtttagggggaaaatttgataatcttgcctgtntcaaaagcggtaatagttggctttttgctacggctgaaaaggncaattcacaaggaatctcatgagnttctgtgacaaaagttgatgtattcgncttcacattctgtaggtgttggttaggnaatcncttgtgtgt

SEQ ID NO: 126839 - DNA, 389 bp, Arabidopsis thaliana
  unsure (1)..(389): unsure at all n locations
nnnnnnnnnnnnnnnnnnnnnnnnnnnnnnnnnnnnnnnnnnnnnnnnnnnnnnnnnnnnnnnnnnnnnnncgacgcgtgcgcggacgcgtgggccggtgacgagacccaccactcttcccactgccttccccggttttattatcatcaaggaggtggtggttcgtatcatgcccgacgaaagtaacttcatccggtttagggggaaaatttgataatcttgcctgtgtcaaaagcggtaatagttggctttttgctacggctgaaaaggacaattcacaagaaatctcatgagtttctgtgacaaaagttgatgtattcgacttcacattctgtagtgttggttaagtaaatctctgtgtgtgaccctttttgtcaaaaaaaaaaaaa

SEQ ID NO: 126840 - DNA, 530 bp, Arabidopsis thaliana
  unsure (1)..(530): unsure at all n locations
nnnnnnnnnnnnnnnnnnnnnnnnnnnnnnnnnnnnnnnnnnnnnnnnnnnnnnnnnnnnnnnnnnnnnnnnnnnnnnnnnnnccacgcgtccgaatccagggccttccccggcaccagagcctaagccatgtccgagtccagggccaaaccccgcaccagcgacaactaagaggacacataacactacgtttccggcgatcttcgcctttggggattcgatcttagacacaggaaataacgattatattttgaccttgatcaaagctaattttcttccatatggcatgaattttccagataaagttcccaccggcagattttgcaacggcaaaatcccttcggactttatcgcggattatataggagtaaaaccagttgtaccggcatatttgagaccgggactgacccaggaagatttgctcactggtgtatcctttgcttcgggtgggtctggctttgatcctttgacacccatcgtagtaagtgcgatcccgatgtcaaaacaattgacatactttcaagaataca

SEQ ID NO: 126841 - DNA, 440 bp, Arabidopsis thaliana
cccacgcgtccgatctcactgaaactagagagaaaaccaaatggcggctactccaatcagagttatagtctcagctcttgtgatcctctcggtattactactttcctcgtctctgggagtcgccacagagacagaaattgagcggaacgagacagaggtgcggctgatgtacgagcaatggcttgtggagaatcgaaagaactataatggtcttggagagaaagagagacgattcaagatcttcaaagacaacttgaagtttgtcgatgaacacaattctgttccggatcggacttttgaagtagggttgaccaggttcgctgatctaacaaatgaagagtttagagcgatttatttaaggaagaagatggaaagaactaaagattcggtgaaaactgagagatatttgtacaaagaaggagatgttttgcctgatgaag

SEQ ID NO: 126842 - DNA, 500 bp, Arabidopsis thaliana
  unsure (1)..(500): unsure at all n locations
caatgcgnttgcaagttgaagaagcaaacgctgctgtaattagagagcgggaggctgcaaggaaagctattgaagaagcacctccagtcattaaggagactcccgtattggttgaggatactgaaaaaatcaattcattaacatcagaggtggaagctctaaaggcttcgcttcaggctgaacgacaagccgcagaaaatttgagaaaagctttctctgaggcagaagctagaaattccgagctggcgacagagcttgaaaatgctacaagaaaagcagatcagcttcatgaatcagtacaaagactagaagagaagctttcgaattcagagtcagagattcaagtaccccgtcaacaggcacttgctatttcgccaaccagcagaactatggccacacgatcaaaaacaatgcttttaccgggacctccggggtggggatttttttttggggggccaaggtttcnccgggcaatttnntttttttggggccnagnnttt

SEQ ID NO: 126843 - DNA, 677 bp, Arabidopsis thaliana
atgtgactcctttattggttgaggatactgaaaaaatcaattcattaacatcagaggtggaagctctaaaggcttcgcttcaggctgaacgacaagccgcagaaaatttgagaaaagctttctctgaggcagaagctagaaattccgagctggcgacagagcttgaaaatgctacaagaaaagcagatcagcttcatgaatcagtacaaagactagaagagaagctttcgaattcagagtcagagattcaagtactccgtcaacaggcacttgctatttcgccaaccagcagaactatggccacacgatcaaaaacaatgcttttaccgagaactccagagaatggaaattatcttaatggaggaacaaagactacaccggacatgactcttgctgtacgggaaccagagtctgaggagaaaccacagaaacatctgaatgaaaagcaacaggaaaaccaggatttactagtcaagtgtatttcacaaaatcttggatacaatggagacaagcctgttgctgcatgtgtcatatacaaatgtcttcttcactggagatcatttgaagtgggaagaacctagcggctttgaccgtatcatttcaaacaaatagcttacagcccattgaaggggcccagttaacaatggggggtttttggcgtattggttatctaattc

SEQ ID NO: 126844 - DNA, 883 bp, Arabidopsis thaliana
  unsure (1)..(883): unsure at all n locations
nnnnnnnnnnnnnnnnnnnnnnnnnnnnnnnnnnnnnnnnnnnnnnnnnnnnnnnnnnnnnnnnnnnnnnnccacgcgtccggctactcaaaggatgttcataccgagctgattcaacataaacgagcttggatgataaaacgtggtattgtcaaagggaagctctctgtagactcagccgagcaacgcctcgcggggttatgtcctcttatgccagaagaagttggtattcttttacgagcttatggatactcatgggatacaatcatatatgtcgctgggggagaggtttttggtgggcagagaacgttaattcctttacatggtatgtttgagaatgtcgttgaccgtacttctctaagtactagctgggagcttgctaaaatgtatgggcgtgaggcaaagcataatgatatcaagaaaatgacacctccttcgatcgaggtagaaacgaaacatgattcattgaaaagcacaagacanagacctcaaccgcttncacctncaccagctagaccaaagtactacaacatcgaaggttggtggggttgggtagccgagagtgacaacgagcccgaaagcacgggtattgagttgagaactaatgcccataagtttggtgtgggaagcgatacattacgttgttagcgtggaagcagatgtgtttatctcgggttttgatcgcgatgggaaaggacatccgagtttcgctagtttggtcatgggacaccggctttatcagtctgcttctgctagaacatttagaccagacaggaaacaaattgcaatgcttttggaagagattcgagaccatatgtacgacgcgaatcacacttggataacatcagttaggaagctactaaagagaagcatactcgagggt

SEQ ID NO: 126845 - DNA, 641 bp, Arabidopsis thaliana
cagcactatccactactatagggaaagctggtacgcctgcaggtaccggtccggaattcccgggtcgacccgcgcgtccgcccacgcgtacgcccacgcgtccgcggacgcgtgggtcctcactcactcttcttccccaaaaaaaaaacaagacagaggaagagaatcacgaaaccatagtcccaaacccttcgaatctataagcatttctcaaacacaatcaagaaactgtgtttagcttttagatttctacaagcatgtaagacgagattttgtttcttttttttctgcatggtggatcgaacggtgagaatggggacggaggtgaagtcgattagggttccaagaagggtctggtttggatcacaaatatctatagttctcctcgtgggtggaaaccatacctcctccaggttttgtactcgctagattcttcgattttctctttgcgattcttctttgttcttaagatctgtctagcagatccgactagacattaatcatattttaagattccatcggagctgaagtatttgaagaaatcagtgggtataaagatcttgaagcttgatatcttcccgaggatctacgaataagcatgctctgttccgggctctcatcatcggctctgctctatctgg

SEQ ID NO: 126846 - DNA, 410 bp, Arabidopsis thaliana
ctctgtttatggaatctctccgctatctccctcagcgcctgcttatcaatccggtccatcttctaccggtgtttcaaataaggaacaaacttttcctcagcgacctgaacaacctgagtgtcaatactttatgagaaccggagattgtaaattcggaacctcttgcagattccatcatcctatggaagcagcatcgccagagggcgcagtgccatgcactcactttgcgcaacacggtatttgcaagtttgggcctgcctgcaaatttgaccactccttgggctcttcttcactaagctacagcccatccccttcttcactcacggacatgcccgtcgcaccttacccctcctcgctcggcacattagctccatcatcctcatctgaccaatgcactgagcttatctctt

SEQ ID NO: 126847 - DNA, 879 bp, Arabidopsis thaliana
ccagataatgatgtttatgatttcagagagatgtttgtttctcctccggatacagatatttactcaattccgagagttcttgcaccgatgcctcaaaagtatattcgatgtgcaatgagtgactatggatgttacaatgtcactgaaccacctattgatgcccccagagatccactgtacaaatctgagagggagatatccaaggttttcttgacaaaacattaccggaacagaaggacaaacgatccagaatttgtgctagatcttgaagagatatatgttattgattccaagacaaagtcaatcaccagagccagagttctggtgacagttccgggaggaagaaaaagggataggaaggatgacttgcttgtgatacgagataatggaacctcctttaagatcatacacgtggtgaaagagatgacccaacaacggtaatagaaagagaagagtggaccaagactagagaagacatggagaaacatctcaggaagctacgagacttcagtgtctcaaattggttctagaagaactcgagagacaccaaacgacaagtcagcataactttcttcctgagatggaaaacgagagcagatgatctaaatcgatgatatggtggagggtatacaattttggtgacctcaggttctgcactagcagcagagatggatgtgttattagatgaatatgggcctctagaaaaaagtgtgtagatgcaatagtttgatggactaacattcaatgactagagaagctagcttatttgcaagttttgaggtgtttaattcaagttttcaattgatgattatgatggcctgtattattcttgtaatgagatattttcatattccagattggaacaaagtgtttgtattt

SEQ ID NO: 126848 - DNA, 551 bp, Arabidopsis thaliana
  unsure (1)..(551): unsure at all n locations
nnnnnnnnnnnnnnnnnnnnnnnnnnnnnnnnnnnnnnnnnnnnnnnnnnnnnnnnnnnnnnnnnnnnnnnnngccgtgcgggcgcccacgcgtccgcagatagtgaagcgacttcatgcattgagctaccacatgaggagctacttttggctagacttgaagcagcttaatgacatttaccgatataagacagaggaatactctcacactgctgtcaacaagttcaacgtaatccctgattctcttccagaatgggttttcgactttatgccgcctcacggagggttctttattggcaacgttagccctgcaagaatggatttccgttggtttgctttgggtaattgtatagcaatattgtcttccttggctacacctgaacagtcgacagcaattatggatctgatagaatctccctggggaagagttggtttggagaaatgccactgaaaggttgctatcccggccttaaaaggcctgaagtgagaatagtaacctgggtgggaccccaaaaaccactcgggggagctaccacaatggaggatccggg

SEQ ID NO: 126849 - DNA, 1102 bp, Arabidopsis thaliana
  unsure (1)..(1102): unsure at all n locations
caaaaaatagtaaattgcaaaagaaagaaaatcgaaaaggttgtttgtaaaataattacaaaacataattagtggtgagaataaatctaaatataaggtacaagggggtgaaggggtgtgtgtctatatatgttggatgattagtttctgccatgtgctatggaatcaacctcttatgctttatgttctgtttagctcctaccttatactataactttaattattcatcaataattctaattctccttcgttttttaatatactagtgtttcatataaatactcgctctctctactcattccctccataacatatatttcttcttcgtttcattcataatcgtcttataaccacagattctaaaacatgggagaagaagtaaaaccagaggcaaaggaggcagcctctgctccacaggccgtccccgctgaggaggaggagaagaagaaagatgtagcggaggagaagaaagtggcggctgaggaggagaaaccaaaggaggaagaggagccgcaaccaccaccaccgcctccacccttcatactctacgtcgacttgcattgtgttggatgcgctaagaagattgaaagatctattctaaaaattagaggtgtggaagaagtggtgatggatatgaatgagaaccaagtgacgataaagggagtgttggatccgcaagcagtgtgcaacaaaatcaagaagaagactaaaagaatggccaaagtcctctcgccgcttccggcagctgagggagagcctctgccaccaatcataacctctcaggtctccggcggcctcaccaccgtcgagctcagcgttaacatgcactgccaagcttgtgctgaccagctcaagaagaagattctcaaaatgagaggggtccaaacaactgtgacagagcacaccacgggaaaagtaatagtgactgggacaatggacgctgagaagcttgtggattacgtctaccgtcggaccaaaaagcaagcccgaatcgtaccccaacctgacccggaacctgaagcccccnnnnnnnnnnnnnnnnnnnnnnnnnnnnnnnnnnnnnnnnnnnnnnnnnnnnnnnnnnnnnnnnnnnnnnnnnnca

SEQ ID NO: 126850 - DNA, 487 bp, Arabidopsis thaliana
  unsure (1)..(487): unsure at all n locations
agaaatccctaagctcaagacgagttttcatttctcgagcaatttcactcttccgagaacaaccctagattccgatgatgaggggtctcgtttccggcgccaagatgctatcatcaaccccatcgtcgatggcgacaagcatcgccactggtagaagaagctacagtctgattccgatggttattgagcactcatcgcgaggagagagagcttacgacatcttctctcgtttgctcaaggagcgtattatctgcatcaacggtcccattaatgacgacacatctcacgtcgtcgtcgctcagcttctttacctcgagtctgagaatccttcgaagccgatccatatgtatctcaattcccctggcggccatgtcaccgccggtcttgcaatttatgatactatgcagtacattcgttctcctattagcacaatttgtttgggtcangntgcatcaatggcttctcttctgttggcagcgggtgccaa

SEQ ID NO: 126851 - DNA, 426 bp, Arabidopsis thaliana
gcgctttacagtgaaggagttcccggactaaaatgcggatgatgaggatgagactactgaagaaactactgaatcgctggacagcctatccacatgacacataaaaggatgtctcctgagcacatgtgggacttcccttacagtattccttcttcgtgaaacttcccccttatataagactactgaaggtgcaagcaccgttgtaagatctgatgaagaagcttggaatggagacattcgggagagcagagaatatggaaaagctttatttttgtcagcaaaagattttgtgagtgggaatgatactgaagagtgaggagagagtggtgtaaagacggagggaagaaggaagcgaaagcagtgttccaagatggatgtctctgtttctgacaaaagctttgcatattctgagccaaagactaagca

SEQ ID NO: 126852 - DNA, 429 bp, Arabidopsis thaliana
cccacgcgtccgggaagatcaaatcgggcaactgttatctgcattttggatacaatcagcacttcctgatatcttaccttcaaacattgaagctattgctcattcttttagcttggtgcttctgtccttgcgactaaagaatcctgatgacgggcttgttgttcgagccttccagcttctcttctcattgaggactctttcgttggaccttaataacggcacattaccctcagtttgcaagcggttgatccttgctttatccacaagtatgctgatgttcgctgccaaaatatatcagattcctcatatttgtgaaatgttgaaggcccaacttcctggtgatgtggatccttatcttttcattggagatgacttacaacttcacgttaagacacaggcaaatatgaaagattttgggtcctcaagcga

SEQ ID NO: 126853 - DNA, 847 bp, Arabidopsis thaliana
gcactaatacgactcatatagggaaagccggtacgcctgcaggtaccggtccggaattcccgggtcgacccacgcgtccgagtccaaacactttcatttgtctcctttcgtcaactccacagagatctcctcatggctccaattgctgtcggcgatgtcgtaccagacggaactatctccttcttcgatgagaatgatcaacttcagaccgcctccgttcactctctcgccgccggtaaaaaagtcattctctttggtgttcctggtgctttcactcccacttgcagcatgaagcatgttcctgggttcattgagaaagcagaggagctgaagtcaaagggtgttgatgagatcatttgctttagtgtgaatgatccatttgtgatgaaggcatggggaaaaacatacccagagaacaagcatgtgaagtttgtagcagatgggtctggagaatacacacatcttcttggacttgagcttgaccttaaggacaagggtcttggtattaggtcaaggagatttgctttgttgcttgataaccttaaggtgactgtagccaatgttgaatctggtggcgagttcacggtttccagcgcagaggatattctcaaggctctttaagaaactttatcgtttcgcttgttgtattgtgaatctaaactgctgtatgtgaagaagagatttctatagcttgatttcaatcaacaagcatgtgtattgacttgcttggcataataaagtatttggttttaatgttaaaaaaaaaaaaaaaaaaaaaaagggcggccgctctagaggatccaagcttacgtacgcgtgcatgcgacgtcaagatcttctatagtgt

SEQ ID NO: 126854 - DNA, 978 bp, Arabidopsis thaliana
actcactatagggaaagctggtacgcctgcaggtaccggtccggaattcccgggtcgacccacgcgtccgcccacgcgtccgcccacgcgtccgcccacgcgtccgattctggaaacttcttaccataacagaaaataaacaaatctcattccggaaaacgctcataaattgtccgaaagccctaaaaatctgagtctcgcattaagtccaaacactttcatttgtctcctttcgtcaactccacagagatctcctcatggctccaattgctgtcggcgatgtcgtaccagacggaactatctccttcttcgatgagaatgatcaacttcagaccgcctccgttcactctctcgccgccggtaaaaaagtcattctctttggtgttcctggtgctttcactcccacttgcagcatgaagcatgttcctgggttcattgagaaagcagaggagctgaagtcaaagggtgttgatgagatcatttgctttagcgtgaacgatccgtttgtgatgaaagcatggggaaaaacatacccagagaacaaacatgtgaagtttgtagctgatgggtctggagaatacacacaccttcctcggactttgagcttgaccttaaagacaagggtcttggtgttaggtcaaggagatttgctctgttacttgatgatctcaaagtgactgtagccaatgtcgaatctggtggcgaattcacagtttccagcgccgatgatatcctcaaggctctctaagaaatgtaccacttgtgttgtctatgtaaaccccctgtatgtgtagtagaggattctatagcttgttctcagaccattaaccaaaggttgtatatataaaccggtttctcttgtttaaaaaaaaaaaaaaaaaaaaaaaaaaaaaaaaaaaaaaaaaaaaaaaaaaaaaagggcggccgctctagaggatccaagcttacgtacgcgtgcatgcgacgtcatagatctct

SEQ ID NO: 126855 - DNA, 937 bp, Arabidopsis thaliana
atgatactccaggtctctacgactcactattgggaaagctggtccgcctgcaggtaccggtccggaattcccgggtcgtcccacgcgtccgttcttaccataacagaaaataaacaaatctcattccggaaaacgctcataaattgtccgaaagccctaaaaatctgagtctcgcattaagtccaaacactttcatttgtctcctttcgtcaactccacagagatctcctcatggctccaattgctgtcggcgatgtcgtaccagacggaactatctccttcttcgatgagaatgatcaacttcagaccgcctccgttcactctctcgccgccggtaaaaaagtcattctctttggtgttcctggtgctttcactcccacttgcagcatgaagcatgttcctgggttcattgagaaagcagaggagctgaagtcaaagggtgtttgatgagatcatttgctttagcgtgaacgatccgtttgtgatgaaagcatggggaaaaaacatacccagagaacaaacatgtgaagtttgtagctgatgggtcttggagaatacacacaccttctcggacttgagcttgaccttaaagacaagggtcttggtgttaggtcaaggagatttgctctgttacttgatgatctcaaagtgactgtagccaatgtcgaatctggtggcgaattcacagtttccagcgccgatgatatcctcaaggctctctaagaaatgtaccacttgtgttgtctatgtaaaccgctgtatgtgtagtagaggattctatagcttgttctcagacattaaccaaggttgtaataaagcggtttcattgtgacttgtttggccaaaaaaaaaaaaaaaaaaaaaaaaaaaaaaagggcggccgctctagaggatccaagcttacgtacgcgtgcatgcgacgtcaaagctcttctat

SEQ ID NO: 126856 - DNA, 603 bp, Arabidopsis thaliana
  unsure (1)..(603): unsure at all n locations
ctaatacgactcactttagggaaagccggtacgcctgcaggtaccggtccggaattcccggtgtcgacccacgcgtccgattctctttggtgttcctggtgctttcactcccacatgcagcatgagccatgtgcctggattcattgggaaagcagaggagctgaagtcaaagggtatcgatgagatcatttgctttagtgtgaatgatccatttgtgatgaaggcatggggaaagacatacccagagaacaagcatgtgaagtttgtagcagatgggtctggagaatacacgcatcttcttggacttgagcttgacctcaaggacaagggtcttggtattaggtcaaggagattcgctctgttgcttgataaccttaaggtagactgtagccaatgtcgaatctggtggcgagttcacggtttccagcgcagaggatatcctcaaggctctctaagaaactttatcgtttcgctttgttgtattgtgaatctaaacctcctgtatgtgatgaagagnatttcctatagctttgattttcaaatcaccaagcatggtgttttnactttccntnngcnataataaaaggattttgatnaaacggt

SEQ ID NO: 126857 - DNA, 417 bp, Arabidopsis thaliana
cagagaactcatcaaagacatcaactcttcccaagtctcctgagaaactaaaagctatgaatttcccaatctccacgatcaagattggcgactgtgtcttcgttgccaaaaaccctgatgacattgtggccaaattctattttgcaaagaagaaacttttatgggagtttctcttcggagaaccagtggctaacatgccgaggctgaagagtaagatcgagattcaatggaatgatgtctcatcttttgaagagagtattaattcacgtgatgaaactggaatcctcaaaatcgagttgaaaaaacgtccaacattcttcacagagactaatccacaggcaggaaaacacactcaatggaaacaattggattacgatttcaccggagatcaggcttcttattacaggagacatacac

SEQ ID NO: 126858 - DNA, 1060 bp, Arabidopsis thaliana
  unsure (1)..(1060): unsure at all n locations
nnnnnnnctctcactagccgatgtagatccaatgctcatgatggaagatgagagcctcgtgtgggcgagcagtgacctgcgcgtgcggcttcagcatctaaatgagaaaatacctttgagttatgtttctgaaacagagagacagcatgctgtcccatcacaggtacagcgacatgtacttgcaggtatagcttctgctttaggcggtgtaagtgcaccatatgaaaagacctcacacgcgcatgaaagacctatcaccaattggctttgggcagccggttgtcacccgtttggaccattctcaaacgtctccctgatcagtcaaatgcttcaagatgttgcactgaggaatactatttatgctcgggttgattctgctctacgcaaaatccgtgaaacatcagaggcagtacaaaactttgcatccgaataccttaagactccacttggcgagccagtgaaagataaaaagaacaaaaccaaaacggagctatgggtcgagaagttctacaaaaagacaacaacattgcctgagcctttcccacacgagctagtcgaaagattagagaaatatctagacactgtagaagaacaactggtggatctatcttctttgctatacgaccacaagctatacgatgctcacctcaacagctcagagattcttcaaaccaccatgtttacacaacagtacgtagaacatgtactggaaacagaaagggagaacatgagatgctgtaagatagagtacaaatacacagttggagtaaagtcttaccagacgttggtgtacggaggaatacttgtggctggttttctcgtttatttccttgtcattttcttctcttctcctccttctcgctagcctacaccttggtatttacggtctactagatttttgtaagtgtaacaatttcttgttgaagacttactttttatgaactaattttttcgtctgataaaaaaaaaaaaaaaaaaaaaagnnnnnnnnnnnnnnnnnnnnnnnnnnnnnnnnnnnnnnnnnnnnnnnnnnnnnnnnnnnnnnnnnnnnnnggaatca

SEQ ID NO: 126859 - DNA, 553 bp, Arabidopsis thaliana
cgatacgtcagctctattccacttaattttagggaaggctggtccccctgcaggtcccggcccggatttcccgggtcgacccacccgtccgtttcatttcaaagacaacatcaacgatgatccgtacaacagtttagcttcttgggtctctaatgctgacctctgtaacagcttcaatggtgtatcttgtaaccaagaaggattcgtcgaaaagatcgttctttggaacactagtctcgccggaaccctaacgccggcattgtctggtttaacttctttaagggttttgactctgtttggcaacaggattacaggtaatttacctttggattacttaaagttacagactttatggaagatcaatgttagttccaatgcattgtctggtttggttcctgaatttatcggtgatttgcctaatttaaggttcttggatttgtcgaaaaatgcgttctttggagagattccaaattctctgtttaaattctgttacaagacaaagtttgtttcattgtctcataacaatctctcaagatcaatccctgaatcaatc

SEQ ID NO: 126860 - DNA, 488 bp, Arabidopsis thaliana
  unsure (1)..(488): unsure at all n locations
ccctcgcgtccgatcttcttcctcaatttcttcttctacttctcatctcttttctgttcttctttgttaaacccaatctgggtctatcatcgtcttcgaggagcctgcgtgctagggtttctccgccttcttccttcccttattttagatctcaaaaggtagaagcagctcattacaggaaccatgatgtcctttgaaatgaatgaccggaaaaaaatcgggttaggcctgacaggatttggcgtattcttctcgtttttgggaatagtctttgtctttgataagggattacttgccatgggaaatattcttttcatctcgggggttagtctaaccattggcttcaagtctaccatgcagttcttcatgaagcgtcaaaattataagggaccatctcttttggcgtcggtttcttctttgtaatcatcgggtggcctattttgggaataaatgtttngngncnatnggctttttccgaaccncttcat

SEQ ID NO: 126861 - DNA, 671 bp, Arabidopsis thaliana
  unsure (1)..(671): unsure at all n locations
gannnnnnnnnnnnnnnnnnnnnnnnnnnnnnnnnnnnnnnntacgcctgcaggtaccggtccggaattcccgggtcgacccacgcgtccgtgaaaattagggttttttgggggattctcgtgtggataaagccatggctgaacgagaagacgcagcagaggtttctctttcagtgagaaacgaggaagatctttctcctgaatgtgtagcttgggctgattcttgcatcatcagttttctagatgattcagacaacaataattggggaacttttagagatgctttaacagaaatcatcgatatccatcccgagatgtttgttttttcatcaacaacgggaacaagaggtgtcctgtctccagacgaggttatgactgaatccgagactattgatctacggagatctgaaccagcagctggttcagcgaacagtagaactaattcatcgaatgaagaagttagcgagattatctctatgctaacttttgaatcagacccgtcaaagaattgcttagaagattattattttccagagtctatagcagagaatggaaaccgtgaaccagcggacggttctaagacagatctgggaggtgttgaaagtatagaagaagatgggtcagtgagcaatggagaggctaaagaagaaaaaccagcgtcagtatcgtct

SEQ ID NO: 126862 - DNA, 433 bp, Arabidopsis thaliana
atttatggcgcctcatgaaattcgccgtcctttcaagcgacgacctatctccgatcaacagaaacgccgagagctttctcttattcgtcagactcagcatcgcagtgatgctcagcagcgagcccgaaacctcgcctcttccttaatctcgctccaatcctcctctcccgatgtcgacccagagatactatctgaagccgtgcctgagcttgtaggaaccgaatcggaatcgagtagctttgacgttcgtcaagcttcgaggctcagaggacctgaggcacgcaagtggttcgcaaagcagctaatgttacctgaatggatgatcgacgtccctgataatttaagccaagattggtatgtgttagcaagaccagctgggaaaagatgttttgtagtttcatctgatggaacaactgttagtagagtacgaaat

SEQ ID NO: 126863 - DNA, 456 bp, Arabidopsis thaliana
cccacgcgtccgaaaagagttaaagaaaaaatgggaatgggaaggtatcagaaatctgcaacttctggtgtttcagctagatgggtttttgttctctgtatttctagcttccttcttggtgttcttgtcgttaacaggcttttggcaagttttgaaaccgtagatggcattgagagagcttcacctgagcaaaatgatcaatctagatcacttaatcctcttgttgattgtgagagcaaggaaggagacattctatctcgagtttcgcatactcatgatgttatcaagacattagacaagacaatttcttctcttgaggtagaactagctacagctcgagcagcaagatctgatggtagagatggatctccagctgttgcaaaaacagtagcagaccaatcgaagattcggcctcggatgttctttgtgatgggaatcatgactgctttcagtagc

SEQ ID NO: 126864 - DNA, 525 bp, Arabidopsis thaliana
  unsure (1)..(525): unsure at all n locations
taccccaaactctaatacgacttacttatagggacagctggtacgcctgcaggtaccggtccggttttcccnngtggagccacgggtccacggacaccttgggttggctcattcgattattataggaggaaaccatggagctaaggaaatctcaagtggccatgcctgttttcttggcaataatgagtctaatggtgagtcaagtggtcttcgccgagaaagattcaggttcaatgtcccctcatgatcgggcattagcagaaatgcaagcccttaaagcttcattggttcggcgaaatctaccggctttggtatctcctcctcctacccctcctcaggccgtacccggtccgcgcgtgtaccaagtgatatcatatggtgccgatcccacagggaaattggatagcacggattcaatattaaaagctatggaagaagcatttgatggtccaaatcatggagttttgatgcaaggtataaatgatctcggaggagcaagaattgatcttcaaggtggaagctact

SEQ ID NO: 126865 - DNA, 516 bp, Arabidopsis thaliana
  unsure (1)..(516): unsure at all n locations
nnnnnnnnnnnnnnnnnnnnnnnnnnnnnnnnnnnnnnnnnnnnnnnnnnnnnnnnnnnnnnnnnnnnnccacgcgtccgaggatctcctccgaagatttccactattactggaagtgatatagatacgttgcaacaaagaagaccacacaaaaacgttattgagcagccgtgaaatcgatttaccaattgaagcttccccccatgatttgactttccctgatgctcgtttgtgggaaagggtttctaaagtgcagagcacctggagttccattcttttgtgacaaaagaaaatccttcttcactaaaactaagaggggctttcacagtttacctttgggcactggggtccgtgtttatttcaacaacaatcttaggtactcaagcaattcaatagaagttgtggagaaagctgccattaatatgggttcaaaggaagacaaggcagataatccagctttatcttcatatgatgatgccatggaagctctgtcgactcttatttctcgtcgaaacc

SEQ ID NO: 126866 - DNA, 437 bp, Arabidopsis thaliana
acgcgtccgatcggcgaccaaaattggaaaatgtactcagcgattcgctcgcttccactcgatggtggacacgttggtggtgactaccatggacctcttgacggaaccaatcttcccggtgacgcttgtttggttttaacgactgaccctaaacctcgtctccggtggacaactgagcttcatgagagattcgttgacgccgttactcagctcggtggtcctgacaaagcgactcccaaaactattatgagaacaatgggagtgaagggtctcactctctaccacctcaaatcacatcttcagaaattccgcctagggaggcaagctggcaaagaatcaactgagaactctaaagatgcttcttgtgtaggggagagtcaggacacaggttcatcttcgacatcatcaatgagaatggcgcagcaggagcagaacga

SEQ ID NO: 126867 - DNA, 473 bp, Arabidopsis thaliana
agataagaacccaccatggagttttaacatttttcccttcaaaaggcgaacgcttttgatttgtataaaagtcccacttaatcacctctctagcttctcattccatttccatctcctctcttttgttttctaagttgcttcaagagttttggatagtgtagcagagagattttaactaatgggtttataaaattttgttcttttgcgtgaacaagttgtcaacttctagacagattttctttttgaagtgttttcttgtcgaaattcttcttcttttggtcaaagaacgcaagattcttctgtagttcctctaaaaaaaatcctaatggagggttattcaagaaacggtgaaatctctccgaagctgcttgacttgatgattccacaagagagaagaaattggtttcacgatgagaaaaactcctggttttcaaaaacagaggggaaggagcttgagctaaagcttggaccac

SEQ ID NO: 126868 - DNA, 617 bp, Arabidopsis thaliana
  unsure (1)..(617): unsure at all n locations
nnnnnnnnnnnnnnnnnnnnnnnnnnnnnnnnnnnnnnnnnnnnnnnnnnnnnnnnnnnnnnnnnnnnnnnnnnnnnnnnnnnccacgcgtccgggctttggaagtcacttgaagcgcaataaatttagaggctcttggatgccacgagatgatgctcttaaaaaacttgaggaaagaggagttgtcatacgctttgtgattggtcggagtgctaaccgaggtgatagcctagatagaaaaattgacgaagaaaatcgtgcaactaaagactttttgattcttgagaatcacgaggaagcccaagaagagttaccgaagaaagtgaagttcttctacagtgctgctgttcagaattgggacgcagagttttatgtcaaagttgatgacaacgttgacttggatcttgaggggatgattgcgcttcttgaaagtcgtcgtagtcaagatggtgcttacattgggtgcatgaaatctggagatgtgattactgaagagggaagtcaatggtatgagcctgagtggtggaaatttggggacgacaaatcgtatttccgtcatgcaactggttcgctggtaatactctcaaagaatctggctcagtatgtcaatataaaca

SEQ ID NO: 126869 - DNA, 763 bp, Arabidopsis thaliana
  unsure (1)..(763): unsure at all n locations
gggggtagtatcgccgnnnnnnnnnnnnnnnnnnnnnnnnnnnnnnnnnnnnnnnnnnnnnnnnnnnnnnnnnnnnnnnnnnnnnccacgcgtccgcccacgcgtccgaaaaaaaaacacaaaagcggcgttgatttttttagattttccgacaagatttctcgtgagaagatttgtctgaatctttctttcgaagaggttttgagttaatttcaaaatggttttggagaaaaaatctgcattgttggaagatttgataaagaaatgcggcggttgtgcggtggtcgacggtggtttcgctacccagcttgagattcacggcgccgccattaacgaccctttgtggagtgctgtttctctcatcaaaaatcctgagctcatcaaaagggttcacatggaatatttggaagctggtgcagacattgtggttacttcatcttatcaggctacgatcccggggtttctttctagaggtttatcaatagaagagagcgagtctttgcttcaaaagagtgtagaattagctgttgaagctcgtgatagattctgggagaaagtgagcaaggtttcaggacatagctataacagagctcttgtagctgcatctattggaagctatggtgcttatcttgctgatggctctgagtacagtggtcactatggtgagaatgtaagtttggataaactaaaggactttcacaggagaagacttcaagtcttagtggaagctgggcctgatcttcttgcttttgaaaccatagcg

SEQ ID NO: 126870 - DNA, 705 bp, Arabidopsis thaliana
  unsure (1)..(705): unsure at all n locations
nnnnnnnnnnnnnnnnnnnnnnnnnnnnnnnnnnnnnnnnnnnnnnnnnnnnnnnnnnnnnnnnnnnnnnccacgcgtccgcaatcctccggtggtcactcgctaatctccgtttgatctcgccgacactcgagccttttaccgatgaaggatggagattccttaccaataagcacttcttccgtcgcggcgacgacggtgaccggaaagaaggaaaccggttattccgctctcttctcgaaaggccggtacaagttttgggccttagctgcgattctgttactcgctttctggtcaatgctcactggcacggtcaatctccgttggtctgccggtaacattaaccatttcaccgacgatctcgtctttcccatccacgaggatctcgatgttcttgaaatggaggagagggagaaagtggtgaagcacatgtgggatgtgtataacaatggccgtcgtatcagattacctagggttttggcaagaggcctttggaggctgcttacgggggggcttaccaattaatgaaccccaattntgggtttanggttccaattccggggtccnnaaggntgctnttcggnccnttttaaaagncccgncccggttattcccnggtttcgggnattaaaaagctttaaantttggcaaagggggggacntaatttaaccagggngnggttaangcttggggttgggaaatta

SEQ ID NO: 126871 - DNA, 380 bp, Arabidopsis thaliana
cttgtcgcgtgggttggagagtagaagagatcttgattttggaagtgcagagagtttccagggcttcctcggtcaacttgagaagacatatgaccactgtagagtatatgtcagaatcttggaacctttgcaggctgtggaaatcctgaaacggcatttcacgttagttctaccgccaaatggttcctatatgcacatccctgatagttctacatggcaagaatgtcttatcttactgattaacttttggataagattagctgatgagatgcaagaggtaaaatcatctaatccaagtttggtggagaatcttaccttgagccctgaatgcattagcagctgttttactctactcataaaacttgtaatgtatgacagtc

SEQ ID NO: 126872 - DNA, 569 bp, Arabidopsis thaliana
gatacgtcagctctcctaatacgactcactatagggaaagctggtacgcctgcagtaccggtcgggattccgggtcgaccacgcgtgcgcccacgcgtccgcaattttccgtttccgttactatctccgaacagcctctttatcgtctccttatttcttccatcatcaccgggtatacattgtggaatgcggagtatcgtgtatcactgaggaggaattttgatataccgattgatcctagaaaggaggaggaggatcaatcttcgaaagacaatgttagatttggttcagagaagggaatgagtgaggatttagggaattgtgttgaggaatttgagagactgagtcctcaggtgtttggagacttgtcacctgaagcgttgagttatattcagcttttgcagtctgagctatcttccatgaaagaggagctagattcacaaaagaagaaagctttgaggatagaatgtgagaaaggaaacaggaatgatttgttggattatttgcgttctttagatcccgagatggtgactgaggtatctcaactggcttcaccggaagtggaagaa

SEQ ID NO: 126873 - DNA, 837 bp, Arabidopsis thaliana
gttggccgtcctgcggtaccggtccggaattcccgggtcgacccacgcgtccgctctttccttctctcaccgcgagagtaaccgagagacatgattctgataaactctaattctccgacgctaatctcagccgttagattcgtgggctcatctccgttcaccactcgggggctttctcagtccactgtctcaatctctagaaacaaaagcttcttcttccacttcaccgagacgaaggagaagaacgcaagaagagattatttgagagtatcaatcgtgtgtgacgcaggagggatgtttccggtggatccatgggctccaaccattgattcacagagcatagcatcacaactcttcgctgtatctctgtttccttacattggctttctctatttcctcactaaatccaaatcagctccaaaactcacacttttcggtttctacttcttgcttgccttcgttggagctacaattccagctgggatttatgctaaggtgcattatggaacatcgttgtcgaatgttgattggttacacggaggagctgaatcacttcttgctcttacccatttgtttatcgtggtgggtcttagaccagctctgaggaagtctccagatgatgatgatgataaacctggtaatgatgatgaaggtcccaccactcaagaaccaagggaattctccagtgtaggaaaaccaaaggtaaattttttaattatggaggttcccctggttttttaattagattatatattaggcgccgcccttctaattcccatttaaaaaaaaaaaaaaaaagggcggccgcctcaaaagaatccaggctaaggaaggggg

SEQ ID NO: 126874 - DNA, 534 bp, Arabidopsis thaliana
  unsure (1)..(534): unsure at all n locations
atgatactgccagctgnnnnnnnnnnnnnnnnnnnnnnnnnnnnnnnnnnnnnnnnnnnnnnnnnnnnnnnnnnnnnnnnnnnccacgcgtgcgctcttcttcatcgtctcatcttcttcgtcttcttcattattaaccctaaatctagccgcaactacctctctctctaggtctctttctctatctccctctgtttactcccacagctctaaaagcgttttcgaatcgtcacacctggagaaggaagctaatcactttctcattttggaactttgaggagagatctgaaagtttttttttttttgttgttgttctggatcgttcctgttccactctcttcatcttccgatcatcgttattttcgaagctctctacaaacaaaatcgattttttttctggttaatctaaagaggtgaccgaaagaagaaaacttttacgttttgcatggagtaagaatgccagagttaagaagtggagcaaggagatcgagacgccttgacgagcagcctaaccctccgctagttgaacaagca

SEQ ID NO: 126875 - DNA, 414 bp, Arabidopsis thaliana
cttcaatgtgtgactctcggaaatcactcaaacatcgaggaattggaccggttaagttgttgttggataggtcaagaatagcaagagagcttccggtgctggtttcaagaggtatgtttcctgtgaaactattgttccatgcagataagaggccgatagagagtggtggttgaggaaatggtcctctaaaatggttataagccaaatctaaaagcctcaccgatgaattcactaaaacttcctccgaaccttctaaatcggtgaacaaattgttaaaaagattcactctgcggagacgaagaaggttccaaaaccactcagggactttcccttttattttattgttggaaaggtctatatgctccaatttcgtaaggttctttaagatggttgggaactcaatgaggccgcaac

SEQ ID NO: 126876 - DNA, 901 bp, Arabidopsis thaliana
  unsure (1)..(901): unsure at all n locations
cggacgcgtggggtgaacaaaaaaagaagaataagaataaaagaaaatgtttgatggtggagtacctgagcagatccaccgtttcatagcttctccaccgccaccgcctccgcttccgccgcatcaaccggcggcggaaagatcactaccttttcctgtctcattctcttcctttaacaccaatcatcaacctcagcatatgttgagcttggatagccgtaagatcattcaccatcatcatcatcatcatcaccatgacatcaaagatggtggtgctactactggtgagtggataggtcagacggatcatgatgatagcgataatcatcatcaacatcatcatcatcatccatggtgtagtgatgaagttcttgctcttcttaggttcagatctacagtggagaattggttccctgaattcacttgggagcatacttcaagaaagttggcagaagttggttttaagaggagtccacaagaatgcaaagagaaatttgaagaagaagagagaagatatttcaatagcaacancaacaacaacaacaacactaatgatcatcaacacatcggcaattataacaacaaggggaataattatagggtatttagtgaggttgangggtttatcatcatggtcatgccaatgaccatgtttcatcaggaagtttgggggtacccaaancaaggngggccccttttngtaggnggggaaagggaaccgtgggggaancggtncaagcttnattggggggggccaaattnaggggnccggtccagggcaagttgggggnnctccttgggggttaaagaacccttttgggttggaaagttggaccgtgnggttttccnggcanttctcctcagnttttgttcctntggggggngngtgnnggngaggaaa

SEQ ID NO: 126877 - DNA, 608 bp, Arabidopsis thaliana
  unsure (1)..(608): unsure at all n locations
atgatacttcagcgtctctacgactcactatatggaaagctggcacgcctgcaggtaccggtccggaattcccgggtcgacccacgcgtgcgggagcttctctgctcaccaacgtctctttcctcctccttcgctctctcttctgctcttttagtccctcgttcgttctccatgccagggacaaggagattcatggttctgtgtagttcccagaaggaaagtcagatgacagtgtcagtaactggagcaactggattcatagggagacgattggttcagagacttcgtgctgataaccacgctatccgggtcttaacacgctctaaatccaaagctgagcaaatatttcctgccaaggacttcccaggtattgtgattgcagaagaatcggagtggaagaactgtgtacaaggctctactgctgttgtgaacttggcaggactgcctattagtacaaggtggtctcccgagatcaagaaagagattaagggcagccggatccgtgtcacctccaaagttgttgacttaatcaataaattcaccagcagaggctacggcctaccgttcttagtttaggggcccacgggtttnttgggtaannanngggg

SEQ ID NO: 126878 - DNA, 541 bp, Arabidopsis thaliana
cagctctctacgactcactttgggaaagctggcacgcctgcaggtaccggtccggaattcccgggtcgacccacgcgtccgcccacgcgtccgtcttcctcgaactctcttcttctttctctcttactttgtgtttgctctgttttgctctcttaacacaacacaaaaaatgtccatcgttgttggccaagcttaccaacatcttcccaagcaagtaagccaaaatcctgacgtgggtggatggagtttcttgcaatatttctctgagccaaaaggcattgtccagaacagagaagacgacacaaagaaaacagcttatgtctacccgatcgagaagcgttccgtagctaaactgagccttgagatgtgcacagagagcctcgggaccgagaatgggagtgatagtggagacgagatgtcgttacttgcgcttgaagcaaccaatatttcaaagagtcctcgtcttactacgaaacctcaaaaagaaactagcttcatgacccgtgagaacagttttcctccgccgctaaactccgtcaac

SEQ ID NO: 126879 - DNA, 1142 bp, Arabidopsis thaliana
  unsure (1)..(1142): unsure at all n locations
atgattttcgccnnnnnnnnnnnnnnnnnnnnnnnnnnnnnnnnnnnnnnnnnnnnnnnnnnnnnnnnnnnnnnnnnnnnnnnccacgcgtccgtgggggttcatccaaaggagtattgaatcagaacaatgagaatgggggtggtgaggcagctaatgtcagtgtcgataacaaagaggagatagagagagaaacaaaagaaagcagcctacatcttgaaagccatccagcccataaggacaatgtgagagaagccccccataactctagacctttagttgagggacctgggaaagacaactcagaaagagagggtggagagctacaagatgatggtgctgttcataaatctcgaaatgttgatgtgggtgatgccctaatcagccaatcgccaaaagatttgaaattgcttcgagataaggtgaaggctaaacgagagaaagctaagaagttgctaggtgaaagaacgaggaaaaaggatttgatggatgaggatgatttgattgaaagagaactggaagatgtgcaactagctgttgaggatgaaaagacgaaggaaaggaaagtacagagcaggccaaaggcggagaactctgatctcatgggtacagaacatggtgagattttagatgttaaaggagaagtcaaaaatacagaggaaggtgaaatggtaaacaacaatgtgtccccgatgatgcatagcagaaaaaaaaaaatgggaagccctcctgaaaagcagtcagaaggaaagagacgccccaatagtgagaaatggggaagaaacccataagacgaccagaggtagtagccatcatggtggatagagagcacagaagacactcacaagagaatacccattcataagagaggtaatgattattaaaactgctactctttgtatcccatctaaatggtctttttaaaagacctttggcacttcgatgcccaaccatgtgaacttgacttctacatgggtcggttcagtcgttggaaccatgctctctgtattttatgttgattatatatctattcgtggcatttttgcacaaaaaaaaaaaaaaaaagcnnnnnnnnnnnnnnnnnnnnnnnnnnnnnnnnnnnnnnnnnnnnnnnnnnnnnnnnnnnnnnnnnnnnnnnnnna

SEQ ID NO: 126880 - DNA, 501 bp, Arabidopsis thaliana
  unsure (1)..(501): unsure at all n locations
tnnnnnnnnnnnnnnnnnnnnnnnnnnnnnnnnnnnnnnnnnnnnnnnnnnnnnnnnnnnnnnnnccacgcgtccgacagaatagcagagatcgaaggaaagattcactttgggtatacacaaaaaacgtatgcttatgacccaaagcaaggtgaatgggaatgctgtgaaggcgaggttgcatttccgaggtcccaatgtgtgatggagagtgtattgtacacctttgctaataactacacttgggaggacgactacgggtgcaagtggtggtcaacggatggatatggggaaaacgtaaaagggttggagtcactttttgagatacacaagaggaatgggggctcaagtgagtataccacctaactaggtgcctggggggggaaactcttacttttatgggaagggttcctgaagccttatccccatattacgaggaggattgggggcgcggtatcgcgtaaaaaaacctaatgaaggtaaggttggggaaatggttaa

SEQ ID NO: 126881 - DNA, 558 bp, Arabidopsis thaliana
tagacccacgcgtccgattcttcttcaacccgaccaaatacacatccgacggggaaaaagagttccgacaagaatcgagaactgaaagatttgtcatttgtctctcaaatatctgtggagagaagagaaattggaataaagaagacagtgttgtgagagagagagagagagagagagatgagttcgtctctacctctgaggctacttcttcctcttacaacttctctgatttctcctcctcctcctcctccagattctttccatgctccttcgtcgttcagatcgaaaaaccctaatttcaaacgccgattgtcttcttcttcctgttgttcttcccagtcgcagcttttctctgggagatgcagatcctattcgcggtgtgttaccatgtgcttaccagaacacatgagaaatcaagagaacacagaaatcttgacagataaagatgaccacattgaatgtgtgcttgaatcggatgaagattctggcctcaggattccgactcaagcacaggctatcgttgaaggatctggttcagttgcagtgtcaaagcttaaa

SEQ ID NO: 126882 - DNA, 639 bp, Arabidopsis thaliana
  unsure (1)..(639): unsure at all n locations
nnnnnnnnnnnnnnnnnnnnnnnnnnnnnnnnnnnnnnnnnnnnnnnnnnnnnnnnnnnnnnccacgcgtccgcccacgcgtccggtgagtggcaagaccgtgtcatcaacacaacagtcagagctcaagcagacaatcaccaagtgggaaaaggtcaccacccaatttgttgagaccgctgcttcttcaagttcatcgtcatcctcatcctcatcctcatcctcatcttctgctgcttctcagcagcagggcaatgcagcaatggtcaagactaattgagtttaaaggtgaagttactttattgcgcaaaagatcaccaagaaagacacaaccagtaatgccaaatattataataagtagttaactattagataatttttcttgtaaataaaactaagatcggtataggtaagcattgcatgcttataaaccgatgtatgcaagtaataactctgtaaaaaaacgttacagatagattgtaaccgctttgtatgttaacatacaaaagtgagtgatacctatgaaagggatttttgaataaaaaaaaaaaaagaaagnnnnnnnnnnnnnnnnnnnnnnnnnnnnnnnnnnnnnnnnnnnnnnnnnnnnnnnnnnnnnnnnnnnnnnnnnnnacaatc

SEQ ID NO: 126883 - DNA, 741 bp, Arabidopsis thaliana
  unsure (1)..(741): unsure at all n locations
gagtttctcgtcacttgtgacattgtcgtttgttctgagatctttaatctatatgacattattacaggtgtagatgtactctgatgatgtgcgtgactgggctggttgctcctgagtagtaacttgctcatacgaagggttgctacaggtttcttcttggatntgtgctcttaatccgtccccattacggatggatcaaccaaagaaacggtcctggagctaaaccccacaggttcaagatatatcagggcatattatggactatctctcttctcatcttggtcgctgggttcattgttggattgatctctctcttcaacaatgtcgatggaaacgaacattgttcgtggtgtcattatctttcatgtgttccaacatctaaatggagctgtaaccgagaaccagcctcttgcacgacgactcaattaggtaaccaattgagcatgacttgtttgaggaatgggaaatcagcatcttacattttggcaaatccctcggattcacggattaatagcttatgtgttcagctttgccgttgatttactgatttttagaaatattattatgtacacaaacacactctacactgtatctatcatatttttttcttgcttattatgtgtatgttttatagcggccgcgaattcctgcagcccgggggatccactagttttaaaacggccgcccccccggttgagcttccagctttgttccctttagtagagtgatttcaaagggcgt

SEQ ID NO: 126884 - DNA, 793 bp, Arabidopsis thaliana
  unsure (1)..(793): unsure at all n locations
cctccgtccaaaaatctctgttgaagcataaggtcccgtgttttgtttactagatggaatgctctctgagatctttatctcctggaccatctattctagctaggttgtgacgattgtatctcttgcattgattgaggcggtgaacttggggctcggtgtgctccctggagtagatacctttgctcatatcgcagggtttgctacaggttttcttcttggatctgtgctctcaatccgtccccatgtcggatggatcaaccaaagacacggtcctggagctaaaccccacaggttcaagatatatcagggcatattatggtctatctctcttctcatcttggtcgctgggttcactgttgcattgatctctctcttcaacaatgtcgatgcaatcgaacattgttcgtggtgtcattatctttcatgtgttccaacatctaaatggagctgtaaccgagaaccagcctcttgcacgaccactctattaggtaaccaattgagcatgacttgtttgaggaatgggaaatcagcatcttacattttggcaaatccctcggattcacggattaatagcttatgtgttcagctttgccgttgatttactgatttttagaaatattattatgtacacaaacactctctacactgtatccatcatatttttttcgtgcttattatgtgtatgttttatagcacccgaaattaaaaaaaagnnnnnnnnnnnnnnnnnnnnnnnnnnnnnnnnnnnnnnnnnnnnnnnnnnnnnnnnnnnnnnnnnncnnnaagtgaattt

SEQ ID NO: 126885 - DNA, 266 bp, Arabidopsis thaliana
ggtaaccaattgagcatgacttgtttgaggaatgggaaatcagcatcttacattttggcaaatccctcggattcacggattaatagcttatgtgttcagctttgccgttgatttactgatttttagaaatatgatagatacagtgtagagtgtgtttgtgtacataataatattttttcttgcttattatgtgtatgttttatagaggcccttgttcaataaataatacaatgttttcctaaattactataacggtgctttgctac

SEQ ID NO: 126886 - DNA, 771 bp, Arabidopsis thaliana
  unsure (1)..(771): unsure at all n locations
nnnnnnnnnnnnnnnnnnnnnnnnnnnnnnnnnnnnnnnnnnnnnnnnnnnnnnnnnnnnnnnnnnnnnnnnnnnccacgcgtccgggcgtgctcgcctaacacagatggggaaatatttcacagcatacaggattgatcatatattgggattcttcagaatctgggagcttccagctcatgctatgactggtttagtggggaagttccgtccatctattcctttaagtcaggaagagttggaaaaggagggaatatgggattttgaccgcttaagcaagccctatatccagaagaagtttcttgaggagaaatttggagatttttggccttttattgcatcaaactttcttaatgaaactcagaaggacatgtatgagttcaaggaggactgcaacacagagaagaagattgtagcaaagctgaagtcattggctgagaagtctttgttgctagaaaatgaggacaaagttcgacgtgatgtctttgacattttacggaatgttgttctgatcaaagatccagaggatgcaagaaaattctatcctcgctttaatattgaggatacttcaagcttccaggatttggatgatcacagcaaaaatgttctgaagaggctatactatgactactatttccaacgccaagaggatctatggagaaaaaatgctttgaaaaccttgcctgctctgttgaattcatctaatatgctggcatgtgggggggatctgggtctcattccatcttgtgtacatcctgttatgcaagaacc

SEQ ID NO: 126887 - DNA, 648 bp, Arabidopsis thaliana
  unsure (1)..(648): unsure at all n locations
ctcacgcgtccgcaccggctctgtatttcggcatttgtggagagaagaaggtaaagagagaagatagaaacataaaatgtcggagaagaagggaaggaaagaggaggtggtgaccagagagtacaccatcaaccttcacagacgccttcatagctgtacctttaagaagaaggctccaaaggcgatcaaggagataaggaagtttgctgagaaggaaatggggacaaaggatgtgagagtggatgttaaattgaacaagcagatttggagcaaaggtatcagaggtcctccgaggagaatcagagtccgagttgctcgtaagagaaatgatgatgaagatgcaaaggaagagttcttctctcttgtcactgttgctgaaatccctgctgaaggactctctggcctcggcactaagatcattgaagaagaggattaaactatcttatagtaacaacaacatttgatcagatttttcgagttttgtttttcgaatctttattggagagaacatttatcttcttgaatccttaagccttgaatcatagtatgcgattgagacaaacaaaaaaaaaaagnnnnnnnnnnnnnnnnnnnnnnnnnnnnnnnnnnnnnnnnnnnnnnnnnnnnnnnnnnnnnnnnnnnnnnnnn

SEQ ID NO: 126888 - DNA, 494 bp, Arabidopsis thaliana
attaataagaataatcagtgcattttagagagaagatggagatagagattaccttcttcttcttcttcttttttgtcaaagagagagattaccttcttcataggaaaagatttctttcttcttctgcattccccaaattttatcttcccaagaaacccaacacagaagaaaatcttaaagtttagtgaattgtggtggagatgaaagttggagctccggcaagtaagccgggtcggatcattgttcaagtttttcttctacaacttcttcttcttcttcaaagtgttcattcacagagatcacaaaacaaacttaacatcacaaagcctggacaaaacataccagccttaacagttcagctaaggagagttggccatgatacggcggtagttgataatggtattgtccaagttactttctcgaacccagaaggcttaataactgggataaaataccatggtatcgataatgtgttggacgacaaaattgatgat

SEQ ID NO: 126889 - DNA, 392 bp, Arabidopsis thaliana
cggacgcgtgggcggacgcgtggggaaatatccaagctttttactcgtaggcctgctttgcagagagccaatgttgctcagttagagtttaagttaagccttcttaagccactgggaatcacgtcttcagaccttgtgaagattcttaactgtcgtcctaggttctttagttgccgtcttgtccttgatgaaaggatcaactacttcatggagattttggggtcaaaagaggtgttgcgcagagtcattatccggaatccgtcactcatgttgtatgacctcgatgacaagatcaaacccgcgatagaatactacaaagggttgggctttagccaacaggatcttgtcgcaatgttgatatcgcgacccacgttgattccaagaacaaactt

SEQ ID NO: 126890 - DNA, 532 bp, Arabidopsis thaliana
  unsure (1)..(532): unsure at all n locations
gccagctctnatacgactcactatagggaagctggtacgcctgcaggtaccagtccagaattcccgggtcgacccacgcgtncgaattgagcagcgggtaaagcaaaatcatctacgtttgggtcgggtttccgtgaatccggaccagagcctgaccgatgggctcgaggagtccttccttctggtggtggggttcaggaagagcgacgtcgtcttgtatttgaaccacgaaaggctgatacagaagtgagtgaaactccaactgctgtgaagacgagtaagccgagtccatttggagcagctagaccgagagagcaagttttggcggagaaaggattggactggaagaaacttgactcggatattgaggccaagaagggacaaacaagctgaccatcaagcgcgcaatcgagcagaccatcaagtgctcaatctaacaggtctgagagttcagcattgaacaatgtggagaatgtggtgaaaccgagaccaaaggtgaatccttttggtgatgcaaaacctcgggaagtat

SEQ ID NO: 126891 - DNA, 484 bp, Arabidopsis thaliana
cgaatttcaaatcaaaatctctctctttctcttatctctaatggcgttgaggaacattgaaaacgctcttccgatctcacaggaacgacctaagaagctggccaggctctcaaagcaaccggagattggtctaaatgacgaaaacaaccctgtcgctgtggctgaatcgaccgtcgaatacgttgcttctgagaatctcaaaccattttcagatcctgaatcttctgtccagagattacttgaagaattagcatcaaaggattggattaaagtatgtgactcattgaacaacacaaggagatttgcaattcatcactcttctctgttgctaccaattctagaaaagcttatagttgtgatggtgaaggcgatgaagaatcctagaagtgcattgtgcaagacttcgattatgacttgttctgatatcttcactgcttatggagaaaagttgctggaaggacctcatttgaaatctatggacgat

SEQ ID NO: 126892 - DNA, 684 bp, Arabidopsis thaliana
  unsure (1)..(684): unsure at all n locations
acctgccggtagacaagcattaagtcctccttcaggcttccaagcagtttttccacaaggaaatacaacatctctccctagagtttcaactcagccagtgctgttggagaagaggaaagaacatcctgattctgttgcaagtgcagcgttaaaaagaaaggttgggaatgatgactttactgtcccggggcatattcgggttgaacagtttattcatggatcagcaagtcagtcacacgatattgaaactgtcaagttgatggaagaaaacaagaagctccgagcaaaatgtttggaccgcaaggtgcgaagtcagaaccttgaagtcaaggccatgaatcttaggagtgagctcgagaactataaaagtgagtatgaaaggttaatgttagagctacaagctttggatttggtgaaagacgagcacagaagaaatgtaaatacgtagaaacttcctctgcacttaaaaaaacactcttttttggctggtcgtatccatcttctaggtatgaaaactagagatccttagtttatgggctgtctcggaaagacaaaacaaaatgtgtaaaaacaggattcatgtttatgaatctttttgtctaggaaaanaaaaaaaaaaaaaaaaannaagggcggccgctctagaggatccaagcttacgtacgcgtgcatgcgacgtcagag

SEQ ID NO: 126893 - DNA, 711 bp, Arabidopsis thaliana
  unsure (1)..(711): unsure at all n locations
nnnnnnnnnnnnnnnnnnnnnnnnnnnnnnnnnnnnnnnnnnnnnnnnnnnnnnnnnnnnnnnnnnnnnnnnnnnnnnnnnnnccacgcgtccggaaagaacatcctgattctgttgcaagtgcagcgttaaaaagaaaggttgggaatgatgactttactgtcccggggcatattcgggttgaccagtttattcatggatcagcaagtcagtcccaagatattgaaactgtcaagttgatggaagaaaacaagaagctccgagcaaaatgtttggaccgcaaggtgcgaagtcagaaccttgaagtcaaggccatgaatcttaggagtgagctcgagaactataaaagtgagtatgaaaggttaatgttagagctacaagctttggatttggtgaaagacgagcacagaagaaatgtaaatacgtagaaacttcctctgcacttaaaaaaacactcttttttggctggtcgtatccatcttctaggtatgaaaactagagatccttagtttatgggctgtctcggaaagacaaaacaaaatgtgtaaaaacaggattcatgtttatgaatctttttgtctagaagattcagcaaagttatggaaaatatataactttctaaaaaaaaaaaaaaagggcggccgctctagaggatcccagcttacgtacgcgtgcatgcggcgtcatagctcatctatagtgcagctcaat

SEQ ID NO: 126894 - DNA, 388 bp, Arabidopsis thaliana
agagtatcaatcaacttgacaaaaatcggaagaagaaacacaaaccgggggttttgaaacatggcgtctaaggtaatctctgccacaatccgcagaaccctaaccaaaccacacggcactttttcccggtgtcgctacttatcaaccgccgctgctgcgacggaggtgaattacgaggatgaatcgattttgatgaaaggagttcgaatttcaggtagacctctttacttagatatgcaagcgacgactcccattgatcctagagtattcgatgcgatgaatgcttcacagatccatgagtatgggaatcctcactcgcgaacgcatctctacggctgggaagctgagaacgccgtcgagaacgcacgaaaccaggtcgcgaaactga

SEQ ID NO: 126895 - DNA, 692 bp, Arabidopsis thaliana
ggggaagaagaagctgaaaagagagagactaatcttcttcttcttcttcctctctgtatttttctcattctcttcgatttgtttgcttgctagtgactagtgagtgagagagtatggagagaagtactccggtgagaaagccacacacatcgaccgcagatctacttacttggtcggaagttccaccgccggattctccttcctccgcttctcgctccgccgttcgttcccaccagccatcggatgggattagcaaagtggtgtttggtggtcaagtcaccgatgaagaagttgagagcttgaaccgcaggaagccttgctcagaacataaaatgaaggagataactggcagtgggatcttttctcgtaacgaaaaagatgatgcgtcagagccattaccagtttatcagcaagcagttaatggtataagccagatatcatttggtgaagaggaaaatctatctcctaaaaagccggctactgtacctgaagtggcgaaacagcgagagctcagtgggactatggagaatgaatcagctaataagctacagaagcagctctctgatgctaaatacaaagagatcagtggacagaacatctttgcaccaccgcctgagatcaaacctcgatctggaactaatcgtgcattggctcttaaggacaatttcaacctcggagctgaatctcaaact

SEQ ID NO: 126896 - DNA, 1045 bp, Arabidopsis thaliana
gctctatacgactcacttagggacagctggtacgcctgcaggtaccggtccggaattcccgggtcgacccacgcgtccgcccacgcgtccgcggacgcgtgggcttcaacattgcttcctaaccagaaatccaccatcatcttcccacgaatacaacttaaagctttaccagaaaatggagggtcagagaacacaacgccggggttacttgaaagacaaggctacagtctccaaccttgttgaagaagaaatggagaatggcatggatggagaagaggaggatggaggagacgaagacaaaaggaagaaggtgatggaaagagttagaggtcctagcactgaccgtgttccatcgcgactgtgccaggtcgataggtgcactgttaatttgactgaggccaagcagtattaccgcagacacagagtatgtgaagtacatgcaaaggcatctgctgcgactgttgcaggggtcaggcaacgcttttgtcaacaatgcagcaggtttcatgagctaccagagtttgatgaagctaaaagaagctgcaggaggcgcttagctggacacaatgagaggaggaggaagatctctggtgcacagttttggagaagggtcaggccggagagggtttagcggtcaactgatccagactcaagaaagaaacagggtagacaggaaacttcctatgaccaactcatcattcaagcgaccacagatcagataaaccctcccgctctctctcttctgtcatctacatatgctctatctacactcttattagacaaataatggcatctaacaatgtcaagaaaagttggtcatggtattaaatcctacacggatatataactataaacctctagtcccctctatgctgtcctgtaatgaatatctatccgcgaaatgtattcgcatagtcttgcgtctaataatgtttattgattttgtaggtttgattataaaaaaaaaaaaaaaaaaaagggcggccgctctagaggatccaagcttacgtacgcgtgcatgcggcgtcatagctcaactatagtg

SEQ ID NO: 126897 - DNA, 602 bp, Arabidopsis thaliana
  unsure (1)..(602): unsure at all n locations
cagctctatacgactcatatgggaagctggtcgcctgcggtaccggtccggaattcccgggtcgacccacgcgtncgagcagggttcatgagctaccagagtttgatgaagctaaaagaagctgcaggaggcgcttagctggacacaatgagaggaggaggaagatctctggtgacagttttggagaagggtcaggccggagagggtttagcggtcaactgatccagactcaagaaagaaacagggtagacaggaaacttcctatgaccaactcatcattcaagcgaccacagatcagataaaccctcccgctctctctcttctgtcatctacatatgctctatctacactcttattagacaaataatggcatctaacaatgtcaagaaaagttggtcatggtattaaatcctacacggatatataactataaacctctagtcccctctatgctgtcctgtaatgaatatctatccggaaatgtattcgcatagtcttgctctaaatgttattggnnnaaaaaaaaataatataaaaaataaaaaaggcgccgctctaagatcagcttacgtagggcatgcacgtcaagtctctaatgcact

SEQ ID NO: 126898 - DNA, 428 bp, Arabidopsis thaliana
gcttcagaggtgtttgaagtggcgccatcattgcatgtggtagttgtctttacggacattaaagcctaatggctttgcggtttcttccattttcgacattatttcactcgcagatcgttgagaagtaaaccgcgtttctttcttcacaagttgcgcttgcttctcgaacaagttttcaagactgaactcgcttgagctagagataagttcgaaagcgttcatggatacaggtttctccttcttctcagttacaagacattccttggagttactaaaagcagcatcaacatcatctatggttatgtcctcgtcatcttggtcaaatgatggcggcttggtaccctttcttgaaccattcatcttcgagcaactctgcaatacttattctggtaatagggttgggttcgagaatacgcttgatgactctc

SEQ ID NO: 126899 - DNA, 508 bp, Arabidopsis thaliana
  unsure (1)..(508): unsure at all n locations
nnnnnnnnnnnnnnnnnnnnnnnnnnnnnnnnnnngagagatcgaagagtgaaatctgaaatggaatcagctccgacgggatgcttcaagtgtggtcgtcccggtcattggtctcgtgattgtccatcatcggctccggtcgccggcaataattccgtttcttcttcttccgctccatctcaaatccctaataatgaatttcagagatcctccagtaaaagtggaacctcaatagctcctgctcctaaagtgacgaagacgagagttcaaaggcccaagctaactcctgaattgttactctctgaggatggtctcggctatgttcttcgctatttccctaaatccttcaagtatcgtggccgaggcaaagaggtgagcgatttggggaatttgatacggttgtacagtgagtggcacactcatttgctaccttactattcctttgatcactttgtgcataaagtgcaacaagtcgcttctactaagcgtgttaagaattgtataaatg

SEQ ID NO: 126900 - DNA, 547 bp, Arabidopsis thaliana
atgatacttcaggtctctacgactcactattgggaaagctggcacgcctgcaggtaccggtccggaattcccgggtctgacccacgcgtccggacgacgatatcgagatcgatccaaccaactctgcagctaacatctctaaggtttgattttccgatgatgagggtgatggagcctccgcctatcgaggaggcagctttggccccagtatcggtcttctgggacataaaatcgtttccggttcccgatggctatgatgctcgactggtgggtccgtgtatcaaacggaatttgaggaagttaggctacacaggtcctatcaccatcactgccgttggcgtactatcagaggtccctcgtgacatccttaaagcagtgtattccactggaatctctcttaaggaggtcattaaaagtccgacaaacatgtatgctcttttccttgagtcctctcttcttcgtactccacctccagctaatatgatggtcatatcccgtccaccatcctacattcctcgacacttctcttctatacgtgacaaggacc

SEQ ID NO: 126901 - DNA, 753 bp, Arabidopsis thaliana
gaaagtcgtagcctctaaaaccctaatcctctctgaaaccctagacatcgcagctgaaaatgaccggagaagtcgtcaaccctaaagcgtatccgcttgcagattctcagttatcgataacaattcttgacctcgttcaacaagctactaactacaagcagctcaagaagggtgctaatgaagctacgaagactcttaatcgtggaatctccgagtttgttgtcatggctgcagatgctgagcctctagagattcttcttcatcttcccctacttgctgaggataagaatgttccttatgtctttgtgccttcaaagcaagccttgggaagagcctgtggtgtgactagacctgttatcgcttgttcagtcacatctaacgaagctagtcaattgaaatcacagattcaacatctcaaggatgctattgagaagcttctgatctaaggcattctctgaattgattgctcggtatgatgggtctccgcgaatgggaaggctttgactgaagttttgtttaggcaactaccaaatcaaaaaccgtccattattctactatcttctcttcaagtttgtaacgtaattcacttttctgcaacttggtttcttaagaatttgtgttggtttctggttttggtttgtagcgaatcattgtgttatttataagaacttgttttgatatctaaaaaaaaaaaacccagcccggccgctatagaggatccaagcttacgtacgcgtgcatgcgacgtcatag

SEQ ID NO: 126902 - DNA, 491 bp, Arabidopsis thaliana
  unsure (1)..(491): unsure at all n locations
gtcgtagcctctaaaaccctaatcctctctgaaaccctagacatcgcagctgaaaatgaccggagaagtcgtcaaccctaaagcgtatccgcttgcagattctcagttatcgataacaattcttgacctcgttcaacaagctactaactacaagcagctcaagaagggtgctaatgaaggtatccgcttgttactcatgtgtgtttgtctctcttatttattgagtttaatgtttgtgaagttgttcctgatttatttaaatttgttcatttcagctacggagactcttaatcgtgggatctccgagtttgttgtcatggctgcagatgctgagcctctagagattcttctttcaaccttcccctacttgctggagggtaagggtttgacttcttcctttcccctggggttccctttttatttatacaccccgttttttttagnaaattgnggtatttgtttcccagggtctangngggggttaagtttac

SEQ ID NO: 126903 - DNA, 623 bp, Arabidopsis thaliana
  unsure (1)..(623): unsure at all n locations
tactagttttctatattcttactttctttgtgaatgttttgtagaatgttccttatgtctttgtgccttcaaagcaagccttgggaagagcctgtggtgtgactagacctgttatcgcttgttcagtcacatctaacggagcttgtccatttgaattcccagattcaacatctcaaggtaacttagcccctccacttgctgtactctctttataacctggaaccatcattgattccacagaattggttaatcattaactctttttttacatttcttcaggatgctattgagaagcttctgatctaaggcattctctgaattgattgctcggtatgatgggtctccgcgaatgggaaggctttgactgaagttttgtttaggcaactaccaaatcaaaaaccgtccattattctactatcttctcttcaagtttgtaacgtaattcacttttctgcaacttggtttcttaagaatttgtgttggtttctggttttggtttgtagcgaatcattgtgttatttataagaacttgttttaataaaaaaaaaaaaaaaagnnnnnnnnnnnnnnnnnnnnnnnnnnnnnnnnnnnnnnnnnnnnnnnnnnnnnnnnnnnnnnnnnct

SEQ ID NO: 126904 - DNA, 391 bp, Arabidopsis thaliana
ctgaatgagaatgtcagaaattgtcaatttgtcagcatctttgagatctttaaacccgaagatctcacctttggttcctccatatcgccaaacctcgagctctttctctcgaccgagaaacttcaaatatcattcttttaccgataaaatctgtttggcagcggagagaatccgagcagtcgatatccagaagcaggacggtggtttgcaagagctcgatgactcgccggtgtctgttgagctcggacctatctgtggtgagagccacttcgatcaagtgatggaggatgctcagaagctcggtgaatcagttgttattgtctggatggctgcttggtgcaggaaatgtatttacttgaaaccaaaactcgaaaagctcgctgctgaattc

SEQ ID NO: 126905 - DNA, 745 bp, Arabidopsis thaliana
gagatagagagaagaatcatctcctatactctagctccaacaatggctaacaaaaacccacttcaaaaaccctttcttttcataatcttatcaatcaatctcatctttcttcaagcagaaacaactactcaaatctctaccaagaagacttatgttatccacatggataaatctgccatgcctttaccttacactaatcacctacaatggtactcttcaaagataaactctgtaacgcaacataaatctcaagaagaagaaggtaataacaacaggatactctacacttaccagactgctttccacggtttagcagctcagcttactcaagaagaagcagagaggcttgaggaagaagatggtgttgtagctgtgatacctgagacaagatacgagcttcacactacaagaagtccaacgtttcttgggttagaaagacaagaaagtgagagagtttgggctgagagagtcaccgaccatgatgtggtagttggtgttttagacactggtatctggcctgagagtgagagcttcaacgatacaggtatgtcccctgttcctgctacttggagaggagcttgtgaaactggaaaaagattcttgaaacgtaactgcaatagaaagatcgttggtgctagagttttctatagaggctatgaagctgcaacgggaaagatcgatgaagagcttgaatataagtcaccgagagacagagatggtcacgggacacacactgcagctactg

SEQ ID NO: 126906 - DNA, 465 bp, Arabidopsis thaliana
ccacgcgtgcggttttctcctgcattctctctattcttcgctaaaccttgaataaagacatgttctttaacatgggtttttccggtttaaagtagtggtatctttgtttcccctttaaaccgggtttaagctcaatcttttcttagaacaactccaactgtttgacgatttgactgagagaaaacagagtcatggaagagacttttgtgccgtttgaaggaatcaagaatgatcttaaaggaagattgatgtgctataagcaagattggactggtggattcaaagctggatttaggattctggctcccaccacttacatatttttcgcttctgcgattcctgtcatctcatttggtgaacaactcgaaagaagcaccgatggagttctcacggctgttcaaaccttagcatctacagccatttgcggtatgatacattcgattatcggaggtcagccactgctta

SEQ ID NO: 126907 - DNA, 660 bp, Arabidopsis thaliana
  unsure (1)..(660): unsure at all n locations
atcccactcaccttaggggaagcacgtacgcctgcaggtaccggtccggaattcccgggttgacccacgcgtgcgcgcgcgcgtgggttcgtcttcttgatctaatcgctttgagctgttagcagagagcagtcgacaatcatgggtcactccaacgtctggaattctcatcctaagaaatacggtcctggttctcgcttatgccgtgtgtgtggaaactcccatgggctaatcaggaagtatggtctcaactgctgcagacagtgtttccgtagcaacgccaaggaaatcggattcattaagtaccgttgatgatcgatgttgttcacacaggagcatcatgtcttttgagttttaaactttgcgttgaacttgtaatcgatttatcgacattgaactaatttgattatgtttttgtgctgttgaatctacaagttactttgttctactattgcttataaggttatcagatatatttgcttaattgattagaagaaattcctattgaatgtaactgtaaattgttaaaacttacctggaagtggtggatgaatgatatgttttttacttttcaatttcataaannnnnnnnnnnnnnnnnnnnnnnnnnnnnnnnnnnnnnnnnnnnnnnnnnnnnnnnnnnnnnnnnnnnnnnnnnnn

SEQ ID NO: 126908 - DNA, 1068 bp, Arabidopsis thaliana
  unsure (1)..(1068): unsure at all n locations
cgtcattagaaagtagccaggccacaaaagaaaaaaggtaaagagagagaccaatcacaggagataacgctaagataaggcttcttacatttaccatcacatataacataacgttactattattctaaaatccaaaaaaactatatgttataacattggaatcatcagtctctaagcagtatcacaccaactcaatatggctaccaccactgcagcagcagcctcaggtatttttgggatccggattcaagatcctagacctggaaccggtagggtccaagcccggttcgggttcagtttcggaaaaaagaaaccggctccaccgccaaagaaatcaaggcaggtccaagacgatggagacagactagtttggttccccggcgcaaacccgccggaatggttggacggatcgatgatcggagaccgtggatttgatccgtttggtttaggtaaaccggctgagtatcttcagtacgatttcgatggacttgaccaaaaccttgccaagaacgtggcgggtgacatcatcgggatcatccaagaatcttcggagatcaaaccgacgccgtttcagccgtacactgaagtctttgggatccaacggttcagagaatgtgagctgatccatggaaggtgggccatgcttggcactctaggcgccatcgccgtagaggctcttacaggaatcgcatggcaagacgccggaaaggtgcaatcggtggaaggatcatcgtatttgggacaaccattgccgttctcgttgacgacgttgatatggatagaggtgctagtggtcggatacattgagttccaacgtaactctgaactggatccagagaaacgggatttancccgggtgggtatttttaacccgttggggacttcgnggctgatccaaagaagttggntactttttaagcttggctgagnttaaacactctnngtctnggtattggngnattttttaatnttnnttttnaggggggcttttaaccggaaaaggcctttaantttcttttcnccctttaaaattngtaanaccctttttttttntttttaaaaaaanta

SEQ ID NO: 126909 - DNA, 755 bp, Arabidopsis thaliana
  unsure (1)..(755): unsure at all n locations
cnnnnnnnnnnnnnnnnnnnnnnnnnnnnnnnnnnnnnnnnnnnnnnnnnnnnnnnnnnnnnnnnnnnnnnnccacgcgtccgcggacgcgtccgcccacgcgtccgcttggctctctgcggaggaaaaagagctagtgaggaagaagcgagaggagattgaagaagctgaacgagtaaaaaagagcaaagtggttatgacatttgatttaatcggccgtaaggttctgttaaatgaagatgatatctcagaactagaatcagggaacaggattctgggaccacctgagactaaaaacgtgaacagaataaaaccgaacccgactgcaagactcgttccaatcttcttagacccaggaccaaccgagaagaagccaaacagcaccaccaccaagaaagacaacaagaaaaaccgaaacggtttgtgtctagagatcacaggaagggtgcaacatgacagaagtgaactcaaatacttacaagccgatccaaaatcggacggtaaatcttggccatcaggaaacgatggacttcatgtagaagatggtggtgaatgttccttagattacgactaaatatttttcagtaaccaaacccggttcaatgttttcggtttaccgaacctgatactatttgttcagtttaaaagtcaacaacttttctcaaaaaaaaaaaaaaaaaagnnnnnnnnnnnnnnnnnnnnnnnnnnnnnnnnnnnnnnnnnnnnnnnnnnnnnnnnnnnnnnnnnnnnnnnnn

SEQ ID NO: 126910 - DNA, 529 bp, Arabidopsis thaliana
ggtgcaacatgacaatagtgaactcaaatacttacaagccgatccaaaatcggacggtaaatcttggccatcaggaaacgatggacttcatgtagaagagggtggtgaatgttccttagatttcgcctaaaatattttccagtaaccaaacccggttcaatgttttcggtttcccgaacctgatactatttgttcagtttaaaagtcaacaacttttctcttgttgagtccacgtcggatggttttttgatacgccgtcggtcaagaatcacgtgtttggaactttgggtctctcatgtccccacgtggcgttatgtaattgggtaatgttaaattctctcggttttattaagataagattattcgtctccacggtgttacgtgttcccgacgctatcaaatcgttttcttagagcacgtatgtattttttatttttaaaaaaaaaaaaaaaagggcggccgctctagaggatccaagcttacgtacgcgtgcatgcgacgtcatagttcaactataggtcagctaaat

SEQ ID NO: 126911 - DNA, 523 bp, Arabidopsis thaliana
  unsure (1)..(523): unsure at all n locations
tgatacgttnnnnnnnnnnnnnnnnnnnnnnnnnnnnnnnnnnnnnnnnnnnnnnnnnnnnnnnnnnnnnnnnnnnnnnnccacgcgtgcggggaaagtgttcgcctttaccgtcaaaacgaatcattgtgttgaacaaaatggaactcgcggatcctttggagttgaagaagtgtatagattactttgaagagagaaactatctttcgtatgcagtgaattcacataacaaagattgtgtcaattactgaactttttgcagagtcaagttagggaattgcataaggctggtcattctggtcatactactactatgatgcttcttgggattcctaatgtaggaaagtccgctctttcaaattctcttcatcatatcggaaggattagtgctgcagagaaaggtaagctaaagcatacaacagttagctcccagcctggagatactaaagacattatgagcttgaagatcgggagccatcccaatgtctatgtactggacacgcctggaatttttcctcctaat

SEQ ID NO: 126912 - DNA, 1058 bp, Arabidopsis thaliana
  unsure (1)..(1058): unsure at all n locations
nnnnnnnnnnnnnnnnnnnnnnnnnnnnnnnnnnnnnnnnnnnnnnnnnnnnnnnnnnnnnnnngcggcgcgtgcggatcatcgccgggaaaccacaccagtctcaatggcgaaaactctatcccgatccaccgcctcatgcgtcgctaagcgtttcttttccacctccaatgccgtcgcctctccttctccgcttccttctcatctcatctctcgtcgattctcaccgacgatcttccacgccgtcggatacatcccagctttgacccgcttcacaacgatccggacccggatggataggtctggcggctcatattcgccgcttaaatccggatcaaacttcagcgatcgaccacccactgaaatggcacctctatttcctggttgcgattacgagcattggcttatcgtcatggagaagcccggaggtgaaaatgctcagaaacagcaaatgatcgattgctatgttcaaaccctagctaaaattgttggcagtgaggaagaggctagaaagaagatctataatgtttcgtgtgagaggtattttgggtttggctgtgagattgatgaggagacatcaaacaaactcgaaggacttcctggtgttctgttcgtgcttccggactcttatgttgatccagagttcaaagattacggagctgaactgtttgtgaatggagaagtagttcctcgtcccccagagagacagaggaggatggtggagttaacgaatcaaagagggtcggataaaccaaagtaccatgaccgaatcagaaatgtccgacggagggagaacatgcgttgactcttattattctcagactttacgctagagcaatcatttcgatttgatctccgatgcttttttttgttggtttgttcttttaatttgctagactcttaatgaataatgtatatgatggtgttttggtgatatcgaatgtatcaattgtttctgcaactaaaaaaaaaaaaaaaagnnnnnnnnnnnnnnnnnnnnnnnnnnnnnnnnnnnnnnnnnnnnnnnnnnnnnnnnnnnnnnnnnnnnnnnnnnnnca

SEQ ID NO: 126913 - DNA, 451 bp, Arabidopsis thaliana
ctgagactttgaaaaaaacctgaggttgtagaatatagaacagagtttttcaagcttgttgtgggaactctatcggtcccgatcgatatcccgggaacgaattaccgcagtggagtccaagcaagaaacaacatcgataggttattgacagaactgatgcaagaaagaaaagagtctggagaaactttcacagacatgttgggttacttgatgaagaaggaagataaccgatacttgttaaccgataaagagataagagatcaagtggtaacgatcttgtattccggttatgagactgtctctacaacctccatgatggctcttaagtatctccatgatcatccaaaagctcttgaagaactcagaagagaacatttggctataagggagagaaaacgacctgacgaaccgctcactctcgacgatattaaatcgatgaaattcactcgag

SEQ ID NO: 126914 - DNA, 733 bp, Arabidopsis thaliana
  unsure (1)..(733): unsure at all n locations
nnnnnnnnnnnnnnnnnnnnnnnnnnnnnnnnnnnnnnnnnnnnnnnnnnnnnnnnnnnnnnnnnnnntacccacgcgtgcgcggacgcgtgggcggacgcgtgggttgggatatactctgatgccgggactcttacctgcagccaaaccatgccgggatcactcgggcatgaagaacaagatgccaagacatttgcctcatgggggattgattacctcaagtatgataactgcgaaaatacagggacaagtccaagagaaagataccctaagatgagtaaagcgctgttaaattcaggaagatccatattcttctctctgtgcgaatggggacaagaggatccagcaacttgggcaggagatattggcaacagttggagaacaacaggagatatccaagataattggaaaagcatgacattgatagcggatcagaatgatcgatgggcatcttatgcaagaccaggatcgtggaacgatccagacatgcttgaagtgggaaatggaggcatgactaaggaagaatacatgtcgcatttcagcatctgggcattggcaaaagctcctctgctgatcggctgcgatcttagatcgatggacaaagttacatttgaattgcttagcaacaaagaggtgattgctgttaatcaagacaaacttgggatccagggaaagaaagtaaagaaagaaggtgatcttgaggtatgggcaggtccactaagcaagaaacgag

SEQ ID NO: 126915 - DNA, 460 bp, Arabidopsis thaliana
gtttatctccagaatcaaagataaacggaggagaagagagcttcgtcgtcttcttcttcttcgcctccatgaatctcctcaagacgattcattaccagtctaccattactcgattttaccgttttgcccctacacgctcctttgcttcttctgtgtcactctctccacagagacacataatctctctcgtttctatctctaatcgtggaaggtgcttcgcattctcgagcgtctctggtgcttcgctttataataatcaagaggatgggaagaaagaagaatccgagagaaattacgcttcgacgaaggaaggagatgaagtggtttaccagaaaacgctgagattagtagaatgtgccatgttcgctgctgtgacaggcctcgtttactttctcagcaattctctcgccattgaggttaatttttcttgccttataattcccataaggacattggagta

SEQ ID NO: 126916 - DNA, 529 bp, Arabidopsis thaliana
gatacttcagctctaatacgactcactttagggaaggcttggtcccccggcaggtcccggtccggatttcccgggtcgacccacgcgtccgcccacggcgtccgcaactttccattttcttaccaccgaagaagaagcagaaaaaaagtaaacaaagactaaaaaaaaaaagccagcatcttcggagttggtgggagagagacagagatggagaggagaaagattgtgatgtgtggtgttttatttcttcttggtttattatcagctgttactgccttcgtcgctgaagctactcgaatcaagagatctcaggtcacggttaccgtttcggattcaatcacaaaatgcacttatccaagaagtccagctttcaatctcggcttcacttcagctctctttctgatgatggctcagataatagtcagtgtctcaagcgggttgtttctgttgtagaaaaggtcctgcttccttcaaggtctaattggattatctccttaatctgctttggtggttcctgggtcacttttgg

SEQ ID NO: 126917 - DNA, 661 bp, Arabidopsis thaliana
  unsure (1)..(661): unsure at all n locations
gatctcttagcaaagctccttgtgaacctcgtgaaatctgctgacaacgccttaaacgaagtccagctagtgaaagggtttgaatcggttttgaaaaccctggaggatgcagtaaatgatgctccaaaagcagcagagtttcttggtagaatatttgggaaaagtgtgacagagaaagtagtgacattgacagagattggtcggttaatccaggaaggaggagaagaaccaggaagtctgatagagtttggattaggcggcgatgttcttgggagtgttttggagatgataaaaacagaagctggagaagaaacgttggttgagattcgccggagctcaggtctgaggattgaaaatttcaaacctcatgcacctaaccggtctaagatattagagaaatttacttaggaaaaaaaaatggaaccatcttttgggttcctttcttcttctctttttttgtttctctcttaaaagtcttttctcttttcaagtgcttcaaacaaaactaatttgttataaagggagtttctctattttattatatagcaaaaaacttccaaaaaaaaaaaaaaaaaaaaaagnnnnnnnnnnnnnnnnnnnnnnnnnnnnnnnnnnnnnnnnnnnnnnnnnnnnnnnnnnnnnnnnnnnnnnnnnnnacatt

SEQ ID NO: 126918 - DNA, 530 bp, Arabidopsis thaliana
  unsure (1)..(530): unsure at all n locations
annnnnnnnnnnnnnnnnnnnnnnnnnnnnnnnnnnnnnnnnnnnnnnnnnnnnnnnnnnnnnnnnnnnnnnnnnnnnnccacgcgtccgatcaatatttggttctactcctgcacatgggtcaactccaggatttagcattggtggatttaacaacagtcagtcatctccgctgtttggttcaaacccctcatttgcacaaaataccactcctgcattcagccagactagtcctttgtttggacagaataccactcctgcattaggacagtctagttctgtgtttggacagaataccaatcctgcacttgtacagagcaacactttcagtacaccttccactggctttgggaacacgttttcaagctcttcatccttaactacaagcatctccccctttggtcaaataacgcctgctgttacgccctttcaattcagctcagccaactcaaccattaggtgcttttggtttccacaactttggtcaaacccaaataggtgccatgggaacttttagccaggaaacttta

SEQ ID NO: 126919 - DNA, 420 bp, Arabidopsis thaliana
ccacgcgtccgccttaatttcgtctccgtcagtagcagtctccgccgggaatattttttttccggtagctatgctccgaaccgtctcttgtttagcttcgcgcagctcgtcctctctattctttcgcttctttcgtcagttccctcgctcttacatgtctctcacatcgtcgacggcagctctccgtgtccccagtcgcaatcttcgccgaatttcctctccctcagtcgccggtagacgtcttttgctccgacgaggtttgaggattccctccgccgcagttcgcagtgtcaatgggcagttctctcgcctctctgttcgcgccgtcgccacacaacccgctccactttatcctgatgtaggtcaagatgaggctgagaagcttggatttgaaaaagtgtcggaagaattcatctcaga

SEQ ID NO: 126920 - DNA, 477 bp, Arabidopsis thaliana
tctcaatcttcttcttcctcctcttactatcatctttctcttcctgttttacccattttatcttttgatcaaacttgtgctttgtcttcgtaagaaccttcacttcgaaaacgtagccagaaaagtagttctaatcaccggagcttcctctggcatcggagagcatgtggcatacgaatacgcaaagaaaggagcatatttggctcttgttgctcgaagaagggatcgtctagagattgtagcagaaacatcacgtcaattaggatctggtaatgtcatcatcatacctggtgatgtttctaatgttgaggactgcaagaagttcatcgatgagacgattcgtcatttcggaaaactagaccacctgatcaataatgctggtgtatttcaaactgttcttttcgaagatttcacacaaattcaagacgcaaatcctataatggacatcaacttttggggtacaacatacatcaccta

SEQ ID NO: 126921 - DNA, 867 bp, Arabidopsis thaliana
ctcactatagggaaagctcggtcgcctgcaggtaccggtccggaattcccgggtcgacccgcgcgtgcgcccacgcgttcgaaaagagatggtgcgtctctatgtatggcagtggcaggcaaacaacaggcgttttccctcaggatgtgtggcactgtgagatatgtaaccgaaagcctggacgtggttttgaggcaaccgccgaagtccttccgcggcgtgtttaagattaagtatgagagtgggacgttagaagaactgttatatgtagatatgccaagggagtcccagaattcatcctggccaaattgtcctggagtatgcaaaagcaacacaagagagtgtctttgagcatcttcgggttgttcgtgatggccaacttcgaatagtcttctcgccagatcttaagatattctcctgggaattttgtgctcggcggcatgaagagcttattccacgaagacttttgataccgcaggttagtcagcttggatcggcagctcagaaatatcaacaagctgctcaaaatgcaacaacagattctgctcttccggagctacaaaataattgcaatatgtttgttgcatctgctagacaattggcaaaggccctggaagtaccacttgtgaatgatttgggatacacaaagagatatgttcggtgtttgcagatctcagaggtggtaaatagtatgaaggacctgatagattatagcagagaaacacgaacaggaccaatcgagagtttagccaagtttcctcggagaacaggcccttcatctgcactgcctggtccttctcctcagcaagccagcgaccagcttaggcagcagcagcaacaacaacagcagcagcagcaacagcaaca

SEQ ID NO: 126922 - DNA, 609 bp, Arabidopsis thaliana
agctctaatacgactcactataggggaagctggtaccgcctggaggtaccgggccggaattcccgggtcgacccaagcgttcggccaagccttcgggcatcttcttcatctaaaaccctaagaaaacaacaatggcgttactctctcgaatccgttcatcaacatctctcttccgtcacctcaacgcatcaccacaaatccgatcactctcctcggcttcaacaatcctctcaccagattcaaaaactcctctcacaagcaaagaaaaaagcaaagcagctctctctcttctcaaatccgagaaagatccagatcgtatcctcgaaatctgccgtgcagcttctcttactccagattgccgcatagatcgaatcgctttctccgccgccgtcgagaatctcgccgagaagaaacatttctccgctgtatcgaatctcctcgacggattcatcgaaaacagaccagatctcaaatcggaacgttttgctgctcacgccattgttttgtatgctcaagctaatatgcttgatcactctttaagaggttttcgtgatctctagaaatttgaaattctttcgtactgtgtatatttttaaatgcgcctttctt

SEQ ID NO: 126923 - DNA, 708 bp, Arabidopsis thaliana
  unsure (1)..(708): unsure at all n locations
tttgtttttcaagtaaaaaatactttgagaaacaaaaagagaaaactagtatgagaaacaaatccttaaaaaaggaaataacagtaatgcacgtgatgatataacaaaaggttttgttttgtttgtttttttattgtttttttcttcttttatttgtctgttataataatcaaaaaacaagaagaaaaaacgagacgttcatgcatttaatctcgcaccttacgacaaagagtgagagagaggatcgctcaggtttgttcatcttcaccggacgattagcttttgcggtgggagaaagaacggcctgtcttcagctctgaaacagaggaacagagaggttaggaaggagacaatggttggacccgcgcggcctcagatcgttttgtttggatcttccattgttcagatgagctttggccatggtggttggggcgccattctttccgaggtctacgctcgtaaggccgacatcattctgcgaggatattatggatggaactcttctcgtgctttggaagttgtcgaccaagtgttccccaaggatgctgcagtacaaccttctctggtcattgtctattttgggaggaaacgactcaatggcgcctcactcgtctgggacttagggacctcatgtaccactttactgaatatggttgttaacatgaaggaaggacccccttaatttttaanggccttttaagntcancc

SEQ ID NO: 126924 - DNA, 452 bp, Arabidopsis thaliana
tgtttttctcactcactcgccgcttcctcttctcttcttctggttcacttctctcctaagtaataacaccactgcatgtttctctcttgagacactccaaaccatttctctccgaaaatgtctgctccttctggcggtggcgaaggaggaggaaaagaatcagctgctggtggagtgagttcatcgtctcttgctccgtcgtctctaccaccgcctcgtcctaagtctccaccagagtatccagatttgtacgggaaacgcagagaggcggcgagagttcagatgctcgagagagagattggttttctcgagggcgaaattaaattcatcgaaggcgtacaaccggcatctagatgcatcagagaagtctctgattttgttgttgcaaattctgacccattgatccctgcacaacgaaaaagtcgaagatccttccggttctggaagtggct

SEQ ID NO: 126925 - DNA, 1016 bp, Arabidopsis thaliana
aagctggtacgcctgcaggtaccggtccggaattcccgggtcgacccacgcgtccgagaagatgtgaacctcttagaagagatgtatccgcaaggagagcaggcagagactgcttgggccttcactgtcctgggatacttggccaagtttgttcttggaatcttaggattaattgtttctgtggcttggattgctcacatcatcatatatctacttgttgaccctcccctctctccttttctgaatgaagttttcatcaaactggatgacgtctggggtcttctcggcacagctgcctttgctttcttctgtttctatctcctacttgctgttattgctggggcaatgatgcttggtttgaagctggtcttcattaccattcatccaatgaaatggggagccactcttatgaactcttttctctttaatgtcggtctcattctcctctgttctatcagtgtgattcaattctgcgccactgcatttggatattatgctcaagccaccgccgctcaggagatatttggccacactttgcagtcccttcgcggtattaagtacctctacaagtacaatgtgttccaaatcgggtttgttgtcctcgctggattgacctttttatattacattgcctttggatggagaagaaaaaaaactagtggccgtttccagctctcttcttaatgtaaaaccgttttcccggggatctgattgagtgctgtcgacaaagtttctacttgtttctggatcatcatcgattccagaagtatctagagactctgcttctgaggtttattttcctgaatgtattattaaatttcttgtgagtgtgctgtttggttgcgcaacagttagctgtcctgtcttggtctattgtactgtctcggatgcgatcatgtaatcatattttcttaatgagaagccttcttcgaaaaaaaaaaaaaaaaaaagggcggccgctctagaggatccaagcttacgtacgcgtgcatgcgacgtcatagctcttatagagt

SEQ ID NO: 126926 - DNA, 569 bp, Arabidopsis thaliana
  unsure (1)..(569): unsure at all n locations
aaatggcggaaaaatgtgaaagcagttgaaaaggagttgcgccaattgggggaagatgtgaactttttagaagagatgtatccgcaaggagagcaggcagagactgcttgggccttcactgtcctgggatacttggccaagtttgttcttggaatcttaggattgatcgtttccgtggcttgggttgctcacatcatcatatatctactcgtcgaccctcccctctccccttttctgaacgaggttttcatcaagctggatgacgtctggggtcttctcggcactgctgcctttgctttcttctgtttctacctcctacttgctgttatcgctggggcaatgatgctgggtttgaagctggtcttcattaacattcatccaatgaaatggggagcactcttatgaactcctttccccttaatggcgggccatccccccnggtcnaacaagtgngatcaatctggngcacgnattngnaatatgccaagcaacggcggncagngaaattggcanacttgaagccctcgnggataagacccacagnnaaggncaaacgggtgtgcccncgg

SEQ ID NO: 126927 - DNA, 542 bp, Arabidopsis thaliana
agccacactttgcagtcccttcgcggtattaagtacctctacaagtacaatgtgttccagatcgggtttgttgtcctcgctggattgacctttttatattacattgcctttggatggagaagaaaaaagccgagcggcagattccagctctctacctaatgtaaatctcttcttttgattttatcgtttatgtttcctcgtctctgggatcgatcgcgtgccactgaggattgctgtgtccacaattataccgagattggtctcatgatctgtgcaagtggtcttatatcataagaacaagcacctgcccaaaaagcttctctttcttctgcttctctttgctgctgaggtttgttttcatttcacttgaatgtaaaattattcttctttttctcttatcttttctcctgtatctattgctttatttttgtttgattaattacaagaaagatctctttgtcgccgtcttctcatggcctattgaatgatttcgaatactttcttgtaaccattacttggttgagagtttagactgtcagaac

SEQ ID NO: 126928 - DNA, 633 bp, Arabidopsis thaliana
  unsure (1)..(633): unsure at all n locations
nnnnnnnnnnnnnnnnnnnnnnnnnnnnnnnnnnnnnnnnnnnnnnnnnnnnnnnnnnnnnnnnnnnnnnnnnnnccaggcgtgcgcccacgcgtccggaagaacacaacagtcagatactttttcttcttattttgtccgtaccgaaatcggaaaatggacattactgttcgaatctccggcttaaaatcctccaatctaatccggataacccctagattctcatcttcctctagattccgttgctccaacaacgaacctcctcgaaagggaaacgagtccaacggtggtggtggtgataaagcgtcgacggactgggacaaggcgtggaagaatttcaagaagcagagcaagaagtcattgttctcgcaattcaacgtggacaagtacgtgacttggaatcctcccagatcggagtttgatttgtcggaagaagtcgatcctataaaaagaacagagagatccaatctcatgctctggacaagtccaaggttcacacttgttggagccatcgncattggctcattcctccttctctacaccattcttgctcctgtcaagngataataatctcattcatctttcatttagatcagattctgaatctggtggttctactgggtatatgcatta

SEQ ID NO: 126929 - DNA, 430 bp, Arabidopsis thaliana
cccacgcgtcagcccacgcgtccgcggtcgcgtgggttttaactttggctgctctgtctcaatccctcgagacttaaacccacttagtacaatctccatataatttgagtagaacctaaaagatcgaagcttgaggaaaatggtcccttccaatggcgcaaaggttcttcgcttgttgagtcgtcgatgtctctcttcatcgcttattcaagatttagccaatcagaaactgagaggagtatgtattgggagttataggagattgaatacgagtgttggcaatcatgctaacgtgattggagattacgcttcaaaatctggacatgatcggaaatggatcaactttggaggttttaatactaattttggttctacaagggcttttcattggaacaggttcttcggttatgtctgctaaggactactatag

SEQ ID NO: 126930 - DNA, 523 bp, Arabidopsis thaliana
  unsure (1)..(523): unsure at all n locations
nnnnnnnnnnnnnnnnnnnnnnnnnnnnnnnnnnnnnnnnnnnnnnnnnnnnnnnnnnnnnnnnggggcccgcgtgcgccagtttcatagtcactaacctaaaagaattaatggaggaaactcggaggaggtttgtcatatcctctgttctaagtgtttctttgatctacttatgtctttcgacatgtcacgtttccgccttcgacttcggtagaaggcagctccggtttaatactgatggtcggttcaagatactgcaagtgtcagatatgcactacggttttggcaaagagacgcaatgctcagacgtttcacctgcagaatttccttactgctccgatctcaatactacctcctttttacagcgaactatcgcttccgagaagcccgatctcatcgtcttctctggagacaatgtatatggattgtgcgagacaagtgacgtggcaaaatcgatggacatggcatttgctcctgcgatcgaatggggattccatggggggctattttgggaatcacgacc

SEQ ID NO: 126931 - DNA, 697 bp, Arabidopsis thaliana
gctttacaacaactccttgaccggaaaacttcctaccggattcggaaagttgaagaatctgtcttacgtggacgcttcaacaaatcttctacaaggcgatttatcggagcttaggtctctgactaatctcgtttcactacaaatgttcgaaaacgaattctccggtgagattccgctggagtttggtgaattcaaggatctcgtgaatctctctctgtatacaaacaagttaaccggttctctgcctcaaggactcggttcacttgctgattttgatttcatcgacgcatcagagaatctcttaaccggaccgatccctccagatatgtgcaagaacgggaagatgaaagctctgcttctcctgcaaaacaacctcactggctctatccctgagtcctacgctaactgtttgactctgcaacggttcagagttagcgagaacaacctcaacggaactgttcccgcgggactttggggattaccgaagctcgagatcatcgatatagagatgaataacttcgaaggtccaatcaccgcggatataaagaacggtaaaatgctcggagcgttgtatctagggttcaacaagttgtctgatgagctgcctgaagagataggtgacactgaatctttgactaaggttgagcttaacaataaccggtttaccgggaagattcctagctccattgggaaactc

SEQ ID NO: 126932 - DNA, 887 bp, Arabidopsis thaliana
  unsure (1)..(887): unsure at all n locations
actttcttgtcgctattgccttcgccgtcattttcaccgcctccaccgtacatggtcgtcataatggtgcagaagatatcgtgcattcctcctgcgaacacgcgagctatccatcactatgcgtccgtactctttcgtcatactccggtccaaccatcaccaaccgccgcgatctagctcaagccgccataaaaatcagcctctcccacgctcaaagcgccgcgaagaaactcgcggtggtgcgagactcggtggggaagaagaagcaagagaaagcggcgcttgtggactgtgtggagatgattggagactctgtggacgagctaagccgtacgctcggcgttttgaagcacctccgtgtctctggcggttgagctaacgagttccggtggcagatgagcaatgcacagacgtgggctagcgcggcactcccggatgacgacacgtgtctcgatgggtttcaagggatggacgccggtgaaatcaaaacggaggtgaagcagtggatgacgaaagtggccagggttacgagcaacgcgctttacatggtcaaccagctagatgagacacgtggcaaaccccacgacgtacatctttgatgttaatgcactagatcgttttaatggacggtctttattgtgtgtgttggtttttcgttcatgtgtaaaaagtgtgagattatctatcgctccgatatatagaaatgagtttttgattatggataaagtcgtttttcgtagttctgattatggtctaataaataacatgtttttttttnnnnnnnnnnnnnnnnnnnnnnnnnnnnnnnnnnnnnnnnnnnnnnnnnnnnnnnnnnnnnnnnnnnnnnnnnnnnnnnnnnnnnnnnnnnnnnnnnnnnnnnnnnnnnn

SEQ ID NO: 126933 - DNA, 499 bp, Arabidopsis thaliana
  unsure (1)..(499): unsure at all n locations
ggnnnnnnnnnnnnnnnnnnnnnnnnnnnnnnnnnnnnnnnnnnnnnnnnnnnnnnnnnnnnnnnnnnnggagccaggcgtgcgtaacaataagaaaccaataaactctaacgctcttcaaagcaaaaaaaaacatcaataatgaagcaatctcttcttctatccttcgtgttactactactctcatcatcatcactcgtgacaccaatccatgcacgtaacaaatcaaatccggcaaagtctcctgttggtgctccagcaccaggaccatcaagttccgattgttctacagtaatatatagcatgatggattgtctcgggtaccttggtgtcggatcaaacgaaactaagccagagaaatcgtgttgtactggaatagaaactgttttacaatataacccacaatgtatttgtgctggtttggttagtgctggcgaaatgggaattgaactgaatagcacaaggactcttgcacacctaaggcttgcaaactctccat

SEQ ID NO: 126934 - DNA, 425 bp, Arabidopsis thaliana
cttggaatccattttcgtttgaatctcaacgttttttgcttgattttagcttctgagagagtccagatccaaggaattggaggaagaataatgtcggcaaggcatgggcaatcgtcgtatcgagatcggagtgacgaattcttcaaaattgtggagactctaaggagatcgattgctccggctccggcggcgaataatgtgccgtatggtaataatcggaacgatggtgcgagaagagaggatcttatcaacaaatccgagttcaacaagagagcttctcatattggtttagctattaatcaaacgtcgcagaagctatcgaagcttgcgaaacttgcaaagaggacatcagtgtttgatgatcctactcaggagatacaagagctgacggtagtcatcaagcaagagatctctgctctaaattc

SEQ ID NO: 126935 - DNA, 509 bp, Arabidopsis thaliana
  unsure (1)..(509): unsure at all n locations
cnnnnnnnnnnnnnnnnnnnnnnnnnnnnnnnnnnnnncggacgcgtgggcggacgcgtgggcggacgcgtgccccgccgccggactgagagacatctcggtgaagaagtagcagagatgtcgacggtgtacgtgctagagccgccgacaaagggaaaggtcattgtaaatactactcatggtccaatcgacgtcgagctttggcctaaggaagcgcccaaatccgtacggaacttcgttcaactatgcctcgagggttactttgacaacaccatcttccatcgtgtcattcccggttttctcgttcaaggcggcgatcccaccggctccggaaccggtggagatagtatatatggaggtgtctttgccgatgagttccattcaaggctgagatttagccaccgtgggattgttgccatggctaatgcgagctcacctaattctaatggaagtcagttctttttcactttggataagtgtgattggcttgataagaagcacactatctt

SEQ ID NO: 126936 - DNA, 876 bp, Arabidopsis thaliana
cagctctaatacgactcctattggggaaggtggtgcccctggcgggaccgggcccggatttccgggtcggcaccacagcctgccgcggcaccctggggcggccacaggggtcggccacaggctgcggcttttttcttttttctggaagcggagaatccaatccaaaaaccaaacctggttctccggggatcgcttttcgaaatggaattccttaacctcagttgcatccattggcagagaagttagtctgagggacctcatcactgaggttccggcttatactggcagcagcatttccgatggttcttcaagtgggtggagttgggtcttgaagcgttgggctactaagaaaaccgctggttctacaaagaacggtcgagactctaatcccaagtttctgggtgttaagaaattcggaggagagagtgtgatacctggaaacatcatagttcgtcaacgtggaactcggtttcatcctggagactatgtcgggattggtaaggaccatactctgtttgcattgaaggaaggacgagtcaggttcgagaaaagcaagattacaggacgcaaatggattcatgttgatccaataggtggtcatgttcttcaccctatctacacaaaagccgcagctgcaaaatcgactaagttgaacacagcttcatagcaaactcgacaatctaaacgtgtcttcgtttcttcttttagattatatgatctctcgagtaaaagatgatggtatcttagaatatcaacactcattcccattacagctgctgttttgtttcaaaaaaaaaaaaaaaaaaagggcggccgctctagaggatccaagcttacgtacgcgtgcatgcgacgtcaagatcttctatagtgtac

SEQ ID NO: 126937 - DNA, 372 bp, Arabidopsis thaliana
acggacgcgtgggtcgcccacgcgtccgcccacgcgtccgcctctctccttctctcgcagccgacgatcccatccaaaaaccaaaactcgctctccggtgatcgtctttcgaaaatgaatttcttaaactcagctgcatccatttgcagaagagttagtctgagggaactcatcactgaggttcctgcttatactggcagcagcatttccgatggttcttcaagtgggttgagtttggtcttgaagcgttgggctactaagaaaaccgctggttctacaaagaacggtcgtgactctaatcccaagcttcttggtgttaagaaattcggaggagagagtgtgatacctggaaacatcatagttcgtcaacgt

SEQ ID NO: 126938 - DNA, 867 bp, Arabidopsis thaliana
  unsure (1)..(867): unsure at all n locations
cgcagtaccggtccggaattcccgggtcgaaaaagcatttacacaacgaagatcattaatggctctcgaggcatggtttatggatgatagcaatgaggaccagagacttcctcatcatcgtaacccgaaagaactcgtctcgttggattacttggcagagttgggagtgttgtactggaagttgaaccctgagaactacgagaatgattctgaacttagcaagattagagaagacaggggttacgattacatggatttgctggatctgtgtcccgagaaagtcagcaactacgaagaaaagctgaagaactttttcacagaacacattcacaaggatgaagagattcggtactgcctagcaggaagtggctactttgatgttagggacaaggatgatcgttggattcgtatctggatgcaacctggcgatctcattgtccttcctgccgggatctaccaccggttcacattcgacaccagcaactacatcaagctaatgaggctgttcgtgggggaaccggtttggacaccatataaccggccacaggaagaacatccggttaggcaaaagtatatccacggcttaacctacaagtttggagaaaccgttaaagcacattaacaatattaatatatgcttgttgggtaatttgtatgtattggttactctttagtcttaagcagttaaaataaaaccggcggctccttctgggttgttggtcttggaacatacttttgcgatgtatgcttttatacataaaaaaaatagtgtgtatttatctaaaaaaaaaaaaaaaagnnnnnnnnnnnnnnnnnnnnnnnnnnnnnnnnnnnnnnnnnnnnnnnnnnnnnnnnnnnnnnnnnnnn

SEQ ID NO: 126939 - DNA, 525 bp, Arabidopsis thaliana
  unsure (1)..(525): unsure at all n locations
nnnnnnnnnnnnnnnnnnnnnnnnnnnnnnnnnnnnnnnnnnnnnnnnnnnnnnnnnnnnnnnnnnnnnnnnnnccacgcgtncagccacgcgtccgtccacgcgtccgatctgttcacagagaattgaagtcgagacattagaagtgtttgttgtgtgtgtgtgtgtgtttctatagaatttttgaattttgtgataaaattgtgtgaatgggagctccaaagctgaagtggacaccagaagaagaaacagctcttaaagctggagtacttaaacatggaactggaaaatggcgtaccattctctcagatcctgtgtatagcacaattctgaagtctcgttctaatgtggatctcaaggacaaatggagaaatataagtgtaacagctttatggggatctaggaagaaggctaagcttgctcttaaaagaactcctttgtcgggtagtaggcaagacgataacgctacagctattaccattgtgtctttagctaatggtgatgtaggaggacaacagattgatg

SEQ ID NO: 126940 - DNA, 960 bp, Arabidopsis thaliana
  unsure (1)..(960): unsure at all n locations
aggagatggaggtgtcctgcgggaagttgcacgcnatgcttctattgagcagattgacatgtgggaaattgatgaaatggtggtcgacgtgtctaagcaattttcccctgatgtagcaattggatatgaggatcctcgcgtgaaccttgtcattggcgatggtgttgctttcttgaagaatgctgctgaaggatcatacgatgcagttattgttgactcttcagatccaatcggtcctgcaaaggagctgtttgagaaacccttcttccaatctgtggctagagctcttcgtcctggtggagttgtgtgcactcaagctgaaagcttgtggcttcacatggacatcatcgaagacattgtttccaactgccgtgagatcttcaagggttctgtgaactatgcttggaccagcgttccaacataccccagtggggtcattggatttatgctttgttcaactgaaggacctgatgttgacttcaaacacccactgaacccaattgacgagagctccagcaaatcaaatggacctttgaagttttacaatgccgagattcattcagctgcattctgcttgccttctttcgccaagaaggtcattgagtcaaaagccaattgaaaagggaaagaaaactaatctggaggatcgttgaatttatcaaaaaataaaagctttttacagtttttagaatgttctgttgtttcactcatgtttctgtaacacaatgcaagagcgactatgtcttcttttagcattacacattcgcatagtagcaaatcctatttacaacatgttcttatgcttttgcgttgaagctgagaagtctaataacctttctgcttttataccatttattataaagattcacacttaaaaaaaaaaaaaaagnnnnnnnnnnnnnnnnnnnnnnnnnnnnnnnnnnnnnnnnnnnnnnnnnnnnnnnnnnnnnnnnnnnngcc

SEQ ID NO: 126941 - DNA, 522 bp, Arabidopsis thaliana
acgactcattatagggaagagctggtccgcctgcaggtaccggtccggaattcccgggtcgaccctcccgcccgcttcaacctcctaagcacattcttatctctttctgaaacgagttcccaaattagctctacaaaaaccaggatcttgatttctcatcagttaaacatgggaactcctgtcgaagtctctaagctccatttcttgctcttccctttcatggctcatggccatatgataccaactctagacatggctaagctctttgccaccaaaggagctaaatccactatcctcactacacctctcaatgccaagctcttcttcgagaaacccatcaaatcattcaaccaagacaacccgggactcgaagacatcaccatccagatccttaatttcccttgcacagagcttggtttgcctgatggctgtgagaatactgatttcatcttctccacacctgacctaaacgtaggtgacttgagtcaaaagtttttactcgcaatgaaatatttcgaagag

SEQ ID NO: 126942 - DNA, 471 bp, Arabidopsis thaliana
cacacgcgtccgagcaataaatctcacctcccttttttttttttttttgtctcgctacttttgattatcatttaaaaccaaaaaacctaccatgaatgagaatcacattcaaagtgatcacatgaacaacaccattcatgtaacaaacaaaaaactcccaaacttcctcttatccgtacgtctcaaatatgttaaacttggttaccattacctaatctcgaatgccgtctacattctcatactccccgtcggcctcctcgccgcaacctcctcctcctttagtctctccgatctcacactcttatacaaccaccttctcaaattccactttctctcgtccactctcttcgccgctcttcttatctttctaaccaccctctacttcacaactcgtcctcgcagaatctttctcctcgatttcgcttgttacaaacccgactcttttctaatatgcacacgagaaacgttcat

SEQ ID NO: 126943 - DNA, 1268 bp, Arabidopsis thaliana
  unsure (1)..(1268): unsure at all n locations
cgcagtaccggtccggaattcccgggtcgacccacgcgtccggatatgatattattaagtagtagtataagcctctcaagaccagtttcttctcaaagcttctctccacctgctgccacttcaacaaggagatctcattcctctgtcacagtcaagtgctgctgttcttccagaaggttgttgaagaatcctgagttaaaatgttccttggagaatctctttgaaatccaggctttgaggaagtgttttgtttcagggtttgcagctattttgcttctctctcaggcaggccagggtatagcgttggatctctcatctggttatcagaacatttgccaactagggagtgctgctgctgtgggagaaaacaagctgactcttccatctgatggtgactcggaatcaatgatgatgatgatgatgagaggcatgactgctaagaactttgaccctgttaggtactctggaagatggtttgaagtagcttctcttaagcgtggatttgcaggtcaaggccaagaagactgtcattgcactcagggagtatacacgtttgatatgaaggaatcagccattagagtagatacattttgtgttcatggcagccctgatggatatataacacgaatcaaagggaaagttcaatgcgtgggagcggaagacctcgagaaaagcgagactgacttagcaaagccagagatgattaaagagaagtggttcctaccatttcccacccattcctttttttccccaagtttgccttatgaatgtcataacccacaggactacgaacaacctacgccactttggttcttgggagcttaaagggctttgttcaggtatactcaaggacgccaaatccaggacctgagttcatcgcaaagtacaagaactacttggcacaatttggctatgacccggaaaaaataaaggatacaccacaggactgtgaagtgactgatgctgagctagcagccatgatgtccatgccaggtatggagcaaacactgaccaaccagtttccagatcttggattaagaaagtcagtccagtttgatcccttcacaagtgtgtttgaaaccttgaagaaacttgtaccgctctatttcaaatagagcaagcttctttgctcaaattcttatgtagactataatcactgtccatatatacatatcttccagaatcaaaaaaaaaaaaaaagnnnnnnnnnnnnnnnnnnnnnnnnnnnnnnnnnnnnnnnnnnnnnnnnnnnnnnnnnnnnnnnnnnn

SEQ ID NO: 126944 - DNA, 476 bp, Arabidopsis thaliana
cagacccccctaagaatccgagagagaagaagagataatgcagatcttcgtcttaaccctcaccggcaaaactataaccctagaagttgagagcagcgacaccatcgacaatgttaaagccaaaatccaggacaaagagggcataccacctgatcaacagaggctgatttttgctggtaagcaattggaagatggccggaccttagctgattacaacatccagaaagagtctactcttcatcttgtcctcaggctcagaggtggaaccatgatcaaggtgaagacactcactggaaaagaaatcgagattgatatcgaaccaaccgacactattgatcggatcaaagaacgtgttgaagagaaagaaggcattcctcctgttcaacaaaggctcatatatgccggaaaacagcttgctgatgacaaaactgccaaagattatgcgatagagggaggctctggtcttcaattggttc

SEQ ID NO: 126945 - DNA, 603 bp, Arabidopsis thaliana
  unsure (1)..(603): unsure at all n locations
gccnnnnnnnnnnnnnnnnnnnnnnnnnnnnnnnnnnnnnnnnnnnnnnnnnnnnnnnnnnnnnnnnnnnnnnncgcacgcgtccggcagaagcggcggcggaagaggaggaggaggaggaggagcatcggctgatcttcactccgcggcaagatccggtgatttagcagcagttcaatctattatcagctctaatcctttggctgttaattctacggataagcattctcggactccactacatttagcagcatgggcagggcacaacgaggtagtgagctacttatgcaagaacaaagctgatgttggtgctgcagcaggagatgacatgggtgcgattcactttgcttctcaaaaggggcatttggaagttgtgagaactttattatctgccggtggttctgtgaagtctatcactcgcaagggactcactcctcttcactacgctgctcaaggttctcactttgaaatcgtcaagtacttggttaagaaaggagcaagcgtcagagctacgactaagggctgggaagagtccagctgatgttgcgggtaatgcagaaaccgcaaattccttgaagaatgtgaagagcaagccaggaaagc

SEQ ID NO: 126946 - DNA, 581 bp, Arabidopsis thaliana
  unsure (1)..(581): unsure at all n locations
nnnnnnnnnnnnnnnnnnnnnnnnnnnnnnnnnnnnnnnnnnnnnnnnnnnnnnnnnnnnnnnnnnnnnnnccacgcgtgcgggacattatagacacaaaagatggaagctgtaagatgcagaagaggcagagagaacaacaaaagtccagagaggatcataaggtctttgaatcatcatcaacatgatgaagaacttgaagaagaggtcaagacaaagaaacccattttccgaagagtccaagttgtttactatctcacaagaaatggccaccttgaacatcctcacttcatcgaagtcatttctccggttaaccagcctctccggttaagagatgtgatgaaccggcttacgattctgagagggaagtgcatgacatcacaatatgcttggtcgtgtaaaaggagctatagaaatggatttgtgtggaatgacttagcagagaatgatgtgatttacccttctgactgtgctgaatatgtcttgaaaggatctgaaatcacccgcaaatttcaagaagtacttgtgaacagaccattgtctggttctattaaagaagctccaaaaagtcgactttctaa

SEQ ID NO: 126947 - DNA, 534 bp, Arabidopsis thaliana
  unsure (1)..(534): unsure at all n locations
cnnnnnnnnnnnnnnnnnnnnnnnnnnnnnnnnnnnnnnnnnnnnnnnnnnnnnnnnnnnnnnnnnnnnnnccacgcgtccgcagaggcttgggaacaatgtctcaagggaaacaaagagggttaccccgtgtggaattaaataagcgatgtaggcaaaaggcactgcgaaaaaaagagacaaagggaaagggctaaagagaagatatttaacgaaattgacagcttgcccaacatcttagaagaaatagcccaagaagatgagggataaccagaattaacatttacgaagggtcatcgccaagcaggaagtgctgaagatacctccctcctcggttgggaaaggtccaatttgaggctcctccagttcaagtcctcttgaccgaagagatgactgggtcaccttcgtaagctgaaggcatggtggacttttgccagagatcgattcaagaaccttgagaagcgaggaatacttggttccttaaaacagattaaaagggtttaggaacttttcttactgtctaaagcttggttg

SEQ ID NO: 126948 - DNA, 919 bp, Arabidopsis thaliana
  unsure (1)..(919): unsure at all n locations
agttttttgaaaaattccaataaaaaaggcccggtaatttaacaaaagtttttgcccgttccacattattgccaaaaaagaagttttgtttaaaaactccccaacgccaaagaaagagcattccaaatttgtttgaaaaaggtgttaatccacaaataatttttttgagcaccgcggtctgaattcacaaccgccaaacgcgagagagactggtacttgtgggtttgggaaacccatggttgtgctctcttccccaaataatgggagaatccccattttttccacctggggaaagggccaaagtaaaaattttgtgcgttaaaggaagtattattgaagggtctctaagagggaacgggtatgggtaaccaatccttactagaaaatcattaccgggtcaatttccttttgtttttgatgctccaaactttataagccttcatgacctagagttaaccagaaacatccattttgagtcaccgcaccttgtaagcctttgtgaacaagagttatccagtagcgagcagctggagccgccacaccctgtaagcctttgtgaccatgagttaacccgaaacgagcagctggagccgccacaccctgtaagcctttgtgaccatgagttaacccaaatcgagcagctggagccaccccagcctgcggcgcgcttgtaaaacaagtcgtagttagagattatgcttttacattgacatcttgatggtgtgtaaccagtttcacctttcatttgcatctggatatttgtattgctaatttaacattttgttagacgttttgttttgtatcattagtttcgctgggtctttggattaaaaaaaaaaaaaaaaaagggcggccgctctagaggatccaagcttacggaagggtgcaggcgacgtcnnnnnnnnnnnnnnnnnnaacg

SEQ ID NO: 126949 - DNA, 1225 bp, Arabidopsis thaliana
  unsure (1)..(1225): unsure at all n locations
gcagtaccgcaccggaattcccgggtcgacccacgcgtccggacctcaaatcgtacttttcggttcttcaattgttcaatatagcttcactgatcgtggttggggtgccactctcgctgacctctactctcgcacggctgatatcattcttcgtggatatgctggttggaattctaggtttgccttgaaggttcttcaccaagtattcccaaaggatgctgtgatacaaccttctttggtgatagtctatttcggtgggaatgattcaactcatcctcatccttcaggtcatggccctcatgttcctttatctgaattcatcgaaaacatgaggaagattggtgaacatcttttgagcctttctgataaaactcgtgtcattttcctcactccgccaccaatgaatgagaaacagatcgagatagtttttggagatgcaataaaaggccggagttacgagtttgtgccgtccatatgcagaagaggttgttaaatctatgcagagagatcaatgtgaaaggtatcgatatttggacccgcgatacacccgccaagatgtttggttgaacagctgcttcacagatgggatcccttttcactgcgaaggcaagtgagattgttgttaaaggagattttgaaggtactgagaggagcggattggaaaccaagtcttttactggaaaatcattaccgggttgaattttccattttgattttgatgctcccaaacttctataagcccttccatgaacctaagagttaaacccagaaaaccaaccattttgagtcaccgcaccttgtaagcctttgtgaacaagagttaaccagaaacgagcagctggagccgccacaccctgtaagcctttgtgaccatgagttaacccgaaacgagcagctggagccgccacaccctgtaagcctttgtgaccatgagttaacccaaaacgagcagctggagccaccacagcctacggcgcgcttgtaaaacaagtcgtagttagagattatgcttctacattgacatcttgatggtgtgtaaccagtttcacctttcatttgcatctggatatttgtattgctaatttaacattttgttagacgttttgttttgtatcattagtttcgctgggtctttggattaaaaaaaaaaaaaaaaaagnnnnnnnnnnnnnnnnnnnnnnnnnnnnnnnnnnnnnnnnnnnnnnnnnnnnnnnnnnnnnnnnnn

SEQ ID NO: 126950 - DNA, 522 bp, Arabidopsis thaliana
  unsure (1)..(522): unsure at all n locations
nnnnnnnnnnnnnnnnnnnnnnnnnnnnnnnnnnnnnnnnnnnnnnnnnnnnnnnnnnnnnnnnnnnnnnnnnctcttggccgagagaagaaacattgatcgtcgatcatggttggaccagtaagacctcaaatcgtacttttcggttcttcaattgttcaatatagcttcactgatcgtggttggggtgccactctcgctgacctctactctcgcacggctgatatcattcttcgtggatatgctggttggaattctaggtttgccttgaaggttcttcaccaagtattcccaaaggttctctctttttgcaaaaagattatgtaatatagtgaaaggaattagctttacttgacctctttttttttggttatgtactgttaggatgctgtgatacaaccttctttggtgatagtctatttcggtgggaatgattcaactcatcctcatccttcaggtcatggccctcatgttcctttatctgaattcatcgaaaacatgaggaagattggtgaacatctt

SEQ ID NO: 126951 - DNA, 419 bp, Arabidopsis thaliana
ctctctctctcttttctcaaatcttggaggagaagaagcaaagaattagactactctgcaacaatggctatttattctgtccataacggcgacaagaaacattggtggttcactcacaagaagattgttgataagtacattaaggacgcaagatctttaatggagagtgaggagcaaaacgacgttgcttcagccattcatttactagacgcggctttatcaatatccccgcgttcggaaactgcgttagaacttaaagccagatctttgctctttctacgtcgcttcaaagatgtagttgatatgcttcaagattatatcccaagcctcaagcttgccgtgaacgaggaagatggatcttattcatacgaaggttcttcttactcttcctcgtcttctcagctctcccggaaacttct

SEQ ID NO: 126952 - DNA, 579 bp, Arabidopsis thaliana
atacgactcactttagggaaagccggtacgcctgcaggtaccggtccggaattcccgggtcgacccacgcgtccgcccacgcgtccgtacgctgcgagaagacgacagaaggggacgtcccggtagagagaaagagaggaaagcttaagccgacgacgacgacgaagatgagagagacggtgaagttgataagcatggaaggtttcgagttcgtcatcgacagagaagccgctatggtttctcagactatccgaagcatgctcacttctccaggtggtttctcggaatcgaaagatggcgtagtgactttccctgatataagcaccacaatactagagaagatttgccagtacttctattggtctcttcaatactctagaggcaaagagacagagtttcatattgagcctgaactgactctagagctgatgatggctgctaactatcttcacacttgaagaatgaaaaggataacgctgttgaatcttattcgacttgtgtgaatcaaaaggataaatctgcattgggttcaagaagaactattgaatagctctaaggaaaagtcatgtacttctttac

SEQ ID NO: 126953 - DNA, 520 bp, Arabidopsis thaliana
cgactcactataggagaagctggtacgcctgcaggtaccggtccggaatcccgggtcgacccacgcgtccgggagcgtgcaaaaaaaagtcacagtcgcgagataaaatccgaagctagcgaaaagcttcgatttccagcgatcctagtgttggattctacgattttagggtttaaatcttgagatgtgttcgttatcaatgcaattctcgctcttgcaatcaccaccatctcgtccttgtccgtcttttttagccaaccatgaacctaaactctctactacttcctcctctgtgaccttccccttgaagacgaacacttggaagtgtagcggaactgggaatttgttggttttgagagttaaagcttatggttcttcttctgattcctctgcagattcctccacgcctcccaatggccctcggccgcccaaaaccagaaggggttttcttctccggagttttgtcacaaaatgggaaacccaagtttcttgggtaagtttcgtttaaacggccccctaa

SEQ ID NO: 126954 - DNA, 404 bp, Arabidopsis thaliana
cacttgtcgagcaatgtcgtcgtcttggtcctgcaacaaatgtactttcctcaattctgcgtctcagaaactcaattgcatgatctgcttggctcctgtatctctcccttctttgtctcctcctccaccttctctctcaatttccgcgaacgatgaagctaaatgggcttgcaaggcctgtacttttttgaacacgtacaagaactcaatctgtgacgtctgtggaacacgatcgccaacgtcttctctcttgggatttcaggatttgactgattcgggtctcgagagtaacgacgctgattcctccgtcgggtctgttttctttcctctgcggcggtgtatcaagcgtaaagctatggatgatgacgtcgtcgaagtcgatggtgcttctgttgtttgctctg

SEQ ID NO: 126955 - DNA, 613 bp, Arabidopsis thaliana
  unsure (1)..(613): unsure at all n locations
nnnnnnnnnnnnnnnnnnnnnnnnnnnnnnnnnnnnnnnnnnnnnnnnnnnnnnnagggaggaatccacgcgtccggaggaatggaaggaatggatttctcgaaattaatgggtggaatgggtggaatgggtggaatgggcggactcgaagggctcggtggaatgggaggcatgggtggaatgggaggcatgggtggtatgggaggcatggaagagtttgaagacagtgatgatgaagaagagacagcaaaatcaggagacaagaaggatgatgccgttaaggaggaaggtcttgcgacagagaaggcaccagcggcagaagaaacaacatctgttaaggaagacaagtgaagactctgttctagagatgatgaaaaaccatatggtattattagcttttcaggtttatgaaaccctctgaattacttcctcttttatatgaatgttgttggtactctgttttctttctatggatttgatcttggtttaagtttcttctaccttttgttttgggttatattgtctccaaaagttcttggacttggaaannnnnnnnnnnnnnnnnnnnnnnnnnnnnnnnnnnnnnnnnnnnnnnnnnnnnnnnnnnnnnncg

SEQ ID NO: 126956 - DNA, 731 bp, Arabidopsis thaliana
  unsure (1)..(731): unsure at all n locations
acgcgagcggcagattactacatatgctaaaatgtttgatattatgaagaatgggaggaatcagggggctcaaggatggtctaagaagatttgcatggcgttcttacaagggaagaggcagggtatgatcacgccttcttctaaagttatcatcaagttccttatcgtcatgcaaaagcacggttacattggcgagtttgagtatgttgatgaccacaggtctggtaagattgttgttgagcttaatggaaggctgaacaagtgtggagttatcagtcctcgtttcgatgtcggtgttaaggagattgaaggatggactgctcgtctacttccttccagacagtttggtttcattgttctgacgacctcagcgggaatcatggatcatgaagaagctaggagaaagaacgttggtggcaaagttcttgggttcttttactgaagcagggtctcgagatctatcttatcgggttatagtttggttctctgtaagtcgattgacctcactgtcaaagtagtagttttatatgttgtggtcgctcggatacgtaaaaacttggagatgagtagactaattaatttcagtttttgaattcgttagacttgcgatttatgaaatcaaaatcatctttcttgggtnnnnnnnnnnnnnnnnnnnnnnnnnnnnnnnnnnnnnnnnnnnnnnnnnnnnnnnnnnnnnnnnnnnnnnnnnnnnnnnnnnnnnnnnnnnn

SEQ ID NO: 126957 - DNA, 524 bp, Arabidopsis thaliana
taaggcaccagcggcagaagaaacaacatctgttaaggaagacaagtgaagactctgttctagagatgatgaagaagagacagcacaatcaggagacaagaaggatgatgccgttaaggaggaatctctttttcaaggccaagcgagcaagagacgtcggagcggcggctactacttaggtttcagtttttgaaattttgaagaatggtgagaatcagtgtgctcaatgatggtcttaagagtatgtacaatgcagagaagagaggaaagaggcaggttatgatcaggccttcttctaaagttatcatcaagttccttatcgtcatgcaaaagcacggttacattggcgagtttgagtatgttgatgaccacaggtctggtaagattgttgttgagcttaatggaaggctgaacaagtgtggagttatcagtcctcgtttcgatgtcggtgttaaggagattgaaggatggactgctcgtctacttccttccagacagtttggtttcattgttctgacgacctc

SEQ ID NO: 126958 - DNA, 512 bp, Arabidopsis thaliana
ctcaccagccgccattcaacgccggcgctaacggtaacagtcagtttcctcctccatctaccggtgcgccgattcctccgccatatcctcaggctaatcaggaatggggcaatccaaattgggggtatcaacaacaacaaggtcacacccctcaagctaatagcaacgtcgaggactgggctgtgaaagccaaagaatgggcagctgcgaacaaggatcagcaatcacagcagtctgcaccgaaccaacctagcggacaagtctaccagcagcagtatcctactcatggctatcaagattttcatcaacaggcagttccaggagtaagctatcagcagcatcagcagtttccagttccacccacaacacagcccgagagatatccaaattacgcaacaggaaacgagagctttcctggagttggattgccccaagaaaacctgcctaccagttctgcaattcatcagcggggggccccttatacttattcttctgtagcaggtaaccattta

SEQ ID NO: 126959 - DNA, 513 bp, Arabidopsis thaliana
  unsure (1)..(513): unsure at all n locations
nnnnnnnnnnnnnnnnnnnnnnnnnnnnnnnnnnnnnnnnnnnnnnnnnnnnnnnnnnnnnnnnnnnnnnnnnnnccacgcgtccggttttgtctcgttcgtgcagagtattcagcctcactttgatgctgtgagctttaacaatgttcaaggagactgtgtggcgacttaccttgctgaaaagcagaatgtcatgaagtctttagaagggattcctggacgcttctgtctaacgctcgacttttggacctccaagctaactcttgggtatgtgtttataactgctcactacattgacagcgattggaagatacaaaagaagcttctcaatgttttgatggaatcgtatccagaagctgacgaagccttgagtctcgcggttgcaaattgtgtttctgaatggggtctggagggaaagttgtttaacgtcacctttaaccacccggcgagtaactctgcggttgaaaacatcagacctcaactctgcatcaagaaccctgggattctggatgg

SEQ ID NO: 126960 - DNA, 835 bp, Arabidopsis thaliana
  unsure (1)..(835): unsure at all n locations
ttttattccaattacattttagggaaggctggtcccctggcaggtcccggcccggatttcccgggtcgacccacgcgtccgttaatatccataatttttttttttaatctccccttggttgatcgggggaacacaaaaaaaaaaatctaaaataatcgcaaaatacattttgaagaagctacacgatcaacaacagcaaaggatttcgattgttgaaaaagttgactcttcttaatttgattcgttgtcttggtttctgggttttcttcttcttcttctgcggcgctctccaattttacaccttgcgaccagcgagaaaagaaacaaatttcacccccattgaagaaggacctttggttaagctccatggtgtggtatgcgcaaagtggacaatacctagatgggtgtttctcttctgaaacaacaacatcgtattacaaatcaagctgatactttttctagattcatggaaagatcaccagagaataatctaagcagaaatgagcacatcatcattgacattccaagaaatgccgccattgcatcatcatcatcttctcatgatagaatctcaaatgttttggaacctttacaacatgaggaagagagaccttctactgtttctcccatggctgctcctcagccagctacagctacagcttcttcttcttcttctatgcgatcaaatcctagaagtgtccgtcgtagaagaagtcctttgaattctggcttatggatttctattgaactattccgcgnnnnnnnnnnnnnnnaaaaaaactattgtcgttttgtctttgtcaaaacatgagcatcctcgtgctcctttgttcac

SEQ ID NO: 126961 - DNA, 591 bp, Arabidopsis thaliana
  unsure (1)..(591): unsure at all n locations
nnnnnnnnnnnnnnnnnnnnnnnnnnnnnnnnnnnnnnnnnnnnnnnnnnnnnnnnnnnnnnnnnnnnnnnnnnnccacgcgtccgctttgcgaaaagtcgtttttttaatcaagtctgaatcacgttttattgatctacactcgcgtgggttctccgtttcgtgcttagatcagagagctccctcccgtgattccgagctttaaggtcggaaatggcggctcatgtttctactggaaacattcataatttctatcttgcggggcaggtttacaggggacaagctttttcatggagttctgcttctactttcatggcaaatccattcaaagagccctcttggtcaagtggggtatttaaggctctaaaagctgagagatgtggttgttactctcgtggtatttcccccatcagtgagacctcaaaacctatcagggctgtttcggtatcttcttcaacaaagtattatgatttcactgtgattggtagtggagtagcgggtctgcgttatgctttagaagttgcaaagcaaggaacagtcgcagtgattaccaaagatgagcctcatgagagaacacaaactatgctcaag

SEQ ID NO: 126962 - DNA, 800 bp, Arabidopsis thaliana
tctacgactttctatagggaaagctggtacgcctgcaggtaccggtccggaattcccgggtgcggccacgcgtgcgcccacacgtccgcggaattttcccaaaagaaaaacagagaatgatgaagctgcaagggggacttctccagtggagtcgtagcagcttaatcccgtcgatttatacgccaatcaacaaaacccaattctctatcgccgcctgtgtcatcgagcggaaccaccagcttacggcgaaggagagacggcagctccggaacgagcggcgggagagtaaattggggtatagctggcgagaagaagttgaagaaaagttgattaagaaaccaaaaaaacggtatgcaacgtggacggaggagctgaatttggatactttggctgagtcgggtccgcaatggtgggcggttagggtttcgagacttcgtggtcatgagactgctcaaatcttagctcgagctctggctcgtcaattccctgaaatggaattcacggtaattggaattttactggatatttgggttgtgttgggtgattttaaagtttggattttgacaatgagattggatcaaactggtatcttgatagaattgctgacaaactctaaacagttgttgatggaaagtgaaaagatttgattttgggttattgtgtgatctttagaatttgtggggaattcatacattggtattgaaacaagtggcttttgaatttggctgtccaggtttatgcaccatctgttcaagtgaagagaaagctaaagaacggttctatatctgcccacgcgtccg

SEQ ID NO: 126963 - DNA, 748 bp, Arabidopsis thaliana
aaagttctactaattaaaaacatttttatagaacaagaaaaaaacagtttttgataatttgcataagctaaaaacatttgtaatctagacattacccgaaaaatatttattcaaaattttaaaatacaaagttagtgccccatatctttgtaaagtactccaattttgtgatttgcagtttaattactacttcaatccggtaattttaatctgatttagtttcataccggcatttgggataaaccgggttcccggttaaacaaattccaaaacattatccaaaacaaacagagaattttatcaacggaattttcccaaaagaaaaacacagaatgatgaagctgcaagggggacttctccagtggagtcgtagcagcttaatcccgtcgatttatacgccaatcaacaaaacccaattctctatcgccgcctgtgtcatcgagcggaaccaccagcttacggcgaaggagagacggcagctccggaacgagcggcgggagagtaaattggggtatagctggcgagaagaagttgaagaaaagttgattaagaaaccaaaaaaacggtatgcaacgtggacggaggagctgaatttggatactttggctgagtcgggtccgcaatggtgggcggctagggtttcgagacttcgtggtcatgagactgctcaaatcttagctcgagctctggctcgtcaattccctgaaatggaattcacggtttatgcaccatctgttcaagtgaagag

SEQ ID NO: 126964 - DNA, 592 bp, Arabidopsis thaliana
  unsure (1)..(592): unsure at all n locations
nnnnnnnnnnnnnnnnnnnnnnnnnnnnnnnnnnnnnnnnnnnnnnnnnnnnnnnnnnnnnnnnnnnnnngggccacgcgtccgattttctcttacatcacttaatttataatttccttttcccattttttttcaaaaaaggaactatgatttctgtttctgaatttgttctctgcatagatgacaatgttagtggtacgtgcatgagaggtaaggtcgttatcagtgatcaagcatttgtgtatgctcaatctgtttatgtagaagacggtgacaacgatgatgacgatatctatgattatgctccagcagcatgaatggatcatatgaaacatgattttgtacctttatatattaatgattttttgccctagggtttctttatgttagttgatttaataccttcagtctttcactataaatcctttaatatttgcttctatacacagctctttgtttcacgttatagaagcgatcgaacgaaaaatttcaaagcaataacgttttattatgcgcattgagatcattactaattttgtttttataaaaacagtgatgtgctaacattcttatgaaaaataaaatttatgat

SEQ ID NO: 126965 - DNA, 848 bp, Arabidopsis thaliana
  unsure (1)..(848): unsure at all n locations
nnnnnnnnnnnnnnnnnnnnnnnnnnnnnnnnnnnnnnnnnnnnnnnnnnnnnnnnnnnnnnnnnnnnnnnnnnnnnnnnnnnnccacgcgtccgcactctcctcttttccttgtccttctctatcgcttctataaactttttcgatctaaggttcgtgatctccttcttctctacgaagtttacactttttcttcaaaggaaacaatgagccagtacaatcaacctcccgttggtgttcctcctcctcaaggttatccaccggagggatatccaaaagatgcttatccaccacaaggatatcctcctcagggatatcctcagcaaggctatccacctcagggatatcctcaacaaggttatcctcagcaaggatatcctccaccgtacgcgcctcaatatcctccaccaccgcagcatcagcaacaacagagcagtcctggctttctagaaggatgtcttgctgctctgtgttgttgctgtctcttggatgcttgcttctgattggagtctctctctctctgcataaagcttcgggatttatttgtaagagggttttggttaaacaaaaaccttaattgatttgtggggcattaaaaatgaatctctcgatgattctctttcgttttatgtgtaatgttcttcggttcataacattttaactattgtctatcgacgttctgccttagtttgtatttgattatgggaatgtaaattggttgggagacactattctatgccatagtttattgcttggatcttaaaaaaaaaaaaaaaagggcgaccgctctagaggatccaagcttacgtacgcgtgcaggcgacgtcatagctcttctatangtgtgt

SEQ ID NO: 126966 - DNA, 442 bp, Arabidopsis thaliana
atcctccgcaatttcgcaattttgtgaaggagccgccggctaaatttgatggcagaccaaaggtcggagatcgtcaatgctctgtgcggcggagatggaagctgtttccgtttcatcaactcaggcatcttcttcgtccgatggattccagatgagtgaagaagttgagaagagatacaaaattgttaggagtatcggtgaggaatgtatacaagaggaagagctaaagaatcttcttgctaagaaggctgctccgatttgctacgacggctttgaaccatcaggaagaatgcacattgctcagggagtgatgaaagtcatcaatgtgaacaaaatgacttcagctggttgcagagtgaagatttggattgctgattggtttgctcagttgaacaacaaaatgggtggtgacttgaagaaaatcagagtggttggagaatac

SEQ ID NO: 126967 - DNA, 291 bp, Arabidopsis thaliana
aaatcatcaaaaatcaaaatctctaaaatcaaatattcgcattttctctctcgccggagagatgcaacggtttcttctacctttactcttccttgcactatcgccgccggcgatttgtcattactcttcctcaacctcttcaccttcttcgtcctccgtttcttccgacgcctcagaatggcgtccagctcgagccacctactacgccgctacgaatcctcgagacgcggtgggcggtgccgtgtggatacggagatctcgtcaaatctgggtacggtatggctactgttg

SEQ ID NO: 126968 - DNA, 543 bp, Arabidopsis thaliana
  unsure (1)..(543): unsure at all n locations
atgatatnnnnnnnnnnnnnnnnnnnnnnnnnnnnnnnnnnnnnnnnnnnnnnnnnnnnnnnnnnnnnnnnnnnnnnnnnnnccacgcgtccgtacgctgcgagaagacacagaagaggagagcagaagtggaagtctcttgtccctctgtaaaccctaaaatagaaaagcaaatcacacttgggggattcatgttctttggctttcttacaaacctctagaaataatggccgagaaagcaggcaaggcaacgaatggtggagaagcagagaaatctctaaaggaaaaaggaaatgagttcttcaaagctggcaactttcttaaagccgcagctctctatactcaagccatcaagctcgatccttctaacgctactctttacagtaaccgagctgctgcatttttgagtctggttaagcttagcaaggccttagcagatgctgagactaccattaaactcaaccctcagtgggagaaggggtacttcaggaaaggttgtgtgcttgaagccatggaaaaatacgaagatgctttggctgcatt

SEQ ID NO: 126969 - DNA, 1024 bp, Arabidopsis thaliana
  unsure (1)..(1024): unsure at all n locations
atgatattgccnnnnnnnnnnnnnnnnnnnnnnnnnnnnnnnnnnnnnnnnnnnnnnnnnnnnnnnnnnnnnnnnnnnnnnnnccgcgcgtgcgcactatttctctttagtctctctacggaacctgtcttcttgtcttgtccaaaatcggatttttaagagtacaagtgagtttattttgggggccgaaatctgtcctggaggatacagaagcaagatgaagttaatagatcgaagaatgaggttaacggagctgctcttacggtgctccatcagtgtcttcgctctcctcgcgcttattctagttgtgacagacactgaggtcaagcttatcttcactatcaagaagacggccaagtacacggacatgaaggcggttgtgttcttggtggtggctaatgggatagctgcggtttattctttgttgcaatcagttcgttgcgtggtgggtacgatgaaaggaaaggttttgtttagtaagcctcttgcttgggcctttttctctggtgatcaggcgatggcgtacttgaatgtggcagcccttgcagcaacagcagagtctggtgtgattgctagggaaggagaggaagatttgcaatggatgagagtgtgtactatgtatggaaagttctgcaaccaaatggctataggagtctctagcgccttgttagcctccattgctatggttttcgtctcctgcatttctgcttttagtctcttccgcttgtacggtgccaccaaagaccgcagaaccacgccgtggtgaagtgaatgcggctttgtctttagtagtgttgaaaatgttgttgttaaaaaaacatatagtaacaaaagtgtaggctcctgttggttcttcttcttcttcttcttgatgatgttatatgtgacaaaccaatatgtaaaactagactattgatgttctgtgtcaatgtgccatatgctgtgataaaaaaaaaaaaaaagcgcggccgctctagaggatccaagcttacgtacgcgtgcatgcgacgtcatagctattcta

SEQ ID NO: 126970 - DNA, 588 bp, Arabidopsis thaliana
  unsure (1)..(588): unsure at all n locations
gttatgttttttgagtaaaacagtattcgtcggacaaccgaagcgaaatccctaatttcccacaacacgaaataccaatttccccaattcgaaaacaaacacggtctgatgtcagacgcaagagataatgatgaccgtgtggatttcgaggagggtagctacagtgagatggaggatgaagtggaggaggaacaagtagaagagtatgaagaggaggaagaagaagatgatgatgatgatgacgttggcaatcagaatgccgaagaacgtgaggtggaggattatggtgatacaaaaggtggggatatggaagatgttcaggaggaaatagctgaagatgacgacaaccatattgatattgagacagcagatgatgatgaggaaccaccatctcctattgatgatggagatagggnaaagtattcccaccttcctttcacttcctcctcatgggttctggaagttttnntttggtgggntcccanggggtnttggagaannggcctgangggtntntntgagagntnggcgggntctttgnggtgnncntgtgaagttgggccctggtgttccatgctttctttnngc

SEQ ID NO: 126971 - DNA, 659 bp, Arabidopsis thaliana
  unsure (1)..(659): unsure at all n locations
ccnnnnnnnnnnnnnnnnnnnnnnctactatagggaaagctggtcgcctgcggtccggccggaattccggtcgcccgcccgtcgacaaaactgtagagatgcacagtttgctacaaaagttgggtagaaagattgttcgtgatgaatcctttggaaatcctggaaaacgccggttcttgttggatgctgaggatatttgtgatgtatttaccgataataccggcacagaaactgtactaggtatatctcttaacacattggaaatcaacgggacattgtctgtagatgataaatcattccaaggtatgcataatctccaatttcttaaagttttcgagaattggcggcgggggagtggtgaaggcatattgtctttacctcaaggcctcaattctttgccccgaaaactcagactactacactggtataaattcccgttgaggtgtatgccttctaacttcaaggccgagtatctggttaacctagaaatggcgtatagccagcttgagaggttgtgggaaggaaactcagcacttgggagtctcacgaagatggatctgtccaagtccggacatttgaaagaaattccagatctttcttacgccgtaaatctagaggaaatggatctttgcagttgtaaatctttgggtacacttnct

SEQ ID NO: 126972 - DNA, 507 bp, Arabidopsis thaliana
  unsure (1)..(507): unsure at all n locations
nnnnnnnnnnnnnnnnnnnnnnnnnnnnnnnnnnngctgggtaaaaaaaattcggaggacgacgaaagagaaaacgagtgtttcagtcactgccccacggagctctcggaaatttgtcttccccttgtcgtcgtctccctatctactgcttcttcttcgttttcgtcttctttatcaaggaatgctgtttaattggaatcaacaatggagaatttgacggaaatagaatcaacgatggagagtttaacggaaatggagagtgagagagttgaacagggtaccgataaggaaattggaagtggagagaaaaggcaggatgatgtaaaggaaacggagaatgagaattctggagagagagtaggagaggaagctcctgtcagggaacatgaagattctccatgtctcattgttattgaagaaggtacttccctagcttcccttgaggaggtgaccaatgctgatgatctgccgaagattgatgatgagaaaaaattcccattttggaac

SEQ ID NO: 126973 - DNA, 429 bp, Arabidopsis thaliana
ccctggcccaaatctttctcttttctataatcactcactgtttggttttttatatttgttttcaaaaactttgggaatttcgtcaatggagcctgacgtggtggagatccctcctcctcctctgatcgcttcgggttctagaactcgtaaacccagaaaggctgttcctgaagtgattgatgtggaaagttatgaattccgcaatgttggtgttgttaaggataacaatgttgttgataagaagaacaaagggaaggcaatacaagttgactccttttctttcaacaacgttcaatctcatcatcatggatcgtcgctgcttaacttagagacgttccaagactattatggtcataagaatatcccttttagtgaatttgctaatcaaccaattgatgttgatgactactcaatgtatcaagacgttct

SEQ ID NO: 126974 - DNA, 811 bp, Arabidopsis thaliana
  unsure (1)..(811): unsure at all n locations
gcggattgggaattggcattggttgaaacaacgagcaatttagaaaaacagacagccgctttgggtggtgggttcgataacttgttgctcaacgggatgtatgatcaaggaatggtcagacaacacgttagcacctcgcaattgacaggtggtagcgcgagcagcgtagctttacccttacctggtaaaaccaacaatcaagtattagccttacctgcaccagatggaaccgttgagaaagtgaaccaagacccattcgcagcttcactaaccattccaccaccttcgtacgtgcaaatggccgagatggagaagaagcagtatctactgagccaagagcagcagctatggcagcaatatcaacgtgatgggatgagaggtcaagccagtttggcgaagatgaacaccggtccagttccggcttacggaatgccacctgtcaacgggatgggaccgccaccgacggggtattactacaacaatccttactgattcattcttttttgcacccattcatatatgtgtagatgactcgtcttccacctttgatcttgtgtgtgttttattatatcccctcggattgtcgtaaaacgattccatcttcttccttgtctctgctcgagtttgatttatagtttatgtacactttcttgagaatcttgattcccttctgtataacattttgatattcatccatgtttcccactgtctaacttaagaacaactccaggtcggtttaaaaaaaaaannnnnnnnnnnnnnnnnnnnnnnnnnnnnnnnnnnnnnnnnnnnnnnnnnnnnnnnnnnnnnc

SEQ ID NO: 126975 - DNA, 752 bp, Arabidopsis thaliana
  unsure (1)..(752): unsure at all n locations
nnnnnnnnnnnnnnnnnnnnnnnnnnnnnnnnnnnnnnnnnnnnnnnnnnnnnnnnnnnnnnnnnnnnnnnnnnnnnnnnnnnccacgcgtccgctagaatgatctcccgtgcccttcctcagggattatcgagggcctttgttggcaggatgttggcggatcctgcatttctctataaacttcttttggagcaagctgccacggttggatgctcagtttggtgggaggtgaagaatcgtaagaatagactaaaagaggaatgggatcttgcacttataaatgttcttactgtatcagcatgcaatgcagctgctgtttggttactagctccatgtcgttcctatggaaacacattccggtttgacctgcaaaatacattacaaaagctaccaaataatttatttgaaatgagctatcctcttagagagttcgacttgcaaaagagatttcattctcttttctacaaggctgcagagttgtccattcttggactcgcagcaggaacactccagggttcgttgtcaaacgttcctagcaggaaagaaagaaagaaacagaattatcttgttgacnggtccccatcctatcaagcaacaaatgctccttgggttaatgggtgccatttctttggaatatatgcccaactttganaatatcagctgtttatgtttggaattttgaaaaaaggaattganccantccncttttgaacntccctaggantttncactccttcctttcccgggactgg

SEQ ID NO: 126976 - DNA, 885 bp, Arabidopsis thaliana
  unsure (1)..(885): unsure at all n locations
gannnnnnnnnnnnnnnnnnnnnnnnnnnnnnnnnnnnnnnnnnnnnnnnnnnnnnnnnnnnnnnnnnnnnnnnnnnnnccacgcgttcggcagcaaaaacgagagtctcttcacggtcaaagaactaaacgacatggtatatctacaagcagcactttcagaaacaatgagactttaccctccaataccaatggaaatgaaacaagccatcgaagacgatgtgtttcccgatgggacattcatacgtaaaggctcacgggtttactttgcgacttacgccatgggaaggatggaatccatatggggaaaagactgtgaatcattcaaaccagagagatggatccaatcagggaatttcgtgaatgatgaccaatttaaatacgttgtgttcaatgctggaccaaggctgtgtttagggaaaacatttgcttacctacagatgaagacaatcgctgcttcagtcctgtctaggtactcaataaaggttgctaaagatcatgtagttgtccccagagtaactacaaccctggtccttgaggcacggtctcaaggtacccttctcgtcaaagtccctggaagagaggatccccgtccaagactagtgattcaacgtccccagagataccagagattcaagtaggaaaacttccccaagtcatgttcctagtagaagcattccaaaaaattaagcctttagggagaaattagcctttgtttaatactaaaaacggcaaggtaacatcttccccttctactacctcagtgatataggctatagtataatcttgaaagatgaaaaaaaaaaaaaaaaaggccgaccgctctagaggatccaagcttacgtacggcgtgcgtgcgacgtcatactcttctatagtgcacct

SEQ ID NO: 126977 - DNA, 1043 bp, Arabidopsis thaliana
  unsure (1)..(1043): unsure at all n locations
gctgccgtaccggtccggaattcccgggtcgacaaacaaacaatggcggcttctctgcaatcagcaaaccctacattgtcacgaaccctagcttctccgaacaaaccttcctccttcgccaccttccgatctccatttctcagattcaattcaacatccgtcgcttccaatttcaaacccctagtttctcgagaagcatcctcatcgttcgtcactcgctccgccgccgagccacaagaaagaaaaaccttccatggactgtgctatgtcgtcggcgacaacatcgacactgaccaaatcattcccgcggagtttctcactctcgtcccttcgaatccagaggaatacgagaaactcggttcttacgctttagttggtcttccagcttcttacaaggaacgattcgttcagccaggtgagatgaagacgaagtactcaatcatcattggcggtgaaaactttggatgtggatcgtcacgtgaacatgctccggtttgtttaggagcagcgggagctaaagcagtggtggctcagtcttatgctagaatctttttcaggaactctgttgctactggtgaggtttatcctttggattctgaagttagggtttgtgatgagtgtacaactggtgatgttgcgactgttgagttgagggaaggagatagtattttgatcaatcatacgactgggaaagagtacaagcttaagccgattggtgatgctggaccagtgattgatgctggtggtatatttgcttatgctaggaaagctggaatgattccatctgctgctgcttgattttgacttcaggtgtcaatggaagtgcatgagagtcacttcaaggatcttgatccaataataagaatatgtaatgtttccaaaagcttatggaccctaatcctatgttttatggnatatataatgactatcggctttagtcttaaaaaaaaaaaacaannnnaanaaaaaaaggggnggcccctnctagnggntcccctgcttncggtcgnngggcaatccnacggnattagccttccnannng

SEQ ID NO: 126978 - DNA, 549 bp, Arabidopsis thaliana
  unsure (1)..(549): unsure at all n locations
nnnnnnnnnnnnnnnnnnnnnnnnnnnnnnnnnnnnnnnnnnnnnnnnnnnnnnnnnnnnnnnnnnnnnccgggcgtgcgcccacgcgtccgcaaaagtgctcgagagagagaccttgaagaagaaagaagaagagacgagtttgatatctaaaggaatcatttttgacggatttaggatctaagtaaaccctagattgaccgaatatgagtactcaagcgacgggtccttcttcaacatcagggaggagaagcaattctactgtacggcgaggaccaccaccttctaagaaaccagtacaatcagagaatggaagtgttaatgggaacacctcaaaacccaattcacctcctcctcaacctcaatctcaagctccttctaatggagagagaacagtgaagaagcttaggttatcgaaagctcttactattcctgaaggaactactgttttcgatgcttgtcgaagaatggctgctaggcgtgttgatgcttgtttgttgactgattcaagtgcgcttctttccgggattgttactgataaagatgtag

SEQ ID NO: 126979 - DNA, 809 bp, Arabidopsis thaliana
  unsure (1)..(809): unsure at all n locations
nnnnnnnnnnnnnnnnnnnnnnnnnnnnnnnnnnnnnnnnnnnnnnnnnnnnnnnnnnnnnnnnnnnnnnnnnnnccacgcgtccgctaaaactaaaagtattcttacatcaaaaaaaacaaagatgacaaagactcttctcatggttacgctcgtgtctatagtaatgttttacatggctcgtccaattttctcccaagaaattggatccatattcgctagaggtgctacaacatgtggccttatcttcatcttcaaagtttaatatttacgttgaagctcccgatgaagctctattcgaagaagctgattcacccgcaatagaatatgacaaggaccggtacaaaatacccgattttattgcggcttgcgctatgaagcaaagctggatatgcttaaatgtggttttcgaaaacatgaaagatgagatgatgccaattataaatgaatgttgtcgtgaaatattgaaaatgggcaaagattgccatttcagattggttgaaggctggtccgccatgtatgtgtatggtaatagtattgcatctaaagacattccatatagcaaacaatcatggaaccaatgtgtccgtagagtagggagcaagtttggtgctccggtctcttttgaccagtaaactaatatatttgtgtgttgatgtgtctatggattttttcaatttgattattccccttattgcccctaaaaaaaaaaaaaaaaaaaaacaaaggcnnnnnnnnnnnnnnnnnnnnnnnnnnnnnnnnnnnnnnnnnnnnnnnnnnnnnnnnnnnnnnnnnnnnnnnnnncaacc

SEQ ID NO: 126980 - DNA, 458 bp, Arabidopsis thaliana
agcttactgactctctggggtatcgctctctccgcatttccattaaccctccaattttcccgcctttgtctcactctcttcccgccttgcactcgccggggactccatggttcagaagcagcaagcctccgccggtccgggtaccgagcctaagaagcgtcgccgtgtcggattttctcccgccgatactggtgtcgaggctaacgagtgcatcaaaatttatctcgtttcaagcaaagaggaagttgattcctctgatatttccagcgtgaagccagttgacttgaatgatttctttgatggagatggcaagatttatggttaccaaggtttgaagataaatgtatggatcaatagcatctcattacattcatatgctgatatcacataccagagcaccattaacggagacaaaggcatcacggacctcagatctgctttacagaacatatttgctg

SEQ ID NO: 126981 - DNA, 510 bp, Arabidopsis thaliana
taaaaaagaggaacattgtagtatagtccccacttgtctctcttcgtctccaaataaaccacattagtcttttcagattttttgtacacttccttcatcccccacccatctctctctctctctcatccttcctctttcttctttgcttgcccttttctttttattttattcttccaaaatcaaatagttccttctttgatctcattgggataactaaaagtttcaagaagagaaacatatcattgaagagagaacccacacaaaaaaaaatgtctgtagatttctcatctgagcgtgtttgctatgtccactgcagcttctgcaccacgattttagcggtaagtgtaccatacgcaagtttgttcacacttgtgacggtgagatgtggccattgtaccaatttgctatccctcaacattggagtttcacttcatcaaacctcagctcctcccattcaccaagatcttcagcctcatagacagcacacaacctctctggtgacaaggaaag

SEQ ID NO: 126982 - DNA, 990 bp, Arabidopsis thaliana
  unsure (1)..(990): unsure at all n locations
annnnnnnnnnnnnnnnnnnnnnnnnnnnnnnnnnnnnnnnnnnnnnnnnnnnnnnnnnnnnnnnnnnccacgcgtccgtacgctgcgagaaggacagaaggggggggtcgcagtgaccaggcccgggcgactgtttaccaaaaacacaggtctccgcanagtcgtaagaccatgtatgggggctgacgcctgcccagtgacgaaaggcttagaaatggtggtgacgtctttctcttcagcgccgcctatcttcttcttacctggagctgatgctcagttttcttcttccaatggaaggtttgctattccttcctcttctctcgtaaagggactaagaagacaccaagatgcaaagttggtgggcaacagagccagagttggagtagtacgagtcctagcgaacccaaatgtatctcctcctcctcctccaggaaaagcaaaggtaaaaaaagaggtaatcatggtagaccctcttgaggctaagcggttagctagtaagcaaatggaagagattaaaggcagagaaaagcaacagagaaggcgtgaaatagaggctattaacggagcatgggcaatcataggactcatgatagggctggtgatcgaagctcaaacggggaagggtattctggctcagttggctggttattggtctgcagttgtccatttgttcactccatcaacttagaatgaattaagtttcatttggttttctctactctcaactgtgaccaaatctaatgttgtgttcatgcaagttaagttgttaaacacatacactttgtaaatcctcccttgtttcaaaatgtcaaatcctgccatttgtaaaagaacaaaatttaaagagttttacacttaaataacaatcaaacatacacttttgtaacaaaaaaaaaaaaaaaaaaaaaaaaaaaaannnnnnnnnnnnnnnnnnnnnnnnnnnnnnnnnnnnnnnnnnnnnnnnnnnnnnnnnnnnnnnnncgtcctaa

SEQ ID NO: 126983 - DNA, 617 bp, Arabidopsis thaliana
  unsure (1)..(617): unsure at all n locations
nnnnnnnnnnnnnnnnnnnnnnnnnnnnnnnnnnnnnnnnnnnnnnnnnnnnnnnnnnnnnnnnnnnnnnnnnnnccgacgcgtccgataaaatttgatagagaaataatgggtgtatttcctgcgtttggagcatggatcaatcagaattctcaacagcctcttgaggaagatcccaagagctctgagcatgttgaatctaagtcggcatcagagatggataatggtcctgctaagatgaaaaaatactatgacgaagatgagtgggagaggcaagataaactttggacagctgcagagaagaagcatccatggaaagatgcccctcctaaggttaaggtgacaacaaaaaagggtatatgccatatgcacatagaattgacattggggttgcctcctgatggagtcttcgaacttttcactaatccacataacggaccaaacaccgaaccacttctggttttatttcttatcattgaatgattcaaatgtggtattaattgtagcaatacttgaaagtgtactctntttgttaattatgaagaaaagcaaatcaagaaaggttttgaaggacgatggaccgaggcagatcgcgaaggtgaagaaagctgtggcct

SEQ ID NO: 126984 - DNA, 496 bp, Arabidopsis thaliana
gagttagaagggcatattcctcagttgtggcatcgatatggtaaatgttctgaaggaactattcccatgaggaggacaaaggaagatgatgttttgagagcaagttcagttaaaagatatggcaagaagaagcgtagaagtgtccctttacctaaatctgcagaacctgaccttattaaccaaagtggtcaccagcatgccatagcttatgtagaaggagataagtactatggagctaaggctactataaatgtgtgggagccaaagatacagcagcagaatgagttcagcttgtcacagatatggcctcttggtggctcattcggacaagatcttaatagcatcgaagctggttggcaggtgagcccggatctgtatggtgacaataacacgagactcttcacttactggactagtgatgcatatcaagctaccggttgctacaatcttctttgctccggttttattcaaatcaacagtgacatagcaatgggag

SEQ ID NO: 126985 - DNA, 583 bp, Arabidopsis thaliana
  unsure (1)..(583): unsure at all n locations
cnnnnnnnnnnnnnnnnnnnnnnnnnnnnnnnnnnnnnnnnnnnnnnnnnnnnnnnnnnnnnnnnnnnggggccacgcgtccgaactaatgagtcgactcgttgactccgttaaagaaatatcagggttttcatcttcaaggggttttattgggaagatccaaggcgatcttgttcgtaggatcacgcttctcagccctttcttcgaggaattgattgagcggcgatgttgaattgaaaaaggatcagattacagggtttgaggctatgagaatcgctcttgattcaagtcttgagctttttcgatcggttaatggaggaagcaagctttttcagcttttcgatagagattctcttgtggagaagttccgtgacatgaacagtggagatagaagcagcgttaagtcagattccttatgagaagattgaggtatcagaggaagtcagagaacaggttcagcttctggattttcagttcaagagagcaaaagaaaaatgggagagtctgatctacgccttaccatgatctagctatggcagagaatggaatggatcctgacctttaatcctaaaagactttacaa

SEQ ID NO: 126986 - DNA, 695 bp, Arabidopsis thaliana
  unsure (1)..(695): unsure at all n locations
gggagttcatttccttccccttagccctcctcggaacggttgttggaagaaattggagcggtgctcctaacaatccatgccgtgtgaagactattccacgtccaatccctgagaaaaaatggtacttgactccatcagtcgtctccctgatggggggtttgctaccctttggaagcatcttcattgagatgtactttgtcttcacatccttctggaattacaaggtctactatgtgtatggattcatgttactggtttttgtgattctcgtcatagtgacggtgtgtgtgacaatcgtgggtacatatttcctgctgaatgcagagaactatcactggcagtggacttcatttttctctgctgcttcgacggctgtctatgtgtacttatactccatctattactactacgtaaagaccaagatgtccggattcttccagacaagcttctactttggatacaccatgatgttctgtcttggccttggaatccnttgcggacctggttggctanctggggatcaaatctgtttgtaaggaggatccnccagnaacatcaagtgcgaccagaaganggnaaccgggaaaaaaagggnaaaccaaatccaattnngaagggancccctnccgaggggananaantaaattggaggngccnnaanaaaancccccaaatgggggggttttgnccccnca

SEQ ID NO: 126987 - DNA, 540 bp, Arabidopsis thaliana
gtttccgacaaatttattggattgacgaactttgaagaagaagaagagagatgccgaagagaacgacacacacgtactcgagcgaggacgccgcgccggatggacccgactctgatctcttcgtatactactgcaaacactgtggttctcatgtccttatcactgatacccagttgcagaagatgccaaaaaggaagaccgacaggtcgaatgtacttgacaagaagacgcaccttgctaggttgaatgtcagcgagggaggaaaagttttattgaaacgtggcgaaggaaaaatggagagacagtttagaatgaactgtatcggttgtgagctttttgtttgttatcgtgctgaagagaatctggaaacagcgtctttcatttacattgttgatggagcacttagtgctgttgctgcagaaaccaacccacaggatgcaccagtacctccctgcatttcacaactcgacggtggacttgttcaggttgcaatagaagtggaagaccgtgcacaacgttcagcaatcacaagggtaaatt

SEQ ID NO: 126988 - DNA, 563 bp, Arabidopsis thaliana
  unsure (1)..(563): unsure at all n locations
nnnnnnnnnnnnnnnnnnnnnnnnnnnnnnnnnnnnnncggaatctccataaatcaaaatacatgatcggagctttctcactatcaaaagctttccggcgacaaaaccaaccatctcctccttatctccaccatgatctcactccactcatcagccattaaagcctctctctacggctctttcccttcttcgttacgatcaacactctctgtttccttctctgctggatctcttattcggcttccttccgtcggcaagcgcaatctctccgtcgtcgtttcctctggaagagactcctcgatgtcatcaaacaatgtttctcgcggatcgtcttcaaaggttgctgctgaatctttcttcaggagtgtcttagggcagatggaaactgtttacctaaatcgaaacccgacgcctaaatccgtcttggagcttgttcgatctgttgatgaccagcaactttgctatgatcatctcgctttcagaacgtttgggattggtggatatggggttgactcgcttgcaagctctatccttgactatggatatacaccgatggatgagct

SEQ ID NO: 126989 - DNA, 449 bp, Arabidopsis thaliana
cccacgcgtccgaaagaacccaaagctcttggaggaggtgatcttctcttctcagatcatcttctactcttgagtatacccttcctttgaagataattcctagtttgggacttatccttacttctccgggatttcactttaatccaccgaagagttttgacatctgaattgtattgttttgggtgtgatcccgatagaattcgagggtaggaatcggaaagtagggtgatttggtttagaagaagaaagaaatggagggttttgtcgatcactacattgttctaggtttagcttctggagaggaagctctgaagcttaccgagaaggagattgcaaaagcatacaagttgaaagctttggacttgcatcctgataaaccccctgatgatcctgatgcccatgagaaatttcagaggcttaagacattttacgaggttttttaaagacga

SEQ ID NO: 126990 - DNA, 833 bp, Arabidopsis thaliana
  unsure (1)..(833): unsure at all n locations
nnnnnnnnnnnnnnnnnnnnnnnnnnnnnnnnnnnnnnnnnnnnnnnnnnnnnnnnnnnnnnnnnnnnnnnnnnnnccacgcgtccggagcttactgagtcggaacaacatcagccaataaagccctgaaccctaattttcttttggctttggctggagaacgactgtatgtgtgttcaacaatgtcgtcgatgaacttcaatccatttcaaaactggttcgagaaaccaccgaacccagtcccgtccatcaacttcgtctcgctcgctgattccttctttcccaagtcgcagtctccgaatttcgcttcgattggacttccaaaattctcaaagaagtccccaaaacccgaaacagcaggaaccgacgaaccaggaccgtacaagcaaatagcagagcagttcttatgggagtgtgagaacataccggattacaggcacactccagaagtggataagcttctcaacgaagatccagttttcgagaagaaggagaatccgagcacagaagagattgaagctgagcagaaatggtgggagagttttcgagcgagtcctgtgggtcagtttatgactcgcgccgaggagattgccgacgatatgaacaagatggagctcgaggataacgacacgccttatcggaaagaagacaaggattactggagagccattcctcatgtccccgggctttgacgggaggcccatagcctagaaggcgatcaaatcanaggaagagagtgatgataagntctgggattcatgaaacagnttctcttcggactttggggtttccggaacggtcttacccgnctggtcgacccatggatgtggctt

SEQ ID NO: 126991 - DNA, 527 bp, Arabidopsis thaliana
  unsure (1)..(527): unsure at all n locations
gatactccnnnnnnnnnnnnnnnnnnnnnnnnnnnnnnnnnnnnnnnnnnnnnnnnnnnnnnnnnnnnnnnnnnnnnnnccacgcgtccgcttgtcaaaaaaggaaccaaactatgaggcgactaggcttcactttgataaccttgtagaacgatatggaaaccccatcatcattctgaacttgatcaagacaaaagagaggaggcctagagagtcaatcctacgagaagagtttgttaatgcaattgactttataaacaaagatttacctgaggaaaatcgtctgcgattcctccactgggacctgcacaaacattttcggagcaaaacaaaaaatgtcttggcactcctttgcaaagtagctacctgcgcattgatgctaaccgatttattttactatcaagttacaccagccatgacgattgaggattccatgagcttgtcttcttcttctgatgccgacactggggatatatctccacacactagttctgatgaatgataatggggaccatgatagtcttgag

SEQ ID NO: 126992 - DNA, 432 bp, Arabidopsis thaliana
atcctctcctctccttcacgttgagatatttttgagttttctgtgttgaattttggggaatcgaagaaattgaatttcaaaaatcaatggcggaagaaattgaaaaatctgtgccgacagaggaatctctgatggagaagatctccgagaagattcaccatcacgattcgtcgtcatcgtctgaatccgagtacgagaaacctgattctccttcggctgtgaaggcgaagatctatcgtatgtttggcagagagaagcctgttcacaaggttctcggtggtggaaagcctgctgatgtgttcttgtggagggataaaaaactatcaggtgctgttcttggtgtcgcgactgctatttgggttctgttcgagctggttgagtatcatttgttgagtcttttgtgtcacatttcgatactcgctcttggaggcc

SEQ ID NO: 126993 - DNA, 1015 bp, Arabidopsis thaliana
  unsure (1)..(1015): unsure at all n locations
cagctactnnnnnnnnnnnnnnnnnnnnnnnnnnnnnnnnnnnnnnnnnnnnnnnnnnnnnnnnnnnnnnnnccgcgcgtgcggccggacgaaggagaggcagccgcctaagaagttgccgtcgtgcgccatggccgtgaaggcttctggattcattgggaaatcagcaatctctgttcatctagatttctcttcgtttcctgtgaaattttcatgcttgaaacagttttctgtatcttcaccaaagccactggtcgttttatccgttgccttatcgtcgccggcaagaacagttgagtctccgcctgttggttaccggaagaatgttgggatttgtctcgttagcccatgtagaaagatttttacggcgtcaaagattcacattccggatacatggcagatgcctcagggtggtgctgatgagggagaagatttgaggaacgctgcctttagagaactgagagaagaaacaggggttacttcggcagaattcattgcggagataccaaactggctgacctatgattttccccgagaagtaaaggacaaactaaaccggaaatggcgaacaagttacaaaggccaagctcagaagtggtttctctttaagttcacgggcaaggaagaacgagataaatctccttggagacggtactgcaaaaccagagtttaaggtgtggtcgtggatgctaccggaacaagttattgaacatgctgtatatttcaagagacctgtttatgagcatgtcataaagcaattcaacccttattttgtggatgaagaaaaggattccatgaactcgtctaaggattgaatgtgcacaaagattcaccaagtgaatactgattagaagcaaatcaatcaattcattatactggtttctcttgaatctcatcaaaaataaaaattcatgaatctcagccaaaaaaaaaaaaaaaaaaaaaaaaaggccggccgctctagaggatccaagcttacgtacgcgtgcatgcgacgtcatagctattctatagg

SEQ ID NO: 126994 - DNA, 630 bp, Arabidopsis thaliana
  unsure (1)..(630): unsure at all n locations
nnnnnnnnnnnnnnnnnnnnnnnnnnnnnnnnnnnnnnnnnnnnnnnnnnnnnnnnnnnnnnnnnnnnnnnnnnnccacgcgtgcgcccacgcgtccgcccacgcgtccgcccacgcgtccgcccacgcgtccgcccacgcgtccgatttcatatataaagtaaaacattttgaggtatgtaaccgatgtgggacaaaatacaagtttgggcttcccagatcccacatttggtggaacacatatataaagagtctcttcgttgattagcttcccagatcccacatttcagtgggaggagctcttctcagaccttaagactattgctttagtggaatgcttctcgtaaatgtataagtgaggaaagaaactccattcgtatctatctactaccctaagccgtttatgcattttctgtccatcagaagatcaacacctgtttctggaggattccattgatttaagggattagatggatgatggaccatgtgggattcagtagatgacaagaacacaaaggaatccacctaacagagaccacccacatgttngcaggaaatacatttaataatatcacaagaaacggaaaaggaagcagacagagacacctttttttgatttaacgccttaca

SEQ ID NO: 126995 - DNA, 535 bp, Arabidopsis thaliana
  unsure (1)..(535): unsure at all n locations
nnnnnnnnnnnnnnnnnnnnnnnnnnnnnnnnnnnnnnnnnnnnnnnnnnnnnnnnnnnnnnnnnnnnnnnnnnnnnnnnnnccaggcgtgcgcccacgcgtccgcggacgcgtggggcgaacgattatatctctgctatcaatcacagctcggcatccagaagcttctgaagctggattcgaagccctccggtttataatgtcagaaggagctcacttgttaccatcaaactacgagcgctgtttggatgcagccagtcactttgctgaatcccgagttggtgaagtcgatcggtctatctcagcaattgacttaatgtcaaactctgtgttttgtcttgcaagatggtctcaagaggcgaaaaactccgattggtgaaactgatgctatgatgaaactaagtgaagatattgggaaaatgtggctcatactttgggaagaacctcaaaaaagtatgtcttgatcaacgcgacgaatgggaaaccatgcatttcaatggtgcaacagctatagccggggcagacgggatcatgt

SEQ ID NO: 126996 - DNA, 309 bp, Arabidopsis thaliana
  unsure (1)..(309): unsure at all n locations
caacaaaaaaaaagaaaggagaaatggttgtgatcctatcatagaanggngagtgtcaatggcataacaatgcacattgccgagaaaggtcccaaagaaggacctgtggtgcttctcctccatggattccctgatctctggtacacgtggcgtcaccagatctagtgggttatcatctctaggttaccgcgctgtagctccagacctccgaggctacggagactctgattcgccggagtctttctccgagtacacgtgtcttaacgtcgttggggacctcgtagctcttctggacagtgttgctggaaa

SEQ ID NO: 126997 - DNA, 635 bp, Arabidopsis thaliana
  unsure (1)..(635): unsure at all n locations
aacccaagcgtccgcaaattcccaacttggcctctctttttcatcttttgggtttttatgttcactcttctctgcttcattcctctttctacttccaggaaataaaaacttctaatcaaagagcaagagattaagaaatgtatgcagaaactagcttagctttccgattcatgcagagttcttcttctccagagattcaccaatttgaagacctctttaaatcctacaagctctctgatgaaatgaacaatcttgttgaggcaagtgagtatgattttggagaagagagtgacctattcaaagcccctgagccgattattgaagaaccaatgttagctgttgatcccctctctcaagagcttgttgaactcggtgatctcgggtcgttgcagagtgaccaacagcttatagacaaggctttctacggctgtaagcaggacctcctggtgaaatcagccatggagtctccgctctccgaggtactagacatcaagaacatctctttagtggcaaaaatggccaacgttgtgaagggtacgggtttaggcgcctctaatgtcccaattcccagggggttagcctcgggaacttaagctcatgggatttgngggcccaannacggggtttanggtncc

SEQ ID NO: 126998 - DNA, 431 bp, Arabidopsis thaliana
cggtaatcggaaccattatatgggcggtcgggttagcgaatcagcacggttactcgttggacaaactaccggaaaagaaacttgattttaaagattccgggatagagtttgcgggaccattcgtgttatatatgagctatgcattgttagatgcaatgtatcagagtatggtttattggttgataggagcattggctgatgattcgcagactttgagtagatatagtggattctacaaaggagtgcagagtgcaggagctgcagtggcttggcaagtggatactcgtaaggttccgttaatgtcacagcttattgttaattggtcacttactactgtaagttatcctttacttgttcttcttgtgtatttttatgttaaaaatgataatgatgatgatagtaatgataaggtttagaagatagtagttatt

SEQ ID NO: 126999 - DNA, 545 bp, Arabidopsis thaliana
  unsure (1)..(545): unsure at all n locations
nnnnnnnnnnnnnnnnnnnnnnnnnnnnnnnnnnnnnnnnnnnnnnnnnnnnnnnnnnnnnnnnnnnccacgcgtgcgcggacgcgtgggcggacgcgtgggcaatcagctcctctcgatttccgtttgtcggaaaatctctcccgtgatcggcgtattgtgaatgccgctcaccgagatattctccgattcttttccccagtgaggacaagtgttcagttgacttattaggaggtggggtttgaataagttacaatggcctcaattcttaatcaaacccaggagttgcaagaatcttctaagggtcttgggcatttaagatgtgaaaacttctttctattccccggggaaaaacactttgtcagatgggttgaggggggggttatattttcgcgggcttgcctactggtttatgggggtggcaggcattactgggacggtcttcagggtatgggaaatggcgggaaacttcccggaaagggggacaattggtccccttactaaggctgagagcatcacatacaagagaggggggaactttacta

SEQ ID NO: 127000 - DNA, 273 bp, Arabidopsis thaliana
cccacgcgtccgctaattttctctgtttgatttgtcctctcaacaatggcggcttcatcatcttcgtcttcctccgacgtctcctctgattcttcagactcgcatcgtcgccgtaaggatcgccgtcatcatcggagaaacgatcgagacagagactcgctcaaagtacgggaaaagagccgatccacctcgaaaaaacgccgtagacgccaacactcctccgattcctctgattcttcttactccgattcctccagtgagagctcagatagt

SEQ ID NO: 127001 - DNA, 486 bp, Arabidopsis thaliana
gacaacacaaaaaaaaagtgttaagagatccttctccctcttcgaagatgagcggtacggtgaaggatatcgtttcaaaggcggagcttgataacttgcgccagagcggcgcaccagtcgtgcttcacttctgggcttcttggtgtgatgcttcgaagcagatggatcaagttttctctcatctcgctactgatttccctcgtgctcacttctttagggttgaagctgaggaacatcctgagatatctgaggcttactctgttgctgctgtgccttatttcgtcttcttcaaggatggtaaaactgtggatacacttgagggtgcagatccatcaagtttagctaataaggttggcaaagttgctggttctagtacttctgcggagcctgctgctcctgcaagcttagggttggctgctgggccaacgattcttgaaactgtgaaggaaaatgcgaaagcttttttacaagaccgagctcaacctg

SEQ ID NO: 127002 - DNA, 550 bp, Arabidopsis thaliana
  unsure (1)..(550): unsure at all n locations
cgaagctttgatttcatctccgatatctcccgccggatttcacacaatacttgaatcagatgagaacgaagactgcgaggagtttacaggattttccgttaatactccgtcacctttaacggcgaaattgttaacggatcgaaacgtggacgttaagctctctccggaatcggctatcgttgcgtcgggtaaaggctacgagacttactccgtcgtcatgaaggtgaaatcgccaccgtttccgacggcgcgtggatttgcgcgtagagtgccggtggatttggttgctgttttagacgtaagcgggagaaattccggtgggaaattggagatgttgaaacaaacgatgaggattgtgctttcgaatctccgggagatggatcgtttatcgattattgcgttttcgtccagctcgaaacggttatcgccgttacggaggatgacggcgaacgggaggagaccggccccaagaatcggtggtatcaatcaccgtncctgggttttntccggggtggaattnaatttnccggtnaagggntagtttnacacc

SEQ ID NO: 127003 - DNA, 605 bp, Arabidopsis thaliana
acgccagctctatacgactcactattagggaagctggtacgcctgcaggtaccgggtcccggaattcccgggtcgaccacgcgtccgggagactcgacgagtcaattttaaccagatttagaggatttgtggatgtgatttcttcttttggtctcttctctttgggattttttttcattggaattgagcatacacatgtgttttccgaatagtttttggagtgagaattaagtttggattgttgattctcttcctctggtcatggaggagccttgtgagacacttgacagtggtgaagcctatcaaatatctagatatcataactataaccaacacagctccagaagctcatctccctggttggatttgagagtgttctatgtccggataagcaatttcgtggtggaagattcaactcctgaggtcctcactatcaatcacattcctctggatccagatacgcttttggagattaacggtgttagaatgggaatgtactcagaaggaggttcttcacagctttaaggagagatcgggttgcataaagaaatcttgaaggagctaccttatgtcagcacagacaatatcaggttaactggtagtgt

SEQ ID NO: 127004 - DNA, 527 bp, Arabidopsis thaliana
  unsure (1)..(527): unsure at all n locations
cggaggaagcnccctganccaacggccctgaantgttaacccnctgatagtaggnacncncgngaaagaaccggatntcgcgcttncacatgagtcttacccgcagacttgtccccttgccttaactcaagaacgccgtgtgaagttctttgctgagaatgagatatgcaagaatgagtagtagtagagagagactagagaataactgtctttgacaaagattcttgcatcattttaggctcaaagagattcacatggcaacaaccatagtttttatcttctacagtctacactgcagctggagccgccagttttgctgtatagtgttagaatatcttttttttttttaaggatgatgctaaaattggatatttttaattcattcattgaacaattattgaattttccttctaatgttaaattctctttcaaattaaaaaaaaaaaaaaaaaaaaaaaagggcggccgctctagaggatccaagcttacgtacgcgtgcatgcgacgtcatagtcattctatagtgc

SEQ ID NO: 127005 - DNA, 690 bp, Arabidopsis thaliana
agctccctacgactcactatagggaaagctggcacgcctgcaggtaccggtccggaattcccgggtcgacccacgcgtgcgatggtaatcgtcggcggatggtttagactttagagataacagaagaagacctcatctttagagtccggagcgaaattaatggcggccatagctcgtcttccactaactcattctcttccctccatcttcaatccttcatccttcctctctcagtctctctcttttcctacttatctccatcgctctccctttcgctccttctcctccgtctctccaatcctctgcacctcccatcgcgattcgagatcgccggggagtgattctaatgcgtcgattgttggggatcttctggattatcttaatgaatcctggacacagtttcacgccactgctgaggcgaagagacagcttttggctgctgggtttgatctcctcagtgaaaacgaagactggaatctgaaacctggtggccgttacttctttacacgaaacatgtcctgtttggttgcttttgctgtcggagaaaagtatgtgcctggtaatggttttcatgccatagctgctcacaccgatagcccgtgtcttaaacttaaaccgaagtctgcttcatccaagtctggctatctcatggtgaatgttcagacttatggaggtggtttgtggcacaca

SEQ ID NO: 127006 - DNA, 541 bp, Arabidopsis thaliana
atttttatctcactcttcttcctcttcacctgtaatctctccaaaatcagaaaaatgacttcttcagtactaaccccaagcttaaagcttttagctatgacgaattcttcctcttcgacccttttttgtattccttctatcttcaacatctcgtcctctgaatctcaccgcttcaatttttccttatcttcacgacccgttaatctcacactctctctcaaatccaaaactcttcgtaactcatctcctgttgttactttcgtttcccaaacttcgaattgggctgaggaagaagaaggtgaggatggaagcatcggaggtacttcagtcactgtagatgagagtttcgagtctgaagacggtgttggattcccggagccaccggaagaggctaaattattcgtcggaaacttgccgtacgatgttgatagtcaagctttagctatgctctttgaacaagctggtactgttgagatttcagaggttatatacaatagggacactgatcaaagtcgtggatttgggtttgtaacaatgagta

SEQ ID NO: 127007 - DNA, 569 bp, Arabidopsis thaliana
atgatactccagctctcctacgactcactattgggaaagctggtccgcctgcaggtaccggtccggaattcccgggtcgacccacgcgtgcggtgagacagagcctcacataaataaaaagtctcctaatctgaatacaactattactaacaataattcacttatctaaagaccatcatctgactgactctacgctgaatcatcacgaggaagacttgaatcgaccggagaagagatacgtgtagagatctgattggctcaccggagagaacaaaacaagaaatggggaggacgacgtggttcgacgttgacgggttgaggaaaggagagtggacggcggaggaagaccggaagctcgtggtttacatcaacgaacacggtctaggcgagtggggttcactgcctaagagagccggtctacaaagatgtggaaagagttgtagattaagatggctgaattatttgaggcctgggattaaaagaggcaagttcactcctcaggaataagaagaaatcatcaaataccatgctcttcttggaaacaggtgggcagcaatagctaagcaaat

SEQ ID NO: 127008 - DNA, 1189 bp, Arabidopsis thaliana
  unsure (1)..(1189): unsure at all n locations
tgcnnnnnnnnnnnnnnnnnnnnnnnnnnnnnnnnnnnnnnnnnnnatcccaatcaatatttccaccactgaaatggtactccacgcgtccgtcttatttcattgcacccgctctcgccttctgcaactcttatggaacggggctcacagactggagcctagcatcaacctatggaaagatcggtcttttcataatcgcttccgttgtaggaagtgatggtggtgtcattgcgggtttagctgcctgtggtgttatgatgtcaatcgtctccaccgcagctgatctcatgcaagacttcaaaacaggttacctcactttatcatctgcaaagtccatgtttgtaagccagctcgtgggaaccgcaatgggctgtgtaatcgctccactcacattctggctgttctggactgcctttgacattggagatcccaatggtccgtacaaagcaccttacgcagtgattttccgtgaaatggcgattctcggaattgagggctttgctgaattgcctaagcactgtttggctctttgtacgggtttttcatagcagctttgattgtgaatctcttaagagatattacaccgcctaagatctctcagttcatcccgatcccaatggcaatggctggcccattctacattggagcttacttcgccattgacatgtttgttgggactgtgatattgttcgtatgggaacggatcaacaggaaagatgcagaggactttgcaggtgcagtagcatcaggactgatctgtggtgatgggatctggactataccatccgcaatcctttcaatcttaaggatcaaccctcccatttgtatgtactttggaccgtcctcagcaagatagagatgccactgtggtcataatcgcaaccgcaactgtgagtcatacaaaaggaaacttatccgagagtcttgtggccgtcagaatcgaaacagttgtcttcatatgttgtgtagatatgtttagtatctcagctcgcaagaacaaaatgttgttgcaaatctcttcaaatgttttagtcaatgttgttgtatgtccccgggatgttgtctcccttgaatgctttcattcacaagctcaaagagttttaggncaaaaaaantnnnnanannnnatnaaaagggngcccgttttgggggncccancttncggcccgggnnattngncgggnatggc

SEQ ID NO: 127009 - DNA, 615 bp, Arabidopsis thaliana
  unsure (1)..(615): unsure at all n locations
nnnnnnnnnnnnnnnnnnnnnnnnnnnnnnnnnnnnnnnnnnnnnnnnnnnnnnnnnnnnnnnnnnnnnnnnnnnccgngcgtgcgtctcgttctgattaccatgaagaggttatcgaacttttcaaacacatgcttcaatcaaacatccgccctgataagtacacattcgttagtatcttaagtttgtgttctaagctctgtgaccttactcttgggagttctattcatggtttgatcaccaaaacagatttcagctgcgctgacacatttgtatgtaacgtactaattgacatgtatgggaaatgcggaagcattaggagtgtaatgaaagtctttgaagaaacaagagagaaaaacctcattacatggacggcattgatttcgtgtcttggcatccatggatatggacaggaggcacttgaaaagtttaaggaaacactgtctttgggttttaagccagatcgtgtctcgttcatctctattctaactgcttgcagacatggtggtatggtaaaagaaggaatgggtttgtttcaaaaaatgaaggattacggtgttgaaccagaaatggatcattatcgttgcgccgttgatcttttggcaagaaatggtt

SEQ ID NO: 127010 - DNA, 492 bp, Arabidopsis thaliana
  unsure (1)..(492): unsure at all n locations
aggtgactggtccaatgcacagggaagttgcaaactgctgcaggtacctggctatggttttgtaccatgcaggagatatggctggggccataatgcagcaacacaaggaactcattattaatgagcgatgccttggtttggaccatcctgatactgcccatagctatggcaatatggctcttttctaccatggactgaatcagacagaacttgctctacaaaacatgggtcgagccttgcttctacttggcctttcatctggccctgaccatccagatgttgcagctacatttataaatgttgccatgatgtatcaagacatgggcaaaatggncacagctctacgttatcttcaagaggctttnaagaaaaatgagagncttcttggtcctgnanacattcagnctgcagtatgctaccacgntcttgncattgcgttcaaactgtatgggngcattcaggcttttcananccatgcatgtgaaggaaaac

SEQ ID NO: 127011 - DNA, 595 bp, Arabidopsis thaliana
  unsure (1)..(595): unsure at all n locations
cnnnnnnnnnnnnnnnnnnnnnnnnnnnnnnnnnnnnnnnnnnnnnnnnnnnnnnnnnnnnnnnnnnnnnnnccacgcgtccgggaggtggttcggacaacagtagcatgcgagtgcgtgtatgtccgggcaatggttatcaaagcattgatatggatgcaaagtccagatgaatcattggatgagttaaaatcaatcattgcctcggagctttcagatcctggttggcctgcagctctagtcaatgatgttttgcttactttgcatgcccgctttaaggcaactccagatatggctgttattcttctcgaaattgccagaatatttgccaccaaagttccagggaaaattgacgctgatgtcttacagctgctatggaagacatgtcttgttggagctggtcctgacgggaaacacacagctctggaagcagtcacgatagtactcgatctaccacctccacaaccggggtccatggctggactgacatcaattgatagggtctctgcatcagatcctaagtcagctctggcgctgcagaaattggtgcaagcagcagtatggttccttggagaaaatgcaaactacgccgcat

SEQ ID NO: 127012 - DNA, 641 bp, Arabidopsis thaliana
  unsure (1)..(641): unsure at all n locations
ctctaatacgaactcactttagggaaagctggtccgcctgcaggtcccggtccggaattcccgggtcgacccaggcgtccgcccacgcgtccgcggacgcgtgggcggcgacgaagctctctctctctctctctctcgcttcgacctctctttcgactcctactccggctccagctgagcttgagaagagaaagcacaagctcaaacgtcttgttcagtctcccaattcctttttcatggtaatgtaaatttgaaacctttctccttcttttgaaccctttaggaacaaagtctctgtggttagaatctatgtaactactcgactttgtgaattgtatgtaagttttgagtctgtgggagacgtgggaggtcatcttcttactctagttcaccaagtcatctttttttttgtgtgggtttctctgttaaatcattctccctgtagccattgtagtctcttttctttacttgtaggtgcatatagagagtcttagatgcatgtttgagttgtcactgttgattacttcatttcatggttgatggtatgggggtataaatagggcttttaacgagattgtgggaaaatgcattgaaaataacatcatgganggggtgccanggggggcattgncaaaggctgc

SEQ ID NO: 127013 - DNA, 1207 bp, Arabidopsis thaliana
  unsure (1)..(1207): unsure at all n locations
aactcactatagggtaagctggtacgcctgcaggtaccggtccggaattcccgggtcgacccacgcgtccgcttaagaaaaacaaaaacaaaaatcaaatgagctccttcaccaccaccaacactccgccaccgtatctcctccggaaaatttatcatcgccgtgtaaaccaaccgttctccgtcgtatgttgcaccggagaaccccaacaagacatcttcacccgccggagaaccttgacttcactaataacattcacggtcatcggcggtgctacgtcatcagcattagcacaggagaaatgggggacaaggtcattcataaaggagaaatattttatgccgggactatcacctgaggatgcggcggcgcgtataaaacagacggctgaaggattaagagacatgaggggagatgttggaccacatgtcgtggagggtacgttatattctacataagattgaaacaggcttatctgtctcaggatctcaccaacgccatgaacatcttgccggagagtcgccggaatgattacgttcaggcggcaaacgagcttgtcgaaaacatgagtgagttggatttctatgtacggacgccaaaggtgtacgagtcctatctttactacgagaagacattgaaatcgatagacaatgttgtggagtttcttgcttaattcagttgtattgtatatatgtctttcttcattcttcacatgaaatctctggactcgttacattagatataaaattaaaagacttaataatgtatattcaagaaacatttcgtttgcgtgatttctctgcaaaatcagatcgatatatatatgtgcatagatatcttagtggcgagagagggagatagcggaattgataacaataagcatgagtaagatcactgcgcagaaagaaccgatgagagatcccgagatgcgttcacagaatccgtcaaattgctggcagatcggtgggccaattagcagttgtggttcccctcgtgagctaaatacacggngggctgttgctgcagatgctccagagctaacccaagccagcatcaccgtgtcgacaacgngcaagatggtccccgnggnttagcttgggacctgaggtttggaagnnncccnagggagggaaggnccaattcccccanatgggggttgcaccccgaaaaatggcgtggaaaccnggattacttccaagncggggct

SEQ ID NO: 127014 - DNA, 755 bp, Arabidopsis thaliana
  unsure (1)..(755): unsure at all n locations
ctatatcggctcacgctggggcgcgcgcgggcaccggcccggccggtccggatttcccgggtcgacccacgcgtccgcgtgtttcgattctatcatctcatttctcacctgcctccgccgtcatggcttccgagaaagaagctgctctcgccgccactccttccgattctcccaccatatttgacaagatcatcagcaaagagattccatccaccgtggtttttgaggatgacaaggtcttagcttttagggacataacgccccagggtcctgttcacatcctccttattccaaaagtgagggatggcctaactggcctctctaaggctgaggaaaggcacatcgacatcttgggccgccttctctacactgccaagcttgtagcaaaacaagaaggcctagcagagggtttcagaattgttatcaatgatggtcctcaaggctgtcaatcggtgtatcacattcatgttcatctcattggaggacgccaaatgaactggcctcctggttaaagatcatcttgaagtggattgttgtcctgatgataagagggacgcttagagtttgctctcgtcgactaatgtctctataaataataaaacgtgggacatgacttttatgattgttatgcaaaaccttattttatgttatgaaaaggatatttcactaaattaaaannnnaaaaaaaaaaaaaagggcggccgctctagaggatccaagcttacgtacgcgtgcatgcgacgtcatagctcttc

SEQ ID NO: 127015 - DNA, 560 bp, Arabidopsis thaliana
tacgacttactataaggaaagctggtacgcctgcaggtaccggtccggaattcccgggtcgggccacggcgtgcgcgatcaacaagcaagtcgtgttacttgattacgtaaccggtttcgccaaggaatccgaccttgtaatcacctccaccaccatcgatcttagggtgctaaagggatctatgacggcgttggtgaagaatctctacttgtcttgtgatccttacatgcgaaatcgtatgaggaaacctgatcctctgagccctgctactgctcagtccttcactcccggcaagcctatctcagggtttggagtgtctaaagtgatagattctggacactcacattacgaagaaggtgacttaatttggggagcagtaggatgggaagagtacagtgttattacaccaattcctaatcttcacttcaagatccatcataccaattttcctttatcttactacacaggacttctgggttgcccgggaaacccggttggtgggttttcaaaatatgcctcaaaaaaagaaaacctggtttgttcggttcttttgcccggt

SEQ ID NO: 127016 - DNA, 1521 bp, Arabidopsis thaliana
  unsure (1)..(1521): unsure at all n locations
cnnnnnnnnnnnnnnnnnnnnnnnnnnnnnnnnnnnnnnnnnnnnnnnnnnnnnnnnnnnnnnnnnnnnnccacgcgtccgtacggctgcgagaagacgcagaagggtacagatgaatgttcaaaaagaactaaattgtgtcaatagaaaactcaacattgctattaccagaatttccaatccgtatggggatcctaatattcttgcagaatttatcgctggacaattaaaaaatcgcgtttcttttcgaaaagcaatgaaaaaagctattgaattaactgaacaggcgaatacaaaaggaattcaagtacaaattgcaggacgtatcgacggaaaagaaattgcacgtgttgaatggatcagagaaggcagagttcctttacaaacaattgaagctaaaattgattattgttcctatacagttcgaactatttatggggttttaggaataaaaatttggatattcgtagacgaagaataaaaaaactttctttatctttatattttatccgacgataaaaaaacgaaaattatataacccgatacagacagtaataaaaaattgcagtcttcttttttatgtttaaaaataaaataagcaattctataagattgaataaaaatttccatcaagactcctttgatataattgctatgcttagtgtgtgactcgttggtttaggattagataaagataaaaaaaaaagaaaaaagaacttacctataacagaaactaataactatagcattaatagaataacctaagcaactcattgcttcacattatctggataaaaaaatcagtcaagatatgatggattgatcatattattgtagcaactgaaaaaaaaaaagaataaagaactataattataagttatgaaaggtaatcgaaaagtatgcggattcagtggaaggatgaaagaaagagagaaaaaattgaatattaatgatatattattccaatttggaaagtctatgaggtcactgtaagaaaagcaatgtaataaagcatcaatacagattcattcagaataattagataaatctgttccgaaaacaaaaaaaattaagagccttgagccaataaaaactaagaaaattgactcaaaaacaaataaaaaaaatgaaattcccgatttcatataagagctccattgtagaattcgggcctaatgattaatcaagaagcgatgggaacgacggaacccatgaatatagaggattctattgaaaaataaatcttagtaattcattggacaggatggcggaataaaccagattattatctattcttatttttattcagagatctcctgggataaacaacaaacttaatatagatattgaaagagtaaatattcgccggcgaatactttttttttaataaaagtaataaaaaacaaaaattaaaaagataaaagaaaataaggatttgttagaatattctaacaaaaacgacattcgagatgatgatattacgttacgttatttttaaataaatagaattaatcttggatt

SEQ ID NO: 127017 - DNA, 484 bp, Arabidopsis thaliana
agaagataaaaaaatacgagactgtattaaaaattatgtccaaaaaaatataagaatatcctctggtatggagggtattgcacgtattgaaattcaaaaaagaatcgatctcatccagatcataatctatatgggatttcctaaattattaattgaagataaaccccgaagagtcgaagaattacagatgaatgttcaaaaagaactaaattgtgtcaatagaaaactcaacattgctattaccagaatttccaatccgtatggggatcctaatattcttgcagaatttatcgctggacaattaaaaaatcgcgtttcttttcgaaaagcaatgaaaaaagctattgaattaactgaacaggcgaatacaaaaggaattcaagtacaaattgcaggacgtatcgacggaaaagaaattgcacgtgttgaatggatcagagaaggcagagttcctttacaaacaattgaagctaaaattgaatat

SEQ ID NO: 127018 - DNA, 895 bp, Arabidopsis thaliana
acgcgtccggcactcaattaaaccctaaaaccctcctcagaagagaggcagagagaaaaaaaacgcagtctttgcggaatctgtgaaaggagaaaagatgagaccaccaatgagaggcggcgggggtttccgtggaaggggaggacgagacggtggtggtggcggtaggttcggtggaggaggcggtagattcggtggaggaggaggacgctttggtggtggaggcggtcgctttggtggttttagagacgaaggtcctcctagcgaagtcgtggaggttgcaactttcgttcatgcttgcgagggagatgctgtgaccaaactctcacaggagaagattcctcattttaacgctccgatctacctagagaacaagactcagattgggaaagtagatgaaatctttggcccaattaatgaatctttgttttctatcaaaatgatggaaggtattgtagccacctcgtattctccaggagataagttcttcatcgacccttacaagcttttgccactcgctcgattccttcctcagccaaagggtcagtcaacgggtggacgtggaggtgcaggtcgtggaagaggtgatagtagaggtcgtggaagaggtggatcatttagtagaggtagaggtgctccaagaggtggtagatttccaccacgcggtggctctcgtggaagctttagaggccgaggaagattttaggttcttctcctgctttataagccttatccaaacttgtaccctttgttttatgaatgactatcgttctcccgtattctcaattttcaagactttggttttatctatgcagtaaaaatatttgcctcgaaaaaaaaaaaagaaaacccccaagggcgaacgctctagaggatccaagcttacgtacgcgtg

SEQ ID NO: 127019 - DNA, 796 bp, Arabidopsis thaliana
  unsure (1)..(796): unsure at all n locations
agctccctacgactcacttagggaaagctcgcacgcctgcaggtaccggtccggaattcccgggtcgacccacgcgtccgtgtgaattcttggaaggcatgaagaagaaaggaatccgtgtccctggcattggtcacaggataaagagcagagacaacagagacaaaagagtggagctgcttcagaaatttgcacggtctaacttccctgcagtgaagtacatggaatacgcagtccaagtagagacatacacactgtctaaagccaacaacctggtactcaacgtcgatggagccattggatctctcttcttagaccttctcgctggaagtgggatgttccacaaaacaagagatagacgaaatagttcagatcggttatctcaacggcctcttcgtcctcgctcgatccatcggtttaatcgggcacacattcgatcagaagagactgaagcagccactgtaccgacacccgtgggaagatgtcttgtacaccaagtaatcatatcattattcacttcttctggtcgttccttattcctgttatcattctctcccattcagttaggctatgtttgattatatatttgttctgacactctatctgttgtgatctcttaatgcttgaaaaaataaaagaaagttcaattttagaagaattataatgttttgattaaaaaaaaaaaaaaagggcggccgctctagaggatccaagcttacgtacgcgtgcgtgcgacgtcataaactcttctatagtgcaccnnnnnnnnnnnnnnnnnnnnnnnnnnnnnnnnnnn

SEQ ID NO: 127020 - DNA, 491 bp, Arabidopsis thaliana
ggatctcagctctgcaattaagagtgggaaagtccgggctcctactcacatcatctccaccatttctgatgacagaggggaggaaccatgctatgctggtgtgccaatgtcatccatcattgaacagggttatggcgtgggagatgtcatttccctcctatggttcaaacgtagtcttcctcgatattgtaccaaattcatcgagatatgcataatgttgtgcgctgaccacggtccatgcgtctctggcgctcacaacaccatcgtaacagcaagagcaggaaaagaccttgtctcaagtcttgtctcaggtctattaacaatcggtcctagatttggtggtgccattgatgatgcagcacgatacttcaaggacgcttgtgacaggaatctcacaccttatgaattcgtggaaggcatgaagaagaaaggaatccgtgtccctggcattggtcacaggataaagagcagagacaacagagacaaaagag

SEQ ID NO: 127021 - DNA, 377 bp, Arabidopsis thaliana
cgtccgcattaaactctgaaccttcaacgttatcttcctctcactagctaagaaacccatttcgattctctctctctctctcgtttccaacatcattccatggctgacgatagcgaattgtatcctcgtttcttcaaagtgttcctcgttgaatcggcttctgaatcgttgatgattccgttgccttttatggcatttcttgctgatccattgccaaagacagtgaagctccaaggtcttggaggaaaactttggactgtgagcttgacgaaaataagcggagctgcgtatcttactagaggatggccaaaattcgcagaggaacatgagctgaagaacggagagttcatgacatttgtgtatgatggtcatcgtac

SEQ ID NO: 127022 - DNA, 425 bp, Arabidopsis thaliana
gagaattaaaagatcctcctaccgtattccctggaacattcgccggagaaacgtacggaatcaacaaccttccccgggaaagaatccattaccgccgattctatcaattcgtataccgtatttgactacccagccattgattctctctccctctcttcccttttcattggtgctaaaccagctcatctttcctgatccggacgtttttcgaagatcgggtcctaattccccgggaatgggtccttaagttctggaagaaatccgtccgctctgtctggtaatttcattgaaggacggattaagcaagcgtgtgtgagatcagaaaagacggattcaactatgagcacccagaagcaagtggtgactattcgggacctggtagatgaagccaagaaacgaattgtaatcgtggtcatatgcgtcgt

SEQ ID NO: 127023 - DNA, 595 bp, Arabidopsis thaliana
  unsure (1)..(595): unsure at all n locations
nnnnnnnnnnnnnnnnnnnnnnnnnnnnnnnnnnnnnnnnnnnnnnnnnnnnnnnncgcccccgtcgcttcgccagtctcttcctcgttttggtgagaaaacgatgaccgatggatttcgctataatggtttctctggaatagcgtacccgttttggctctcatctccaccaccgcctacacctccacatcatccagcttctgcgccgccgtttcaacaaagcaatccggttgaatcctatgatccagccaaagaagtgtttgatccgatgatgttgtatcatgactcttatcaacgatcgccggctaattggtcaaataacccatcgtatcgtgaaaattctcgctctcagactccttcttcatcgttttatgctgacaacactcaacatggaaatagtggtcttcgaggtgaagattcttcttataaagatatgttatcaccgagtggattttactcttcaagggaatcatcatctgattttgtgtcactccctcccactgagaatttctcagagaggcaacgtttgaactttgagcctacctacagctcaactaccttacctcctgggccttcttatgcagatatgctaatc

SEQ ID NO: 127024 - DNA, 783 bp, Arabidopsis thaliana
  unsure (1)..(783): unsure at all n locations
gatacccagctctatacgnactcactatagggaagctggtacgcctgcaggtaccggtccggaattcccgggtcgacccacgcgtccgcccacgcgtccggaactccaagaacacataattttttttcttggtggtctctccaatggctttctctgcgactgtgtctcagctttcttctctttcaaccatctcctcttcattaccaatttcttctagaagactccctcatcgatctcttcctcaattcacagtcaaagcagaagcagagaaagagaaacagagcacacagggcaagtctgatggggaagcatcaccagctgcaaccaaaacccctaaaaccctccccaagaaaccggtttactcgatgaagaagggccaaatcgttcgtgtggaaaaagagaagtacctcaacagcatcaattacttatcagttggacatcctcctttctacaaaggacttgattacatatacgaagatcgcggcgaggtcttggaccttccgtgtctttgagacaggagagtatgcacttggttgggatgggttggtatccccaccggaccagcttgggtcccaacagatatgntccatcaaagtgtgggaaacttgtttacgagcgaatgtaggagtcaagaanggtccaagaagatncctttggatggaactggnntnccaaggggttgtggtaagctgggatgnacggtacaattgggggccatcntgngnatggggtcaaaggttggcaagnttaacngtccatnggttcaaaactggtnggggnntc

SEQ ID NO: 127025 - DNA, 519 bp, Arabidopsis thaliana
aagatcgcggcgaggtcttggaccttcgtgtctttgagacaggagagtatgcacttgttggatgggttggtatccccaccgcaccagcttggctcccaacagatatgctcatcaagtgtgagaaacttgttttcgagcgaaatgtagagtcaagaaggttccaagaagaatcctttggaatgcacctgatataccaaggattgtgttaagctgaagatgaacgataacaatggcgcaccatcatgatcatgtgttcaagagtttgacaaagtatcaacgttacaattagttacaaaaactgttgtggagtgtggaatatgtcatcagactcctataataagaatgcagcttcagtaaacggatgatggtaattttatctcatcgatctcccaacataaactcatttctcacagcttcataaaatttcctctggttttgtcaaaaaaaaaaaaaaaagggcggccgctctagaggatccaagcttacgtacgcgtgcatgcgacgtcaaagtcttctata

SEQ ID NO: 127026 - DNA, 665 bp, Arabidopsis thaliana
  unsure (1)..(665): unsure at all n locations
nnnnnnnnnnnnnnnnnnnnnnnnnnnnnnnnnnnnnnnnnnnnnnnnnnnnnnnnnnnnnnnnnnnnnnnnnnnccacgcgtgcggacattgtgcttgatgtgatcaagaatgtcccggcctggcctggacgacatttgctagagggaggagatgatctaagatacttcggtttgaagacggttatgcgaggtgatgttgaattcgaggtcaagagccaaagggaatatgaaatgtggacacaaggtgtctcaaggcttcttgttcttgctgctgagaggaagtttaggatgtgaataaacgttcaatggctgcttggtttaagtgtgagtttttttttaacttatgtggtcaaatttcattagtaggggttcttttaaggtaatggttttttgggttgggtataggataaaatggacctaccagtcaaggtgaggaagcatttgggtaaacaaaacttagtgggggtgatctcgaatatctatgttcctagttttttttgggtggttgggggtctttttgtataaaaaaccaaagtggaggtaatagatatataggatgttttaattttaaaaaacaaaaaaaaaggcgcgttttaaggannnnnnnnnnnnnnnnnnnnnnnnnnnnnnnnnnnnnnnnnnnnnnnnnnnnnnnnnnnnnnn

SEQ ID NO: 127027 - DNA, 417 bp, Arabidopsis thaliana
acccaagcgtccgcgacggtacaaaggcgaacaccggcaagatcgatttgaacggtgacggcgaatgtggcggcgaagtaacttaccggggaatccagattccgatcagagcatatctgaggaagaagaagaaaatgatatttcgccgaaggagaatgcgaaggaacaagagagaggattactacttcaaacaaagctcgaaaaactcataggttgtggtgagctaaattatgctagggaaaccggtgatgtaactctggaagcaactctacggaagatatcatcctctcttgaagatgtggtcgaagttcctgactcccccgaggagagttatatttcttcttccagaagaactggattagcatgcatatctgctcaggaaaatgggtcagatgatgagattacacatgatgaaca

SEQ ID NO: 127028 - DNA, 639 bp, Arabidopsis thaliana
  unsure (1)..(639): unsure at all n locations
nnnnnnnnnnnnnnnnnnnnnnnnnnnnnnnnnnnnnnnnnnnnnnnnnnnnnnnnnnnnnnnnnnnnnnnnnnnccgcgcgtgcgggcgaatgtggcggcgaagtaacttaccggggaatccagattccgatcagagcatatctgaggaagaagaagaaaatgatatttcgccgaaggagaatgcgaaggaacaagaggtaatgtttaatctcaactttcgattcgttaagcttgcataaagctctctgtgaactcctgagaagttgtctttgagaaagaacttggcaacttctgatttgccgaattgattgttgttggcttgagtagttttttttgaggagctatagggaatttgattgtggtttgaccatagttggcttcaatattgtagagaggattactacttcaaacaaagctcgaaaaactcataggttgtggtgagctaaattatgctagggaaaccggtgatgtaactctggaagcaactctacggaagatatcatcctctcttgaagatgtggtcgaagttcctgactcccccgaggagagttatatttcttcttccaaagaactggattagcatgcctatctgctcaggaaaatgggtcagatgatgagattacacatgatgaacaag

SEQ ID NO: 127029 - DNA, 899 bp, Arabidopsis thaliana
attgtttttaggtacacactatagaagagctatgacgtcgcatgcacgcgtacgtaagctcggaattcggctcgagcaaaaacgccgtgacgattccggtgatggcgaaagctagaattggtcatttcgttgaagctcagatcctggaagcaatcggagttgattacgtcgacgagagtgaagttctcactctcgccgacgaagataatcacatcaacaaacataatttcaaaatcccttttgtttgtggatgtaggaatctcggtgaagctttaaggcggatccgtgaaggagccgccatgataagaaccaaaggtgaggctggaactggtaacgttgttgaagccgttaggcacgtgaggagtgtgaacggagctattcggttacttagaagcatggacgatgacgaggttttcacttacgcgaaaaagatcgctgcgccgtatgatttggttgtgcagactaaggagcttgggaggttaccggtggttcagttcgctgctggaggagtggcgacgccggcggatgcggcgttgatgatgcagttgggatgtgatggagtgtttgttgggtcgggtgttttcaagagtggagatccggtgaagagggctaaggctattgttcaggcggttacgaattatagagacgcggcggtgttggcggaggtgaagctgtggtttaggtgaagccatggttggtcttaatttggatgataaggttgagaggttcgctagtcgttctgagtaaccaatcaaatttcagatgtttttatccataacgtttgtcactttaatatgtatccccaaaccaatattctcgatttattcaagattttatagaaaaaaaaaaaacccaaagggcggccgctctagaggatccaagcttacgtacgcgtgcag

SEQ ID NO: 127030 - DNA, 603 bp, Arabidopsis thaliana
  unsure (1)..(603): unsure at all n locations
cggacgcgtggggcgtcctataaaatcccctctcctctgctccacactctctcaaaaccctagaaaaaatggcaggaaccggagttgtggcggtgtacggcgaaggagccatgacggagacgaaacagaaatctcccttctccgtgaaagttggtctcgctcagatgcttcgtggcggtgtaatcatggatgtcgtcaacgcagagcaagctcgaatcgctgaagaagctggcgcatgcgccgtgatggctcttgaacgtgttcccgccgatattcgagctcaaggcggtgttgctcgaatgagcgatccagagatgatcaaagaaatcaaaaacgccgtgacgattccggtgatggcgaaagctagaattggtcatttcgttgaagctcagatcctggaagcaatcggagttgattacgtcgacgagagtgaagttctcactctcgccgacgaagataatcacatcaacaaacataaatttcaaaaatcccctttttggtttttngntgtagggatttncggtaaagcttnaaggnggtcccctttaaggngcccccatttttaanacccaanggntnngcctgnaccttgnaacntttttc

SEQ ID NO: 127031 - DNA, 670 bp, Arabidopsis thaliana
  unsure (1)..(670): unsure at all n locations
gaaacggtatgcaacttcagtggctgcttctgctgccagaaccaaagggcccgtggtgagtaacgggagtggtttccctgatcacaatatgaccacatcacctgcgggaaccaccaagtttgcaaatgctaattcagggttccctcaaaaccttgtccagtcgagtagcaatcaggttcagtctcagcagtggaaaaacaattcacccaggacaacaaatactacccaagctcagtctccttcgatgttgtcgccatcaacatcagttgctgctgcatcttcgctaagaaacatcccgcataaacagcaaagccgtccccagcaatcgcagatatcttttgcagcaaactcaaaaccaatgacttctggttcaccaatgcagcaggtacaaggaggaaccaaccaccaggctccgtctccaccaatgttagttgggtcgccttcgacgtcgtctgtctccaaaaatgccagcggaagcccaagaccaactgctttctgctttcctcggcgggcaaacaaaaggtgggcaagcttccacaacttntnnctnagnatcttagccgtccaagnantttcagcctgaattggggggtaatttnttggtgnagggatnaatgggcctntttttnttggaanccggnccaggggttttggtccagtgggacannag

SEQ ID NO: 127032 - DNA, 439 bp, Arabidopsis thaliana
  unsure (1)..(439): unsure at all n locations
cgcgtccggattttgcgattcggcgatttgcttctccgatgtcaatcccaccatcttcaggttcttcttcttcatcttcctcgtctcagtacacatacgcagctaattcttactagtccgctccgtatcagcctccacagccttacgcggcggcgccttcgcctgctgtaccggcgcctgtggcatccattcccggagctacggtctatcctcagcctgttggaccggttcctgccgtctacgnttaccctcagtaccaacaggcacatcaattgttccaaagagatgcacagncaattacaccagaagctcttgaggaatgtaaaanctgctttngcaagtagtggaacccgtacacaaagcagganactanaaagggnggccatttntccgtnaagctnctggacaagttttnggnggntccanctctttcaanaat

SEQ ID NO: 127033 - DNA, 575 bp, Arabidopsis thaliana
  unsure (1)..(575): unsure at all n locations
nnnnnnnnnnnnnnnnnnnnnnnnnnnnnnnnnnnnnnnnnnnnnnnnnnnnnnnnnnnnnnnnnnnnnnnnnnnccgacgcgtgcggcagagctcacacttagaaaacaaaaaacaaaaatggctacgctttcgtttggaatcgccgccgctgcaaccaccgtccgtacgattccgagatttaattcacggaggagcaaaatcacatgcgaatgggatccgaaaggtgtgttgggtccggctcaaactggtcatatagctcggcttgagtttaagcgtcggctagagagagattcagaggcaagagaagcttttcagaaacaacttcgtgaagagaaagagcgtcgtcaagctcttagacaatctagagttgtaccggatactgctgcggagctgattgagtactttcttgatactgaagctcaggagattgagtatgagatcgctaggcttagaggaaggttaaccgccgattccttgcgcagatacgacttgaaatcggacagattcgatttgctgttactaagactgcggatattgagatagattgttgacctttaaacacttcaaaagct

SEQ ID NO: 127034 - DNA, 439 bp, Arabidopsis thaliana
tttccgcgtttatcacttgtttcctcgaggtgagactacgaagatgccattgagctggcctcagagaaagagcatcattttggatgtggctaaagggttggcttatttgcattacggtgtgaaacccgctatttatcaccgggatattaaaggttcgaacatattgttagatgtcgatatgagagcgagagttgcggatttcggtttagctcaacagagtagagaaggagagtctcatctcactaccagagttgcgggaacacacgggtacttggctccagagtatgccctctatggtcaattaaccgagaaaagcgatgtgtatagcttcggggttgttatattggagatcatgtgtggaaggaaagctcttgatctgtctacttctggatcaccaaacacttttctgatcacagattgggcttggtcattggtaaaa

SEQ ID NO: 127035 - DNA, 921 bp, Arabidopsis thaliana
tttccgatttacgtctcttcttcttcatcttcctcccacaaccacatcatcatcaatagccttcacttcgacaccaacaatggtaatactaataatagtaacaacagctacaaccatctccatacatttcccatgaagaaagagcaacaaagcaatgaccatatcatgaattaccaccatagtatcatccctccttggcttgctcctcagcctcacgcactcacatcttcaaaccctaaccctagtaatggtggaggaggaggaggaagtttgttctctcttgcttctccggctatgtcagccaccgcattgctccagaaagcagcccaaatgggctctacaaagacacctcctttaccaccaaccacggcctacgagaggtcaactcataataacaacctcacaacgacaatggcggccaatgatgccgtcaccatctggatccatcagctccaaccaacaacaatcatgttttgtttcaagactacaacgcatcccgggtttgataatcacgggcagagaagaagcattccggacgatacatttggcgggttcttgagaacaaacgaagttacagccgccgcaggatcagagaagagtactaaaagcggtggaggagaaggtttgacgagagatttcttggggctaagaccgttaatgtctcataacgagattctaagttttgctggtcttggaagttgcataaatagctctgcttctgatcagcttcatccaaagccttggcagggttagttaggttttttgctcataatatataatatgtgtatatatatttatatatctagttttgcatctttctcttgttttgttcttcgttttataaatttatatgttgaatgctcatcgcggccgcgaattcgatatcaagcttatcgataccgtcgacctcgagggggggcc

SEQ ID NO: 127036 - DNA, 518 bp, Arabidopsis thaliana
  unsure (1)..(518): unsure at all n locations
acaatcatgttttgtttcaagactacaacgcatccgggtttgataatcacggcagagaagaagcattcgacgatacatttggcgggttcttgagaacaaacgaagttacagccgccgcaggatcagagaagagtactaaaagcggtggaggagaaggtttgacgagagatttcttggggctaagaccgttaatgtctcataacgagattctaagttttgctggtcttggaagttgcataaatagctctgcttctgatcagcttcatccaaagccttggcagggttagttaggttttttgctcataatatataatatgtgtatatatatttatatatctagttttgcatctttctcttgttttgttcttcgttttataaatttatatgttgaatgctcatcaaaggagaatcacagaaaccgttaacaaaaagaaaaaaaaagnnnnnnnnnnnnnnnnnnnnnnnnnnnnnnnnnnnnnnnnnnnnnnnnnnnnnnnnnnnnnnnnannnnnnnnnnn

SEQ ID NO: 127037 - DNA, 604 bp, Arabidopsis thaliana
  unsure (1)..(604): unsure at all n locations
cccgcccgcgatttgttgtcgcaattttgagcgcaaacccttttcgcccgacgaacccgcaggccccctactttgcgccccactctaactcgccctcactttagggaaaagcttgtccccccctaggtcccggttccggaaattcccgggcggcccccacggttccgcgttcctccactcgtcgctctctcacagtctggtactcctagagctagagaaaaggcacaggcgttgctcagttacttcagaaaccaacggcatggaaacgctgggcgtggctgatgatggatgatgatgatgatgatgatgttgatgatgcacagattctggtctctcagtgcctatttttatgttttgtcttgtgaccaaagtagtgattttgtacaaaagaggtctcttctgcaaataattttttcgtactcaagattttttgttggttctctgtattctttaattttctattgattctcataataaactttgatttggaatagaattttttttttttcaaaaaaaaaaaaaaaaaagcnnnnnnnnnnnnnnnnnnnnnnnnnnnnnnnnnnnnnnnnnnnnnnnnnnnnnnnnnnnnnnnnnnnnnnnnnnc

SEQ ID NO: 127038 - DNA, 753 bp, Arabidopsis thaliana
  unsure (1)..(753): unsure at all n locations
gtcgtgcggggactcacgaacacgctcgtggtttaggtaaacgtggccccaggttgcttccattggggttggaactctgagccacaatgtcctggtcaatgcgcgtggcctttccacgcgccggtgtacggtccacagagtccaccactagtggcaccaaacaatgacgtgggactcgatgggatggttattaacttagctagtcttttagctggaaccgcaacgaacccttttggtaatggttactatcaaggtccacaaaacgcaccgcttgaagctgcttctgcttgtcctggcgtttatggtaaaggagcttatcctggttacgctggagatttgcttgtggatactacaacgggaggtagttttaatgcgtatggtgcaaacggcaggaagtttttgcttcctgctttgtatgatcctacgacgtcggcttgctctactatggtctgaatactaaaaaaaagtccaatgtttggtctttggtagtagaaaataatattctagcgtaattcttttgttatgtttggttacaaattctagtataattcaatttattcattaatattattctcatttttcccttcatgttgtatgactgaaatcttgtcgcttggactataatttaacggaatattattaagacactttggcggccgnnnnnnnnnnnnnnnnnnnnnnnnnnnnnnnnnnnnnnnnnnnnnnnnnnnnnnnnnnnnnnnnnnnnnnnnnnnnnnnnnnnnnnnnnnnngt

SEQ ID NO: 127039 - DNA, 551 bp, Arabidopsis thaliana
aggtgacacttagaagatctatgacgtcgcatcgccgcgtacgtaagcttggatcctctagagcggccgccctttttttttttttttttatcatataacaatttttgatttgattagttctcctcatcacatatctgaaaaagcaatatggtgaggaaagatcgattctgtaacaaaagacaaacacaccaatgggtggtgagtgtgtttacatatctgcactcatctgtctaatgaaagggacaaagttgttccagttctcgaccctaaagatcttctcattcattctgcaaaacgtaaatgatcttagagtgtcgccattcggttgcacacagttctctcgtatttgccttagtcccatctcatcaaatctttcgcttgtgtttctaccagtcacatgtattgtccacttcttcgaaacatcatgtatctgtctacgtaatccttcagggctgcaaagatatttctcaggtatttcactatctgccatatccaagcaggggatgttgagagcagcaccttgactagacatgacggaagcttcaggatct

SEQ ID NO: 127040 - DNA, 506 bp, Arabidopsis thaliana
  unsure (1)..(506): unsure at all n locations
nnnnnnnnnnnnnnnnnnnnnnnnnnnnnnnnnnnnnnnnnnnnnnnnnnnnnnnnnnnnnnnnnnccacgcgtccgggaagggtgacgtggcacaatttccctgcgacgcacccaacctccgtctctctctctctcagatcggcggccatctccgtcgagtaattgaaatctctctcagccgttggattcgaattccgccgcatcttcatatacctcgtttcaatcctgcggaaccctagttgctctgaattgtggtttgctactgtgataagttcttcagtggtagattaggaagcaccaccaatggagattgtgtaagacatattcattacagctctcttttaaggattatggggtctgtttgctgtgtggctgcaaaggacagaaatgttcccagtggagctattgataattcagtgtgttcaccatcgtggagttttcgacgggacaacaggaggcgtgtagctgatgagattaaagattcatctaatcataatgttgggg

SEQ ID NO: 127041 - DNA, 378 bp, Arabidopsis thaliana
tttcccacgcgtccgatttagggttcctccttccttgagagttcaggtcaagctttctttccaatttcgccatgccagaagaagatgttgttgatcagaaaagatactttgaggaatcttgcaaaccaaaatgtgtgaagccactacttgaatatcaggcgtgtgtcaagaggatccaagatgatgagtctggccacaaacattgcactgggcaatattttgattactggcattgtgttgacaaatgtgtaagtgtgtgagtgctgtttttctgtatacacctaaagtttcgcgaaactaaaatgacaaagacagctacttggagtctatttttctttccagggttatataaaatgatgtggatgcttaacattacta

SEQ ID NO: 127042 - DNA, 692 bp, Arabidopsis thaliana
  unsure (1)..(692): unsure at all n locations
gcccttatggaaccgtgactccgaaactagatttctgtctgatttcagctccagtgatgtcgagattgtggactgtggtgtatagatctttgtaagtagtggcattgaagtgggcgactgtgaaaactgcaggcgacagaaaccaccacatagatggagaagcagaagcgtttaaggtaactcaagttgaaaacagtaaacatacaggccactggagttggcttaggaagcttcgtctggggaagaagaagatgaagaataataagacagagcttagttcgagaccagtctcaggatttagtgatcttactcggggaatctttataaggtatcaggagcctgaagctgttgagctcactaaagatgaaagaatcacagatctttcgagtttactatgtattggttcccttgtggtctgtttttttcattctgtttttttcgggcaaccccttgtggtctctgttttgttgcttccttcttgcttctttcttcagatgcaatgagctgcatctcacacagatcttgttgtgtgtgtatgtgcgaaacaaaaaaagatttcagttttcttgttcttatatatactccctctgggaggcggccgnnnnnnnnnnnnnnnnnnnnnnnnnnnnnnnnnnnnnnnnnnnnnnnnnnnnnnnnnnnnnnnnnnnnnnnnnnnnnnnnnnnnnnnattt

SEQ ID NO: 127043 - DNA, 647 bp, Arabidopsis thaliana
tagcctttgctgctgcaacagttgcagtctcttcttcagtgttacggattcttattcttcagccctaaaaatcatcactttggaatcagaagcttgaatgatggaaggaagaagaatcatagcaaaccctagaccgtgtagcggtagtagaagagttattgctaagaagaggtctcgtcccgatggattcgtcaatagcgttaaaaagcttcaacgccgagaaatctcttctcgtatggatcgagctttctcaatcagcactgctcaagagagattccgcaatatgcgtctcgtggagcaatatgatacgcatgatcctaaaggatactgtttagtatcattacctaacttgttgaaacgaagcaaagttattgagattgttgctgctcgtgacattgtctttgctcttactctatctggtgtctgtgcatcttttagcagagagacgaataaaaaggtttgctttttaaatgttagtcctgatgaagtcattcggagtttgttctacaacaagaacaatgattctctcattactgtttctgtttacgcctctgacaattacagctctttgaaatgcagatccactagaatcgaatatattctgaggggtcaagcagacgcaggatttcctctttttgagtctgagt

SEQ ID NO: 127044 - DNA, 695 bp, Arabidopsis thaliana
  unsure (1)..(695): unsure at all n locations
cagctctatacactactataggaagctggtcgcctgcagtaccggtccggattcccggtcgaccacgcgtncgcgcattcttttacgtatgggcttgagtcccacggtaaagccgagacacaagatgataatcaagaggggaatcaaatgttcattgggcttggatgctaaactgttcagatgagaaagttcgaacagagaatgagctacgacacaatagatatagaagaggtagaaactgatccatcttcttttgacatgaatacattgatgcaacctgaaagagaggaggaatctgattccgagtacgaggaagaagaagatgatgacgacgaggagtttgcataaacccggagttcaacaaagaaaaggtccaaatacagacaatgaatcgaagaacaagcttcatgtcttgatgtatcatcatcatgagaggagaatgaatgatttactttgaattttcgaacagattctttgttgatcagattagcattctctcttatccatccttgtcatcgattcttttgttcatcatgttgttgaaatcagaacaatatggcccagaaattgtaatgactaaaataccctcaggggcaaatcacctaattatgattttttttttcctaagcaaaaaaaaaaaaaaaagggcggccgctctagaggatccaagcttacgtacgcgtgcgtgcgacgtc

SEQ ID NO: 127045 - DNA, 480 bp, Arabidopsis thaliana
  unsure (1)..(480): unsure at all n locations
gacagacaaaacactcaccaccctcaccaaacagtctctcttcaactctaaaatcaggtggcaaaacaaaatcaatggctctagtggtgtcaggtggcaaagcagccatgatgccgcttcatgccaattctcttcctctaagtatcaacaccaaatcaagagtactaagtgcatcagcatttccactattctcgtccactcctcacctcccttccagatccctctccatccgcctctcgccgaatgtttcccggtctctcactgtggtatcttctgttttgtcagaggacagagctactaacgttagtggcgtctggggcagatgcattcaagctgacttacttggagggcaatagctggctatgggaacagctgggctgaaaacctagttgatccggttcttntgggaatttgggctttgggatnccntggtttttnatgntnccagnggtttttnagggcttcaaggttnntgncccc

SEQ ID NO: 127046 - DNA, 750 bp, Arabidopsis thaliana
tgcagtaccggtctcgaattcccgggtcgacccacgcgtccgggtaatgaaggagttgaggtcataaatccagaaggtggctatggaagatgctgaagaggaagctcagaaaggaaggtggatggacgaggaacgagatagttactggaagatgatgcagaaatatataggttcggatattacgtcaatggtggctcttcctgttgttatatttgagcctatgactatgctccagaagatggctgagataatggagtattctcatttgttggatcaagcagatgaatgcgaagatccatacttgcgtttagtatatgcttcatcatgggctatatctgtttactatgccttccaacgaacttggaagcctttcaatcctattcttggggagacatatgagatggtcaaccatggggggatttcttttatttctgagcaggttagccatcatccaccaatgagtgctggtcatgccgagaacgagcacttcatttacgacatcacatcaaagttgaaaactaaacttttggggaactctgttgatgtttaccctgtgggaagaacgcgtgtaaccctcaagaaagatggtgtggttctggatttggtgccgcctctcactaagatttacaatctaatatttggacgaacctgggttgactcacctggggaaatggtcatgacaaattttaccactggagacaaagttgtgcttttatttccagccatgtggctggttcgggtctggccgat

SEQ ID NO: 127047 - DNA, 561 bp, Arabidopsis thaliana
actatagggcaagctggtacgcctgcaggtaccggtccggaattcccgggtggacccacgcgtccggaagaagacgcttgatcgaaaattcccttagatttcgtaaatagggttttacagaaggtgagattacacagagatcggatttgcgaaaaaaaaaaatgggaagtccaaagaagaacgagaacaaaggcttcttcgccgccatgacttctggcttctccatgttcggtaccgccgtgtcgagatccgttaacggcgtgcaaggtaatgaaggagttgaggtcataaatccagaaggtggcaaggaagatgctgaagaggaagctcagaaaggaaggtggaaggacgaggaacgagatagttactggaagatgatgcagaaatatataggttcggatattacgtcaatggtgactcttcctgttgttatatttgagcctatgactatgctccagaagatggctgagataatggagtattctcatttgttggatcaagcagatgaatgcgaagatccatacttgcgtttagtatatgcttcatcatgggctatttctg

SEQ ID NO: 127048 - DNA, 508 bp, Arabidopsis thaliana
  unsure (1)..(508): unsure at all n locations
aggggntcnccctgcgagatccatgccgcctgngtgctcacacgtcaggggttaccctcggggagcgttgatgagaagaggaatgacccgaaactactcttgggaaaccgctgccgttcagtatgagcaagtttttcagtgggttttcatggaccctccctatgtcagctagaccaaacataggctgaaccaaaccgagttggaccggatcagaccagacctgaccaatcagatggagagtgtggaacctccttttccggctatcgaaaatctatggttttcaacgtttccacattaaaccgtgtatctatctatgtctattatcttaaactcgtatggtgtttgttttggggaggtatagaattttagttatgaggttataatatgtttttctttcggttatgacatgtgtgtcttactcttttcctaattatctgaatcccacctagatttcttttgataagacattatacgagtagactaatatgacttaagtttataaaaaacc

SEQ ID NO: 127049 - DNA, 571 bp, Arabidopsis thaliana
ggcccccccattaggcctgaatgtccgatgattgggtttataggaagacttgattaccagaagggcattgatctgatccaaaccgctggtcctgatctcatggtggatgacattcaattcgtcatgcttggttcgggtgacccaaaatatgaaagctggatgagaagtatggaggaaacatacagagacaaattccgtggttgggttgggttcaatgtccccatctctcatcgaatcacagccggctgtgacattcttctcatgccgtcgagattcgagccctgtggtttaaatcagctatacgcaatgagatacggaaccattccagttgttcatggcactggaggactcagagatacggttgagaatttcaacccttatgcagaaggtggagctggtactggtacagggtgggtcttcactcccttgtcgaaagatagcatggtctcggccttgaggttggctgcagcaacgtacagagagtttaaacagtcatgggaaggattgatgagaagaggaatgacccgaaactactcttgggaaaacgctgccgttcaatatgagcaagttt

SEQ ID NO: 127050 - DNA, 440 bp, Arabidopsis thaliana
  unsure (1)..(440): unsure at all n locations
gggtgaccccaaatatgaaagctggatgagaagtatggaggaaacatacagagacacattccgtggttgggctgggttcaatgtccccatctctcatcgaatcacagccgggtaaaaacaaatcattctagcttagactgtcaaaaatgccagaagacatgataaaatcaatagagaatctttgctttgtccagggagatctattctatggactatcatatgatccatatacaggaactgttgtagaaaaccttcacagtgccacaaatatctcattggattgtttttnnttgtnttgtcttgaaaaactatccgntaaacagcttgtgacattcttntcatngccgtcggaggattcgagcccctgtnggtttaaatccagntnntccgcaatgnagatacggaaccntttccatttntttcattgggncctggnggct

SEQ ID NO: 127051 - DNA, 766 bp, Arabidopsis thaliana
gcccgggtcgacggtatcgataagcttgatatcgaattcgcggccgctcttgggtttggttgggtcactcttcaggtcaggtgtgtaaaaaagaaagaaagaaaagagagattgttgtgttgtaacccctttgactaaaatctaatgaacttttttaacacaacaaaactccttcagatctgaaagggttcttcttctctcttagtctctttgtccttttattctccgtcgtcgtttcatgatctgactctctggtcttctcttcttcttcttcttcttctattttttcttacttcgtcactgttgtgtctgaacatgccacgccctttcttccataagttgattttctcatccactatccaagaaaaacgtctgagggtcccagataagtttgtgagtaaattcaaggatgagctttcggttgctgttgcactcacagtacctgatggtcatgtttggcgtgtaggactaaggaaagctgacaacaaaatttggtttcaagatggttggcaagagtttgttgaccgttactccattcgcattggttatcttttgatttttagatatgaaggaaactctgccttcagcgtctacattttcaatttatcccactctgagatcaattaccattccaccggtctcatggattccgctcacaaccacttcaaacgcgcccgtttgtttgaagaccttgaagatgaagatgccgaggtcatctttccttcttctgtgtacccatcacccacttctgagtctacagtaccag

SEQ ID NO: 127052 - DNA, 452 bp, Arabidopsis thaliana
atttttgacctgaaccgcttcgtttccgatcggaggaagtatctggtgatgacgggaggcttgcataatgaggaggcgggttcactggctacgccgactagtgctaggcacattgggaagagagctcgcaagaacaaaagcctcaccgtctcttttgacgagaaagatctcaaggattttgtgactggttttcacaagaggaagaagaaaagaagaaaggaagctcagaagcagcaggaggaagcttttaggcggaaacgaatcgaggcccgtaagaataggaaattggaagagctaatggttgctggtaatggcgaggataatgaagatggggaagctgaagatgaagtggatgcagaggatgaagaagcagagcctgatgcttcaacatctgccacgacgatgtatgatacaggcgagttgaaagtaactgtgacaacaagtgagatatc

SEQ ID NO: 127053 - DNA, 1060 bp, Arabidopsis thaliana
  unsure (1)..(1060): unsure at all n locations
tactnnnnnnnnnnnnnnnnnnnnnnnnnnnnnnnnnnnnnnnnnnnnnnnnnnnnnnnnnnnnnnnnnnnnnnnnnnnccacgcgtccgcggacgcgtgggttttgatctgacgtttaaaagcaggtttctttctatttccagataaaaaaactttactcatcgagactcgtttagtgattcgaaatttcccttctcggctcaaatcttcgatctgggctttcgtgtctttttgcgttttgattggtaataaaaagaagctttttaaaaactttttccatggctggaagtgaagaagttaatcttattgagagcaagacagtggttcctctcaatacatgggttctaatatccaactttaagctagcttacaatctcctgcgtcgccctgacggaacttttaaccgtcatctcgcagagtttctagaccggaaagtccctgcaaatgccaaccctgttaatggggtcttctcttttgatgtgatcatcgatcgccaaactaatttgcttagcagagtttacagaccagctgatgctggcacttcaccaagtattactgatctacagaatcctgttgatggtgaaatagtgcctgttattgtcttctttcatggtggaagctttgcacattcttctgcaaacagtgctatttatgatactctttgtcgtaggcttgttggtttgtgtggtgctgttgttgtctctgtgaattatcgccgtgcaccagagaatcgatacccttgtgcttatgatgatggatgggctgttttgaaatgggtcaactcgagttcttggcttagaagcaagaaagactcaaaggttcgtattttcttggcgggtgatagctctgggggtaacattgtgcataatgtcgcggtaagagcggttgagtcaaggatcgatgttttggggaacattttgcttaaccctatgtttggagggaccgaaagaacggaatctgagaaacgtttggatgggaagtactttgttacggttagagaccgagattggtattggagagcgtttcttcctgagggtgaagacagagagcatccagcgt

SEQ ID NO: 127054 - DNA, 338 bp, Arabidopsis thaliana
ccacgcgtccgaaaaacatcatacagagagatatttaacgttttgaaatggaggctgttagattcgccgtcgccgtcgttcttgtattttgctacgttacgtcgtctaatgctcagatgacttcaccaccgagcggcggtgcaggaggagacgcacactcactgccgtgtattcagaaactgatgccgtgtcagccgtatcttcacttggcgactccgccgccggcgacgtgttgcatgccgttgaatgagatcgtagccaaagacgccacgtgtctctgcgctgtctttaacaacgttgatatgctcaaatcgcttaacctcactaaagaaaacgct

SEQ ID NO: 127055 - DNA, 296 bp, Arabidopsis thaliana
ttttcctgaggacataacagcatctcctttaccgaccaagtcactcttgtcacctgaaataaacaactccggaaaggaggaagagcgagtgttaccaaagtccttggagtacatatcatgcctaattcatttggctgcttttgggatttttggggccattacgagatatttgctgcaaaaattgtttgggccaactggtgctcgagtaacaagtgatgggagcatcttgtaccttgatcttccctccaacatggtaggatcattcctgatgggttggtttggcgttgtattcaaag

SEQ ID NO: 127056 - DNA, 382 bp, Arabidopsis thaliana
  unsure (1)..(382): unsure at all n locations
gttctttgccggcaaatgctccaaagattcttctttttttctcctatcaacaagtccaacacacaaacttaatggcttccgcttgcgttaaaagtgccggtgtttcgccggagaagttctcgtcgtacggatggacgagccctcggatgtctttaaccagagacgacaacagacgctcttcctccgttgacaagcaacaatctgacccattaccggaaatccaagatccagttgtggatttcgagttttgccttgaggatccggtcacaatgctctctgccgatgagctcttctcccgacggaaaagctcgtanctttnaangttctctggccctaaganggacgnccggcgncggacgtaaacgccagtcaaancacaant

SEQ ID NO: 127057 - DNA, 909 bp, Arabidopsis thaliana
  unsure (1)..(909): unsure at all n locations
acgactcactattgggaaagctggtccgcctgcaggtaccggtccggaattcccgggtcgacccacgcgtgcggtttaatatcttattgtttaaaaaagaagaacaagactatgggaagtgtacagttgagtggttccggcctagtagcttctctacctccaaatcatagctttagccacaagaccaaacttaataagccaaattcgtacttctttcgctcaaaacacaatgccgcaagaaccaaaaccgtccgagccataagcaccgcaccagcgagccagcctccagccgctgatgagcccgacgaacctcctgctgtcgattttgcgttcgtccattcggtgttgttgccggacgggacaccggacgtacattggagaagagcgaacggtggacagaaactaagagacataatgttggattctaacatcgaactctatggtccttatagtaagcctttgtcaaactgcgcaggagtaggaacctgcgctacttgcatggtccgagatggtaaatggaaaggaacttctaaatccgcgaactgatattgagaaggagaaactcaaaaggaaaccaaaaaattggagactagcttgtcaaaccaacgtgggaaatccagattctaccggattggttgtcatacaacaattgccagagtggaaagctcatgagtggaacatccctaagaatatacctaatgacgatgatctcgaaacttctacttgaaaccatccattaatntgtcattgttgttagttgttactatatcataaaattgtaacgatctattttttatatatatggatcgataattagctataaaaaaacaaaaaaagggannnnnnnnnnnnnnnnnnnnnnnnnnnnnnnnnnnnnnnnnnnnnnnnnnnnnnnnnnnnnnnnnnnnn

SEQ ID NO: 127058 - DNA, 502 bp, Arabidopsis thaliana
agctctatacactatataggaagctggtcgcctgcagtaccggtcccggattccgggtcgaccacgcgtccgcaaaatcccaaatttttcctcgacaaaaaatctacctgctttgatccaaatctctatgggtttttatcattaatcgaatttcaaaattgatgaatccataatttttttctctattcgatttatgagaaattgatttttttttttatttttctcccttgtgaaataggttaaagattattgttttgttgctgtttgtagttatgccggtaatgaatccatcattgtgtattggtacacaaacatcggtgtacctcgctcctcgtgagaaatcttttacgagtaatggaaactctcaaaggcgttatcctacaagcgtttctatgcaacgccagccttggagccaaagtaaattcccttctctccaggatgcagtgcaaccagttgtcgtctctaagaataaaagaccagtctttgcatgtaactctgcgct

SEQ ID NO: 127059 - DNA, 420 bp, Arabidopsis thaliana
ctctctatagggaaagctggtacgcctgcaggtaccggtccggaattcccgggtggggccacgcgtgcgcccacacagtccgggaaggtttgggtgcttttcaaaaactgcccatggtcatgccatctattgatttgtatgcttctgctctcaggaagtctaaaagagtccaaccaactaaaggcattgctaatattgctaagcgagaaagaaatagaggtgctaaacagcttgatgcattcatgaaagaactggctctacctttaaaaggctacatggaaagttttcccaggaagaaactcttgcatccatatgaaaggtctcttattgactcgacactcggtgatggaaagtatgaagaggtgttaggaaaagttgctgttctgaggaagaaggtgcaatctgttggaaaggaacatg

SEQ ID NO: 127060 - DNA, 556 bp, Arabidopsis thaliana
  unsure (1)..(556): unsure at all n locations
nnnnnnnnnnnnnnnnnnnnnnnnnnnnnnnnnnnnnnnnnnnnnnnnnnnnnnnnnnnnnnnnnnnnnnnnnnnccacgcgtgcgggtacttggagtgatggaaagcttgttactcgaataggaaagaatagtgccaccgttctagcggtgttgaaaacgttggttcgctttggggctcctgataatatattggtcaacggaaagcctcatctaggaacagataagctagttccattactccgtaatttcagacattatcttcaaagtgcgggagtgactatcaagtttggaactcgggtagatgatcttctggtagaggattctcgtgttgttggagtcagggtttcggattcaacaaaccaattgcagactacctcccagaatttaaaggttgatgcagttgttcttgcagttggtcattcagcacgtgacacatatgagatgcttcattcctcgtaatgtcgaattgattccaaaagattttgctgttggtttgcgtattgagcatcctcaggagctaattaacagtatacaggactcggatttggctaatg

SEQ ID NO: 127061 - DNA, 661 bp, Arabidopsis thaliana
  unsure (1)..(661): unsure at all n locations
nnnnnnnnnnnnnnnnnnnnnnnnnnnnnnnnnnnnnnnnnnnnnnnnnnnnnnnnnnnnnnnnnnnnnnnnnnnnnnnnnnnccgcgcgtgcgcagcaaaaccacctaactcaaattgttgtctatatacaagaaacataatcataatgggaaaaggaggaggttatgtgacggtggcggcggaagaagtggaggagttacggaggaggaacggagagttggagagagaaatggaggagatgaagaaagagatggttcagctgtggcggcgtacggtggtggcggaggaggcccaggagagactctgctcgcaactggcggagctagaggtcgagtctttagatcaggcgcgtgactatcactctcgtatagtctttctcatggaccaaatctctcgtctctcttcttcctctcttgaaggcggtgttacgcattcgtagatagattaattattattttggctttagctttttttttttttttaattgtgggatccaaggagtttaatgtgttaaaaagatatgtaaagaaattttgcataagtattacaaattttcattttcttcaaaaaaaaaaaaaaaggggcggccgctctagaggatccaagcttacgtacgcgtgcatgcgacgtcatagtcttactatagttcagctaaatca

SEQ ID NO: 127062 - DNA, 478 bp, Arabidopsis thaliana
actctaatacgacttactatatggaaagctggtgcgcctgcaggtaccggtccggaattcccgggggggcccgggcggcgaaagtttctaacctctaggccaccactcatggctactctgttcatgaagctggtgagcttctttctaattctatctactttttgtctcactactgtgaactcggagccacagtgccataatttcaaatcgatcattagtttcggcgattctattgccgacactggaaacttgctcgccctctccgatcctaccaatctccctaaggtcgcgtttctaccgtacggagaaaccttcttccaccatccgaccggccgtttctcaaacggccgcctcatcatcgatttcattgctgaatttttgggttttccgcttgtgcctcctttttacgggtctcaaaatgcaaattttgagaaaggagttaattttgcggttggaggagcaacggcactggaacgtt

SEQ ID NO: 127063 - DNA, 431 bp, Arabidopsis thaliana
  unsure (1)..(431): unsure at all n locations
tctaatacnactcactatatggaaagctggtacgcctgcaggtaccggtcccgaattccccggtggagccacgcgtccaggaaaattgtcctaggccatctaacacacggtttaaggagcttaattctgagcctgttgtaccggaaggttttccggggtgggaagaagtaatggactcatggggttacaagatgatatccgcggttgaggttgttgctgaaatggcagcaattgggtttggtttgcctaaggatgcatttacatcactcatgaagcagggtcctcatcttcttgctccaacgggaagtgatcttaactgttacaacgaggaagggacgatatttgcaggatatcactatgatcttaattttctaacgattcatggaagaagtagattccctggtctatatatttggttaaggaatggagag

SEQ ID NO: 127064 - DNA, 431 bp, Arabidopsis thaliana
aatcaggccctctcgatactgatctcttgctttgtgaagacgtctcatcacgaagaatatttgggtgtaaaggaagctatattggtggaccttcttagagtcataagccaccaccgagctcgtctagctacaccaatccgtacaatccgtaagatgtacacagagactgacgtggaaaacacaccatttggggaatcgatgtacggaggtgttacttctcggcggcctttgatgctaattgaacccgcttacaaaatcaatggagaagacaaatcaaaatctcaaaaccgtgcagcaaaaccaaccgcagagcaagaaaacaagggctcgaatccaaagtcaaaagaaacgtcttctcctgatctaaaggcgaatgtgaaagttggggaatcccctgtttctgataccaacaaagtatctgaagaaacagt

SEQ ID NO: 127065 - DNA, 521 bp, Arabidopsis thaliana
  unsure (1)..(521): unsure at all n locations
nnnnnnnnnnnnnnnnnnnnnnnnnnnnnnnnnnnnnnnnnnnnnnnnnnnnnnnnnnnnnnnnnnnnnnnnnnnnnnnnnnccacgcgtccgtagaaacattagcttcacgaatactgcgccggctccattgccggggatgcaagggtggcaagcggtggcgtttaggatctccggcgacaaagctttcttttccggctgcgggttttacggtgcacaagacactttatgcgacgatgctggccgtcattacttcaaggagtgttacattgaaggctctatcgactttatctttggtaatggccgctccatgtataaagattgtgagttgcattcgatagcgtcaagattcgggtcgatagcggcgcatggtaggacatgcccggaagagaaaacgggtttcgcgttcgtgggttgtcgggtacaggtacgggtccattgtatgtgggccgggccatgggacaatactcacgtatcgttaacgcctacacttactttgatgctctcgtcgctcacggtgg

SEQ ID NO: 127066 - DNA, 592 bp, Arabidopsis thaliana
  unsure (1)..(592): unsure at all n locations
nnnnnnnnnnnnnnnnnnnnnnnnnnnnnnnnnnnnnnnnnnnnnnnnnnnnnnnnnnnnnnnnnnnnnnnnnnccacgcgtccggagaacatagtttcttcttgcttttgagaaaaaataattatatatttttatataggaaagggttaatttattaataaaaaaaaataaaaagaagcagaaaagagataatgcagggtggtaggcttttgacggtgttggtgtgcctcgcctccacggtggcgttggtgagcgccggtgacccttacttctactacacgtggaacgtaacctacggaaccgccgcgcctctcggaattcctcaacaggtgattctcatcaacggacagttccctggtcctaacctaaactcaacctccaacaacaatgtcgtcatcaatgtcttcaacaacctcgacgagcctttcctcttgacctggagtggactccagcacaggaagaactcatggcaagatggtgtgactgggacctcatgcccaatcccagcaggcaccaacttcacttaccatntncagcctaaggaccagatcggtagctacttctacttaccatccaccgntcttcaccgtt

SEQ ID NO: 127067 - DNA, 630 bp, Arabidopsis thaliana
  unsure (1)..(630): unsure at all n locations
acttatggcnttgggagtntccttagtcggcggatcggtnccaggcgaaatggnggaattgcgttggccaatgnttaatacgcaacgtttgccgcggaggtccttaggtttccaaaaatnaacatcncccatgcgnacaaccaaggttcaactgcacaaccaaggcatccttcaggctccaaccaaaggctcccgcccgccgcaacttaaatcatcttcgccctcttcttccaagagcttcttctccggctgccgaaggacccggtccccgaggatgactactctgcctctagtcctagcgcctctgctgaggcacctaccgtctcctcccccccggctcccacccccgacagcacttccgccgctgatggaccaagcgatggacccactgcagagtcacccaagagtggtgccgtgacaactcgctaagttctctgttgtcggcacagtcgccgccgtcggcttcttcttcttttctttctaagttaagtcgtccacgttttgcttggatggatcagagatttgtataatcttttgagttgaggccgtaaatttattttatatattctgtttataaaggaaaaaaaaaaagggcggacgctctagaggatccaagcttacgtacgcgtg

SEQ ID NO: 127068 - DNA, 575 bp, Arabidopsis thaliana
  unsure (1)..(575): unsure at all n locations
ggggcactatttctccataaaataagaaaaataaaacaaaaataaataaataaaaaatactgctttagcttttggagtatcctccttttaatctcaataaaaaaactattaaaacagaaaaaaaaatggcacgtcaatttgtcgttttggtcctattggctttaactatcgccaccgctttcgccgccgacgctccctcagcttctcccaaaaaatctccatcacccactgccgcaccaaccaaggctccgactgccacaaccaaggctccttcagctccaaccaaggctccagccgccgcacctaaatcatcttcggcctcttctccaaaagcatcttctccggctgccgaaggacccgtccccgaggatgactactctgcctctagtcctagcgactctgctgaggcacctaccgtntcctccccaccggntcccacccccgacagcactttcgccgctgatggaccaagcgatggacccactgnagagtcacccaagagtggtgccgtgacaaactgntaagttctctgttnntcgggaaaagttgccgccgtngggtttntttttttttta

SEQ ID NO: 127069 - DNA, 768 bp, Arabidopsis thaliana
tgggcccccccccgagtcgacggtatcgataagcttgatatcgaattcgcggccgcctcggactttctttcaatagtgggaaaaagacacagaatctcaaaaaagtcctctcttgtccaaagtccaaagcttttgaaagagaccataaaaacagagcttaatctctctctgtctctgtctctctctcttttggaggcttgaggatgacgagaagagctgaatttgagatgggtttgttcgtgattcttcaatccatgtttctgatatctctatgttcatcacagaaacctgaggagttcttacctgagatatcaccagatacttctcctcaaccgtttcttcctttcattgcaccttctccaatggttccatacataaatagtaccatgcctaaactatcagggctttgctcgcttaatttcagtgcgtctgagagtttgattcagactacttcacacaactgttggactgtttttgctccattgttggcaaatgtgatgtgttgtcctcagctagatgctacactcacaataatcctttggtaaagcgagtaaagaaaccggtttgcttgctttaaacagaacccagtctaagcactgtctctcggatttagagcaaatcttggtacgaaaaggcgcttcaggtcagcttaataagatctgttctattcactcgtcgaatctcacttcttcgtcctgccctgttatcaatgtccatgagtttggaagcaccgtggatacagcgaaacttcttttggcctgtgaaaaa

SEQ ID NO: 127070 - DNA, 636 bp, Arabidopsis thaliana
  unsure (1)..(636): unsure at all n locations
gccnnnnnnnnnnnnnnnnnnnnnnnnnnnnnnnnnnnnnnnnnnnnnnnnnnnnnnnnnnnnnnnnnnnnnnnccgcgcgtgcgcccacgcgtacgagactgtgttcattactcgtggggtcggtctctctcctctctatctctctctttctctgtgaagacgaagacagctgtttctgagtttcccttttgtttttgtgtctatcttctcaaccaagttttttgtgtgtccggggttcgcaaagaaacgcctttctcttcttctccttagatttctcggactttctttcaatagtgggaaaaagacacagaatctcaaaaaagtcctctcttgtccaaagtccaaagcttttgaaagagaccataaaaacagagcttaatctctctctgtctctgtctctctctcttttggaggcttgaggatgacgagaagagctgaatttgagatgggtttggtcgtgattcttcaatccatgtttctgatatctctatgttcatcacagaaacctgaggagttcttacctgagatatcaccagatacttctcctcaaccggtttcttcctttcattgcaccttctccaatgggtccatacataaatagtaccatgcctanactatcagggctntgctcgct

SEQ ID NO: 127071 - DNA, 595 bp, Arabidopsis thaliana
atgggaggcaacgttattactgagcagcaacgtagaagactggatcctgcatcaagtgaaccgttgtttaccaactgtaccagggactttataggcacacttgattacatattttactcagcggacacgctatcagtggaatcgttgctggaactgttgggtgaagactccctgaggaaggacacagctcttccatctccagaatggtcttctgatcacattgcacttttggatgaatttcgctgcatgcccagggccagtcgaaacaatattttatagagatactgcaactgtcataactcgataccaaaggctgggtcccatggatatggttaagctacatgaagtagatagcatggccatgtccctggggtttcttccgctgggtttttcgctcgagaataactctgtatcacagttttctttactgcctggttcgcctggcctttctttctatagatatttcctctttgcccgaaaggtttgtcttcaccggcctgtggttggaaccatgttaaccattaggcggccgcggatttcttccggcccggggctccccttaatttaaaaccgcccccccccccggtgaacctcc

SEQ ID NO: 127072 - DNA, 558 bp, Arabidopsis thaliana
  unsure (1)..(558): unsure at all n locations
tacatattttacacagcggacacgctaacagtggaatcgttgttggaactgttggatgaagagtccttgaggaaggacacagctcttccatctccagaatggtcttctgatcacattgcacttttggctgaatttcgctgcatgcccagggccagacgaaacaatattttatagagatactgcagctgtaataacccgataccaaagactggttccaatggatatggttaagctacatgaagtagatagcatggccatgtccctggggtttctcccgctgggtttttcgcttgcgttctactctgtatcacagttttatttactgcttggttcgcttggcttttctttctatagttatttcctctttgccagaaagttttgtcttcactggcttgtgattgtaacaatgtaaacaattagattcttcaagaaaatagtgacttcaccttttccatattaacaaaaaaaaaaaaaaaagnnnnnnnnnnnnnnnnnnnnnnnnnnnnnnnnnnnnnnnnnnnnnnnnnnnnnnnnnnnnnnnnnnnnnnnnntcaatcc

SEQ ID NO: 127073 - DNA, 274 bp, Arabidopsis thaliana
tttagatttagggttttgtaactttggagagctcaagttcggtttcgttcatctccctcttaattcactttaattcagggtttagggtttcatttattttgttttccccaattcgatatgtattctgatctagtggtggctgaaactaaaatcagcaaaacgttcaagaaccgtctcaatggtggttccggtgccttctcttctcgcggcaaacaacaacaagtcacaaggaagagaggaaggcaagatcatcataagtgggagcatgatcttt

SEQ ID NO: 127074 - DNA, 502 bp, Arabidopsis thaliana
ctctatccaactaattatagggaaggctggtccgcctgcaggtcccggtccggaattcccgggtcgacccacgcgtccgtctctctctctccacaaagataagccaacaatggttggtgattacagaggacgctttagtagccgtcgtttctccgatgactctgacgattcttccgacgatgcttcttccgtggagggagagaccacttcttccatgtactctgcggggaaagagtatatggaaacagaatggactaatgagaagcatagtttatatcttaaatctatggaagcttcattcgtagatcagttatataactcgctcggagctctcgggaagaacgagaatgtatccgaatcaacgaggttcggtagcggtagaaaaccgtctcaagaacagttcaaggttcttcatgatggtttctggcagaagattaatgtgaaacaacctgaacatcggattaacggaaggcacggtggtaattctcatgagtttcttagg

SEQ ID NO: 127075 - DNA, 931 bp, Arabidopsis thaliana
  unsure (1)..(931): unsure at all n locations
gccgagcactatacgactcattatgggaaagctggtacgcctgcaggtaccggtccggaattcccgtttcgacccacgcgtccgcccacgcgtccggaaatggcttgcaccgtagatttccggtgccttgacgaaggattcggcggcaaaacctacaaacgcaaacgcgaatctcaagaacaagccgccgccgaagcaatcgccgatgaagcttccatggacatcgatggtgctcctcctgccgcgaaacgtagcgccgtcgcttcctctgaaaatccagacaaacctattgctctagctgtcgagagaccaacctacgacggtgtaatcgccgggaaagtctccggacggaactggaaacagccgcgaactcatagatcttcagggaggtttgtgaagaacaggaaaccagatctggaggagatgaagaggcaaagggagattaagaaagcgtataaggagagggtgaatgagctgaaggaagagattaggagtaataaggttgagaagaggaagaagaaggaagagagagagaagcggaagaaggagaatgttttgagaactggtactaagttgcagaagattacaaatcccaagactttgaagaaaatttctatgtctaagaagcagaggaagcagcttaagaaaattcctgacgagatgttgagtggtggtagcaagaagagtatcacgaattagtggttttttgttccttctctttaaaggcaagtgttttcagttttttgtatttcctcatgaggtttattcgatgttgtttagttaacaatctgcagctaagaactaaatgttatgaaagtttaatagtgagaaactttgttttgcttcaacaaaaaaaaaaaacaaagnnnnnnnnnnnnnnnnnnnnnnnnnnnnnnnnnnnnnnnnnnnnnnnnnnnnnnnnnnnnnnnng

SEQ ID NO: 127076 - DNA, 768 bp, Arabidopsis thaliana
  unsure (1)..(768): unsure at all n locations
tgannnnnnnnnnnnnnnnnnnnnnnnnnnnnnnnnnnnnnnnnnnnnnnnnnnnnnnnnnnnnnnnnnnnnnnnnnnnccacgcgtccgcccacgcgtccggccaaatttgcagactttcccaggaccaaaattatattaacaaaaagttccttttttctgatcaaattgtgaaattcgcttgcttgctttcttcacagtcaattaattctcttacaaaacattcttcgatcgttcgttttcatcttctatgcttctctgatcagacacaagaacacaaccaaagaaactcactatagcttgtctgtagattctgatgttcgaattcttgttgttgatgatgattgaattgatgatgatgatggtttgatgcagatgggttntcaaaaatctcatctttttttcttaacaaatcanaaagcttagaacttggtgaacaatactagagactagagaatttgcagataatctgtttcaaaaatggatgctacgagtggaactccgagtttacagtatattaacttgccggaacaaatctgttcgactaacttctctccctgtgtcaccatttcanaaggccaaacgacattgctttggtgacccaactccaggagagtttcctttagcagctaaccctctcattgccctacatgttctcactgaatgtagattggatcctcgtgacctcgctaatcttcgaggttttgttccgaaatgtcggaaatgtgttactcgcaatttcgaggattgattggtctgctgatttga

SEQ ID NO: 127077 - DNA, 848 bp, Arabidopsis thaliana
  unsure (1)..(848): unsure at all n locations
taatcgactcatttagggaaagccggtacgcctgcaggtaccggtccggaattcccgggtcgacccacgcgtccgcaaaaagcaccagtttcaagtgatcctgcaatatctaaagatgtagtgttatcaagctctagctttctccgcgcaactgggtcatcaagacgtgctgctgtatccagtagtcgcgaagctgcagttctgggaactgattctgagccatcaaaccctcaaatcgttgaagctggatcaggctccaattcaaagatccctgttagtcgaaactcacctatcgtctcatctgagatcaacaagctatcatcaccttcaagggcgactacttcagtcatgaagaactatgaggctaatcttaaagggatcgagagtctgcatttttagtcgttggggccagtgaatgatcttgaaaccccgggacaagtgtaaattaaaagacaaagatgacctctcttaggccctcctcatgttttacgtgcatttgtgtttacagggagggagacttgtgcctctaagcacacactctaataacatagataaggaaaagcctctgaagaagtgattttcagagaaagacaaactcaaaagagggcgagactaaaaagtcaaaagacttttaacacttttattccccatttggttttacactgtttatgttgtgtttgtcttgtttggtactgcaacagctaaaatcgtttgtgcttcaaaaaggttttaagttcttaaaaaaaaaaaaaaaaaaagnnnnnnnnnnnnnnnnnnnnnnnnnnnnnnnnnnnnnnnnnnncgtcctaaannnnnnnnnnnnnnnnnnnnnnnnnaatcgnnnnnnn

SEQ ID NO: 127078 - DNA, 987 bp, Arabidopsis thaliana
  unsure (1)..(987): unsure at all n locations
nnnnnnnnnnnnnnnnnnnnnnnnnnnnnnnnnnnnnnnnnnnnnnnnnnnnnnnnnnnnnnnnnnnnnnnnnnnnnnnnnnnccacgcgtccgcccacgcgtccgggcgtgcaaatcaggtatacgtcatcgactttggtctggcaaagaagtacagagactcaaatcatcagcatattccatatagggaaaacaaaaacttgactggaactgctagatacgctagcatgaacactcaccttggcattgaacaaagtcgtagagatgatttggagtcacttggattcgttctcatgtacttcttaaaaggaagtcttccttggcaaggactgaaagctggcaataagaagcaaaagtatgagaaaatcagtgaaaagaaagtatcgacatctattgaggctttatgccgaggttatccatctgaatttgcatcttatttccattattgccgttctctgagatttgacgacaagccagactatgcctacctgaaacggcttttccgcgacctgtttattcgtgaaggcttccagtttgattatgtatttgattggacgatcttgaagtatcagcaatcacagatttctactcctcctcctcgtcatcatggtcctgtagttgggccaagctctgccctcccccctgccattaccagtgctgagaggccatcaggtggcgacgaagctagaccttctggctggtcatcaggaatccctagacgaaattctggacaaatttttaactcaggaagcttagctaaacaaaaagcaccagtttcaagtgatcctgcaatatctaaagatgtagtgttatcaagctctagcttttctccgcgcaactggggcatcaagacggtgctgcttgtatccagtagtcgcgaacgtccaggttcttcccacctgattctgagccatcaaaccctcaaatcggtgaagctgggtcaggctccaatcaagaaccctgttagtcgaactcactatgtctca

SEQ ID NO: 127079 - DNA, 556 bp, Arabidopsis thaliana
  unsure (1)..(556): unsure at all n locations
nnnnnnnnnnnnnnnnnnnnnnnnnnnnnnnnnnnnnnnnnnnnnnnnnnnnnnnnnnnnnnnnnnccacgcgtccgtcctcttcctctgctccactcattctcctccaccgtcgccacaaaatccaccgcctctagaatcactgccacgccgtcgaaaatccgcttctctgtcataaacgccacgtcggagaatggaaacagcggtggtagtaaaaacgatcgtgatgaggatccatcttttaacccatttggtttcgttacagacaacccgtctagccggagtgcaattcagttaccagagtctccggcggaagacggcaatgtcggccaaatgctctacaggactgaagataaaggtaaagagtatggctcaactatcaaatctgggaagcttagatggtttgtgagagagactggatcaaaggagagtcgtcgaggaaccattgtatttgttcatggagctcctactcagtcttttagctacagaactgtcatgtctgagttgtcagatgctggatttcattgctttgcacctgactggataggattcggat

SEQ ID NO: 127080 - DNA, 528 bp, Arabidopsis thaliana
  unsure (1)..(528): unsure at all n locations
tgatacgccagctctatacgactcactattagggaagctggtacgcctgcaggtacccggtccgggaattcccngggtcgacccacgcgtccgaaagaactccagcatatcgagcaggtcttcactcctttggttgagaaatgcaaaaagtacgggagagcaatgcgtattgggacaaatcatggaagtctttctgaccgtatcatgagctattacggggattctccccgaggaatggttgaatctgcgtttgagtttgcaagaatatgtcggaaattagactatcacaactttgttttctcaatgaaagcgagcaacccagtgatcatggtccaggcgtaccgtttacttgtggctgagatgtatgttcatggatgggattatcctttgcatttgggagttactgaggcaggagaaggcgaagatggacggatgaaatctgcgattggaattgggacgcttcttcaggacgggctcggtgacacaataagagtttcactgacggagccaccagaagaggagatagat

SEQ ID NO: 127081 - DNA, 609 bp, Arabidopsis thaliana
  unsure (1)..(609): unsure at all n locations
nnnnnnnnnnnnnnnnnnnnnnnnnnnnnnnnnnnnnnnnnnnnnnnnnnnnnnnnnnnnnnnnnnnnnnnnnnnccacgcgtccggctagttagagttttcgccaatgatccacattttgtgaaggatggtgttgatgtttcgaatcaaccaggttcgaggaaacctttttgtacagaggtgaaggatttggtccgggaagctgatactgtcataaagattcggtcttttcagatcattgtagctcagggagtgacaggatcgtttccttggtctgctctttcttttgcacctatgtggttggaactcattgggttctcacacgggaaaactgcattcttgatgggtcttttcgtggctgcatcttctcttggtggcttgtttggaggcaaaatgggagattttctgtctactcgtcttcccaattccggaagaatcattctcgcgcagattagttcagcctcagcgatcccgctcgctgcaattctcttgttggtcttaccagatgatccatctacagctgcaatccatggtctgatcttagtcctattggggctatttgtttcttggaatgctcctgctaccaacaacccaatcttcgcagagatc

SEQ ID NO: 127082 - DNA, 890 bp, Arabidopsis thaliana
  unsure (1)..(890): unsure at all n locations
tccagctttataccaattcattttagggaaggctgttcccctggcaggacccggcccggatttccgggtccgacccacgcgtccgcaaaaatcaaaatgtcttctcatactgcaactaagtatgatgttttcctaagtttcagagggcatgacactcgccacaacttcatcagttttctctacaaagaactggttcgaaggagcattcgaaccttcaaagacgacaaagagctggagaatggccagaggttttcgccggagctcaaaagccccatcgaggtgtcaagattcgccgtcgttgttgtctcagagaactatgctgcgtcttcttggtgtctcgatgagctcgtaacgatcatggatttcgaaaaaaagggttccatcaccgtgatgcccatcttctacggcgtggaaccgaatcatgtgaggtggcagaccggagtactcgctgaacagtttaagaaacatgcgagtagagaagatcctgagaaagttcttaaatggaggcaagcattgaccaattttgcgcaactctccggcgattgctcaggtgatgatgactcgaagctggtggacacaattgctaacgagatatcagacaagatgacgatttatgcatcactaaacaatgggaagaatctagttgggattgatacacacatgaatgaactaatccgattaatgatatgaattgcacanagtactgaagaatggtgggatctggcaaacgaggcatggtagtcagctcagctaatatgttatcagacatctgcacagttgacagcattgttctggaactgaaacattctaggtcgcctcaccattaccacagttctggaaataaagaaaacttacaacatgtctagataaagtctgtgtggaacacgtct

SEQ ID NO: 127083 - DNA, 895 bp, Arabidopsis thaliana
  unsure (1)..(895): unsure at all n locations
ctcatactgcaactaagtatgatgttttcctaagtttcagagggcatgacactcgcgacaacttcatcagttttctctacaaagaactggttcgaaggagcattcgaaccttcaaagacgacaaagagctggagaatggccagaggttttcgccggagctcaaaagccccatcgaggtgtcaagattcgccgtcgttgttgtctcagagaactatgctgcgtcttcttggtgtctcgatgagctcgtaacgatcatggatttcgaaaaaaagggttccatcaccgtgatgcccatcttctacggcgtggaaccgaatcatgtgaggtggcagaccggagtactcgctgaacagtttaagaaacatgcgagtagagaagatcctgagaaagttcttaaatggaggcaagcattgaccaattttgcgcaactctccggcgattgttcaggtgatgatgactcgaagctggtggacaaaattgctaacgagatatcaaacaagaagccgatttatgcaacaatatgatgagtccagacgagaagaagaagaagaaaggagaaggcccataaggactcgcatgcccaatccaaagtattcccaacactaagtcattttacttagtctctgttttcgatttagttacaataagcaaggagtcttccacgattacagtttccatcttttccaagtttgtagaagttgttactccacgtttgtttccatgttgtttctagttgtaaggaggtgtactccaagtatttatatcaatgaaaaccaaaccaaaaaaaaaaaaaaaggcgnnnnnnnnnnnnnnnnnnnnnnnnnnnnnnnnnnnnnnnnnnnnnnnnnnnnnnnnnnnnnnnnnnnnnnnnnnnnnnnnnnnnnnnnnnnnnnng

SEQ ID NO: 127084 - DNA, 475 bp, Arabidopsis thaliana
attggtttcagttcgctggagaatcctgtggaagaccttgttaggcacttcattgggggaagtctcctacaatatcctcagctttcagccatcagttcttaccagttgtatgtagaggttgtctgtgaagaactagattggattcctttctatccagccagaaaggactcccagccagccgaacaatcacacgggcataaaagcagaccacaagggccacctaattatgatgctcttccacagatattgaatgtttgctcttattggctacagagctttattaagtacagcaaatggcctgagaatccttctaatgtcaaggcagcaaaattcttatccaaggggcacaacaagttaatccagtgccaggaagaactgggaatatcaagtttggctgtaacagaagcgagttttattgacatgacctcatcctcaactgatggagagtcaagctcatttgacaaggctctagaga

SEQ ID NO: 127085 - DNA, 433 bp, Arabidopsis thaliana
gtttcttcattgccttgggcaagagcacccagtcttttttagctgcaaatggtttcagttcgctggagaatcctgtggaagaccttgttaggtgactcattgtttttcttctgtttgcttaccatactctttgatacaccctatcacttagatcttctttatttaggcacttcattgggggaagtctcctacaatatcctcagctttcagccatcagttcttaccagttgtatgtagaggtaggcataaatcataccatcactggttgaaaatatttagttaccagtttgaaatcttatcatggaattctatagcgtaggttgtctgtgaagaactagattggattcctttctatccagccagaaaggactcccagccagccgaacaatcacacgggcataaaagcagaccacaagggccacctaattatgat

SEQ ID NO: 127086 - DNA, 547 bp, Arabidopsis thaliana
gttagacccaaaacgaaaaaaaggttcgtttaaagagctctggttgggtttaacttggaggaattaatcgagtttggtgatcttcttcttaggtttttttctcgatctggttgatttgcttaaacatctgtaactatggcggcagaacccaaggcagctgtcgaagtggtgaaggtggatctattcgaggacgacgatgagttcgaggaatttgaaatcaacgaagattggttggagaaagaggaagtgaaggaagttagcctgcagtgggaagatgactgggatgatgatgatgtcagtgacgacttctcgcgtcagttaaagaaggagcttgagaatgctagtgagaagaaatgaggtccaagattgcgagaaaggcaggtcttctcatttagggaaccttggcttttttgtttgaattgcatcctttggtttatcgtagcatgtatcggttctccttttccttaacacattatactcttccttggatgcaaatttctcgtctttgaagatgataaatttgagctgatagtaattctattctgat

SEQ ID NO: 127087 - DNA, 443 bp, Arabidopsis thaliana
  unsure (1)..(443): unsure at all n locations
aacgtcatctctttctcatctcgtgaaatcaacaccactgccggattccaacctcctccggcgaacatacgactttgttcccgtcagccatcgtctcctcctttccccaccgcgctctcttgttctcgacatggagaagatggagcttgcctttcgatgacaaaatcaaactcagattccgactactttgatggctacctccggcgaaagcaactgcaaaccttcaccttttcttggttgctctccgttctggtgaaacaagagacttctcttcgtctctnatccagggctctngtccgtgacacatnacaacaatnacaatcnatcttcaccatccaattaactccggctgcgnttaaatccgccgaatnggnccgccancattaaccggacaantcatgtttccaattgggngagntccacctntttttccgnggaannng

SEQ ID NO: 127088 - DNA, 578 bp, Arabidopsis thaliana
  unsure (1)..(578): unsure at all n locations
gancntacttggcnatnangccatnccacccnntnttgagctcttttcacggcntcacccncngttcgnccgncttgcccttttntccggggncccagaatcncccttaaacattcccccaaacacaagccccaatcataaaccacccntttgctctgggaccggttaggcagcgatgcttatggaaccgatactttgttctttgcgttctactatcagcagaactcataccagcaatatctagctgcaaaagagctgaagaaacagtcatggagataccacaggaagttcaacacttggtttcagagacataaagagccaaagattgcaaccgatgaatatgaacaaggagcctacgtttacttcgatttccaaaccccgaaagacgagaatcaagaaggaggatggtgccaaaggatcaaaaacgagttcacatttgaatacagttatcttgaagatgaactcgtcgtatagaatagagagagatgcatgtttgtatatactctcgagcaagtgtgttattatttccagcgactatttgtactcttcttttcaataaactaattacttttagtttc

SEQ ID NO: 127089 - DNA, 789 bp, Arabidopsis thaliana
  unsure (1)..(789): unsure at all n locations
agataaaccaatgcctagaggggagattgtggtaggtggtaacagtgtaacagcaggttacttcaacaatcaagaaaaaaccgatgaggtttacaaggtcgatgagaagggcacaaggtggttttacaccggagatattgggagattccaccctgatggatgtctcgaagtcatcgatagaaagaaagatattgttaaacttcaacatggggaacccgggcccccgggaaaggtggaggcagctttgggttcgagcaattacgttgataacatcatggtccacgcagacccaattaacagctactgtgtagctcttgttgttccatcacgaggagcattagagaaatgggcagaggaagctggagttaaacacagcgaattcgctgagctatgcgagaaaggtgaagcagtcaaggaggttcaacaatctcttaccaaggccgggaaggcggcaaagctcgaaaagtttgagcttccagcaaagatcaagttgctgtcagagccgtggacaccggagtcgggattggtcactgctgctcttaagataaagagagaacaaataaagtccaagttcaaagatgaactcagcaagttatatgcctaaaaacttttcttggacttgtgacaaactccatatatttcagtctgactttccacattttgttatatctacaataaacttgaagtttttctagacacaaacacaaagggcaannnnnnnnnnnnnnnnnnnnnnnnnnnnnnnnnnnnnnnnnnnnnnnnnnnnnnnnnnnnnnnnnnnnnnnnttc

SEQ ID NO: 127090 - DNA, 640 bp, Arabidopsis thaliana
cggggctaagcgatctgccgaagctgtgggatgtcaaaatgcatcggtaggggagcgttccgccttagggggaagcaaccgcgcgagcggcggcggacgaagctctctctctttagcttcgatctctccctcgcttcgatctctctctcgactgctactcctggaatgtacatttgttgatggaagtttcttcagaattgatttcaaaatctctgagctgaagattcttgacttggaacaaatatgcctcacagaacaaggccgttgaagggactcttgcttttcactggaataaactttgtgttggtgcagaccattactccagtctatgactttgtctgcttcttgccttactgggagagaaggagagagcgaatccggcaggagcgtgaagccgcagctgcatccttaaactcaacacaaaaagctactcaagcatctgttggatgatgaactcttctctacatcttctcagtctcttaaatcagaattcctctttgtaagaaactagttaccctctgattactgaatatctgagaaggcatgttcacatttctgctctgagcttagattcattgtagcaaatcttgaaagtttctgtggatttttcaaacacgtgttattaatcgtagatactttc

SEQ ID NO: 127091 - DNA, 853 bp, Arabidopsis thaliana
cagctctatacgactcactatagggaagcttgtacgccttgcggtacccgtcccgaatttccgggtcgcccacccttccggggaggtggtggttagggacccgagaacccggaagaagggtggaccacgacggtgtttccgttggagagatcgttttaaaaggcggttcggttatgctgggttactacaaagaccctgaaggacccgcaccgtgtatgagagaggacggagggttctacagcggagacgtaggagttatacttgaagacggttacttggaagttaaagaccggtcaaaggatgtgatcatatgcggaggagagaacataagtagtgccgaggttgagacggttctgtatacaaatccagtagttaaagaagccgcggtggtggctaaaccggataagatgtggggagagacaccgtgtgcttttgtgagcttgaagtatgatagtaatggtaatgggttggtgactgagagggaaataagggagttttgtaagacgaggttacctaagtatatggttccaaggaaagtaatttttcaggaggagcttccaaagacttctactggaaagatacagaagtttcttctaagacaaatggctaagtctctgccttaaagattcgcttgagttattgagaatatgaagaagaatctccaagaatgaagtaaagaatgacatttattttgtgttgtattattgttgtacccttaagaagggattagtttccaaacaagcttgctactattttcataagaaactatatgaagaactattcagaacaaaaaaaaaaaaaaagggcgaccgctctagaggatccaagcttacgtacgcgtgcatgcgacgtc

SEQ ID NO: 127092 - DNA, 703 bp, Arabidopsis thaliana
acaccccagacgagctatgacgtcgcatgcacgcgtacgtaagcttggatcctctagagcggccgctcgcgatctagaactagtcatcatccttcaagaacacaaagctagacagaaaaaaaaaaatgtgttcctcaaaattaaaaaatctgacccaagaaaacatttctcagatcaacggccgtccggttcttcaaccgaagtcgaaccaagttccgacattagaccgacgtaactcactaaaaaaatcgcctcctaagcctttgaatccaattgcatcaaagataccctcaccaagaccaatttctctaatctctcctcctttgtctcccaacacaaaatccttaagaaaaccggccggttcttgcaaggaacttcttaggtctagctctacaaaatcgaaaccagtgatatcaccagagaacagtgatggtggctacaaagaggttatgcctatggtgattgttcaaaagcagcctggaagtatagcagctgccagaagagaagaggttgcaatgaaacaagaagagagaaagaagaaaatttctcattacggtagaatcaaatccgtaaaatcgaatgaaaagaacttaaatgttgagcatgagaagaagaagagatgcagtttcatcactacaagttcagatccaatatatgtcgcttaccatgacaaagaatggggagttccagttcatgatgacaa

SEQ ID NO: 127093 - DNA, 450 bp, Arabidopsis thaliana
ctcttgcaagaagaaaaagcaagcaaaacttcagcgtgcagtgaaaagtattaaaagaaagcagcgttcgtcgtctgagaacaccacttcaacattttcacctcttaatcatttaaatgatgcgcagaaattcgcagagaaattgttttcccgtcttcagaccatcaagggcagtggtgaacgtgttgagactaggttgatgatgattaaagttattgctcgcacaattggtcttcacaagttgcatttactaagtttctatccttttcttcaaaactatgctctgccgcatgtaaaggacattacacaaatacttgcagcagcagttcaatcttgccacgatggggttccttctgatgttgtggagccactgttcaagcaaattgtgaatcagtttgtacacgacaagtcacgtcctgaagctattgctgtcggactcaatgtggtgcg

SEQ ID NO: 127094 - DNA, 517 bp, Arabidopsis thaliana
  unsure (1)..(517): unsure at all n locations
nnnnnnnnnnnnnnnnnnnnnnnnnnnnnnnnnnnnnnnnnnnnnnnnnnnnnnnnnnnnnnnnnnnnnnnnnnnnnnccacgcgtccgaaaaaaaaatgtctaccatttcaaaacctctcttcttaaaacttctctatatcttcttcttcttctgctactcagtttctctctcatggtcttcgtctctttctctccactttcctctcacatctcttcgtctcactccaaccacaaactcctcctccttcaaaacctccctcctttctcgccggaacccatctccgccgtcgtctccgtacactttccgatcaaacatcaaatactcaatggctctaatcctctctcttcccataggaacaccatctcagtcacaagagctagttcttgacaccggaagccaactctcatggatccaatgccatcccaagaaaatcaagaaaccacttcctcctccaacgacgtcgtttgatccttctttatcttcatcgttctccgacctaacttgctctcatcct

SEQ ID NO: 127095 - DNA, 531 bp, Arabidopsis thaliana
  unsure (1)..(531): unsure at all n locations
tgannnnnagcttttaatccaattacttttagggaagagctggtccgcctgcaggtcccggtccggaattcccgggtcgacccacgcgtccgggaacatctttctgttcctcgtttcagcgatgtagcagtagtacccagtggagtggagcaatggcttgccttagccgaatcttccttattctgatgattactatgtcttcttcgtctcctcctttctgttccggtggaagtcggaaggagctccgagataaagaaattacgagtaagagtgatgatacacaggcgagttatgttttaggatctaaatttgtggacccgacacgtgttcttcaactttcatggctaccaaggtcaggtacttctgattgatatctggttctaccatcatggatcatttctgcacataggaatgtatgttttactgcttcaaattttaggggtctgaagcaatttggtatgtatagggtctttctataccgcgggttcttgtccgaggaagagtgtgatcatctgatatctctggttaatt

SEQ ID NO: 127096 - DNA, 418 bp, Arabidopsis thaliana
ttcttcgcgtccggttttcgattcgaaaatcttaatctccatttcattccttcgacatcttcacacaaaccctaatctcatttctggtaaatccgattttgggaaactctaatttgatctcgagatcgctaacaacgatggaagaagacaagcaaatgcacgaggagaaatcatctctggttaaagaagaaccggttcgtggagaagagcccgagattgagaaattgacagtggcagatgtggacgcgccaccgaagagtaccggtggttggggttggggtttctctggcttctctgtgctttccgatctccaaaaagctgcggaagatatttctcgtaatgctgcagcggtggcagagaaagcagcgaaaagcattgcagagatgggagaagtggatgaagactctgaatcttctgc

SEQ ID NO: 127097 - DNA, 486 bp, Arabidopsis thaliana
  unsure (1)..(486): unsure at all n locations
agttggggtatccaaanacctgggctngggacccagcttgccatntatggggaaaaccagcttgnacccaggcgattttctaggaccactggtgggtagcagctctagcattcggggaaggatgccacaacaatcaccatgctttggagttctcagctcgacacggcttagaatgggtggcaacttgatatgacttgggtacgtcgttaagttccttcaagccatcggtttagcaactgatgtcaagctcccatcggaagctcagaaacaaagaatggcattcaccagcgactgatcttaaaaaactacatggttatgcctaaagtcaaaactgtcggttcgattgaagctatgaaggttttaaaaaaggattttgttctgcttttttgtgtttacttaaaggtatatatctgtgcaagagattgtatgtgacaaactgattatgaataatatctataattacattcaaaaaaancaaaaaaagaa

SEQ ID NO: 127098 - DNA, 588 bp, Arabidopsis thaliana
  unsure (1)..(588): unsure at all n locations
nnnnnnnnnnnnnnnnnnnnnnnnnnnnnnnnnnnnnnnnnnnnnnnnnnnnnnnnnnnnnnnnnnnnnnnnnnnnccacgcgtccggcctttgttctgtttctctgcgatttcttcgatgttcctcttcttcgttttgattttcagatttgtttaactcggtcgttgcgttgacttcaaatttcttaaaagagagagagagagagagaggagatagttcagaaaatctgtcagacttgggatctttctcggcaatgcgacgcttgttcgccgcgaaatccctctcccgagaggatacaacctttttgtcattctcttcttcttcggtgacgcgtttcctcaaggctcttcttcctctccgttcagatccaagagatgtccgctaattctcatcctcctaattccaaaaacgtcctctgtaatgcagccgccggtgccgccgccggggttgttgcggctacgtttgtgtgtcctcttgatgttataaaaacgaggtttcaggttcatgggctgcctaagctcggtgatgcaaacatcaaaggtagtctaattgttggcagtcttgagcagatcttcaagagagaaggg

SEQ ID NO: 127099 - DNA, 442 bp, Arabidopsis thaliana
ggtccagcacgcgtccggattaaattggagcactgaattgttcttctggatttgttattaatttggaaccatggaagcagaaatcttcaggaatcttcttggcttgactcataaataaaaaataaggttttggaatgtgaaagtttaatctttgaacattctatttacaagaagtgtaggaaaggattactttgtgatttggatccttttctacacttgttagtttgtgattttgagttgtggtatttggtgttttgttatgtagcagatcaaataaaagaccactttacctgcaaaatgacgagatcgtgggtgcttttgtttgttcttatgttcattgtgttgacttctcagtttgagtggaatgaacaagttgagaatgaaagtgagactagtagtcgtcctctgattctttcagataaagagcaacaacatatccctc

SEQ ID NO: 127100 - DNA, 449 bp, Arabidopsis thaliana
ggaaaacggtgaaagtagcttgtagtatttggcataccgcagcgattgtcgaggttatgggtcaaaccgctacgagtatgtcatctaggaagttgtttacttggggtgatggtgacaaaaacaggttgggacacggaaacaaagagacttacttgcttccaacttgtgtatcttctcttattgactacaactttcataagattgcttgtgggcatacatttaccgtcgcactcacaacttctggacatgtttttactatgggtggtaccgctcatggtcagctaggtaactcaatctctgatggtaaattaccatgcttggttcaagatagattagtcggagaattcgtggaagaaatcgcgtgcggagctcaccatgtcgcggttttgacatctagaagtgaagtcttcacgtggggaaaaggtgctaatggaagattaggacatgga

SEQ ID NO: 127101 - DNA, 1064 bp, Arabidopsis thaliana
  unsure (1)..(1064): unsure at all n locations
cagcaatcaatataagcctgggatccaattttcttatttccccaaccaaaacaggggaagaaaaaaaaagaaaacaaaaaaatcaaaaaaaattagaaaatgaaagcctcaacaagagtcatatggacaatatctgtccttatgctcgctgctgtgtccgaggccatcttccctctaccgtttctaccgttcctccctgggttcaacaacggctttagggacaatgaggctgtcaaggttgcgaaaccacagcctgcaggagcagttggtggaaaagccgcaagaaggcagcgtggcggcggtttagacgctcagacaacctggggtggtaagtgggagctcttcttggaaaactcgggtgtgtcagggatgcatgcgatccttatgccagttatcaacaaggtccagtactatgacgccaccatttggagaatttcaaagattaagttgcctccaggcgtaccatgccatgtcgtggacgctaagactaacaaggtcgattgttgggctcattcgattctcatggatgtcaacaccggcgcccttaagcctctagggctttccaccgatacatggtgctcatccggaggtctgaccgtaaatggtacattggtgagcactggaggatacggaggaggagccaacaccgcgaggtacctatccagctgtgaaaactgcaagtgggaagaataccctcaggcattggccgcgaagagatggtactcaacgcaagcaactctccctgacggaaagttcttcgtgattggtggaagagacgccttgaactacgaatacattcctgaggagggacaaaacaacaggaagctctttgactcattgctcctcaggcaaacagacgacccggaagaaaacaacctttaccctttcgtctggcttaacaccgacggtaacctcttcattttcgctaacaaccgatccatccttctaagccccaaaacaaaccaagtcatcaaggagttccctcagctcccaggtggtgcccgtaactacccgggatcaggttcttncgcactcctccccatccaactttacgtgaaaaaccc

SEQ ID NO: 127102 - DNA, 423 bp, Arabidopsis thaliana
ctgtaatatctggttctcttgtccttgaaaattttacgaggttgttctctgtgaataatcgatgtctgcttcatgtgctttaacaccgtctgttaggacagagttattcagttcatcatcatctaaaagatcaatctttcctgctagaatttgtcgaccaagaaacaaatgtgaaatcagcagaagggattttgcaattaggggagggattgctgcttctggagtctcagtcatggatacttcttctgcttcttctcagtctgttcaaggtagtgagaggttggcttttaaaccagaaggctataacttttgggaatggagaggtcacaagattcattatgttgttcaaggagaaggctcgcctctagttcttattcatggttttggtgcttctgtctttcattggaggtataacattcctga

SEQ ID NO: 127103 - DNA, 422 bp, Arabidopsis thaliana
agagaatttggtccccttggcacgtataaaccctagcagagacattaaaccctgaaagtaattagggatcactgttctccggctccggcgaaaaaatccctcgaaatcgatcctaacctcaattgattgaaggaagttatgtattcgctttcgaggattctccaaaggagtcaaagatataactttgcaccttcttcgtttggtgcggtcagtaaattagaagtatcaagtggtggtgataaagaacgggtctttaaatcatttggattgatttatagcaaacctcaaggtttagtcagactttattccgcaagagatgtgttttcacggttctttggcatccacaagctttcttctatagctgatgctaaagataaaggagatgaggtagttagggaagaggagctgtctgaatcagagga

SEQ ID NO: 127104 - DNA, 538 bp, Arabidopsis thaliana
tgatacgctcagctctatacgactcactatagggaagctggtcgcctgcaggaccggtcccgaatttccgggtccggcccaacgccttccgtagaaccattcccaccgaggagggcctttttcctttggattcattggcccaatggggaggcgaagaaaaaggattttttaggtggccttaggtcttcagttaacaattctgaccatggtaaacttctctctaagaaatatctccagggtcgaatggctaagaccttgatggcaaagcacgatatggctgaacttggattcagtggtgttaaagaacttgattccactgaagataagaatacagagagtatcgaacattgaaaggttgaccaaaaaactttgagcctcattttgtaaaattttggattaacattgggatagcatttgagattttaggtcctaaaacccaactactatgaaactatatgcttcagattcaccaatttttatacgtatgtattcctgtgtgaaataaagcattatacaaaaaaaaaaaaaaaaagggcgg

SEQ ID NO: 127105 - DNA, 513 bp, Arabidopsis thaliana
acgcgtccgtaagaccaataccaccagagaagggcattttccctttggatcacttgcacgagtgtgatgcggagaagaaagaatatctaggttgtcttaagtcttcagctcacaaatctgaacaatgtagacatctctctaagaaatatctccagtgtcgaatggctaagaacttgatggcaaagcaggatatggctgaacttggattcagtggtgttaaagaacttgattccactgaagataagaatacagagagtatcgaacattgaaaggttgaccaaaaaactttgagcctcattttgtaaaattttggattaacattgggatagcatttgagattttaggtcctaaaacccaactactatgaaagtatatgcttcagattcaccaatttttatacgtatgtattcctgtgtgaaattaagccttaatccaaaaaaaaaaaaaaaagggcggccggtttaaaggaacccaggttaaggaaggggggcgtgcacctcctaagtctccaaa

SEQ ID NO: 127106 - DNA, 1278 bp, Arabidopsis thaliana
  unsure (1)..(1278): unsure at all n locations
nnnnnnnnnnnnnnnnnnnnnnnnnnnnnnnnnnnnnnnnnnnnnnnnnnnnnnnnnnnnnnnnnnnnnnnnnnnnnnnnnnnccacgcgtccggaaaataagaaaaaacaaaagatgaaaaccattatcctttttgtaacatttcttgctctttcttcttcatctctagccgatgagacagagactgaatttcattacaaacccggtgagatagccgatccctcgaaatggagcagtatcaaggctgaatggaaaatttgcgggacagggaagaggcaatcgccaatcaatcttactccaaaaatagctcgcattgttcacaattctacagagattcttcagacatattacaaacctgtagaggctattcttaagaaccgtggattcgacatgaaggttaagtgggaagacgatgcagggaagatcgtgatcaatgataccgactataaattgggtcaaagccactggcacgcaccttcagagcattttctcgatggacagaggttggcaatggaacttcacatggtacacaaaagtgtagaagggcacttggcagtgattggagttctcttcagagaaggagaaccaaatgctttcatttcgcggatcatggacaagatccataagatcgcagacgtacaagatggagaggtcagcatcggaaagatagatccaagagaatttggatgggatcttacaaagttttatgaatacagaggttctctcacgactcctccttgcacggaagatgtcatgtggaccatcatcaacaaggtggggactgtttcacgtgagcaaattgatgtattgacagatgctcgtcgcggtggttatgagaagaacgcgagaccagctcaacctctgaacggacgtctggtttatttaaacgagcagtccagtccaagtccaactccacggctaagaataccacgagttggtccggtctaagacagtcttataggacaaggcaactccgagccctaatttccatacaaagaaaattcggaaaagaattttgaagatgtatgaaaattgggagccataactatttttttttaactattcttttgattaaaagataaaactacgcaatattatatgcataaagtttttcttttatacatgtattccaataaacaagatgtaataatatccaaccataatgagttgtttgattattttataacaaaaaaaaaaaaaaagnnnnnnnnnnnnnnnnnnnnnnnnnnnnnnnnnnnnnnnnnnnnnnnnnnnnnnnnnnnnnnnnnnnnnnnnnn

SEQ ID NO: 127107 - DNA, 906 bp, Arabidopsis thaliana
ctaatattaataaactcatatctctctcatctaaaatctcatctcttcttcttcttcttcttcttcttcttcttcgtcttcttctcctctgtctttgaagctatcttcttggattgtgtttaggagttaaaaacttgctttggtccatcatgagattgcttcttagtctcttgtttctcttggctttaaccacctactcaagtgcaacttattgtctatgtagagatggtgttggagagaaagatcttcaaacatcgatagattatgcatgtggagttttaaaagattgtaatcctattcatgagaaaggtccttgttatcaaccaaacaccatcaagagtcattgtgattgggcggttaatacttatttccaaagatttggtcaaatctctggaagctgtaatttctcaggaactgctactaccagccaaaatcttccttcaactgtggttactggttgcttatatccttcaagtccaggaagtgcagggacaactcccacgacaggtactccttcaggaacacagacgtttccgggacctcctgcgtttggtccggccggagattttgatccttcaggcaataatggtgctccgagtttgttcatttcaatcgctctctcacttggtttctccgtcgtcattgcgtttctataaaaggctagtgagtgattaagaaagtgaggctgacgttttggatgtatggatgagattttgtcacgtgtgaatgcaagttctttgaggcagacatccatttagtggttggctttgttgtttaggctattttaattttatttcatgtatgtaagaaatgatctaatggaatctttctataagtgttaaaaaaaaaaaaaaagggcggccgctctagaggatccaagcttacgtacgcgtgcatgcgacgtca

SEQ ID NO: 127108 - DNA, 505 bp, Arabidopsis thaliana
cggacgcgtgggtcgcccacgcgtccgcccacgcgtccggagagagagagagagagaggcttgtttgttttctctcctctaagaaacaatcagtctcataaagtggcaaagatggttgcagaacgatacacagtcgatttgaataagccacttgtgtttcaggttggtcatcttggcgaagaatatcaggaatggattcatcaacctattgtatgcgttgagggtcctcgttttttcgaaagtgatttttgggagtttttgactcgcacggtttggtgggcaatcccaacaatctggcttccagttgtttgctacgttctttcaatatcggcgagtaagggacttacgtttccccagatcggtttaatagttgcttttggtgtactcacgtggacactgctcgagtacacgcttcatcgcttccttttccacatccaaaccaagagttactgggcaaacactgcacactatcttcttcatggatgccatcacaagcacccacaag

SEQ ID NO: 127109 - DNA, 583 bp, Arabidopsis thaliana
  unsure (1)..(583): unsure at all n locations
ctnnnnnnnnnnnnnnnnnnnnnnnnnnnnnnnnnnnnnnnnnnnnnnnnnnnnnnnnnnnnnnnnccacgcgtccggccttgttatgattattttcgcaacataatggaggagttcacgactgagaagtctccatctttgacggtttatgtccctctagttgctggggcaatagcacgctccttggcttgtatctcttgttaccctgttgagttagcaaggacacggatgcaggcatttaagggaacgcaaagaaatgtgaaactgcctggcgtttggaagacattagttgacgtcgtcaatccagtgaagggctcaaataatggatataggatgttatggactggtcttggtgctcaacttgctagggatgttccattctctgcaatctgctggtcgatacttgagcctacccggagaagcattcagtcggccatgggtgaagaaccaagggcaggcagtataataggtgcaaacttcgctgctggttttgttgcgggtgcagttgctgcagcaactacttgcccctagatgttgcaaaactaggcgtcaatagagaagaaacagatagagccttgacatg

SEQ ID NO: 127110 - DNA, 638 bp, Arabidopsis thaliana
  unsure (1)..(638): unsure at all n locations
nnnnnnnnnnnnnnnnnnnnnnnnnnnnnnnnnnnnnnnnnnnnnnnnnnnnnnnnnnnnnnnnnnnnnnnnnnnnnnnnngcgcgcaggggggaattagagcttgctcttccctaggccatcttcttaatgagatttttgaagttgttgtagagccaaagcttgtgcagcccacatttgtcttggactacccaatcgagatatctcctttggccaagccacatcgcggcaatgccggtttgactgaaagatttgagctgttcatctgtggtcgtgaaatggcaaacgcattctctgaattgactgatcccgtggaccagaggacacggttggaagagcaagtaaggcagcataacgcaaagagagcagaggctgttcgggaatctcctgaaccaaacgcaaagaaagatgatgatgatgatgagtcatacgaagtgccccttgacgaaaactttctaactggcttggaatacggaatggctccggcttcagaatgggggttgggaattacaggctggtgatgctgttaacaactccccgagtataagagacgtcattgcttttcctggttgagacttancagtacactgaaactggcagggggaatgcgtggtgcacctttatagcattcttgggga

SEQ ID NO: 127111 - DNA, 432 bp, Arabidopsis thaliana
ggcggcaatttctcctctcttccttctcttcctcattcccattatcccactatcgcttctcgctatcttagccctaattgtacgtcctcgtcccattaagatccctatcaagtcccgtcacgccttcatcaccggtggatctagcggcatcggtcttgctctcgcccaccgcgccgcttccgagggcgctcgctgtctcaatcctcgcccgatccggatcaaagctcgaggaggctaagaaatcgatccagctcgccactggtgtcgaagtcgccacattctctgcagacgttcgcgattacgatgcagtctcgaaggcgatagatgaatcggggaccgatcgatgtgttgattgttaaccaaggtgtgtttacggcgaaggagctggtgaaacatagtcctgaagatgtcaaattcacgattgacgtaaat

SEQ ID NO: 127112 - DNA, 584 bp, Arabidopsis thaliana
tcctacgacttactatagggaacagctggtacgcctgcaggtaccggtccggaattcccgggtcgacccacgcgtccgtggtggggttttgggtgaggagggattgccgttgaatggtgttgaagctgatcggccgaagaaagttttgattttgatgagtgatactggtggtggtcacagagcttctgcggaagccattagagctgcttttaatcaggagtttggagatgagtaccaggtgtttattacggatttgtggacagatcatacgccctggccgttcaaccagcttcccaggagctataattttctggtgaaacatggaactctgtggaaaatgacttattatggtacatctccacgcattgttcatcaatctaattttgctgccacttccacttttattgccagggaaatcgcccaagggttaatgaaatatcaaccagatatcataatcagtgttcatccgttgatgcaacatgtcccacttcgtgtcctaagatcaaaaggcttgcttaagaaaatcgtgttcaccacgggtattacagacttaagcacttgccatcctacatggtttcataaga

SEQ ID NO: 127113 - DNA, 710 bp, Arabidopsis thaliana
gtccgtctgcaagtaccggtccggaattcccgggtcgacccacgcgtccgcttcgacgtcatcacaaacatcattggactcattgcaggtattcctggccaattacattgattattggattgatccagttggagctatcattcttgcattatacacaatacggacatggtcaatgacggtcttggagaacgttaactctcttgctgggaaatcagctagaccagagtatctgcagaaactaacttacctgtgttggaaccaccataaagccattaggcacattgacacagtgagggcatacacatttggctctcattattttgtggaggttgatattgttctcccagctgacatgcctctgcaagtggctcacgacattggagaatcgctgcaagagaagctcgagctactagaggagatcgaacgggcttttgtgcatcttgattatgagtacactcacaaacctgagcacgctagatcccactgttagctgtttatcctttttaaagatctctacgtttctatatctttacacattaatcttcactgtattgttgtttagtagacaattgtgagataaaggaatacctttgtaactatttacttctgtttgacggtctccttacaactgattgtccgttgttacacgccgactggaaacctagcgtcccactaatcccttcacacaggccgctttctaagaccaattt

SEQ ID NO: 127114 - DNA, 799 bp, Arabidopsis thaliana
  unsure (1)..(799): unsure at all n locations
attggactctcttcttgatcttctttctggcttcatcctctggtttaccgccttctccatgcagacacccaacccgtatcagtatcccattggcaagaaacgcatgcaaccactgggaatcctagtctttgcatcagtgatggcaacacttggattgcagattatcttggaatctcttcgcacaatgttatccagccacaaggagttcaacctaacaaaagagcaagagagttgggtagttgggatcatgctttctgttacattggtcaaactgcttctggttctttactgcagatccttcactaacgagatcgttaaagcttatgctcaagatcatttcttcgacgtcatcacaaacatcattggactcattgcagtaatcctggccaattacattgattattggattgatccagttggagctatcattcttgcattatacacaatacgggcatggtcaatgacggtcttggagaacgttaactctcttgttgggaaatcagcttgaccagagtatctgcagaaactaacttacctgtgttggaaccaccataaagccattaggcacattgacacagtgagggcatacacatttggctctcattattttgtggaggttgatattgttcgcccagctgacatggctctgcaagtgggctcacggcattgggngaatccgctgcagagaagccccagctactaaagggnntngaacggggcttttgggcncctgntaangggnccccccaaaccgggncccgnnaancccccggtaaggggtancccttnaanancccgg

SEQ ID NO: 127115 - DNA, 806 bp, Arabidopsis thaliana
  unsure (1)..(806): unsure at all n locations
taggtgcacactatagaaagatctatgacgtcgcatgcacgcgtacgtaagctcggaattcggctcgaggtttgactcgttgatcaacgaaagtgtgagtttgaggtgaaagatgacggcgacgatagatcggaggttatcaacgctgaatccaaacgcgccggtgtttgatccggtggaatttcgtgaggtggaggatttttcaccgaaatggtgggatctagtaacgacttcgaaatggttccgtgacttttggctcagtgctaactctgagaatgagttcctcggcggcgacgatttctcagttatggaagaagagttcgaggagatgatcgcatcgtctgatggtggatccatggctgatacagttacagaagcagatgtggctagttatttgaagatgcttttgaacatagcggagtctacgaaagagaagatttatagatcgaaggtttcgtcttgttcaccaaagtataatcagaagaagtacatgaatccgaactttaattgtcgccggaatcatcatatctatcagccacggtgaagcttctagaaggaacaaagctcttcttcttcttctttcgagatgataatcagagtcgtgtctgtgtttatggctgaatctgatcttttctgctttcttgttttttgtaattctgtgaatattcctactttctataataacatcactttatgttaaaaaaaaaaaaaaaaaaaagggcggccgccgactagtgagctcgcgaccggaatttatccggacggactgcancgtacagcttcctatagtgagtcgtatagagctg

SEQ ID NO: 127116 - DNA, 861 bp, Arabidopsis thaliana
  unsure (1)..(861): unsure at all n locations
gnnnnnnnnnnnnnnnnnnnnnnnnnnnnnnnnnnnnnnnnnnnnnnnnnnnnnnnnnnnnnnnnnnnnnccacgcgtccggaaaatttgtttatctatgagtgattttgacatggcatttacagttcatccagaaagctggaatccgatgtggtctgtatcaagcatacttacaggacttctctcatttatgatggataccagtccgacaactggaagtgttaacactactgtaattgagaaacaacggttggctaagtcatctctcgctttcaattgtaaaaccccagcatttcgaaagctatttccagagtatgtacagaagtacaaccagcagcaactagctgagcaagctaccacacaaactgacaacaccagagtctcctcaaaagagcgataccaaagtcgagtcagagaaaaccatcgatccaacaaagggagattcagaaggtggcttgaaggagaggaaaaagaacaataatcagggattgccagcgtggataatactgttgctagtgtcggttttcggtgtggtaatggcgttgcctctacttcaactgtgatttctatgcagcaaacctcgacctggttttcgtataatctctccttgtgtctctctctcttcagcatcaagagtagtctccttttgtctagtgctcttcgtctgaatttactcatttagcacctcatggtttgtgcttgtaaaagcagataacataagtttggtttcacaattacatacatattgtagcttcgttggaactactttgtatagtatatatgaattgaggataatggtttggatttgaaaaatagaaccgtatggtcttcnnnnnnnnnnnnnnnnnnnnnnnnnnnnnn

SEQ ID NO: 127117 - DNA, 521 bp, Arabidopsis thaliana
atacgactcacttagggaaagctggcacgcctgcaggtaccggtccggaattcccgggtcgacccacgcgtccgcttgagcgtcctaaagtgatatacaattcagatacaggtaagtacgtgatgtggatgcatatcgacgatgcaaactacactaaagcttcggttggtgtagccattagcgataacccaacaggtccattcgattacttatactgcatatcgccacacgggtttgatagtagagacatgacagtctacaaagaccatgataacgtagccgacttgatatattcatcacaggacaacagcgtgctgcatatcggtcccctgaccgagaattacctcgatgtgaagccggtaatgaagagaatcatggtgggacaacacagagaagctccggctatcttcaaacatcaaaacacttactacatgatcacgtctggttgcaccggatgggcaccaaacgaagcattagctcatgccgctgagtctataatgggtccgtgggagacattatgg

SEQ ID NO: 127118 - DNA, 692 bp, Arabidopsis thaliana
  unsure (1)..(692): unsure at all n locations
acattgagagaggcttctggatacaatccaaacatctccaatccctcctcgggttcatgagttctaccctaaacttgtctcctgcaaccatcggttgttcatgctctctgtttcatggtgcgatgaaggagatgggcaaattgggaggagaaacaaggcagtgagaaagctgtgggagttggatcttgtgtacctcacatggaccgaggtttcagtacacccggacgcaccaatggattggaacgccacatatgtctcagaccagaacatactaatgggaattgagatgttcaagatctttgggcaggtattaagtttcttcactgtctgcgatgtattaactgaagaagcctcttggagacatgtttcgaggaaccaaaggagtcaaaaacttaatctatcttgtacgaacaagaccattgcattgcttcatctctgatcttcttcattctttttgttaactttcaggactcgtcgaaattgattgattcatgtattgaaaagaaatgcaatgtgctagttcctagattgatttgaaatgtaatatttatattttttttaaaaaaaaaaaaaaaaagaaaaaaaaaaaaaaaaaaacccacccccaagnnnnnnnnnnnnnnnnnnnnnnnnnnnnnnnnnnnnnnnnnnntagaatcgnnnnnnnnnnnnnnnnnnnnnnnnnnnnnncg

SEQ ID NO: 127119 - DNA, 497 bp, Arabidopsis thaliana
  unsure (1)..(497): unsure at all n locations
atgannnnnnnnnnnnnnnnnnnnnnnnnnnnnnnnnnnnnnnnnnnnnnnnnnnnnnnnnnnnnnnnnnnnnnnnnnnnnnccacgcgtccggaccattgcattgcttcatctctgatcttcttcattctttttgttaactttggttctaccctaaacttgtctcctgcaaccatcggttgttcatgctctctgtttcatggtgcgatgaaggagatgggcaaattgggaggagaaacaaggcagtgagaaagctgtgggagttggatcttgtgtacctcacatggaccgaggtttcagtacacccggacgcaccaatggattggaacgccacatatgtctcagaccagaacatactaatgggaattgagatgttcaagatctttgggcaggtattaagtttcttcactgtctgcgatgtattaactgaagaagcctcttggagacatgtttcgaggaaccaaaggagtcaaaaacttaatctatcttgtacgaac

SEQ ID NO: 127120 - DNA, 711 bp, Arabidopsis thaliana
  unsure (1)..(711): unsure at all n locations
tctnnnnnnnnnnnnnnnnnnnnnnnnnnnnnnnnnnnnnnnnnnnnnnnnnnnnnnnnnnnnnnnnccacgcgtccgctctcttcctcttcgaattttgtgagtttcttcgagagttgaggaagagagactcgagaatatggccaacgatactcacaccgatgacttagacgagcttctcgatagtgccttggatgatttcaaggatcttaatcttactcaaagaaatggaggggttaagaaagaagagggtgataaaaaagagacagagtcattgccaagtggggttcaaggtcttggaatggggttaccagatatgaggagtaagaagaaaggaaagaaaaagattgctaaagaggaccatgttactgaggcacttgataaactcagggaacaaactagagaaactgtgaagggacttgagtccttgtcatcgaagcagcaacctacaggttctgatgatgctatggttgaagattggatcaagcaattcgagaatcttactgggtctaacgacttggagtcgatagtggacacgatgtatgcaacagctgttatcgaaggattttcttcacgaaccaatgaaagagattggtgcaagatacccaaaatggctagaagagcatgaatccagtctaaacaaggaagaattcgatcgttattcacgccagtatgaacttatcanagaactcaacttggtgtacgagaacg

SEQ ID NO: 127121 - DNA, 745 bp, Arabidopsis thaliana
tgattctccagctctattcgactcactatatggaaagctggcacgcctgcaggtaccggtccggtattaccgggtcgacccacgcgtccgcccacgcgtccgcaaaaatgttcacaaaatctatccttttggcttctcttcttatcatcatcctcgtctctgcaactgaatcagctcgtcaaaagagcgggaacgatggtttaggattcggtggtgtacccggatccggatttatacccgggtttggaaacgggtttccggggactggagttggtggtggatacggtggagggtttggtggtcctagcggagggtttgggaaaggaggtgtggtgagaccaacggttacttgcaaagagaaaggaccttgtaacggcaagaagcttaggtgtcctgctaagtgtttcaaatcttttagccgctccgggaaaggatacggcggtggaggtggcggtggaggatgtactatggattgtaagaagaagtgtatcgcttattgttaagatataataaagatcacatcatctttataatatatagtcattatgatgggtatgtattttctatgttatagcctatagattatgagatcatgaggatccttttgtcttgattcgatttgtagcagttttatatgcataatatatggttgtgatgaataaatgagggaactttactgttttctctattgtatgtttgtgtaaaagattctaagttaattgtgatttcatctgttttatgatgc

SEQ ID NO: 127122 - DNA, 373 bp, Arabidopsis thaliana
aggaccttgtaacggcaagaagcttaggtgtcctgctaagtgtttcaaatcttttcgccgcagccgatggaacaccgttcgtgagagaaaacatggtttgtatctttgagagttacgccggagatattgggtggcgtcactccgaaagccccatcaccggtataccgataagggaagtgagaccaaaagtgacgctagtggtacgaatggcagcttcggtaggtaactatgattacatcattgattacgagttccagactgatgggcttataaaagctaaggtcgggctaagtggaatactaatggtgaaagggacaacatatcaaaacaaaaaccaagtggagaaagattaagacggtaatgaagaagagct

SEQ ID NO: 127123 - DNA, 502 bp, Arabidopsis thaliana
  unsure (1)..(502): unsure at all n locations
atgannnnnnnnnnnnnnnnnnnnnnnnnnnnnnnnnnnnnnnnnnnnnnnnnnnnnnnnnnnnnnnnnnnnnnnnnnnnnnccacgcgtccgcggttattgaaagacagagtgttaggggtccaacagagtttctgagttcgtgttgcttgtgtaagaagaaacttcaaggcaaagacatatacatgtacaaaggagagatgggattttgtagtgccgaatgcagatcagtgcaaataatgaatgacgaacgacaagagcaatgtaaaacgcacgtttcaagaaacgccgacgttttgagctctccttacgccgccggacagagattatctgccggagtattcgtattttaggatgatcacaattcacaataatacgaagagaagtatattttatttatatataaaaaaaaaagtgatcatcattccattttaccttaatagaagaaaaaaggttagaaaataacaaaaaaaaaaaaagggaaatttttggttaggttaaa

SEQ ID NO: 127124 - DNA, 500 bp, Arabidopsis thaliana
aatacgactcactttagggaaagctcgtacgcctgcaggtaccggtccggaattcccgggtcgacccacgcgtccgctgacggcgactcgacgacgacttcggctatggagatctccggcgacaagattgatttgaaggacggtgaagcaacaacaccaccaaaaacagatatcgagtcacagattctcgcggctatgcagtcccgagtaacctacctcagagataaagcagacaacttcacctttgaaggtgtgcggaggttgctggaggaggatctgaaattggagaaacatgctttggatgtgcataagagctttgttaagcaacatttggttcagtgcttagcaggtgctgagaatgatgaaacttcagaaaattctctagaaactgagaagaaagatgatgtaactccagtgaaagaagcagcagagttatctaaagagcacacgacgaaaaaagatggtaaggaagatatgactggtgatgatgagaaaacaaa

SEQ ID NO: 127125 - DNA, 373 bp, Arabidopsis thaliana
cgggtagttgagacatcttcgaagcaccagattctccgaattcgagccatttctaagaatttcatactctgattaatgtcctactcagtcgcctacgcaccgtcggcaccggagctaccacaatcgtgcgttcagcagcagcacgatggctgaatgtagatacacttacgcctatccatcatatcaaccaactcagcaattcagctctgactccgggatgttttccccggaaacgcatccggagattgtgaggagctttgagtcggcggatagaaaccggagcggatttctcgaagaatcggagctccggcaagcgttgtcgttatctgggtacgatggaattagtaacagaacgattaggttgctgttgttt

SEQ ID NO: 127126 - DNA, 476 bp, Arabidopsis thaliana
  unsure (1)..(476): unsure at all n locations
aaaagctgaaaggaggaaaccagaggaaggagacgacgaccaccaccacaacgcatctcagctcttccttaatccatggcagacaagggccgcccgttgccgaagtttggcgaatgggatgttaatgacccttcatcagctgaggggtttactgttatcttcaacaaagctagaaacgagaagaaaggaggtggaaaatctgactcaccagggaaagatgaacctggatataataaaaatggggaagttcttgagaaacccgccaaaaaatggttttgctgtatacgcgcagaataagtggagaggtgtttgccttggaaggtcttttatctatatctaaaatcatactgcatcaagaagactggagcttgtctgataagccatgacagtcactttttggatttccgagtcggtgtgtttagtgactcccggttgttcctgcaaaggttnnantnttcntnggtaaccacanaang

SEQ ID NO: 127127 - DNA, 779 bp, Arabidopsis thaliana
  unsure (1)..(779): unsure at all n locations
accggacccggatacgccccggggcgggctccagagaaacgagagttccgtaatcattttctcttgttgttcctgatcgcgtagctcaagcgaaaaaaatggcgtcgtttgatgaagcaccaccaggaaacgccaaggccggtgagaagatcttcaggaccaagtgtgctcagtgtcacaccgtcgaagcaggcgccggtcacaaacaaggacccaatctaaacggtctatttggaagacaatctggtacaactgctggttactcttactctgctgctaacaagaacaaagctgtggaatgggaagagaaggccttgtacgattacttgctcaaccccaagaagtacataccaggtaccaagatggtgttccctgggctaaagaagccgcaagaccgtgctgatctcatcgcctacttgaaggaatctactgcgcctaagtgaatctgatggtggattgattctgagttgttaagtctctctcagatgaggcttttttactttgctatattcttttgccaaataaaatctcaaactttttttgtttatcatcaattacgttcttggtgggaatttggctgtaatgtgtgctgaggctcactttatcgagtacatttgattttctgaggctcattttcctttttttggccagaagcattttctcccttaanggggcnaaattganggcaaaaaagtccgntttnnnnnnnnnnnnnnnnnnnnnnnnnnnnnnnnnnnnnnnnnnnnnnnnnnnnnnnnnnnnnnnnnnnnnnnnnnnnn

SEQ ID NO: 127128 - DNA, 934 bp, Arabidopsis thaliana
  unsure (1)..(934): unsure at all n locations
nnnnnnnnnnnnnnnnnnnnnnnnnnnnnnnnnnnnnnnnnnnnnnnnnnnnnnnnnnnnnnnnnnnnnnnnnnnccacgcgtccgcagagattgaaaaggctcaagcggaggtgatggtaattgatgcattgagtcacctaaatgaagtaatctcgtatgatgatgaggtttccatgatgaggaacgttctcaatgccccggcttctcaaggcagtgttgccgggattgattattcgggtctgagtttgaccagtttggacggatacggttttgtgtcaagtcttcacaacacagcagaatgtagtggcaagcacagtgatgatgttgacatggaagttactccacatggtttatatgaagactacgacaatctctggaactgctctcacattctaggcttagaagaaccgcaatctgagttgcagagtgcgcttgacgatttcatgtcacagaagaatgcttcggtcggtggtaaggctcacagcaaaagatggacaaagcttttcagtgtctcgagatggctctctgttttcaagtatgtcaagttaggaaaaatataaaatgagtttagtacacaaaagaacaaaacgactcgctgcgccgcgccctggacagattcgtgtatatatatactcggggaaagcttgggtttctgatgatccagaggcgttcaaaagtgttttctttcttcttcttcttctggttgtctccatctttgtgttaaagatgtgaatatatgttttaggacagcttcatttttgttgaaagcttaaaaaacagggtcttttataatctctgtgattagtaccaaattgcagatttgcagaactacgtttttcttggtttgtcaggtaatgtgcaactgaataaaatgaatattatttgaatctacttagattttcaattaaaaaaaaaaaaaaaaaagggcggcc

SEQ ID NO: 127129 - DNA, 791 bp, Arabidopsis thaliana
  unsure (1)..(791): unsure at all n locations
agcaaaatgacaacattctccttcaatttaacggttaacgatttagaaacacattttccggtgaacggagacggcgaattcgagattctcactggaatcatatggaaatgtgttgcgacggtgaggggagaatcagctccggtgacgattacggttatcagatcggatccgaagaagttgaagcctagagcggtgagaaatggtcagatgataagttccattcacgtcgatttctcggtggcggaggcgagtttggaggagattgtgaaatcgatcggtgaagcgaaagatgagagggttgtgatcgatgagattgttgatgatgtttcggattttattgtttacggagcgaatttaacgtttgtggatatgagtgaagttgatttttatgaggcgaaagttatggggaaatcgccggaatcggtttattgtaatattcaggggattggggacgacggagcagtggtggttttaccgggggttgtggaggaggagagggttgtgacggtgacattaccggtggatgagattgagaaggtgaaatgggaaatgaagaaatgtggtttgatcacgccgttagtttaacggtgaatgaagaaatcattttatgcggttatcgttaatcgtgttttttattgtttgtttgggtttttattttatttggtgtgttttatataaaatcaaataaatgtcattttaaaaaaaaaaaaaaaaaaaagnnnnnnnnnnnnnnnnnnnnnnnnnnnnnnnnnnnnnnnnnnnnnnnnnnnnnnnnnnnnnnnnnnnnnnnn

SEQ ID NO: 127130 - DNA, 548 bp, Arabidopsis thaliana
  unsure (1)..(548): unsure at all n locations
atgannnnnnnnnnnnnnnnnnnnnnnnnnnnnnnnnnnnnnnnnnnnnnnnnnnnnnnnnnnnnnnnnnnnnnnnnnnnnnccacgcgtccgcacaactccagaagaaaaactgagagagtttgctcgaagaagaagaagaagcaaaagctttttaaaatccatttttattttcttgtatgattccaaacttatcttcatcattctttctcaatcataccattctttcttaatctccaagctcgtattctatttcttattcgatgtttatttcgttgaaatctcgaagcttctcttcgggtaatacctaaatgttgattggttactcgaaagcccagatgagattttgagagtaggccgaaattggagccgtgtttttggttcagtttctcgagggttcgatttcggattcgtgagcttttggggactggagaatatggacaacggccatgaggaaagacttgccgagaggttttcgggagtgggacctcgaaaatcatctggttcccatgaaaaccacgttaaaaacgatagcttggtttaagtta

SEQ ID NO: 127131 - DNA, 624 bp, Arabidopsis thaliana
  unsure (1)..(624): unsure at all n locations
atgannnnnnnnnnnnnnnnnnnnnnnnnnnnnnnnnnnnnnnnnnnnnnnnnnnnnnnnnnnnnnnnnnnnnnnnnnnnnnccacgcgtccgattcaagacgtccacggggacaagatgtccttgtctcttgggctcttccaagactaaccaatagagagaaaattagtgaaatggtggatccaaccatgaaaggtcaatactcacaaaaagatcttattcaggtagcagccatagcagcagtgtgtgtgcaaccagaagcaagttatagaccgttgatgacggatgttgttcactcgctcattccccttgttaaagctttcaacaaaagtactgattcttctcggtttcctagccgtagagaaagcttgtcatttgatgatattatgccatgacactcttttgtttaatatgtattaatttctctcttttaagttgagattctcgttgttattgtatatttgtataggtaaatgaatccatttatcttgtactataacttatattagtgttgtttaattgcctaaaaacaaaaaccaaaagnnnnnnnnnnnnnnnnnnnnnnnnnnnnnnnnnnnnnnnnnnnnnnnnnnnnnnnnnnnnnnnnnnnnnnnnnnnnnnnnn

SEQ ID NO: 127132 - DNA, 728 bp, Arabidopsis thaliana
cctcaagcaaacgacccgtttctgtcgccaagtcaacccgacccgacttcgttcccatcggttgatcggccgggacctgattgcgtttagcctcccgaaatctacgggcaaagttgatccctctgggatagtatggctgaaaaggaagtggtttctgcctcaactttagaatctaagatcactgaggatcatcatgacatctggatccgaggagcgatggaaaagagccgctcctccaacatcagtgttctgaaggatagattcatagctgctgaggattctgctctagtttccaaggatgttgcacaaaaggatattgagattctcttgagacgagtgaaaactgctacagctttattgacttacctgaaatctaaagcgacaactgtggctgctgccgatttggccaatctttcacttgaaactgaccagctccaagatacaatagacgaacatgatgggacttatgtcactgagatgcttcagcatgtagagaccgttacaggcgtcatggagtctctggctaggcgtgcttttatcgccgaatcagaagccgctatcgagaaaggaaaggttgtgctaagccaagaggaaattcaaagaaaggttggccaactcgagaacatgtccgtgaagttagaggacatggaaaagtttgctcttgggaccagtagtattctctgtgaaatgcggcagagggttgatgatttggttgaagagacctctag

SEQ ID NO: 127133 - DNA, 551 bp, Arabidopsis thaliana
ggagtcatgttgtgttaatcctcaagcaaacgacccgtttctgtcgccaagtcaacccgacccgacttcgttcccatcggttgatcggccgggacctgattgcgtttagcctcccgaaatctacgggcaaagttgatccctctgggtttgtcatttgatatcctcttttcccgtaccgcgcgtttatgattctgattacgttcttggttgtttgcgattgatccgtttaggattttctctgagtccatcgcttattgaatcgtcaaggctttttcttgtttgactttggaatatcgaatctgctcaatactccaccaaattatcaaacttggtgttctttgttgctcaatactccaccaaattatcaaaacttggatgttctttgtagctcaattaccaaattaataagttgcattcttctttgttgcttgttagccttttcatcgagtttcgtttctgcgatactattttgtttaggatagtatggctgaaaaggaagtggtttctgcctcaactttagaatctaagatcactgaggatcatcatgacat

SEQ ID NO: 127134 - DNA, 373 bp, Arabidopsis thaliana
gccttgccctgtgctcatcgttctcttcttcactttattcatggtggtttagttcatgattttggatgttttaagaactttttctactagaactcgaaatcttccaagttctggtttttattcgataagtactagtataatgcgagatatcaaagtcaaatctgattctaaggagtttctaacatcatctgatgaagaagaagaatcagtttccattagagtgtcgtcttcttcttccttgagtagtgttaaatcgacgcctgcagattgaggaaaagtatgtccatcgagtttacgatgcgtttgccccctcattttagctcctactagggttgcttagtggcctaaagttgctgcctttctcgaatcgtta

SEQ ID NO: 127135 - DNA, 518 bp, Arabidopsis thaliana
  unsure (1)..(518): unsure at all n locations
nnnnnnnnnnnnnnnnnnnnnnnnnnnnnnnnnnnnnnnnnnnnnnnnnnnnnnnnnnnntcgaccacgcgtccggaagggtttatgatctccttgagcaaatcggagattctttctacagttgtgcgaacgttcttataataagtttttagttgatcgatctccgatttagtgaactaggcgtcatcttaagaaccctaatttgttttctccggttgtgattacttctgttgttcgtcgtcgaaggtcagttcgtgattctgagtttgtacaccttttcgtttcctctgttggcactcgaattttccaggaagtgaaactagaatttgattctgcgtagtattgaacattaagataatgtctggaagaaatcgtggacctcctcctccatcaatgaaaggtggatcttacagtggtttacaagctccggttcatcaaccgcctttcgttagaggcttaggaggaggaccagtgcctnctncttctcatccttctatgattgatgatagtagagaacc

SEQ ID NO: 127136 - DNA, 713 bp, Arabidopsis thaliana
  unsure (1)..(713): unsure at all n locations
cagctctatacgactcacttgagggaaagctggtccgcctgcaggtaccggtccggaattcccgggtcgacccacgcgtccgctctcgcgtcctaaatcagaagagtagagcacaaattagggttagggttagggcttctcccttcctggcaaattcatcccttttagccgccattgaagatgactggtaaggccaagccaaagaagcatacagcgaaggagattcaagcgaagatcgatgctgcgttgactaatcgaggcggaggaaaagctggaatcgctgatcggaccggaaaagagaaaggaggccacgctaagtacgagtgtcctcattgcaaaattacggctccaggtcttaagacgatgcagatccatcacgaatcgaagcatcctaatatcatttatgaggaatcaaagctcgtgaatctccatgctgttttagcaccagtagctgaatcgaaacctaaacctggtatcaggggaagcttgaagaagtaactctatgtttgaattttataaaatttgttatcttttgatgttaaagagtgtaatgtgctacttcttaccccaaaatctatcatgttgttgatgtcaccaaaaaaaaaaannnccnnnaannnnnnnnnnnnnnnnnnnnnnnnnnnnnnnnnnnnnnnnnnnnnnnnnnnnnnnnnnnnnnnnnnnnnnnnnnnnnnnnnnnnnnnnnnnnnnnn

SEQ ID NO: 127137 - DNA, 607 bp, Arabidopsis thaliana
aggtgagtagagagagttatcatctagggtttatagattggagattttagccgcaacaaggaggaagtgtttttaatttaattttattgttaagagttattgttgctttagggatttttagaatttgggtgttcttttaaatggctcggttgataattccttgtcgaagttcgtctctggcgagagtcaatcttctgggtttgctctctcgtgctcctgttcctgttagaagcagttgtcttcgtagttcggcaaacagacttactcaacacagaccgtttcttacttccgaggccatttgtttgaggaagaatcggtttctaccccattctgttgatacacataagcaaaacagcaggaggctcatttgttctgttgccacagaatcagttccggataaagctgaagattccaaaatggatgcacctaaagaaatatttctcaagaactacacaaagcctgattactactttgaaactgtggatctgagcttctctctaggtgaagagaaaacaattgttagctctaaaatcaaggtttctcctcgagttaaaggatcttctgctgcattggtcttggatggacatgacttgaagctactttctgt

SEQ ID NO: 127138 - DNA, 529 bp, Arabidopsis thaliana
  unsure (1)..(529): unsure at all n locations
nnnnnacgactcacattanggagaagctggcacgcctgcaggtaccggtccggaattcccgggtctgacccacgcgtccgcttcatcgtgatgtcaagtgttctaacatattcttgaccaaagagcaagatatacgccttggtgattttgggttagccaagattctaacatccgacgatctcacatcctctgttgtcgggactcccagctatatgtgccctgagcttttagctgatataccttatggttccaaatctgacatttggtctttaggtacgtttttattgcatgtagtagtggattgttaagttcccttatttgctacataaggaagcagtaatctatctcttgaattactaaagtttcaagcataagcctgaaaagattactgcaatttagttttcatgaggtttctaagaagtcttcataaaccataaggaagactgaagagagttctcaagtcttgggttctttttgttactagatcattctaagttgtctagtgtgaattggatcgtagcgtgagggc

SEQ ID NO: 127139 - DNA, 549 bp, Arabidopsis thaliana
  unsure (1)..(549): unsure at all n locations
nnnnnnnnnnnnnnnnnnnnnnnnnnnnnnnnnnnnnnnnnnnnnnnnnnnnnnnnnnnnnnnnnnnnnccacgcgtccgcccacgcgtccgttttcggcttctatccgtcgattcatatcggcggcagttcccagcgacattaatctccggcgagacagtttactcgtgtttattgaagctatgcctaaaagaacagcagaagcgtgtccatcatctgaaatccaaagaagcagaggagatacttttggtagttacagatctcaagtagctgagcttttgtctctaggtgagaggatctcacatcatgatcaacaagaagccaatgagaggcattctgagagtgttataggagctgggatgtcaaatgttgagaaagataatttgaatgttttgttaaggcagtgtgtgaggaatctaagtccagaagttgatgagatgcaggaatgtgtacgctctctgtatctaatttctcagctagggaacaaatgtcagtcatcgtcgccgagcgattttgttcctgaagaaaccggaggagcgagagaagatg

SEQ ID NO: 127140 - DNA, 823 bp, Arabidopsis thaliana
  unsure (1)..(823): unsure at all n locations
gacccacgcctccgcccaagcgtacggaagaacagagccgagaattatcaagaacgcatctgaggtaaaatcaataactgctagtctcaaagccggtgaagcagggtatgatccgtcttcaagaagatggacccggtcatcaaactactacaacgggaaaaacaaggggaaagatggagaagagaacgaggcagcggttgccgcagcggttgagcccaatggggcagatgcaggaccaggtgttgaagcgacagaagcagctttagaagcagctgcagaggcaggaaagctaatagacacaagagctccaataggtcaaggagcagaacacaatcagcttcataactttgaattgtcgttatcgctaacggctttacagaagtacggaggacctcaaggagtacagaaagcgttcatggcgaggaagcaactgaccgaagcaactgtgggatgcagagtcgcagagaacgatggcaagagacatggccttacgttaactgttagtgattacaagagaaggagaggtcttctctgatttatttgcatttttttcaagtctcagtgtttcattatcttctgaaaactgcttcttggttcttcttttcttcatatctttcttttgtactccacaaaatatgtttagatcagtttgttttttcttgaaatatttttgtactcgtttttgtgtgaactctcccgattagtgtatgcctgcatgaaattagaaaaaaaaaaaaaaaaaacanaaagnnnnnnnnnnnnnnnnnnnnnnnnnnnnnnnnnnnnnnnnnnnnnnnnnnnnnnnnnnnnnnnnnnnnnnnnn

SEQ ID NO: 127141 - DNA, 926 bp, Arabidopsis thaliana
  unsure (1)..(926): unsure at all n locations
nnnnnnnnnnnnnnnnnnnnnnnnnnnnnnnnnnnnnnnnnnnnnnnnnnnnnnnnnnnnnnnnnnnnnnnccacgcgtccgggagaacgtggaagaagaagccatggactctatcgtctccagttcgacgattcttatgcgatcatatctcactcctccggttcgttcatgttctccggcaacctccgtttccgtcaaacctctgagctcagtccaggtcacctccgtcgcggctaaccgccacctgctttcgttaagctccggtgctagaagaaccagaaaaagctctagttcggtgataagatgcggcggaatcaaagagattggagagagtgagttttcgagtacggttctcgaatcagcccagccggttttggttgaattcgtcgctacttggtgcggtccctgcaaattgatctatccagctatggaagccttatctcaggaatatggtgacaaattgacgattgtaaagattgatcacgacgctaatccaaagttaatagcggagttcaaggtttatggtttaccgcatttcattctcttcaaggacgggaaggaagttccagggagcagaaagggaaggtgctattacaaaggccaagcttaaggagtacattgatggtctcttgaactcaatatctgttgcttaatcgtctctctccccaccggtattcttctgtctcaacactgtttttttaatgtaatcaaatctcttcaattgtgatgatcttcatccccggtttctcatttgatgtgtatatcttgcaacaaattttacgaatagaaaagagttgttctcttatcagggaaatatgtatttaggcttnnnnnnnnnnnnnnnnnnnnnnnnnnnnnnnnnnnnnnnnnnnnnnnnnnnnnnnnnnnnnnnnnnnnnnnnnnnnnnnnnnnnnnnnnnnnnnnn

SEQ ID NO: 127142 - DNA, 507 bp, Arabidopsis thaliana
  unsure (1)..(507): unsure at all n locations
gannnnnnnnnnnnnncccccgacttacttagggaacgctggtacgcctgcaggtaccggtccggaattcccgggtcgacccacgcgtccgcccacgcgtccgcggacgcgtgggctcgtccccaacgatatttgttcacttctactgcgtattctccgaccagctctctattcaggtcttggagactttgtcccaacaccaacaaaacgtcgtccgatgctcctcctcagtgttccgtctagccaacgaccttgtaacctcaccggtaaacaatctcttccaagatgaattggcgagaggagacgtctgcaaatccatccaatgttacatgagtgaaactggagcatcagaggataaggcgcgttcgcatgttcgacagatgatcaatgacttgtgggatgaaatgaattatgagaaaatggcacatagctcttcgatactccatcatgattttatggaaacagtgataaatttggcacgcatgtctcaatgcatgtatcaatatg

SEQ ID NO: 127143 - DNA, 906 bp, Arabidopsis thaliana
  unsure (1)..(906): unsure at all n locations
nnnnnnnnnnnnnnnnnnnnnnnnnnnnnnnnnnnnnnnnnnnnnnnnnnnnnnnnnnnnnnncttcttcattcggtggtgagcctgatgaagcagaggagaattacgctagaggctcatgggctgctctgttcgctggaatctgtttcgctcttcttctctgtaacatccaaaacgtcttcgacagttacatcttcaaacgaactgaatcaaccaatcaaaaaccaagctttgcctctgttttcgaagttattatcttctcttctctcgttgctacgatcatctccgtcgtgggtctgcttatagccggtgagcaacacgatttgaagagggaaatgaatggattctcgaaagggaaaggttcttatgtgatggctatggttggtcaagctgtttcgtggcaggtctattgggttgggattgttggacttgtctactctgtttcgagcgtgttgtcgaatgtgatcagtgtcattacgtggccgattgtgtcggttcttgtggtgatcttcttcaatttcatggatgatgagtttgatgccttcaaaggtgttgccttggttactgccgtcttaagcgctgcagcttatttttttaggcttcccaaagacaatcgtatggcttattaggtttggattcttgaatctctaaagaaagtttttttatttcccctgattttttgtgggtatatctaatcaaaaattttaggtgtttatcttgtgtaagtgtaagtgtgtaacagctttggttataaatgtaaatttgtatgttttccaatgaaaatgtttgggagtgtgcaatctnnnnnnnnnnnnnnnnnnnnnnnnnnnnnnnnnnnnnnnnnnnnnnnnnnnnnnnnnnnnnnnnnnnnnnnnnnnnnnnnnnnnnnnnnnnnnnnnnnnnnnn

SEQ ID NO: 127144 - DNA, 570 bp, Arabidopsis thaliana
ccagaagaaggcgttgaatcctttcgttttccgattccatttttgggatctcttgtttcgttttcttctctttggatccattccattcccatgttccccaatttctttaatcggtgttgcttccacaaggcttcatgagcttgtataacaagtttctctaggaggtgttaaagagccagatcaagctttcagaagagattttcttagggtggttgagagctgaaagttttgatatttagtcaactttgttccactgaaccttctaggaagctacctcaagtacacagctttgttgacgggcttcaagccagtggtaaagatatgcttctgtagaagggttaatcttgagcattaaaggacatggctttctactctgaagacgacaagagcgaagactacctctttaagattgttctaatcggtgattctgctgtcgggaaatcaaatttacttgccagatttgcgagggatgagttctatcccaattcaaagtcgacgattggagtggagtttcagacacagaagatggatataaacgggaaggagatcaaagcacagatatgggacaca

SEQ ID NO: 127145 - DNA, 485 bp, Arabidopsis thaliana
  unsure (1)..(485): unsure at all n locations
gtttaccaccggaacccgtttcctgtgtttttcttaagaggtctcaatgtttctctgtctactgatgacccccttcagattcacttaactaaagaacctctcgtggaagagtatagcatagctgcatcagtttggaagctgagtgcgtgtgacctgtgcgagatagctcgtaactcagtgtaccagtcaggtttctcacacgccctgaagtcgcactggattggaaaagattactacaaaagaggacctgatggaaacgacattcacaaaacaaacgtgccacacataagggtggagttccgtgacacgatctggaaagaggagatgcaacaggtttatctgggcaaggctgttatctctgatgaagttgttccataaaaaccacaatcagaaatggcaagacattgcaggggnncaaagagagcattttanggagtatacggaagcaggancctagtagnttgggntaataatatgagtgggct

SEQ ID NO: 127146 - DNA, 495 bp, Arabidopsis thaliana
  unsure (1)..(495): unsure at all n locations
atgannnnnnnnnnnnnnnnnnnnnnnnnnnnnnnnnnnnnnnnnnnnnnnnnnnnnnnnnnnnnnnnnnnnnnnnnnnnnnccacgcgtccggcaatgactctctccttcaaattcaatcctccttcttctcttctattctcttcccgcttcatcctcctcctacgtcatccggacgctacgtttccccggcgccggcggattctaccgattcattgcgttagatttgtcactgagccctaagaatttggggaattttggtctgcttcggcgaaggatcgatggagaaatctaccaaatgtgctgtttgctacaagtcgtttcgtccctcaatctgtgtagattgtgttaatcgcgggttaaacgaatacaaggtcaagttggactcgttgaagagtcttcgggaggtttcgtatttcagattaagtggcttacttgtcacaaaggagaaagcaattagtcaacgttgttggaaggagcttcagaatgagaagc

SEQ ID NO: 127147 - DNA, 437 bp, Arabidopsis thaliana
cagcaaacttcaaaaggtaacatgataaaaaggtttgctgcttgggtttgacttcattacttgctctccctgggggtcaattccccgatgaagcgctgcagcgtgttttcagggcaacacttgatcttctagttgcatataagaatcagctagctgaagcagctaaggagacagaagtagattatgaagaagaaatgaatggactccagagtagtgatgatgattatgatgatgatgggtctgatggggagatggatgatacagaggaaggagatgaagcacaaagtgttaaactgcagaagttagctgcacaggcaaaggccttccactatgatgatgatgatgacgacgattctgatgatgactttagtgatgaggacgagtttcagtcacccatcgatgaggtggatgcctttgtattctttgtcgatgcaatc

SEQ ID NO: 127148 - DNA, 431 bp, Arabidopsis thaliana
tttcagtccccgccgagaatcgagaagcagcagccatggccgacgtagttcaataccgcctcgagcggatggttgacgagcttgatgatctagaacgaagagaaatcttcactcgtgctgagatagctgagatcgtgaagcagcggcgtaagtttgagtaccggctcaagcgtccaagcccactcaaagaagatttcatagcctatattgactatgaggttaagctcgatgagctccgtcagctacggaggaaatcggtggcgcgtgtgactaagaagagaaagaagaaatcagtatctgatttcgccggtgtggctaggattgttgagatttatagattggcgacgatgaggtataaaggtgatatcaatttgtggtttaggtatctcgagttttgtaaacagaagaggcatggaagaatgaaaaaggca

SEQ ID NO: 127149 - DNA, 396 bp, Arabidopsis thaliana
acttcgatttttcaatcagtaatattggtggttcagagatgatgatgatgaatcttttaaggagatcagcgatagccatcggccgccaatcaaaatcgaaactggcgtcgttttcctccgctacacaaccttgttccggaatcccaaaatcgtccaagagggtttttagcaactcatttctttcaaaggactctactggagctaatggactattgtttcgcttccgaaacccgcaagcaagtatatgtacggaagctcgtccaaagaacatcaactcatcttactttaccagatcgtttgcagctcgtgctgcacaagatcctgggaatcagcagaataaggctaagaaagaggtgacgactgtggaggatccttttgattctcctacataccaca

SEQ ID NO: 127150 - DNA, 754 bp, Arabidopsis thaliana
gatagatcatgaggccgagttgcttgtgcttgcaagtgacggtttatgggatgtggtaccaaatgaggatgcggtagcccttgctcagagcgaggaagagcccgaagcagctgcccgcaagttaactgacactgccttcagccgtggcagtgcagacaacatcacgtgcattgttgttaacttccgtcatgataagacagaatctcctagaatcgaaacaaacgccatggctgaatcggaacctgatctggtccccacaactgaactggaacctgaatcaaaccccagtactgcattggtaactgaatcaatccccaaggctgaactggaatccgaacctgatgctatacctgatccagaacctgaaaccgaaccagagaccaagggtgagaaagctggtgagtaaggtagcagccggggaaaggtgtccatactgttggggacatgtggaaacagatgaatataaaattgcttagtaagttgtgtggtttgtggctacctgtaacgtgtgaggatttgtgttttttgggtttgtgttgcattcatgcacatgcctatgcctgccttgaggacgacgacgacccgttttgacatgtccccgattttttgtctatttcattttaccctattttggttttgttggtgctactcacaccaaaaacagcacatttgttctctgtttctcctactttttctatcttttatttaaaacaccgtccattccaataaacaatgtttttgtaattaaaaaaaa

SEQ ID NO: 127151 - DNA, 742 bp, Arabidopsis thaliana
gacagtttttcgtggctgcgagataatgaattcggacgtgaagctcttgctggtgtcaaccctgtgaacattgagctactaaaggagctgccaattcgaagcaatcttgacccggctctatatggacctcaagaatctgttctcacagaagaaatcatagctcgagaagttgaacattatggaactactatagaaaaggcgcttgaggagaagagatcgtttcttgtggattaccatgacatactcttgccatttgtagagaagataaactctatcaaagaagatccaaggaagacatatgcttcaagaacaatcttcttctattcaaagaatggagccctgcggccattggccatagagctctcgctgcctcctacagccgaatccgagaacaagtttgtttatactcatggacatgacgctactactcactggatttggaaactagccaaagctcatgtctgctcaaatgatgctggtgttcaccaacttgtgaaccactggctaaggactcatgcttccatggagccttacatcattgctactaacagacagttgagtacaatgcatccggtttacaagctacttcatcctcatatgcgctacacgcttgaaatcaatgctcgtgcgcgtaaaagcttaatcaacggaggaggaatcatcgaaagttgcttcactcccggaaaatacgcaatggaacttagctctgcagcgtacaagagcatgtggcgatttgacatgg

SEQ ID NO: 127152 - DNA, 745 bp, Arabidopsis thaliana
  unsure (1)..(745): unsure at all n locations
ctnnnnnnnnnnnnnnnnnnnnnnnnnnnnnnnnnnnnnnnnnnnnnnnnnnnnnnnnnnnnnnncttttttttttttttttttttaaacaaaaaaaatatttttttttatctcaagtactaaagacttgagatgtaagtaactgagttcttgttgtttacagagatgctgaagcaagacaacctctctggagaaaagtcccaatctcttcgagcaaaatcagtccttaccgtatcgtgatcgttcttcgtcttgtgatcttagttttcttcttccgtttccgtatcttgacaccagccaaagacgcataccctctctgggcttatctcagtcatctgcgagatctgggttcggcactctcttgggatccttgatcaagttccccaaaatgggtttccaatttaaccggggaaacctaccttgaccgtctctccaatgaggatttgaaccgggatgggggaaaagaacaagcttgcaccgggttgatgtgtttgccagtacagtggatccgcccaaggaacctcccataatcacagccaacacaattctttcgatcttagcggttgattacccagtgaataaggtgagctgctatgtgtctgatgacggtgcatcaatgctcctgttcgatacattgtctgaaacttccgagtttgcaaggagatgggttccgttttgcaagaagtacaatgttgagccaagaacttcagagttttacttctctgagaagattgattacttaaag

SEQ ID NO: 127153 - DNA, 532 bp, Arabidopsis thaliana
  unsure (1)..(532): unsure at all n locations
nnnnnnnnntctacgattcactatagggacaagctggtacgcctgcaggtaccggtccggaattcccgggtggacccacgcgtccgcccacgcgtccggaagaaagaaagatccaaaggattattattaaagttaaaaaatgacaaaagtcccaatctcttcgagcaaaatcagtccttaccgcatcgtgatcgttcttcgccttgtgatcttagttttcttcttccgtttccgtatcttgacaccagccaaagacgcataccctctctggcttatctcagtcatctgcgagatctggttcgctctctcttggatccttgatcagttcccgaaatggtttccgattaaccgagaaacctaccttgaccgtctctctatgagatttgaacgggatggggaaaagaacaagcttgcaccggttgatgtgtttgtcagtacagtggatccgctcaaggaacctaccttgatcacagccaacacaattctttcgatcttagccggtgtttacccagtgaataaggtgagctgcttt

SEQ ID NO: 127154 - DNA, 817 bp, Arabidopsis thaliana
  unsure (1)..(817): unsure at all n locations
nnnnnnnnnnnnnnnnnnnnnnnnnnnnnnnnnnnnnnnnnnnnnnnnnnnnnnnnnnnnnnnnnnnnnnnnnnccgggtggcccacgcgtccgtgtttatacaaatatatatctacaaactacaatgaataatttcattctcttatggcatatggtgctataaacaaacacacttaccacgcttgatcctacaacacatgaaccatggcttcttcaacccactcttacttcaccactttagcactaaccctaatcttgatctttcgtctcataccagaaaccaccgcatcacgccatctgaatggaaagaatccggcggtaattggagttaccactactagcgagaaatacattgttcctacgccgttaccaccgtttttacgaccctttttcccaccgttacagtttgccgctgcaccgttcggagggaatatcccacaaccaccgttaccttcaccacctccaacatttctaccgtgtctcccaggtttcaagtttcctccctttcagtcccgaaagcctacgccgccgtaatcgtatatacgttgacggcatcaagtctaaaactgtaatgaaatattaaactatctactttaatgtattatctatctctatatatcaccgttgatcatctataaataattgatggtaatatcatggtatgaaactgtaataaagatctctggtgtagtaattaataaattgaataagtactatgttagatatctaaaaaaaaaaaaaaaggtnnnnnnnnnnnnnnnnnnnnnnnnnnnnnnnnnnnnnnnnnnnnnnnnnnnnnnnnnnnnnnnnncgtcc

SEQ ID NO: 127155 - DNA, 758 bp, Arabidopsis thaliana
gatccttggggttgttttcaaatgtttctaccaaccaacacttggaacaccactggggtttgttgatgcttcgggttatacacactgctcgagttgaaaacttcctggaacgtgctgataaattagtaggtaaggatggagtgtttgattatatcagcgttacgccaccttacatggaggttgattatcaggttctgatggatcagattgctaagtcaccagcgattggggaaaatacttttattttggtcgagtacccatcacgaacaacaatgcttgattcatgtggatgccttgaaaagatgactgatagaaggtttggccggacacatctagctatatatggaccaaaatgggctcagaagccaagaaaatcttaaagccacagtgattgtcgacagttatatctggccatttttttcggtttaaggcaatgaagagagactgtgactgaagagctagttccttctaacctttgaatactagtgtgcttttgtccgtcagccgccattttgtttgtagccaaatactaaagctggatacaagttgcagtcttatgatagttctaaaatcggtaatggtgtatgtcggcttgtgtgtgtctgtgaagtagagatatagctgtaatctgtatacagtttgagatatgaagtcagttagagtttctccttaaaaaaaaaaaaaaaaaagggcggccgctctagaggatccaagcttccgtacgcgtgcatgcgacgtcatagctcgtctagagtgta

SEQ ID NO: 127156 - DNA, 446 bp, Arabidopsis thaliana
  unsure (1)..(446): unsure at all n locations
tggacgcgtccgcccacgcgtccgcaccatgctactcattgtttctatatctatgtatcatatacatccgtaacaatcgtaagaatcacactagttccttctaacctttgaatactagtgtgcttttgtccgtcagtcgccattttgtttgtagccaaatactaaagctggatacaagttgcagtcttatgatagttctaaaatcggtaatggtgtatgtcggcttgtgtgtgtctgtgaagtagagatatagctgtaatctgtatacagtttgagatatgaagtcagttagagtttctcctttttactattacatatggcctcttttgatgctcttaaggtctgagagagccaccatgctactcattgtttctatatctatgtatcatatacatccgtaacaatcgtaagaatcacttcgtgtttggaaaaaaaacaaaaanaaa

SEQ ID NO: 127157 - DNA, 559 bp, Arabidopsis thaliana
aggtgccttatagaagagctttgacgtcgcatgcccgcgtacgtaagcttggatcctctagagcggccgtcctttttttgtttttttgcgctgatgttgtaatattgaagtgcgtagcctgggagctaagagaaaagagaagatgtggaagtcaaaattacaaatgcgaagatagatagcattccatttaaaatctgtcatatcagtaattggtacaagaagaagtaactttgttgcctatgtgagcaccaaagcattcaacaacagataaccataacattggcaccatcaaggcgaccttgtctctgagctggtcccatctttgccaaatcttgaaatacttctcacactcttaggagtcacagcaccaggacttgctccacgaggacttgctccacgataacttgcacgaaggctctcatcaacagtagaagatgatttagctattgcctttctgaaaaacttctgagcagcgggtgaaagagtcctaacattcggacttgcacttccacttcgatgaggagatggcaacggaggtttcttaaacatactattcgat

SEQ ID NO: 127158 - DNA, 409 bp, Arabidopsis thaliana
tatcttctctgcgatttgaatgtaacagatccaacttcattcacagagtgcatcactctgcaaagccacagacaatggaagataacgaagaagaagaagaatcaccgacggagctaaacacgatcaccggtgtaagcgggtttgtagttatctctcccgataagctttctctcaaatacactggcgtttctcaacacggtcacgatgtcggcgttgttcaagctaataaacctgctccgtgtaaacgtttcgcttattacttcgagattgatggtgaagatgctggtgttaaaggacgggtctccattgggttcactactgataggttcagaatcgcgagacatcctggatgggaactcaacacttgtggttatcatggtgaagatgggcttagatatctaggaaaacg

SEQ ID NO: 127159 - DNA, 481 bp, Arabidopsis thaliana
gcgtccgaagattcacataatctttttgttttctacttctgttatcttctcttggattttgctttatacttccattagcttctgaaaattcagtttaagttatggcgtatttgagtgatggatttgaaatgaagtcgactcgtgagtatgagagattacggttagggtttgtgaggtttactagaggattagggaggaaaaggattctcatatctaaacgagctccggaaaatgattcgccgccggtgaagagaccaagtcatgaaacgacggaatcctgtaggtctctgcgtgaaactctgcatcaagatatcttgattcgagtaccttgtcatgtggatcacgaggacctagccacactaaaacgtgtatctaaaacaataagaaaagctgtaattgaagcaaagaagtcgcattttgattatagcacacctaaaaagagattgccatttcgagacgcaatactaatccttgattcaaa

SEQ ID NO: 127160 - DNA, 581 bp, Arabidopsis thaliana
  unsure (1)..(581): unsure at all n locations
aaacattccttctctcgctcactcttctccaatccttattttattttttgaaagtttaaaattttatacaacatatcaatttggggtagaaaaattcgaaagaaatgaaagagatgggagtgatagtgcttcttctccttcactcgttcttctacgttgccttttgcttcaatgatggactactaccaaacggtgacttcgaactcggtccacgacattcggacatgaaaggaacacaagttatcaacataacagcaatcccaaactgggaactctcaggctttgtcgagtacattccctcaggacacaaacaaggcgacatgatccttgtcgtgcctaaaggcgcattcgcagtacgtctaggcaacgaagcctcaatcaaacaaaaaatcagcgttaagaaagggtcgtactattcgataacgttcagtgctgctcgaacatgcgcacaagacgagcggttaaacgtttccgtggctcctcaccatgcagtgatgccgatacaaacagtgtatagtgctcaggttgggatttgtattcgtngggcttttaaggnccaaagtgactatgcagatatagtg

SEQ ID NO: 127161 - DNA, 879 bp, Arabidopsis thaliana
  unsure (1)..(879): unsure at all n locations
caaattacaaaagagaaaagatggaaaaagttttctccgacgaagaaatctccggtaaccatcactggtcggttaatggaatgacgtcgttgaatcgcagtgcttccgaatgggcattcaatcgtttcatacaagaatcctccgccgctgcagacgacggagaatctacgacggcgtgtggtgtttccgtctcctctcctcctaatgttcctgtagattcagaggaatacagagcatttctcaagagtaaacttaatcttgcttgtgctgctgtcgccatgaaaaggggaacttccatcaaacctcaggatacttctggtagatctgacaatggtggagccaatgaatcagaacaagcctctcttgcttcttccaaagctacaccaatgatgagcagtgctataacaagtggatctgagctctctggtgatgaagaagaagctgatggtgaaactaatatgaaccctactaatgttaaacgcgttaaaaggatgctctctaatagagaatcagctagacggtccagaagaagaaagcaagcacacttgagtgagctagagacacaagtttcacagcttcgtgtagagaattcaaaantcatgaagggtctcactgatgtaactcaaacatttcaatgatgcatctgtagaaaacagaagtttttaaaagcccaataattgagacactacgngcannggtgaaaattggcttgaagagccgtggagnancctccctggctttaacccaatggtccnccaatatgcctcanattggntncaactggctcccttccttcaggganttaaattcnccagancnttnaggngccangggcttccccgnggttttgnccggggnnaaggaggcctttntgggnaa

SEQ ID NO: 127162 - DNA, 540 bp, Arabidopsis thaliana
cagctctatacgactcactttagggaaagctggtccgcctgcaggtaccggtccggaattcccgggagacagttttagggttccgtcgttcttattcactctcgattcttcgcttagcttcgtcttcttcatcgaagatttatctctacaattcgctgtggatcttcggggcgggcgaatttcattgattttccattgaatctgcgaggttacatatccggatttgtgttatcggagctgaatttaggaatggaggtagagaaatccaagtataggagcgaagatttggatgtggtggaggaggaggctgatttgaagaagagtcggcgagatcgtgatcggagtaatgagcggaagaaggataagggttcagagaagcgtcgagagaaggataggcggaagaaacgagttaagagtagtgattctgaagatgattacgatagagatgatgatgaagagagggagaagcgtaaggagaaggagagggagcggagacggagggataaggatagggtgaagagacggtctgagagaaggaag

SEQ ID NO: 127163 - DNA, 1105 bp, Arabidopsis thaliana
  unsure (1)..(1105): unsure at all n locations
nnnnnnnnnnnnnnnnnnnnnnnnnnnnnnnnnnnnnnnnnnnnnnnnnnnnnnnnnnnnnnnnnnnccacgcgtccggggggaatgatttcgattggactgaagagatttcagaaagcattagagcttctttacaatgttgggactgctcctatgcatcaagtcaatgccatagctcttgaggcgtacaaaaagtacatattggtgtctctcattcacaatgggcagtttactaacactctccccaagggtgcttctacagcagcacagaggagcttcaagaactataccggaccttacattgaactgggtaattgttacaacgacgggaagattggtgaactagaggcattggttgtggccaggaatgcagaatttgaagaggataagaaccttggattagttaagcaagcagtgtctatccctttacaagcgtaacattctgagattgacacagaagtacttgaccctgtcgcttcaagatatagccaacatggtccaacttggtaatgctaaggaggcggaaatgcatgtgcttcagatgatccaggatggtcagatacatgcccttatcaaccagaaagacgggatggtcagattcttggaggaccctgagcagtacaaatctagtgagatgattgagatcatggattctgttatacaaaggactattggtctgtcgaagaatctcttagccatggatgagagcttatcatgtgaccctttatacttgggaaaggtaggaagggaaagacaaaggtacgactttggagacgatttcgatactgttcctcagaagttctccatgtaaacagcgaaagtcgagaagcaccaacaaaacttggctcaaagacaaccgtagtgtgaatcttgagaatgttacttttgatttctttgttcatttttgttggtttaaaaagtttcatatttttgtcacaattgccaacaagtagagaagaccattatggaccctcgaatcttttatttcccttttacttaaaaaattttccccttgcgcgtgaaaaaaaaaaaaaaaagggcggccgctctagaggatccaagcttacgtacgcgtgcatgcgacgtcatagttttatatagtgca

SEQ ID NO: 127164 - DNA, 517 bp, Arabidopsis thaliana
  unsure (1)..(517): unsure at all n locations
tacgccgnnnnnnnnnnnnnnnnnnnnnnnnnnnnnnnnnnnnnnnnnnnnnnnnnnnnnnnnnnnnnnnnnnnngccacgcgtccggctgattctcgccttctcggtaaggttcaaggcatggaaatcgggctctctctaggcttgaaaagtgatgaaggaggcttaaaactttctctttcggaatgtggatgccatgtggaagacattaccattgagttggaaggaggagcatcatggttttatcaggggatggttaatgcatttaaagaccaaattgggtcaagtgtggaaagtaccattgccaagaaactcacggaaggagtatcagaccttgattcattcctacaaagccttccaaaggaaatcccagtggatgataatgctgaccttaatgtcactttcaccagtgatcctatattgagaaattcatctatcacttttgagattgatggcttgtttccaccaaagggggaaccaaatcaagtntttaaaannccttnttnaaaaaggcctg

SEQ ID NO: 127165 - DNA, 926 bp, Arabidopsis thaliana
  unsure (1)..(926): unsure at all n locations
nnnnnnnnnnnnnnnnnnnnnnnnnnnnnnnnnnnnnnnnnnnnnnnnnnnnnnnnnnnnnacggacgcgccaggcggccggaaaatcgcaatgggtgcgtacaaatacgtgtcggagctatggaggaagaagcagtcggatgtgatgaggtttcttcagagggttaggtgttgggagtatcgccagcagccttccattgttcgtcttgttcgtcccactcgtcccgacaaggctcgtcgtctcggctacaaggccaagcaggggtttgttgtctaccgtgttcgagtcagacgtggtggacgcaagaggccagtgcctaagggtatcgtgtacggtaaacccaccaaccagggagtgacacagctcaaattccagcgtagtaagagatctgttgctgaggaacgtgctggtcgcaaactgggaggccttagggttgttaactcctactggctcaatgaggactctacctacaagtactacgagattatccttgtagaccctgcacacaatgccgtccgaaatgatccaaggatcaactggatctgcaaccctgtgcacaagcacagagaactcagaggtctcacctccgaaggaaagaagaatcgtggtcttcgtggaaagggtcacaacaaccacaagaacagaccttcccgcagggcaacctggaagaagaacaacagtatctctctccgtcgttaccggtgatcagttttatgttttgttttttctcgaactggtatatcttcagtgtggattgtgtttcggaattctggaattacattgggatggaagactttcacattcaagagtttgtttcaagttttgagttctttgattctgaccataaagcaatgtttcttagttattacttatttttgatgattaatttttccctacttaatatcaagagtgtagatttgctcct

SEQ ID NO: 127166 - DNA, 1572 bp, Arabidopsis thaliana
  unsure (1)..(1572): unsure at all n locations
cgactcatatagggagaagctactacgcctgcaggtaccggtccggaattcccgggtctgacccacgcgtgcgcccacgcgtccgcggacgcgtgggcgcaactttcgtcagtttttgtgtgttttcttctacacatagacactttgctcaatcaaacacactctctgttctgtttttctcaaacttgtttaagttcgatgactatggaagtgtcgaaaaagaaaggtggagattttcagcaatgtcacgaattgattcccggtttaccttccgaactagctttggagtgtttggtcagagttccgttccaattccaatccgccatgagatccgtttgccgttcttggcgtagcttactctccgactcttcttttatccaagaacggcggagatgcggcaaaacagagcttctcctctgcctcgttcaaccgctaacgccgccaattccagcgtctaaatcggttgacgagacattaatggttgacgagaaaaaatcagaggatgagtcacacccgcgcgttttctgcacgccgcgttttggattgagcgtttacaacgctgcgatgtccacgtggcatcgcgttgcgtttccagaggaggagcagatcccgcttttctgcgagtgcgtcgtgcttcaggacgccgggaagattctgctcatcggcggttgggatccggagacgttacagccgacgagagacgtttacgttctggaattcgccggaaggaagtggagacgaggtgcgccaatgaaggaatcacgacattttttcgcttgcgcctcggtaagtccaacgaaggtatacgtcgccgaaggtcacgacgatcagaaaaacgctttacgctcggcgaaaggtgtacgacgtcgagaaagccgagtggtcgtcggttactccgatgacggaaggaagagacgaatgtcaaggattcgccgttggtatgggtctaaggttttgcgtgctgagcggttacggaacggaatctcaaggaagattccgatctgacggagaaatttacgatccagcgacagattcatggtcgagaatcgacaacgtctggcgatttccagatactagcccgagaggtcgcaccgccggagactttagaagctcctctacgttatggtgtttcacagacactgatttacagagtgaacgtcgatgggaaactaacgatgattcgagaaatttgaaactggatcttcaatctatacagcttccgatgacaggaagctcagttttcgccggaagcttaggaggtgaatcggtggtaatgattggcggtaaaagagagagtgaaggtgaaggtgaaggaggagtgatgatgaagatgacgactgagaagaaaatgggaaaatggagtcatcatgttcatataccttgtgatttctctactcttccattttcgcatgcttcaatctatgtttgaaaatcccaaaagattttatagtacaacattgtgttctgatcgcggccgnnnnnnnnnnnnnnnnnnnnnnnnnnnnnnnnnnnnnnnnnnnnnnnnnnnnnnncacnnnnnnnnnnnnnnnnnnnnnnnnnnnnnnnnnnnnn

SEQ ID NO: 127167 - DNA, 510 bp, Arabidopsis thaliana
ccacgcgtccggaacatacaagcagctattttgttggtcgagatattcacagtcacaaggttgcttggggtcagatatcaatggttgatgcagaaagaaggctattagctcatgctctcgttgatcctgataatcaacactttatattgctgtcagatagttgtgtaccgctattcgactttaactatatctataaccacttgatcttcgcgaatctcagcttcattgattgttttgaggatcctggaccacatggatctggtaggtattcacaacatatgctgcctgaggttgaaaagaaggattttcggaagggctcacagtggttttcaatgaagaggagacatgctatagtcgtcatggcggacagcctttactacacaaaattcaagctttactgtaggccaaatatggaaggacgcaactgctatgcggacgagcattattttccaactcttttcaatatgattgatccagatggaatagcaaactggtcggtcacacatgtag

SEQ ID NO: 127168 - DNA, 446 bp, Arabidopsis thaliana
acgcgtccgcaatatcacactttcataaagctcataacatacataaaaaatgggtgaatcttttagattattcaatcatcatcacttcctcacaacttttctcataatcatagccatgctcaaattggttcatacaacaacaacaacaactacaacaacaacaacaaacaccgagttcgtaaaatcatcatgcactttcacaacgtacccaagactctgtttctcttcactctcaactcatgctagtctcatccaaacaagccccaagctcatggctcatgcggctctcaacatcacattagcctcggctaaagtaacttcagcaatgatggtgcgtctctcgaatagtcggctcaagcctaaagaagtctcggccatgagagactgcgtcgaggagttaggtgacacgttggaggagcttaggaaatcgattggtgagatgtgtc

SEQ ID NO: 127169 - DNA, 627 bp, Arabidopsis thaliana
  unsure (1)..(627): unsure at all n locations
cnnnnnnnnnnnnnnnnnnnnnnnnnnnnnnnnnnnnnnnnnnnnnnnnnnnnnnnnnnnnnnnnnnnnncccacgcgtccgaaaaaacaagaaacagagcctatgacgtgcttgttcagattggtcatgcatacgcagatgaggagaatggtggagacaacgagaagttgcatgggtacttcgatatggtggttggttgcttggctggcgaaaaacctcaaatgattagtgctgctgtcaagggtgtagctcgtttgacatatgagttctccgatctcatatctagtgcttacaatttacttccttcaacatttcttctcctccagaggaaaaataaagaaattacaaaagcaaatttaggtttgttgaaggtgttggtggctaaatcacccgttgaaggactacacgcaaatttaaagagcatggttgaaggcttactaaagtggccagaaggaacaaaaaatctgttcaaagcaaaggtgaggcttctgttggagatgctcatcaagaaatgtggcacggaggctgtcaagtctgtgatgcctgaggaacatatgaaactcctgacaaacatccgaaagatcaaggaacgtaaagagaaaaaatatgcagctggctctgacatc

SEQ ID NO: 127170 - DNA, 439 bp, Arabidopsis thaliana
  unsure (1)..(439): unsure at all n locations
gttcaaacctttactctctctgtctgcaaaaggttcatcatttagggtttatacaagtttacagagagtttacgattctgaatcagtgattttggaagaaaccccaatcagctgaagatgaggagattgtttgcgatttcatcgacgggaaacagatttgttcatcggagtcttctcggaaaaggtaaatgtggaactgctcctccttcctttagccattgcagtttctgggtacgagatttctctggtgttagatatgattacagaaaaatatcgataaataggctaaatgatttgaagctagatgatgcggttaatctgttcggtgacatggtcaagtctcgtcctttcccttcgattgttgagttcagtaaactgttgagtgccattgctaagatgaacaagttcgatcntgtcatctctctcggcgagcagatgc

SEQ ID NO: 127171 - DNA, 492 bp, Arabidopsis thaliana
agcccacgcgtccgcaaaacaaaaaaaagagcgtggctttatctatcatctggtatccactatccacaactggggtcagcttctggttctctctctcggtaactttctgagctgaagaaccctaattcttatcttcaccggattccgggtatagggctttgtaaagttgttgaatttacaaagaaagatatgctggtttgtctgggttttgtagaagaatctgtgttgttgctttgagattaaagtccgaacaatgttgggtttgattcatgtccttgatgagctcgtcaatggtcttatgccactgcttatcattcagtagtcaaaacccagatcctgaatcatcatcatcttctcttcttcgttataagccttgtgattcgatttcgttgtggggtaagagaaggaagaagctttggagatttgttcccagtgcggagaagaataacagtcatacgggtaataataataagaggagaagaagctggtggc

SEQ ID NO: 127172 - DNA, 421 bp, Arabidopsis thaliana
ggaaaatcgagcttatagaagcaatcgtgcggcagcgttggatgcgtcagggaggttagaagaagcagttaaagaatgccttgaagctgtgagatgtgatccttcttacgctagagctcatcagagactcgcttctctttatctaagattgggagaagctgagaatgcgagacgtcatctttgtgtttccggacaatgtcccgatcaagctgatttgcagaggttgcagacgcttgagaagcatctcagactgtgtacggaggctcgagagatcggtgattggagaacggtgattagcgaaatcgatgcagccattgcaaatggagctgattcttctcctcagcttgtagcttgtaaagctgaagcctttttgcggcttcatcagataaaggattcagatttgtgtatatccagcattccg

SEQ ID NO: 127173 - DNA, 625 bp, Arabidopsis thaliana
gtggattttagggaaaaaagagaattcgaacaaggtcgtcgccgtcgtcggatttgtagatcatcatggagttctctctgatcgcagatacagtcacagtttgcacggctaagcaaggtatcgcgtttgggaaatctcttcttcaaagggtggatttggccaatcacattcctttcgccgattccgttgttgatcatcaatctcccggtggaggaatcgttcaagcatcggcgattattttccccgtcgatgcaattgctcctccaccggtcagatctagctcttataagacaattcgccggatccgtaaaaagcgacgaaccaggcgagtttcgtttggtggagatggagatgacgcaggagattttggtcgttttctgttagaaggtgatttcggtggtagcgacggtccatttggatttggaggcggaggaaacgatggaggcggaaagggatggaactacggcggcggcggcggtggtttcgggagggataattgggatgggtcttcgttttcgtcttggtcagatccagcgatggaatttgtgtatgaagtgatttgctggatcgcgttgtctaattgtgtgcactttgcgttcaagaggatagtgaggatcgtgaccga

SEQ ID NO: 127174 - DNA, 563 bp, Arabidopsis thaliana
ttttgaaacataagctcttcttgatacagaaaggactcgctttcaatggttaacgaaccaaaacagctagatctcaaggcaagaagtttcaagtctctgtggagcaagaagctactcggttactgggaaacttgggatgggctctgatgcaacgagacaactttgtggaagctgaagatgcatacagaagagctttatcaatagcaccagacaacaacaaaatgtgtaaccttggtatctgccttatgaagcaaggaaggatcgatgaggccaaagagactttacgacgtgtgaaacccgcggttgttgatggccctagaggcgtggattcacatctaaaagcttacgagagagcgcaacagatgctgaatgatcttggatctgagatgatgagaagaggaggagatgataaggttgaacaaagaaggctctttgatgcaatctttggatcttcctctatatggcaacctcagccttgtagtgagcagactgtgaaggctaaaccaaagcctggtttaagcaatggtgatggatacggtgatgagaacgtgaagatgagtgtg

SEQ ID NO: 127175 - DNA, 885 bp, Arabidopsis thaliana
  unsure (1)..(885): unsure at all n locations
nnnnnnnnnnnnnnnnnnnnnnnnnnnnnnnnnnnnnnnnnnnnnnnnnnnnnnnnnnnnnnnnnnnnnccacgcgtccgatagatttagctccgtcccggagaaccatggcgtcgctttgctctgcgaggttccttccttctccatcgctcgatattttatctacgaagacgaagatatcctccgactcgcgctcgcttggttgctcttcgtcgcgtgtctttgctttctcttccgttcaccgttcttcttcgcgtcgcaatcggaatcagctgcaagttgtgtctatggctcctgaggaagaaaagctcactcgtcgtaatcctctcgatttcccaattgagtgggaaagacctaaacctgggaggaggcctgacattttccccaagtttagccctatgaagacaccattgccaccaccgatgccttatgatcctccggaagaggatgaagaagaggaagagaagaaagaagaggaagaagaaaacccagaccaagaagaagaggaacaacccgagaagcagcaatagatttttggttggagataagaacgaatgaaacatcgagagatatcgaagagcattttttgtttcaacttttgtagtgttttggaggagaagaagaagagtcaatcttttctcacatttagttgctagatttaatctcatactcgtgttcgtgtattatatctgtgtaatgccacagtttcagaagctatgttatcctttcgaaattcgaaccttctttgtgtaagtagacagagggtttaactaatctctctttctccttnnnnnnnnnnnnnnnnnnnnnnnnnnnnnnnnnnnnnnnnnnnnnnnnnnnnnnnnnnnnnnnnnnnnnnnnnnnnnnnnnnnnnnnnnnnnnnnn

SEQ ID NO: 127176 - DNA, 951 bp, Arabidopsis thaliana
  unsure (1)..(951): unsure at all n locations
nnnnnnnnnnnnnnnnnnnnnnnnnnnnnnnnnnnnnnnnnnnnnnnnnnnnacggaacgcgcgagacgacccacgcccccgtacggcggcgagatgacgacagaagggggagccatttaaatctgattcatatcaaaaaattttcgatttaaaaaaaaaaccctcaaaaggtgttgatacggaaaaagaaaagggaaagaagaagagaatggatctagaatcggtgaaaaagtatctggaaggagatgaagacgaaaaggccaaggaaccaatggtggcgaaattaccacacagattcctcgaacgattcgtaaccaatggtcttaaagtggatctcatcgaacctggccgtatcgtctgctccatgaaaatccctcctcatctcctgaacgcagggaaattcttacacggaggagcaacggcgacgctggtggatttgataggatcagcagtgatctacacagccggagcttcacattccggagtttcagtggagatcaatgtttcataccttgatgctgcttttctcgatgaagagatagaggtagaatcaaaggcattgcgtgttggtaaagctgtagcagtagtgagtgtggagctgaggaagaagacgactggtaagattattgctcaaggtcgtcataccaagtactttgctcctcgttccaacctttgatcgttcaaccaacctttcttcttttttacattcaataaacaacatcaaggtgtttttagtctttgtcccatttgcttcttattattattgatactaataaaactacattactatatgtttttctaataatacaaacaaccttactttttctcaaaaaaaaaaaaaaaaaaaaaaaaaaaacccaaccccaaagggcggccgctctagaggatccaagcttacgtacgcgtgcatgcgacgtcatannnnnnnnnnnnnnnnnnnnnnnnnnnnn

SEQ ID NO: 127177 - DNA, 503 bp, Arabidopsis thaliana
  unsure (1)..(503): unsure at all n locations
cnccacccncngtgatgggttcggngtcgtaaccccaaaacctggccccagnacccaacgggnnccccccctnanccccggctgccaaacctgggnccacnccaaaaggaaaagccctgctncngttgnccaatcttgtaaagcgggtctactcgacacgtcaaaagcgcttggaagnaaagtngcaatcgttaacatcgtcttcccttgtcttcctcatccattgtctactctgttggttcctgtgctttccaggaacaacaagagggatgaccagttattccccgtacctacggatataagccttgaacatagtttatcgggttttaggacagagattcgttgatacattgttggagtttggttttatgtttgatgatttttatctttggtgttttgatgagacctattgcttgtacagctcacttatgagactattatcagtatgttctgccttttgggctaaaccttgatattgatttattatatgcttttattagttt

SEQ ID NO: 127178 - DNA, 614 bp, Arabidopsis thaliana
  unsure (1)..(614): unsure at all n locations
catggntaagacagcgacattgtgtctcttgttctngttcacatncctcacgacctgtttgtctaaagatctctgtaaccaaaatgacaaaaacaccctcctcaagatcaagaaatctctaaacaacccttatcacctcgcttcatgggaccctcaagaaccgccgaatgctcaggctcagctggacgaatctgacaggtccaattcctgactttataagtcagcgcaagggtctcgagttcttagaactttccttcaatgatctctctggttccattccaagttctctctctacgttacctaaaatcttggctcttgaacttagcaggaacaaacttacaaggttccataccagagtcattttggggtcgtttccagggacaagtccctgaccttcgccgtatcacataaccagctcttccggtccaatacccaaatcattaggcaacatcggctttaaccgggtcggtttttcccgcaacaagctccaaggtgatgcttcgatgttgtttggttccaacaaaacaacctggtctattgacttatcaagaaacatgttccagttcgatatctcaaaggttgatatccctaaaacacttggtatcttggacttg

SEQ ID NO: 127179 - DNA, 636 bp, Arabidopsis thaliana
aacaccatggataagacagcgacattgtgtctcttgttcttgttcacattcctcacgacctgggggtctaaagatctctgtaaccaaaatgacaaaaacaccctcctcaagatcaagaaatctctaaacaacccttatcacctcgcttcatgggaccctcaaaccgactgttgctcctggtactgccttgagtgcggcgacgccaccgttaaccaccgtgttaccgccttaaccatattctccggccagatctccggtcagatcccggctgaagtcggtgacttgccgtatcttgagacccttgtcttccgcaaactctctaacctcaccggtacaatccaacccaccatcgccaaactcaagaacctccgaatgctcaggctcagctggacgaatctgacaggtccaattcctgactttataagtcagctcaagaatctcgagttcttagaactttccttcaatgatctctctggttccattccaagttctctctctacgttacctaaaatcttggctcttgaacttagcaggaacaaacttacaggttccataccagagtcatttgggtcgtttccaggaacagtccctgaccttcgcctatcacataaccagctctccggtccaatacccaaa

SEQ ID NO: 127180 - DNA, 471 bp, Arabidopsis thaliana
  unsure (1)..(471): unsure at all n locations
ctcacttattaggggaaagctcggtacccncttgcagggtaccggggtccgggaatttcccggggtcggacccacggcgtccgcccaaaacacacataaaaagatcaggaaaatgagttccttacaaccactttctgtgcacagtaccaactccaaagtcataacagagaagagaaaatcggtgacaacccttacaaatggtagtcgtcatctagagagcaagcctaagattcatgatgtcgacaaatgcgccgaagctttcatccaaaacttccggcgacaactttctcttcagtgcgataacatcctccctagaggagctctctgatatattccacttacagaaaaaatagatgtctcatgtcacgtgtttcagataacatatgttacttatctctctaagcttcttaggcgatttcaattgtattataaggtttcttactatcatataaccacatgttttagaagcat

SEQ ID NO: 127181 - DNA, 1106 bp, Arabidopsis thaliana
  unsure (1)..(1106): unsure at all n locations
agatttttcaggtacaaacgactcactttagggaaagctgctacgcctgcaggtaccggtccggaattcccgggtcgacccacgcgtccggatgctcacaaagcagggctaaaactatatgcgtcaggttttgcaaatgatgttgatattgcatataactacagttgggatccagtttctgaatatctatcttttgttgacaatggcaatttttctgttgatggtatgctctctgattttcctttaactgcatctgcatctgttggtaagaaaattatcttctacagacaaaatattatttcttaatacattactgtgtaatactcaaaatcaaacattttatttttgtatttcttcagactgcttctcccacattggcagaaacgctacaaaacaagtggattttcttgttatatcaaaaaatggtgcaagtggggagtatcctggatgtacaaaattggcatatgagaaggcaatcaaagatggttctgatgttatcgattgctcggtccaattgtccagcgatggtacacccttttgcttaagttcgatcgatctcgggaacagcacgacggtctccctaactgctttcagaaaccgttcaacaactgttcctgagttgggctcacttggtgcaatatacactttcagtctcacatgggctgagatccagaccttgactcctgctatttcaaacccctacagagtaaccagcctgtttaggaatccaaaacagaaaaatgctgggaagcttttctcactttctgatttcctaagcttggcaaaaaactccacctctctctccggtgttttgatcagtgtagagaatgcggcatacctgagagaggagcaagggctcgacgttgtcaaagcagttcttgatacactcacacagactggctacagcaatagtacagccacaaaggtcatgattcaatcaacaaacaactcggttctaggtgacttcaagaagcaaaaccagtacgagactgtctacaaaagtgaagaaaacatccgtgatattctcgactctgctattgaagacatanagaaattcgctgatgctgttgtgatccaaaaattatcagtctttcctgtcgctcagt

SEQ ID NO: 127182 - DNA, 430 bp, Arabidopsis thaliana
ctcttgtttatcacaaaggtcgagctcctcgtggcgaaagaaccaattgggttatgcatgagtatcggttggttgatcaagaccttgataaaactggtgttcaccaagatgcgtttgtgctttgtaggatttttcagaagagtggctccggacctaaaaatggagagcagtacggtgctccgtttgttgaggaggagtgggaggaggaggatgatatgacatttgtacctgaccaagaagatcttggaagtgaagatcatgtttatgtccatatggatgacattgatcagaagtctgaaaactttgtggtctatgatgccattcctattccgttaaactttattcacggggagtcgagcaataatgttgaaacaaactactcagactccataaactatatacaacaaacaggaaactatatggactctgg

SEQ ID NO: 127183 - DNA, 366 bp, Arabidopsis thaliana
gagcaacagaagaagaaccggagacgatgacaaaggattgctctggaaacttccccaagttaggatcagagacattggaaaagttggtccagcttttggactcggtgtcggttgcggatttggtttcggcgccggtcttatcggaggtgtacgattcggaccaggagttcctggattacaatttggtcttggatttggagctggttgtggaattggtgtaggttttggctatggtgttgggagaggagctgcttatgatcactctcgttcttattacaacgttggaaaaccatctctgaatgaagttgattcactgattgatgaacttgttgttagcacgaagaagcttgtgaaagctactacaaa

SEQ ID NO: 127184 - DNA, 450 bp, Arabidopsis thaliana
ttgctatggcgttaccaccattgtctattcgcggggatcttggtgttctctccacagctgctgctagatatgctccttcgcttttaaaatcttttatcaaaatgggtcctaaaggagcgttgggagcgacaaaacttctccgcccgttctcggagatcgttgattctttggagttaaaagacccgtttatacgaaactggattgatcttctcgcattcctgctcgcaggggtcaaatctgatggcatactttcagcagagatggtagccacttatgttaactgtatcctttattccacaacatgtctaacatggaaaaaagaaacaagattatcatacttttggtgcaaaagatcggtttaaaatgaagtctttgtttcttatgtgtgcagatctacatgtctgcagaatggtacaagccaggctgcacattggagtaccctattgatgg

SEQ ID NO: 127185 - DNA, 597 bp, Arabidopsis thaliana
  unsure (1)..(597): unsure at all n locations
cnnnnnnnnnnnnnnnnnnnnnnnnnnnnnnnnnnncggacgcgtgggttcttcttcttcttcttcttcgccacccggcgagtgctgcgtaaaaatgggtaatacgtattgtatcttaggaggttgtattgaacaagctagcgttggtgtggtcgaacgttggggtcgattcgagcatatagctgaaccgggatgtcatttcttcaaccctctcgccggtcaatggctcgccggagttctctccactaggatcaaatctcttgatgtcaaaattgaaaccaaaactaaggataatgtgtttgtgcagctggtttgttcgattcagtatcgtgtagtgaaagctagtgctgatgatgcgttttatgagcttcaaaaccctaaagagcagatccaagcttatgtctttgatgtggttagggctttggtcccaatgatgacgcttgatgctctttttgaacaaaagggtgaagttgccaagtctgttcttgaggagcttgagaaggtgatgggtgcttatggatacagcattgagcacattctaatggttgacattattcctgatccctctgtacgcaaggcaatgaacgaaatcaatgc

SEQ ID NO: 127186 - DNA, 712 bp, Arabidopsis thaliana
  unsure (1)..(712): unsure at all n locations
nnnnnnnnnnnnnnnnnnnnnnnnnnnnnnnnnnnnnnnnnnnnnnnnnnnnnnnnnnnnnnnnnnnnnccacgcgtccgctagtcttgtcttctattatgcaaaaggtcttcttggccatggatacttgtgctctagtaatccatcagtctctgtctcgcatcaaactttctcctcccaaatcttcttcttcttcttcttctgctttctcccctgaatccttaccgatcagacggatcgagctgtgtttccgaggagctatatgtgccgccgtacaaagaaactacgaagaaacgacctcctccgtggaagaggcagaggaagatgatgagtcatcatcatcgtacggagaagtgaacaagatcattggaagccgaacggcgggggaaggagccatggagtaccttatcgagtggaaggacggccattctccgtcgtgggttccatcgagctacatcgcagcagacgtagtgtcggagtacgagacaccctggtggacggcagctagaaaagccgacgagcaggccctgtcacagctcctggaggaccgagacgtcgatgccgtggacgaaaacggccggacggctcttcttttcgtggcaggtcttgggtcggacaantgcgtaaaggtttttgcggaggcttgagccgtttttgccacccggaaaataaggggaggntttacggcctttnanatnggggntngttacnt

SEQ ID NO: 127187 - DNA, 629 bp, Arabidopsis thaliana
  unsure (1)..(629): unsure at all n locations
nnnnnnnnnnnnnnnnnnnnnnnnnnnnnnnnnnnnnnnnnnnnnnnnnnnnnnnnnnnnnnnnnnnnccacgcgtccggtttctaagtctctcgtccttttcttttaaccacactccttgcttgagattcaatcgaaaactgaaattcgcaagcctccactgctcgccgtcgcactcatcggaatattccattggcaccgtactaccctgaaatcatctcatcagatcaaaacgggagtttaactagaattgcgtggattaatggggaagaagcagagcgagatatctgcaatggagatcgacgatccgaaatctgaaagctcggatcagatccttccaaggttctcgatcaatgttctgcagctgatgaaatcttctcaggcgcaacatggtctgcgtcatggtgactatgctcgctatcggaggtattgctccgcacgtttgaggaggttatacaagtccttgaaattcactcatggccgtggaaaatacactcgacgagccattcttgaatcaactgtcactgatgttaggttccttcatgtggttttctatatggcggaaagagcatggagccatgcaatggaaaaaagacagctaccagttggtcctaatgcacggcagcgga

SEQ ID NO: 127188 - DNA, 478 bp, Arabidopsis thaliana
  unsure (1)..(478): unsure at all n locations
nnnnnnnnnnnnnnnnnnnnnnnnnnnnnnnnnnnnnnnnnnnnnnnnnnnnnnnnnnnnnnnnnnnnnnnnnnnnnccacgcgtccgcgaactcaaatcttcaatcttcatcttactctctaattgctttcctattccgatctctgtttcttcataaagtctcaatcttttttttctctatggccggaactaaagattctcatgtagtggagattccagtagatgaagagcataaagagagacaacaacaacaacagttggttgcggtctcaaatccgggaatgggaatactcaaagtgattcagcagcatccgttgtctgaaatctcagagagtccaggacatttgttgcttttgaagttatggcaaagagaagaagatttgttctgtcgtcgtgttcttcttaaagaatcaagactagagtcaatcaaaagagagatctttcagctttgttgtttcttcctagtcttccatgggt

SEQ ID NO: 127189 - DNA, 558 bp, Arabidopsis thaliana
  unsure (1)..(558): unsure at all n locations
nnnnnnnnnnnnnnnnnnnnnnnnnnnnnnnnnnnnnnnnnnnnnnnnnnnnnnnnnnnnnnnnccacgcgtccgatatatggcaaaagaggcctcctttggaattctttgcgatgatccaaggaagagttttggcacgtgatctatttgtagcttatgcacggtgtcataagcatgaatttctgaaggatttcttcttatctacgggccagattcatgaggtagcttttcttttatggaaagaatcatgggatatggggaaaaacccaatggctagcaaaggatctccattgcacggtccgcgcataaaactaatagagaaggctagaaaccttttctcccaaacaaaggaacacactttcgagtctaaggctgctgaggaacatgcaaaactcctgaagatacaacatgagctagaagctagtacgaagcaggctttctttgttgattcaagcatcaatgatactatacccacatgttttgtcctgggtataacccgggctgcaataaaagtgaagacagaattcaagggcagtgataaaagatggtgttggctta

SEQ ID NO: 127190 - DNA, 599 bp, Arabidopsis thaliana
cggccgaaatcccggtgggcgacgcgtccgcggcgatattcttcttcttcggctcacattgcatcgtctctcactcgatccttcgttctttcagggacaatcatttcggaaacatgccaggtcagaagattgaaacgggtcatgaggacattgtccatgatgtgcagatggattactatggaaagcgaattgcaactgcatcatctgactgcaccatcaagataaccggtgtcagcaacaacggtggatcgcagcaactagccacattaaccggccaccgtggtcctgtctgggaagtcgcgtgggcacacccaaagtatggatcaatccttgcttcatgctcctatgatggtcaagtcatactctggaaagaaggcaaccagaaccaatggacccaagatcatgttttcacagaccacaaatcttcagtcaactccattgcatgggctcctcatgatatcggactatccttggcctgcgggtcatctgatggcaacatttcggttttcacagcccgtgctgacggtggctgggacacatcaaggattgaccaagcacatccggttggagtcacttcagtctcatgggccccagccaca

SEQ ID NO: 127191 - DNA, 563 bp, Arabidopsis thaliana
  unsure (1)..(563): unsure at all n locations
acgcgcacnnnnnnnnnnnnnnnnnnnnnnnnnnnnnnnnnnnnnnnnnnnnnnnnnnnnnnnnnnnnnnnnnnnnnccacgcgtccgctctcttatgtctacttcccagaaaaatttctgcttttgaaattcaagatgtactcgtcgtcggcctcttcttctatttttcttcaatttccaccggcgagaataaccaccgcgtctccatttatactccgccgtagcaggaagcgaggagctcgttttaaacgacagagtcggaatttagttcttgtgaattcgtcaattttccctccgcctttcgatggcagcgttcctctcgattcctccttagctccatctctcgccggaatcgcttccggcttagccgtttatttatcgtcgaggttttttggaaagtctttggagaagattagtgataaaatcgctgatgatgttgttgttggggaatggattcttttcaccactccgacgccgtttaacagatgtgctcttcttcgttgatctttgctctcctttgatgatgactctgagaagagtttaagcgatagacttgtcacag

SEQ ID NO: 127192 - DNA, 481 bp, Arabidopsis thaliana
ttgtgtcaacagcgatcatgttatgcttcctttggttcagctattgcatgatccatcttcctctgtccaggttgcagttcttggtgctctgaacaatatagtaatggatttttcatcaccgaagtcatcatttatcgagtatggagggataaaacagcttactgagttgtcaaaatcaatggatccaaatactcggtgtagcgctttgcgggctttaaggaacctcatgttccttgccgacattaaacgtaaagaactcttttattcagacgttaaggctcaaggacttgcttgtctcattagtgatcctgagcccccagtgcaagagcaagctttggccctcctccgtaatcttgttgatggatgtatcagctctatcgagtttgtatttgatgaagatggtcttatcttagatactgttgggaggcaattgaggaaagctccacaggcacaaatggcaatacagggaatgtatgtgctc

SEQ ID NO: 127193 - DNA, 888 bp, Arabidopsis thaliana
  unsure (1)..(888): unsure at all n locations
nnnnnnnnnnnnnnnnnnnnnnnnnnnnnnnnnnnnnnnnnnnnnnnnnnnnnnnnnnnnnnnnnccacgcgtccgcccacgcgtccgtacggctgcgagaaacgacagaagggggagaacaactaagttaaagggaaagcaaaaatgggctgcatcggtgttgtgaatgtaacaagcataaatccatatctcacaagaagatcaaacaaaccctacaattcaagaagaccatcatccatggctgctgcgattagagctgagtctactgagaaattagggattacaattgaaaagaatcctcctgagtccaaactaacccaactcggtgttcgtagttggcccaagtggggttgtcctccaagcaagtttccatggacttacagtgcaaaggagacttgttatttactacaaggaaagtgaaagtgtaccctaatggatccgatgaaggcgtagagatcgaagcaggcgactttgttgttttccctaaaggaatgagttgcacttgggatgtctctgttgctgttgataaacattaccaattcgagtgaatggctgctatcaatctctgctctacgtattcgtgtattcgataggacttgaccatctttgtatgttgatggatacttactttaagcttgtgtgaagttttttactttagtggaaataaaggagtcatatatggacgcattatctcattcaacaccaaagtcattcgaagttcgatacaataacatgtatagtgtttactgtcgaaaagtaaataattgataatagaagtgatattcccgtnnnnnnnnnnnnnnnnnnnnnnnnnnnnnnnnnnnnnnnnnnnnnnnnnnnnnnnnnnnnnnnnnnnnnnnnnnnnnnnnnnnnnnnnnnnnnnnnnn

SEQ ID NO: 127194 - DNA, 746 bp, Arabidopsis thaliana
aaaaaaagtcactgaagatttattagactctcttcttcttcttcctccttggcgcaggttcgcaatttcgcaatcgcatcagtcaattatcgaatcgtcctcccagagattaccggagaaaatgaggattgatgagaacgaaggtgtctctgcttcaagcaagcacctagtcttcgcttactacgtcactggacatgggttcggtcacgccactcgagtcgtcgagggtgtccgtcacctgatcgcggcggggcatgatgttcatgttgtcaccggcgcgcctgattttgtcttcacatctgaaattcagtctccgaggctcaaaattcgaaagggtcttttggattgtggggctgtacaagctgatgcattgaccgctgatcgtcttgcctcgttagaaaagtatgtggaaacagctgtggttcctcgagctgaaatattggaaactgaagtggagtggcttcattctatcaaagctgattttgtggtgtctgatgttgtccctgtcgcatgccgtgctgcggctgatgctgggatacgttctgtttgtgtcaccaatttcagctgggattttatctatgctgagtacgtgatggctgctggatatcaccatcgctccatcgtttggcagatagctgaagattattctcattgcgagttcctaattcgcctcccaggatattgtccaatgcctgcttttcgtgatgtcatcgatgtaccgttagttgtgaggagacttcacaaat

SEQ ID NO: 127195 - DNA, 535 bp, Arabidopsis thaliana
  unsure (1)..(535): unsure at all n locations
cnnnnnnnnnnnnnnnnnnnnnnnnnnnnnnnnnnnnnnnctcagaatagaaatcgtccaagattcgacgaccacgcgtccgcaaagaagaagagaagtgtatgtttttgccactcgttttgttactttcttttgatattttgttttaggtgttcacataaatttgatagtgtaaagaaaacaaaaccactttctagttcttaaagaaactagaaatccatggacccgtctcgtcatactcatgtgatgctcgtatctttccccggccaaggtcacgtaaaccctctacttcgtctcggaaagctcatagcctctaaaggcttactcgtcacctttgtcaccacagagaagccatggggcaagaagatgcgtcaagccaacaagattcaagacggtgtgctcaaaccggtcggtctaggtttcatccggtttgagttcttctctgacggcttcgccgacgacgatgaaaaaagattcgacttcgatgccttccgaccacaccttgaagctgtcggaaaacaagagatcaagaatc

SEQ ID NO: 127196 - DNA, 996 bp, Arabidopsis thaliana
  unsure (1)..(996): unsure at all n locations
agccgtattggtgcttgcatggcttggatgggggggtagaattcgcgggnatactatacgactcactatagggaaagctggtacgcctgcaggtacccggcccggaattcccgggtcgacccaggcgtccgatctttttattttctctatctatctggatattattttttcacttggggatttggagaaacctctcctctctctatctatagccatggctgctttcacttgtacctctcgtcctccgatttctctccgctccgagaccagaatcgtatcctcatcaccatcggcttcttctctctcttctcggcggatgttcgccgtcttaccggaatcatcaggtttgagaatccgtctttctctctctccggcttcgttgacctcgattcatcaacctagggtttctcgattacgaagagccgtcgtctgtgaagctcaggaaactactaccgatattcaagtggtcaatgactcgacatgggactctctagttcttaaagcaactgggcctgtagttgtcgacttttgggcaccatggtgtggaccttgcaagatgattgatccgcttgtaaacgatctagcacagcattacactgggaagatcaagttctacaaattaaacactgatgaatctcctaatactcccggccagtacggagttagaagcatcccaacgatcatgatctttgtcggtggcgagaagaaggatacaatcataggtgcagtgcccaaaaccacactcacatctagcctcgacaagttcttgccatgaaatatcacttgtggagtctgtaagatctcgtatctctctgtctctcgttcttgttctcattatctctgtaactcattatcactgaacatctagacctggataaataatatgatgtcatgtcttatgtcaaaaaaaaaaaaaaaagcnnnnnnnnnnnnnnnnnnnnnnnnnnnnnnnnnnnnnnnnnnnnnnnnnnnnnnnnnnnnnnnnnnnnnnnnnna

SEQ ID NO: 127197 - DNA, 711 bp, Arabidopsis thaliana
  unsure (1)..(711): unsure at all n locations
gtatttttagtagaaatacttatttttccaaaaatatttgtttgtgttgatgtatatataaaaaatctgcatcagtgttttgtctacattttctcttccattagtttcgttatctttttattttctctatctatctggatattattttttcacttggggatttggagaaacctctcctctctctatctatagccatggctgctttcacttgtacctctcgtcctccgatttctctccgctccgagaccagaatcgtatcctcatcaccatcggcttctcctctctcttctcggcggatgttcgccgtcttaccggaatcatcaggtttgagaatccgtctttctctctctccggcttcgttgacctcgattcatcaacctagggtttctcgattacgaagagccgtcgtctgtgaagctcaggaaacgactacccgatattcaagtggtcaatgactccgacatggggactctctaagttcttaaaagcaaactggggcctggtaagttggtcgaccccaacggcgtcccgtgnntgcctccgggtcaaagggnncctaattaaacccggaaacggaaagcttggaaaaaaatcntcctaaacccccggaaaatggggnnnaaactcaaaaccaaaaacancanccaatnaannccggnnaaagnanggggggccccnaaaaggnaanccaaaaaaancaagggttccntt

SEQ ID NO: 127198 - DNA, 512 bp, Arabidopsis thaliana
  unsure (1)..(512): unsure at all n locations
nnnnnnnnnnnnnnnnnnnnnnnnnnnnnnnnnnnnnnnnnnnnnnnnnnnnnnnnnnnnnnnnnnnnnnnnnnnnccacgcgtccggataccttcgccggagaagaagctctcgttctctctatcgtcggagaagctctcgttctctgcttccctgctctgtacagatctcgagccgcatttcgtggatctgtcaaaatcgcgttaaaacctactcgcttctctctaaccctagggtttttgaatttttttcgggacgagggagaaatcaatgtctgtgaagctttgaggaagctatatggttacacctttggttctggttagtcttcgttttgatcggcggagagtgttcgccgaggcttggtgtctccgttattgactaatggtggtttttgatttgagataagagatgcggaactttgcgatgcttctgctgttaattcttcttcttcactctctcgcctcgtttcctatatgctttgctcggttatttccgatgagtttgccattta

SEQ ID NO: 127199 - DNA, 564 bp, Arabidopsis thaliana
  unsure (1)..(564): unsure at all n locations
aattaactggtgagagagttcaacatccaatctttctctctctctctctatcttttatctctcacactcttaaaatgcttcttctatctccgatctctgcctctcttccaccgtcgtttcaccggggtaatttgatccggcgatcaattaagccgttaggtagggttgttgcaaaggccaaggacaacaccgacactggtggatttctggagacggcagctatagccggtggtttagtgtcgacgacggttattggatggtcactctacactttgaagaccacgggatgtggcttanctnccggaccggccggnttaatcggagcgttggaaggtgtgagctacttggtggtggttggcaatcgttgggttgggcttttntacactaaaaccaaaaaacttgggtcaagntttnccaaaatgggccattttgggttttttgggtccggccnaggggttnttcgaatttttcggntntaagcccatttttttgggntttggaattaanttttngnaaaaggggcngttccagggccctttctngnnccngttttttggnaccccg

SEQ ID NO: 127200 - DNA, 765 bp, Arabidopsis thaliana
  unsure (1)..(765): unsure at all n locations
nnnnnnnnnnnnnnnnnnnnnnnnnnnnnnnnnnnnnnnnnnnnnnnnnnnnnnnnnnnnnnnnnnngccacgcgtccggagacgtcgtcgtcttctagcttctgattaagtctgataaattatgcccctaaatctgtaattctccaaggattcggattcgatcgatgaaagcttctcaaattttggcggctgcagcggcgagggttggaccggcgttaaggaagcaagtattaaccttaacggacgaagctgcttctagggttcatcatctcttgcaacagcgtcaaaaaccttttctccgattaggcgttaaggctcgtggctgcaacggcttgtcgtacactctcaattacgccgatgagaaaggtaaatttgacgagttggtagaagagaaaggtgtgaggatccttgttgaaccaaaggccttaatgcatgtgattggaacaaagatggattttgtagatgataaactcagatcagagtttgtgtttatcaatcctaactcacaaggacaatgcgggtgtggtgaatcgtttatgacaacatctacctctagtgctaagcagagtgctagttaacacacagtgatgcgtttacatttgtgattacactcatatattatactgttactggaattggcgttaatgagaaactaaatactttttaataaaaaaaaaaaaaaagggcggccgctctagaggatccaagcttacgtacgcgtgcatgcgacgtcatagctttaactatagtgtcggtctcaattc

SEQ ID NO: 127201 - DNA, 614 bp, Arabidopsis thaliana
tctctacgactcactattgggaaagctggcacgcctgcaggtaccggtccggaattcccgggtcgacccacgcgtccgcccacgcgtccggctgcgagaagacgacagaaggggaggacgaagaagacactgattggtcttggtttgggacagctcctctcacttcttgctacttctaatggctttacatcttctgagctcgccagaaaaggaattaatgttccaacatcacaatgctttctgaattatgtgttactggcatttgctactacagctactggactgatcatatactccatgaaggagaaagatcaagaggaacacagatttgaagaagtgggcgacgaggcggctatgcagaggaagttgttaggtgaggatgatgagccgggaacctaaccacataggtttttgtcaattccatcgactgtgtgatattatattattgcatccagcaaaaataaaggatcttttgagtggagaaaagtaaggacaccgttggtgactgtaaagagtgagaaaaagggctttatttgatcttgattgtaaagataaacgaagatttacattgtaagaacaacattggactattatagaagttacttccattgaag

SEQ ID NO: 127202 - DNA, 423 bp, Arabidopsis thaliana
tgcaattcttcagtttccgtttctctcctgagaaatttattgacttcaaaaaccctaaaaagacttgtgattgttcgtttctctaactcgaatgttgatcgtacgacggtgagtgatcggagtacaatgacgaagaaatcacagccgcagattccgcctccattgtcccgtcgcggcggcgtcgtgtggctgggatggaaactcgtaatcgctttctccgtcgcgctttgccttcttgctcttcttcgaatccaactacagtacaattccttcacgacattgtcgtttccactctccgtcgcgagatctcagacaccgcttcacaaatactccggtgatcgtcccaagctcgctttccttttcttagctcgccgtgatctcccacttgattttatgtgggatagattcttcaagggagtggat

SEQ ID NO: 127203 - DNA, 545 bp, Arabidopsis thaliana
  unsure (1)..(545): unsure at all n locations
nnnnnnnnnnnnnnnnnnnnnnnnnnnnnnnnnnnnnnnnnnnnnnnnnnnnnnnnnnnnnnnnnngccacgcgtccgcggacgcggggtcgcccacgcgtccgcccacgcgtccgcccacgcgtccgctttttgtttttggcatacaagaaaagaaaatggcgtctcatgctgttacaagcggacaaaaaccacacgtagtttgcatacctttcccggctcaaggccacatcaatccgatgctcaaagtggctaaactcctctatgccagaggcttccatgttaccttcgtcaacactaactacaaccataaccgtctcatccggtcacgtggtcccaactcccttgatgggcttccttcttttcggttcgagtccatccctgacggtctaccggaggaaaacaaggacgtcatgcaggatgtccctaccctttgtgagtccaccatgaaaaactgtctagctcctttaaggagcttctccggcggatcaacaccacaaggatgttcctccggtaagctgtattgtatcgacggtgtgatgagc

SEQ ID NO: 127204 - DNA, 809 bp, Arabidopsis thaliana
  unsure (1)..(809): unsure at all n locations
ctctttggtcgggatcattttataagaaatgtataatctcactttctctccatcattgtcctcttctttgctctcttttacacaacaaactcctgcagccatagtgtcctcttctcctccggatttagtacttcaacaaaaactccggtttgtcgtggaaacctcaccggaccgatgggcttatgtcattttttggcaaaagatgtttgatgatcaatcggaccggtcttacttggtttgggttgatggccatttctgtggaaacaagaacaacaattcccaagaaaattatacaacaaacagcatcgagtgtgagctgatgatggacggcggagatgatctggagttgttctatgccgcatcgttttacggtgaagatagatcgccgagaaaggaagtatccgatgaatctttggtttggttaaccggtcccgacgagctccggtttagcaactacgagagggctaaagaagccggttttcacggggtacacacattggtctccatacccatcaacaatggcattatcgaacttggttcgtctgaatcaattatacaaaaccggaactttataaaccgagtcaagtccatattcgggtcgggtaaaacancaaaacacactaaccaaaccggttcttaccctaaaccggcggtatcagatcattcgaaaagcggaaaatcaagcaattcggggttggnaagaaaacggggggtgngnaactttagacggcaaggntagttncggcgccggaaagggaacatnatcccggggnttttttcccnngnnggaaggcggnnaagncacgggg

SEQ ID NO: 127205 - DNA, 833 bp, Arabidopsis thaliana
  unsure (1)..(833): unsure at all n locations
nnnnnnnnnnnnnnnnnnnnnnnnnnnnnnnnnnnnnnnnnnnnnnnnnnnnnnnnnnnnnnnnnnnnnnnnnnnnnnnnnnnccacgcgtccgtacggctgcgaaaagacgacagaagggggaagcagaagtaacggcaaccaaaaatgacgacaatggcgacacaaggcgcttggctacgaatgacctcatcagccaagtccatgaccaagtcaaccgtgacttcaaaggagcttggattcctcacctcccagctcagcggcttaagaatctcatatactcccagtgacgtcatcaaccgtatctcccttccttcgttccccgggattcagccaatcgtcgcacgtagaatctgcccttttactgggaagaaagcaaacagagcaaacaaagtttcattctctaaccacaagaccaagaagttgcaattcgtcaacttacaatacaagagagtttggtgggaagctggcaaacgttttgtcaaacttcgtttatcaactaaggctttgaagaccattgagaagaacggactcgacgctgttgccaagaaagccggcattgatcttcgcaagaaatagatatgatgatcgcaaagtttattatatacatttcttgcttctccttttgcagtactcgtacatttcctttctagattttggtaagtatcaatggaatctctgagtttgttgtatcagacactgtcaagaaaagactttaaagagaaacgaaacccncctctcaaaaaaaaaaaaaaaaaaaaaaaaaaaaaaagcggccgctctagagatcccaagcttacgtacgcgtgcatgcgacgtcatagatcttctat

SEQ ID NO: 127206 - DNA, 406 bp, Arabidopsis thaliana
gggttcgccttcctccgtgactcaccggatttatcttcctctccaattctggagatatccgtgtgggattcatcgacgggaatcgaaaccagccaattccttggtggaatttgcttcgacgtgtcagagattccgctccgagacccgccggatagtccattagcgccgcaatggtaccgtctcgaaggtggtggagctcacaacagtgatctaatgcttgccacgtggacaggaactcatgctgacgaatcattccccgacgcgtggaaaactgatacagccggaaacgtgtccgcacgagcgaaggtttacatgtcgtcgaagctgtggtatctacgcgctaccgtgatagaagcacaagacttgttaccgcctcagttaacggcgtttaaggaagcgtcatttc

SEQ ID NO: 127207 - DNA, 561 bp, Arabidopsis thaliana
  unsure (1)..(561): unsure at all n locations
atgtggtatcactgcttgcatcataaactctgtgatgaccatgaagcaaggctcagcaaagagagactcaggggactcaaaagatagagggcaagtctcttctacacgtgtacgccaagctcttgcggcgggagatatgaggtacgtatcagagctccttggcagggcacatcgtcttatcttgagagtcagaacccaagatatgccaagtgaaaggatgatctcagtcccgagatcatcaatacttaatttgccaccagggatcggaatttataaggcatgtttgcttctagttggtgatgagtcttcagttccgtgtaccgtagttgttgatacatcaaatatccatgtagaaacagaggaggtacgaccctgtaatttagattggtctcaagaatttcgactcgtgagtgttgagttcggttgagtcaatcttagttcgtataaattcatatttctaaaaaaaaaaacccaaaaaagnnnnnnnnnnnnnnnnnnnnnnnnnnnnnnnnnnnnnnnnnnnnnnnnnnnnnnnnnnnnnnnnnnnnnnnnnnncattcg

SEQ ID NO: 127208 - DNA, 1309 bp, Arabidopsis thaliana
  unsure (1)..(1309): unsure at all n locations
tgannnnnnnnnnnnnnnnnnnnnnnnnnnnnnnnnnnnnnnnnnnnnnnnnnnnnnnnnnnnnnnnnnnnnnnnnnnnnnccacgcgtccgcggacgcgtgggcttttcagagagagaaacaatatttctaatctattacaagtaacatgatcggccaacttatgaacctcaaggccacggagctctgtctcggcctccccggcggcgctgaagcagttgagagtcctgccaaatcggcggtgggaagcaagagaggcttctccgaaaccgttgatctcatgctcaatcttcaatctaacaaagaaggctccgttgatctcaaaaacgtttctgctgttcccaaggagaagactacccttaaagatccttctaagcctcctgctaaagcacaagtggtgggatggccacctgtgaggaactacaggaagaacatgatgactcagcagaagaccagtagtggtgcggaggaggccagcagtgagaaggccgggaactttggtggaggagcagccggagccggcttggtgaaggtctccatggacggtgctccatatctgaggaaagttgacctcaagatgtacaaaagctaccaggatctttctgatgcattggccaaaatgttcagctcctttactatgggaaactatggagcacaaggaatgatagatttcatgaacgagagcaagctaatgaatctgctgaatagctctgagtatgtgccaagctacgaggacaaagatggtgactggatgctcgttggcgatgtcccatgggaaatgtttgtcgagtcttgcaaacgtttgcgcattatgaagggatctgaagcagttggacttgctccgagagcaatggagaagtactgcaagaacagatcttgaattaataataaaaaaaaagaagcatcaatgatcaacaatatgacgggttcttgattttatatgtatttttatgattgtatgtggctatcacctatatatgtgtgttgtaattttaaatacttgatgggtatatagggcagtattttaccagtaagatgtggacaaacttgtaatgtgaccaaaagagaggaaacttcaatatctctgtgtttgtgtcatatttattgcccaacatgtgtctgtcggtttgatgatcaatcacaacttgatatgtgcatacatataaatgtgtgtatgtaggtgtgtgtacatgtacatgtgttttgatccctactctacaacttctcgtgtcttgtgtgtgttgcggccgcgaattcgatatcaagcttatcgataccgtcgacctcgagggggnnnnnnnnnnnntaa

SEQ ID NO: 127209 - DNA, 621 bp, Arabidopsis thaliana
  unsure (1)..(621): unsure at all n locations
nnnnnnnnnnnnnnnnnnnnnnnnnnnnnnnnnnnnnnnnnnnnnnnnnnnnnnnnnnnnnnnnnnnnnnnnnnnnccacgcgtccgcctggattatatcttggttatcccttagtagaaaccacaattggagtgatggtgcaatgctttgactgggaaatcgaaggagataaagtcaacatgcaagaaggttccggattaagatttttcttggatttggctcatccccttaagtgcactcctattcctcgaatcataaatcatgaaccttctaatacgcagattccaaattcgtgagttcaagacttcacttaatttacaaatatataactgtgaaggttcaaggatcgttattacacccctatggtatatacattatttttgcattcgttgatgttgttgaatgcactttccctaaactgttgtatttcattatgttcatattattgttaagttatttatgtaaatcgcatagatatttgggtgaattggtgtactatcatatatagtaaatttacttaaataaaaaaaaaaaaccaaaccgaaagggcgaccgctctagaggatccaagcttacgtacgcgtgcatgcgacgtcaaagtcttgtatagggcaccaaat

SEQ ID NO: 127210 - DNA, 437 bp, Arabidopsis thaliana
aaaactctgactaacattcttcttcacttatctcccatctttctctcttcaataataataaacatggatctcaccgacgtaatcatattcttgttcgctctctatttcatcaacctatggtggcgccggtacttttccgccggaagcagccagtgtagcttgaacattccaccgggaccaaaaggatggccactagtcggaaacctactccaagtcatattccaacgtcgccatttcgtcttcttaatgcgtgacctacgtaaaaagtatggtccaatattcaccatgcagatgggacaacgtacgatgattatcatcacggacgaaaaactcatccacgaggcactagtccaacgcggccctacattcgcttcccggcctccggactcgccgatccggctcatgtttagtgttgggaaatgcgctataaactcggc

SEQ ID NO: 127211 - DNA, 534 bp, Arabidopsis thaliana
  unsure (1)..(534): unsure at all n locations
nnnnnnnnnnnnnnnnnnnnnnnnnnnnnnnnnnnnnnnnnnnnnnnnnnnnnnnnnnnnnnnnnnnnnccacgcgtccggaaaaggatagagacgacaaaactccattgaagaacttattagagaagaagaacaacaacaaggaagataacgaaagtcactaaaatctttcaagacccatgaactctcaaatcactcttttcttcttcttcttctcaatcctctccctctcccaaatctcaaattcatcatcactactaaaaccacacccatgtccaattttacccctcccatcctcccaacagctccaatggcaactcggatccatggccatgttcctccattttggacccaacactttcaccgactccgaatggggcaccggaaaagctaacccatccattttcaacccgacccatctcaacgcaagtcaatgggtccaaatcgctaaagactcaggcttttcccgcgttatcctcacagctaagcaccatgatggattctgtctctggcctagcgaatacactgattact

SEQ ID NO: 127212 - DNA, 455 bp, Arabidopsis thaliana
atcgactctaatcataatggaagtgatacctttcctgggtttggctgtcggtgttgataatatgtgcatcctggttcatgctgtcaagaggcaagagcaagagctgcctttggaaagaagaattagcaatgcccttatggaagttggaccatcgattactctagcaagtttagccgagattttagctttcgctgttggtgctttcattaaaatgccagctgttcgagtattctccatgtttgctgcattggctgtccttttggactttctttctccagattaccgcgtttgtagctttgatagtttttgactttccgacggaccgggggataagcgagttgattgcttcccgtgtattaagacatcaaaatcatctattagtgctgaaaaaggggttggtcaaagaaaagctggccttttgactcgatatatgaaggaagtccatgcacctgttc

SEQ ID NO: 127213 - DNA, 990 bp, Arabidopsis thaliana
  unsure (1)..(990): unsure at all n locations
cgnnnnnnnnnnnnnnnnnnnnnnnnnnnnnnnnnnnnnnnnnnnnnnnnnnnnctccatcttctacttcccacgcctccggaaaaatcaaatgaagaagttagcgagaaaatggcggagaactcgtcgtgacgaagatgatgataagttcgtccttcctacttctgaagacgtcgattctcggcctattgatacgcaagagcaggaggagtacgttcggtatcttgaggaagctcatgctcagcaaagtcttcaatggaggagcgtgtttgtggttcttctgatctgctttggagctttcctcttctactccattttccagcagttcatgtcaccatgggaactgcggtatcatgcctactttatggaagatctcaagtcatggatggtcatttcagctgagtggatcgctatcatggcttgctccctctccattgtcgggctacgagataagaagaatgatcatagacgatggttctggtactcttgtgttgttggatctgcattgaccatcttttggctttattacttgctgaggcttccgaaattccggtgggatgctatctggcttccgtttgggccgctttgtggagctggaatttgtctatacgtggaccatcttctagaggagtcatctgaggaagtgaaaaaactgaggaactatatgtatgcatataaagcacggtagagagataatagctactttcaaacctcgtcagagtgaatttgtgatagcaagagtgcaagttttgactctattatcccctaaagaacattcttctgttgttgtaaatagatacgaaactctgaagttcgttttgtttaaaaactcatgattgactcgaactagattccagttcatacatgtaatactcttgatttattcaagcaattcacttgagagaaaaaaaaaaaaaaagnnnnnnnnnnnnnnnnnnnnnnnnnnnnnnnnnnnnnnnnnnnnnnnnnnnnnnnnnnnnnnnnnncacc

SEQ ID NO: 127214 - DNA, 484 bp, Arabidopsis thaliana
  unsure (1)..(484): unsure at all n locations
nnnnnnnnnnnnnnnnnnnnnnnnnnnnnnnnnnnnnnnnnnnnnnnnnnnnnnnnnnnnnnnnnnnnnnnnncccttttcctctgttcttcactttaagaaaattacaaacttttatcttctattggacgaatctttgatctggttttaattaatcacacgcttactttaggatttttttacctgaattcgaatatatacttttgattttcatcttccgtagtccgtaccgtagaattgaggagcttcatggagaacgagctgtttatgaatgcaggagtttcgcatccgccggtgatgacgtcaccgtcttcttcgtcggcgatgcttaagtgggtttcaatggagactcagccagtggatccaagtctcagtcgcaatctgttttgggaaaagtcaacggaacagagcatttttgattcggctctgagctcactcgtctcttctcctacgccgtcaaattcaaacttttcggttggcggag

SEQ ID NO: 127215 - DNA, 479 bp, Arabidopsis thaliana
  unsure (1)..(479): unsure at all n locations
nnnnnnnnnnnnnnnnnnnnnnnnnnnnnnnnnnnnnnnnnnnnnnnnnnnnnnnnnnnnnnnnnnnnnnnnnnnnnccacgcgtccgcggacgcgtgggcggacgcgtgggcggacgcgtgggcggacgcgtgggttctaggtacctcaaattagcgacacattatggcatctccaggggaaaaatatgttaccagcgatatggttcatttttaaccgtagaggatgtgatgcagctgtacagtatgttgaaaattttcagtttttagatgattgcgagaagagtgaggttgagttggccttgaagaagtttcgcgttctttatccagatgcagtgagagagagtgcagagaaaggactgcttaggggaattgctgctcatcatgcaggttgtctacctctttggaaatctttcattgaggaactttttcagcgaggacttgttaaggttgtctttgctactgagacacttgctgctg

SEQ ID NO: 127216 - DNA, 657 bp, Arabidopsis thaliana
tacggtgcgagaagacgacagaaggggagaacaaaatactcatacacacacacacttggatttaaagaaaaaaaggagttttccttcttcttttgggtgtgtcaagtttctgttcttctttttctcgtgcttccatcacgagatatctcacaaggctctcgcgactcaagaaaggtaaagataaagaaagaagaagcaaagattccataaatggacttgaaaagcaacaaccaccagcaacagcaacaagtacttgatggctcggacatagttgagctggtggaaaacgagaaagtgttcgacaagtttgtggaacaaaagtttcaacagttagaccaagatgaagatggtaagctctccgtgactgagttacaacccgccgttgctgatatcggcgctgctcttggtttgcctgctcaaggaacttctcctgattccgatcacatctactccgaggtaatttccttttcttctttcttaaaaccttttatattcgtgatctatggtccagtccgactaatttgcatatacatatgttagcattttaatttcttaatcacttttcctgtattattgatctttcaattgttggttatcatgtgatctttgattttttccgattaccgtatattttaatgctagtaagaaatgttttcc

SEQ ID NO: 127217 - DNA, 750 bp, Arabidopsis thaliana
  unsure (1)..(750): unsure at all n locations
ggtcgagcacgcgtccgattaaaagctctctctctctatctcccacgatttcctttttccgccggaagaagaagcaaaaaaaaaagaaatcgaatctctctttcaagtgttcgatttaaagcaaaagtgtaattataatcggaagcgagatcttgagaaatggtgggatgacggcggagggagatggcgaggggaggaggagaatggaccggagggatcgccggaaccggagttctctctttcaaaagaatcactctacttgtttgctttttcaacattctcattgctctctttgttcttcgctttctctatgcttcttctctccacatctattccaataacgataatgttgttaagtacacagctgatgagattaggaaaatggaggaatctattcggattcgaagatcgaaggaacctactctgattcttcaattggtgaagaagctcaagcatgaggtttccactgcagaatctagtactgaactatctcctaatgttaaacacaaactagttgatgagatcctccagcgtttgaaaagctttgaggacaaatctaatgttactcagcttagagaagttntaaaacgtggcgcaatgagaagctggaggaagctaaagagctaaattcaagggcaaaatggggtaaattccncccttatagtggnggaagcagggtttcttttaagngcctttngagtttgagtgggnttttncctntnttnaggnaatccggtttttggggtancc

SEQ ID NO: 127218 - DNA, 531 bp, Arabidopsis thaliana
ttattccaattcattttagggaaggctggtcccccggcaggacccggcccggatttccggggtcgacccaggcgtccgcccaggcgtccgttaaccaggagaaatttactttttttaaaatatacattcaaacttaaaacatgcaacttcaaataaagacactttctaatgagaaatttacaattgaatgtgaattaactgattcggtaagatcaataaaagaaaaaatcgcttcgaaagatcttaaagataaatacgaagctgatgcggttaaactaattttttcgggaaaaattctcgaagattcaaaaacacttgaatcttattcgataaaagaagatagttttctcgttgttgttaaacaaacaccgccaaaagcatcatcagcagcagcaactacaccgagttcatcagctgcatcaactaatgttcaacaaccaacaccagctgctgcttcagctagcccagctccagctcaacaacaacaacaacaacagcaaccagctcaagcgagtggtactgcagaaactg

SEQ ID NO: 127219 - DNA, 504 bp, Arabidopsis thaliana
  unsure (1)..(504): unsure at all n locations
ctctatacgactcatatatggaagctggacgcctgcagtaccggtccggattcccggtcgaccacgcgtncggtatatttcctttggggtgtcttccagggaagaaaagagactaacccacaaaagaacacatctttgcctacttcaaatgttttgccgcgtgacagagaccccaaggagctgtgtcaaacgagttctccttccaagcatttggagaaagggtcttctctacgtgagagctccagcaacggaattgaaacacggaatgggacagatgcacgtagtcatgagaatccaaataacagggaatcctctattgagcgatcaccgagcaaaaaggaggatattgctcttaaagtggaagaagcaggtgtgaatcacatcccccctcaagttactggatcaaattctggagatagtctagtgaggaaggttcagaaagtcgaggaacaagaattaggtggtaggaaggatctgccattgacggtcatgggctcagggatc

SEQ ID NO: 127220 - DNA, 739 bp, Arabidopsis thaliana
tgtttgaaacaagtctaatcctcctcccggagaattcacgaacttagaggagattcttccaaaagggtttttagatcggacggcggagatagggaagatcataagctgggcaccacaagtagatgtgttgaatagtcctgctataggagcgttcgtgacacattgtggatggaactcaattctcgagagtctttggttcggtgttccgatggcggcgtggcctatctatgctgagcaacagtttaacgcgtttcatatggtggatgagcttggtttagcggcggaggtaaagaaggagtaccgtagagattttctggtggaggagccggagattgtgacggctgatgagatagagagagggatcaagtgtgcgatggagcaggatagcaagatgaggaagagggtgatggagatgaaggataagctccacgtggcgttggtggacggtggatcttcgaactgtgctctaaagaagtttgttcaagacgtggtcgataatgttccataatccataggaacgtgctcgataatgtaccataggaacatggttgggtgttttgtgatagaataatgggaatcttttaaaaggactatgatgacatgattgaaaacaaccagtctgaaagtataataatagttacgtgtaaaaaaaaaaaaaaaagaaagggcggccgccggctagtgagcttgtcgacccgggaattaatccggaccgggacctgcaggcgttcccagcttc

SEQ ID NO: 127221 - DNA, 528 bp, Arabidopsis thaliana
gatattacatgggactgacggttgccccggcgatagtatcgccggctactatacgactcatatagggaaagctggtacgcctgcaggtaccggtccggaattcccgggtcgacccaggcgtccggaataatcctttctctgtatttccttcacctccggctaaatctccggcgaccgcgtaacttgttctccggtctgaatagtgaataaacacacacacggagccaaatccaggagaaattaggtttgaattagagagattaggagaatacaaattggtttggtggttttcaagtatgctaccaagtgggttgaaagaaacccaactccgtgagagcaacaacaaccaaaaagtccatcctcaaccaatggaagagtctatcaatcagaatcctgaagctatggaagcacttatctccaatctcttcggaaacatctcgtctttgaaatctgcttatatcgagcttcaaagtgctcatactccttacgatcccgagaagattcaggcagcggacaaagttgtcattt

SEQ ID NO: 127222 - DNA, 520 bp, Arabidopsis thaliana
taataatactctctcgacggcgtcgtttcgtgctggcttcacttgaattattatttttctggctggactcatattttctccggcaaggaaaaaagaaaaacatcactttctgcaagcggatgaaaaattcaaagattgagtcaccaccaccatagtaatatacgcgtatgagttcccagatgtgatctccatccaacgttgtatttctttcgttttggttatcttcttcggttccatcgaattccaacaattcccatcgaggaatttggttacgaatcttttgatctgactaaacctagggagcttgatcacaaggagactgaaaccaatgctaggaggagtctcttcaggttagtagaatgagtagaaaaagaacggaaaatggcagtgaatcaggaccagccacttctcatgttcctgtggatagattcgggtttctcaagcaagaacatgccaattcgcctgagcgttttagcaagtctaaaactacatcatccactgatcatgacagagaggagag

SEQ ID NO: 127223 - DNA, 1450 bp, Arabidopsis thaliana
  unsure (1)..(1450): unsure at all n locations
agctgttcctcgaggcagttacgaatatgaagtttgatgaggagcccaactatgccaagcttatctcgatttttgatactcttatcgagccatgtgctatatctagaccaattagaattgatggggctctaaaggttggccaaaagcgaggaagattgcttatcaatttggaagaggatgaacagccaaggaagaaaattagaatcggcagtcctgccacacagtggatttcagtctataactgcccccccgtccgatgaaacagagatatcattacaacgttgcagacttaagacttgcacagcatgttgagaaaggtaatgaggatggccttttcataagctgtgtagcatcatcagctaatctctgggccatcatcatggatgctgggactggtttcagttctcaagtttatgaactgtcctcagtcttcctgcacaaggactggatcatggaacaatgggaaaagaactactatatcagttccatagctggtgcaaataatggaagctcgttggttgttatggctaaaggaactccttatacccagcaatcttacaaagtcagcgactcatttccattcaagtggataaataaaaagtggaaagaaggttttcatgtaacatccatgaccaccgctgggagtcgttggggtgtagtaatgtccaggaactcaggctactctgaacaggtggtggagcttgacttcttgtacccaagtgaaggaatacatcgaaggtgggaaagtggatacaggataacatcaatggctgcaacagctgatcaagcagctcttatattgagtatacctaaacgaaaaataaccgatgaaacccaagagactctccggacttctgccttcccaagtacccatgtcaaggagaaatgggcgaaaaatctgtacattgcatcaatatgctatggtcggacagtttgctgatgaaacatggagtatactgtttcaacctctctcactctctctctagggttttagggacgatctctctctagaagcctgacaacgtgtagccttcggtttcagtacaatccaaaggtaaaccttaaccaggagccaacctatgtgactgtgtaatgaaatgaaatttgtctctatgtatgtagtaagtccaagataaaaggaaaaaaaaaaaaaaaggtagaagagccgaaatcattattcctagaaatgatgaagagctgccccaagattatgcagtttttggcttatttggctttgtccctgatttgagtccagaatcaggaggaagccccatgtttgttataatgaccatataattttaagaaggctttcttctnnnnnnnnnnnnnnnnnnnnnnnnnnnnnnnnnnnnnnnnnnnnnnnnnnnnnnnnnnnnnnnnnnnnnnnnnnnnnnnnnnnnnnnnnnnnnnnnnnnnnnnnnnnnnnnnnnnnnnnnnnnnnnnnnnnnnn

SEQ ID NO: 127224 - DNA, 514 bp, Arabidopsis thaliana
gctctatacgactcatatagggaagctggtacgcctgcaggtaccgggtcccggaattccggggtcgaccacgcgtccgatgatgaagttgatgaggttgttgttgattagagtttaaaccaaataaaccctaaccaaaaataaataagatctgaggttttttctcgagaagtaagagagatctggaatttggcgacgatgagttacggatgggcgatatacgaaggcacggtggtgatagcttcactaagtctcttaggatgggcaggtttatggtttcttaatcggagattatacaaagagtatgaagagaaacgagctttggttcaaatcattttcagtgtcgtcttcgctttctcttgtaatctattgcagctcgttttgttcgagatcatacctgttctctctagagaggcaaggatgataaactggaaggtggatcttttttgtttgatacttcttctggttttcatgttgccgtattaccattgctatttgatgcttcgtaatagtg

SEQ ID NO: 127225 - DNA, 401 bp, Arabidopsis thaliana
tggatttagcgagtcacatattcgaggaaatgcgacagagaaacgttgtctcttggagttctatgatcgtgggttacgcagctaacgggaatacattagaggctttagaatgctttcgtcagatgagagaattcggtgtcagaccaaacaagatcacgttcgttggagttctcagtgcttgcgtccatggaggtcttgtggaggaaggaaaaacatattttgcgatgatgaagtcagagttcgagctagaaccgggattatcgcattacggatgcatagttgatctattgagccgtgacgggcagcttaaggaggcaaagaaagttgttgaggagatgccgatgaagcctaacgtgatggtttggggttgtttgatgggaaggtgtgagaagtttggggat

SEQ ID NO: 127226 - DNA, 769 bp, Arabidopsis thaliana
gctctatacgactcactatatgggaggctgggccgcctgcaggcaccggcccggatttcccgggtcgacccacgcgtccgggggagcccatattggatggcacctgaggtgataaagaattcaaatggcagtaaccttgcggtcgacatatggagtcttggatgtactgttttagaaatggctacaacgaaacctccatggagccagtatgaaggggttcctgctatgttcaagattggaaacagcaaggagcttccagatatccctgatcatttatctgaagaggggaaggattttgtaagaaaatgcctacaaagaaaccccgcaaatcgtcctacagctgctcagcttttggatcatgcttttgtaagaaatgtgatgccgatggaaaggcctattgtgagtggcgagcctgcagaagccatgaatgtagcttcgagcaccatgagatcactggacattggacatgcaaggagtcttccgtgcttagactcggaagatgcaaccaattaccagcagaaaggattaaaacatggctcgggattcagtatatcccaatctcctaggaacatgtcatgcccgatttcaccagtcggtagtccaatctttcactcgcattcaccacacattagcggaagaagatctccattcccaatatctagtccccacgctctctctggttcatcaacacctttaactgtgtgtggtggagccatcccgttccatcaccaaagacaaactatcagttaactttttgcttgaaggcata

SEQ ID NO: 127227 - DNA, 713 bp, Arabidopsis thaliana
tacgccgagacctaatacgacttacttagggaacgctggtacgcctgcaggtaccggtccggaattcccgggtggagccacgcgtccgcccacgcgttcgcggacgcgtgggcagaaaggtgtaatgcttgactgggtgaagaagctgcaccaagaagggaaactaaagcagttaatagacaaagatctaaatgacaagttcgatagagtagaactcgaagaaatcgttcaagttgcgctactctgcactcaattcaatccatctcatcgaccgaaaatgtcagaagttatgaagatgcttgaaggtgacggtttggctgagagatgggaagcgacgcagaacggtactggtgagcatcagccaccgccattgccaccggggatggtgagttcttcgccgcgtgtgaggtattactcggattatattcaggaatcgtctcttgtagtagaagccattgagctctcgggtcctcgatgattatgactcactgtttttaaaaaatttcttttcctgggtttgttttttatttgtcgttttataatgttgatatagatgtcaaggtgagtgtgtaatttttatgtaaagaaaaaatatgaaatgcaaaagaaaatgttgatttaaaaaaaaaaaaaaaaaagggcggccgctctagaggatcccagcttacggacgcgtgcctgccacgtcataacttctttctatagtgtgcccc

SEQ ID NO: 127228 - DNA, 440 bp, Arabidopsis thaliana
atgtgctccaagcaaaaacatgtgtaagatatacttgcatgtgcagacaaccaacgaagacgcaatcaagttctacaagaagttcggctttgagatcacagataccatacaaaactattacatcaacattgagccaagagattgctacgttgtcagcaagtcctttgctcaatctgaagccaacaaatgatgaaaaataccaaacttggggaagccattcctccccagtttctttgttgcattcagttcaagatctattaatgttatgatgatccttcggtttccgagttttgcttgttttgttgaccttaatttttcttactgattctaaatttataaattcctggttatatacttgcatgatttctctaatgtcctcttggctttggacattttcgtttggaaaagtttttaactttgcaactcaaagctttactacc

SEQ ID NO: 127229 - DNA, 695 bp, Arabidopsis thaliana
tcactataccgatagctggttcgcctgcaggtaccggtccggaattcccgggtcgacccacgcgtccgaagaaaaggaactgcctgtatgttgcttgaagagtatcggactgctaaaacagctcttgaaaagggtgcctctatcacgccgagtgaatccaaatttaagaagttgatagatgaatgcaattttctaatcacagaagaagagaaagatttggttcaaccggtgccttcgactttgccttcaagtgtgacagcaccaccagtatctgaacttgatgtcacccctacagccaagtacaggcacgagtactaccaaaagccagaggaagttgtggtaactgtttttgcaaaaggaatacccaagcagaatgttaacatcgactttggtgaacaaattctgagtgttgtgattgaggttcctggagaggatgcgtattatctccaaccgagattgtttggaaagataataccagataagtgcaaatatgaagtattgtcgaccaaaattgagatctgtcttgcaaaaagcccgatattaatcacatggggcctttccttcggaacaccgggaaaaagggcccagccggtttttggcccaaaggccctaaatggtccttcaatcaagaggggtttttcaccaagaagggcccaagcctttaattcccaattcttttcttaaaaaaaaaaggt

SEQ ID NO: 127230 - DNA, 523 bp, Arabidopsis thaliana
agctctcatacgactcaccttagggaaaggcttggtcgccttggcaggtccctggccctggatttccacgggtcgccccaccctgtccggaaaagggggcctctttcacgccgagggaatccaaatttaagaggttgttagatgaatgcaattttctattcacagaagaagagaaagatttggttcacccggtgccttcgactttgccttcaagtgtgacagcaccaccagtatctgatcttgatgtcacccctacagccaagtccaggcacgagtactaccataagccagaggaagctgtggtatctgtctttgcaaaagggatacccaagcagaatgttaacatcgactttggtgaacagattctgagtgttgtgattgaggttcctggagaggatgcgtattatctccaaccgagattgtttggaaagataatacccagatagtgcaaatatgaagtattggcgaccaaaattgagatctgtcttgcaaaagccgatataatcacatgggcctccctcga

SEQ ID NO: 127231 - DNA, 412 bp, Arabidopsis thaliana
tggatacaaagagttaggtgtggagaaatctggtaaaaattctgagggtgactcttggtgggaaacttggcaagaagtccttcatcaagatgagtggagtaatctagcaaggattgaaaggagtgcacaaaagcaagcaaaatcaggaactgaaaatgctggttggtacgagaaatggtgggagaagtacgatgctcaagggtggacacagaaaggagcacataagtatggtagacttaatgagcagccatggtgggagaagtggggggagcattatgatggaagaggatctgttctcaaatggacagacaactgggctgagacagagttggggaccaaatggggagacaagtgggaagagaaatttttcagtgggattggttcacgtcagggggagacatggcatgtatca

SEQ ID NO: 127232 - DNA, 744 bp, Arabidopsis thaliana
  unsure (1)..(744): unsure at all n locations
anaaaggggggnttcccttcncngggnaccccccttttttttggccncttttnnagntttcagggtccccaatttcgggggccatacccccaattgaaatggccaaccccccgcggtacagctccctaggaggtccaggtggccggtttaggaacccttatgatctcgggtccagaagaaactgctcggacttcttagtaaaaggttataacgaagatattgagtgtcatgaagaagacgcaacacagagaccagagggtattagcatgatgcagatgcagcggaatccaaatcttcaaaatggcaatggccatgttgctatcgatgttaacccgacacataattcacagtcagcacatgttcattctgccaactgcagccatagccataatagtaagtcaaagagtgacaatgttcctttgggtttgggacttggtcttagccgcaacccaacccgacctgttgtatctccataatatggcccgtgtcccaaatgtgcatttgtgttgtaagaaacacgttttctctcctcgagtcattgattacatcattatccgtttcatgtgaagatagtaatactcccttgttttcaattttctatgcaaaaattaaatgtcatgtttcttaaaaaaaaaaaaaaaaaaggaaaaaaaaagggcggccgctctagaggatccaagcttacgtacgcgtgcatgcgtgttcatagnngtcctaaannnnnnnnnnnnnnnnnnnntagct

SEQ ID NO: 127233 - DNA, 1032 bp, Arabidopsis thaliana
taggtgcactatagaagagctatgacgtcgcatgcacgcgtacgtaagctcggaattcggctcgagaggggttagcccagtcttgtcagtaatcatcaaagttgggactcgctccagttctttggatcatgatcctgctgcttctgctcgtatatacgaattcggttgttttggcatccaatctgccaaagttaacgactgggattggtgcgcttgcatggctgggattcattcttgcaactgcaggattatttttgttctaccgctgtagcaggaaggatccaggttacatcagaatgaatatccatgatccgcaaaccatgaaagatgatgaaccactcttaaaaatagagctaaacaatcctgctttgcttgctgggaattggacacagctctgtgcaacatgcaagattatcagacctcttcgagctaagcactgttccacctgtgatcgttgtgtagagcaatttgatcaccattgtccttgggtatcaaattgtggtggaaaaaaaaacaagtgggaattttttctttttcttctacttgaagttctagcgatgctgataactggtggcgtcactcttgcaagagtcttgagtgacccttcagctccatcttcttttggagcatggatgagccatgtcgctagtaatcatgtgggtgctttatcctttctgctagtggaattctgcctcttcttttctgtcgccgtcttaacagtcatacaagcgtcacaaatatcaagggacataaccacaaatgaaatggccaacgccctgcggtacaagctacctaagaggtccaggtggtcggtttaggaatccttatgatctcgggtgcagaaggaaacttgctcggacttcttagtaaaaggttataacggaggtaattgagtgtcatgaagaagacgcaacacagagaccagagggtattagcatgatgcagatgcagcggaatccaaatctttaaaaaggcaatggccatgttgctatcgatgttaacccgacacataattcacagtcagcacatgtt

SEQ ID NO: 127234 - DNA, 614 bp, Arabidopsis thaliana
  unsure (1)..(614): unsure at all n locations
gctaaagagggttcggttctttaaacccctccatctctctctccttcattacactgtagagtgttaaagtaccactctatagccatggcttcctcttcttcatctctagctttctctctttctcttcttctagctttaatcctctgtttctcacccacccaatcctacaaaaccatcggcaaaggctaccgtttggtctccatcgaagaatctcccgacggtggtttcattggttatctccaagtcaaacaaaagaacaaaatctacggctctgatatcaccactcttcgtctcttcgtcaagcacgaaactgattcacgtcttcgtgttcacatcactgacgcgaaacaacaacgatgggaagttccatacaatctcctcccacgagaacaaccaccacaagtcggaaaagtcatcgggaaatcaagaaaatctccaatcacagttcaaggaatctccgggtcggaattatcttcagtnnnncaaanggttccatttaattttngcggnnaangnnggtntaacccgggaaaacctttaaanaaaaagcctttggggntaangggnaaaccggggggttaatttttttccaaanggttcccctggggtngggc

SEQ ID NO: 127235 - DNA, 451 bp, Arabidopsis thaliana
ggaaaaaatctctctttcgaataaaaaaaaaactccagaatccaaaaatgggtcgtgtccgaaaatcagatttcggttccattgttcttgttctgtgttgtgtcctaaatagcttactctgtaatggaggcatcaccagtagatatgtcagaaaattagaagcaaccgttgatatgcctcttgatagcgatgtttttcgtgttccttgtggctacaatgctcctcaacaggtgcatataacacaaggagatgtagaaggaaaggcagtgatagtatcatgggtgacacaagaagcaaaaggatctaacaaagtcatttactggaaagagaatagcaccaaaaagcacaaagctcatggcaaaaccaatacttacaagttctacaattatacttctggttttatccatcattgccctatcagaaacttagagtatgacaccaagtactatta

SEQ ID NO: 127236 - DNA, 528 bp, Arabidopsis thaliana
  unsure (1)..(528): unsure at all n locations
cccacgcgtccgcccacgcgtccggaagacattgtgaccatcattcatgagtatttcaactctgatgacataccagaactcatacgcagtcttgaggatttaggagcacccgagtacaacccaatttttctaaagaagctgataacacttgctttggacaggaagaatcacgagaaagaaatggcatctgttcttctctcatctcttcacatcgagatgttcaccacagaagatgttgcagatggtttcgtcatgctcctggagtctgcagaagatacagctcttgacattctggatgcgtccaacgaacttgctctgttcttagctagagctgtgatcgatgatgttttagcaccttttaacctggaagagatcagtagcaaactacgccctaactcaagcggaactgaaaccgtgaagatggctaggtcactcatctttgctcganatgcaggngagaggcttctaagatgcnggggaggtgggagcggttgggcagtggaagatgcaaaggtcaagatatcaaat

SEQ ID NO: 127237 - DNA, 440 bp, Arabidopsis thaliana
cccacgcgtccgctttgattctcgttccaataatacttcctccaccatctctcctcctctcgttagatctaagaaacagagaaaacaagagagatagaatgagaaagggagttctaaatcctgacagagatcgtcagatagtggcacatgagttgcaggaaactgggtttagtccagaaacagagaaagtcaagaacaagaattttgaagaagatgaagaggaagaagatgaatctgtggagaagatatttgagagtagagaagtaccttcttggaagaagcagttgacggtgagggcttttgtggtgagctttatgcgaagcatcttgtttagtttcattgttatgaagcttaacctcacaacgggaatcatcccttcgctcaatgtctctgctggtcttttgggtttcttctttgtcaagacatggactaagatgctt

SEQ ID NO: 127238 - DNA, 495 bp, Arabidopsis thaliana
ctctacgacttactatagggaacagctggtacgcctgcaggtaccggtccggaattcccgggtcgacccacgcgtccgaacgaagcatagtggcaaacccgtaaatacataataccaatgacgaccaatgattgcggaaaccacggcggcggcggaggaggaggaaccgccagtcgaatctgcggagtaatcatcggcttcatcatcatcggcttgatgaccatattcctcgtgtggataatcctccaaccgacataaccaagattcatcctccatgacgccaccgtctacgcctttaatctctcgcagcctaacctcctcacctcaaactttcagatcacgatcgcttcacgtaaccgaaactcaagaatcggaatctactacgaccgccttcacgtctacgctacttaccggaaccaacacatcactctacctacagcaatccctccgacgtaccagggccataaagaagacaacgtttggtctcctttcgtt

SEQ ID NO: 127239 - DNA, 691 bp, Arabidopsis thaliana
gatgagggaactccagaacgaacatcacatgaaggcttttggtttgcaggtttcagctgctggttatgaccgccaaggtgtggctgaccacgcaagtaacctggctaccaaaattaggaataatctcaccaattctatgaaggcacttggtgttgacatattgacagggtttggcgctgttctgggcccacaaaaggttaaatatggtgacaatattatcaccggaaaagatataatcatcgcaactggatctgtaccgttcgtcccgaaaggaattgaagttgatggaaagactgttatcacaagtgatcatgcattgaaattggagtccgttcctgactggattgcgatagtaggaagtggttatatcggtcttgagttcagtgatgtttacacggcccttggaagtgaggtaacttttattgaagcactggatcagctaatgcctggatttgatcctgagatcagtaagctagctcagagggttttgataaatccaagaaagattgactatcatactggagtctttgcaagcaaaattactccggcaagggatgggaaaccagttctgattgagcttattgatgccaaaaccaaagaacctaaggattctttggaggtagatgcttgctcttattgctactgggagagctccattcaccaatggactttgcttgggaaatgttattgt

SEQ ID NO: 127240 - DNA, 854 bp, Arabidopsis thaliana
  unsure (1)..(854): unsure at all n locations
ctctatacgactcactatanggaagctggtcgcctgcaggtccggcccggaattcccgggtcgacccacgcgtccgagatgatgagacagagagctgcagaagtcgctggaacctcgggttgattaatttttgtaaatactaatttcatttaggatctaagcagaagtggaaatgtaatcttcttccgaaagttaagaagataaaagaaactggtgtttatgatctccacttgaagaaggtgaagaaaaagtgaataacagcagctagtgaagacatgaaacagccatataacgatttaatttagatggattcctatttaacagtcgcaagtcgtggagtgatgatgatgaataacttgagtgacttgaagagtttctcagcttaagtgccaattgaagcagaagaatcgtcgtagatgctaacttatgctgtgtgtaaggtcgcgaaaaggaagaaatgagattccagactcttcgattagttcagtggcttgatctggctggtgattctttgactatacatatattactctgtgactgattactgtcttctacctctccgtcttttttttgtagtctggtacaatttgtaaaatagcttatatccctttgggggatgtggcaggaatgtaatatatatacatataaatagataacttgctagataagtaagaaagatgaagtgtgtctctttaaggatgtttccttcgcttacatttttgggcgaacttgtattaacattttagtatcgtttcaaaaaaaaaaaaaaaaaagnnnnnnnnnnnnnnnnnnnnnnnnnnnnnnnnnnnnnnnnnnnnnnnnnnnnnnnnnnnnnnnnnnnnnnnnnnnnnnnn

SEQ ID NO: 127241 - DNA, 632 bp, Arabidopsis thaliana
  unsure (1)..(632): unsure at all n locations
atctgaaacaaaaatggtgaatcaaagaaagctacaagtagtagtaagaggaaaaggagaattatcctctcattacaaccaaagtagttgagtatttgcagccagtaatgtgtcgagagcttctctgcaaatttccagataactctgcttttggattcgactactcacagagctctctttggtctcctctcttgcctcgaaattacgccagtccttcagatctagactccgacagttgcgtttgtcggaatcttaagctaggggagtttcaagtaggcaagaagaagaagatgaagatgatgtcaatgaagaagaacaagaagaagagtaaattactgaaactagacataccttcaatgaagaatgatgattcttctcctaaaattggctgttttcctcttcctaccaagggatggaatggtgtgttaaaggcagcttcaaaacatttcaagaaatcgaaaaagaaganagantcattcgctgatgccaagcttctcgacttcaaatactaagattatagcaacttcaattgcttttcattgtantcaanaattactagacctttgatgaattgtgaagttgagctgtttctattatggtcatcatgtaatcatttggagtgtttgatcaaa

SEQ ID NO: 127242 - DNA, 500 bp, Arabidopsis thaliana
  unsure (1)..(500): unsure at all n locations
tgannnnnnnnnnnnnnnnnnnnnnnnnnnnnnnnnnnnnnnnnnnnnnnnnnnnnnnnnnnnnnnnnnnnnnnnnnnnnnccacgcgtccggtgcaagtcactcttcaaggatctgaagtttttcttgagccgtgaggttccaagagagtccctgcaattggtgattactgcttttggtgggatggtgtcttgggaaggagaaggtgcacctttcttggaggatgatgagagtattacacatcatatcatcgataagccaagcgctggccatttgtacctttctagggtatatgtgcaaccacagtggatctatgactgtgtgaatgctcgcataatcttgccaactgaaaagtacttggtcggaagaattccaccgccacacttgtcaccatttgtggacaatgaagcagaaggatacgttcctgattatgccgaaaccatcaaaagactacaggcagcagcaagaaacgaagtgcttccattgccaggtgttgggaa

SEQ ID NO: 127243 - DNA, 818 bp, Arabidopsis thaliana
  unsure (1)..(818): unsure at all n locations
gaattgcactccccgcnnnnnnnnnnnnnnnnnnnnnnnnnnnnnnnnnnnntgccgtaccggtctcgaattcccgggtcgacccacgcgtccgcactatcaaatgaaagtctgaagacaaattcttccattagaagaagaagatggctcttctctgcttcaattctctcccttctctctcttctctttcttcttcttcttcctcgcgccttcttcaatctccgtctttcgcttctccagttttgagccttaaacccaacgctgtcgagtccaagaacagagtctctctcagtgcttacagcttgaactctagccatggaagaattgtggtgaaggcggctgcttctggcgtggacggggctgagcctgagagcaaggaggaaccaaagactgttgttgctgctgttccagtggataaactaccgttggaatcgaaagaagctaaagagaaactgctcttggaattgaggctgaagatgaagctggccaaaaagattaggctacgcaggaaacgtctggttcgtaagcgtaagatgaggaagaagggtcgatggccaccttccaagatgaagaaaaacaagaatgtctaagtgactcaactgtttgctgcttttcgtattcgttttttggaatggtctttttggtgttcaaagaccattaatgtacttcaaatgccacccattggtttggaattaactttcaaagctgagttcctttaaagaaaaaaaaaaaaaaaaaagggcgggccgctctagaggaaccaagccttcctaccccttgcctggcgacggcaatagctctttcttttgggggccccc

SEQ ID NO: 127244 - DNA, 432 bp, Arabidopsis thaliana
accacgcgatccggtaaaaaatgtcgttgtgtttggttatagcttgtatggtaacatcatggatcttcttacaccgatggggacaaagaaacaagagtggtccaaagacttggcctttggttggagcagcgatcgaacagttaactaattttgatcgaatgcatgattggctcgttgagtatctttataactcaagaacagtagtggttccaatgccattcactacttatacatacatagctgatcccatcaacgttgaatatgtcctgaaaacaaacttctccaattaccccaagggagagacttatcattcttatatggaagtattgttgggagatgggattttcaattctgatggagagctttggaggaaacagagaaaaaccgcgagtttcgaatttgcttccaagaatcttagagattttagtactg

SEQ ID NO: 127245 - DNA, 373 bp, Arabidopsis thaliana
ctaactaagacatttaccttgcacttttgatctgtgttctcagtagattattcgtaccaccatggtcggcggggaagttaaaattcttcgcgggtacgaactccgtctcatccggtgcaccgtctctttgccactatcagatcctcctctcgatgaatcccaacccggaacccatccacacgactctcttataatgtcccttttgtcttcaatcgacgctgggaactatcttgaagctttagcctccgaagctactaatctaatacgcggagagtacgagttcgacccggttgattccgccgagcgagtttactccgagcttctcaacaaagtcgaatcgttcgtgttgaacgattcttcggatgaaatcgat

SEQ ID NO: 127246 - DNA, 656 bp, Arabidopsis thaliana
  unsure (1)..(656): unsure at all n locations
ggganccgaagctttggctaantccggccaggaatccttttctacccgtcgtntccctgagatcaaaaccgacttcttgactggtcttgcagcggttgaatccccccgcgagacacagccttatctcccgtggtcttgatcccagtgctctacgctggatccgcaagagcctcacacgatgaatcaacagaagaagctatcgagtttgctactcagtacgggaaagagaaagagctatgcaagactggagattccgttgttgctctactccgagtcggtaatgcttccgtgatcaagatcttgaccgtcaagtgatgattccactcaaaaattcacgtttttggcgtttggggaacgctactttaaacgttttattatgaaactattcaagattgtgattaaaatcttgagatagaaaactcaagttctattttttgcttattaccacaactactgtgaccggtgaatccacttaacagctccttttgggatattttggttgtattgaaacctattggatcattcatacacgtatcaattatcatgatttcttttgttgtccaaataaaaaaaaaacaaagggcgcccgctctagaggatcccaagcttacgtacgcgtgcaggcgacgtcatagatcttctatagtggttcctaa

SEQ ID NO: 127247 - DNA, 869 bp, Arabidopsis thaliana
cgctttttgtttcagaaaaaaaaaacagagaaagaggtgtttagagtatctttgtcattggcgatcctcaaaaaaacctttccgaatttgacccttattgatatcctgaatcttctgctcggttctcgccggagagaagacacggagaagagggttttcgaaaaggaggatgagaggttccaataacaccgatctatttgaccctaagacggagatggattccaatttctctcgccatggttcttcctccgaaggtgattttggtttcgctttcaatgacagtaacttctccgatcgtttgctccggatcgagatcttgggtgggccttcggattctaggtctgatgctgaaggatgtacgagtattgccgattgggctcgtcatcgcaagaggagaagagaggacaacaagaaggacaatggtgttgcgatttcagacattgtggcatgtgctgaagaacagattctaaccgataacaaccatcctgatttcgatgatgctcctggtggtgataatcttgacgatgaacgataggcaatggttgaagaggctttatcaggtgatgatgatgcatctagcgagccaaactggggtattgattactactactgttgttagagtttaagaactgcatattaactctcctatcttggcctgcaaaagcccctttttctacaagctgttctctaatggaatgagggaattagaacacagacatgtgccccttataatttctgcacaagacgaaggtgcttttgatgggatcttttgaaactttatggtttaggcaacttattctaaagtgtcaacaaccaggcaccccgcttttatttaaaatgttcatttattggcttgcctggacaaagtt

SEQ ID NO: 127248 - DNA, 302 bp, Arabidopsis thaliana
tttttagtgatcacagaggccagagttgagagtttgacaccgtcatcaatggcagaaccggaggtgattcactcatggtctgcaccaagatctctcagcaccagcctcatgtactcctttgctcagagacttgacactgaagttgtcgacgagccgttgtatgcatcatttcttaaagctacaggttttgataggccatacagagacgaagttctctccaagatggagtgcaatggagagaaagttgtgaaagatgtcatatatggatcaggatctaagaagtaccggtattgtaagcatat

SEQ ID NO: 127249 - DNA, 804 bp, Arabidopsis thaliana
  unsure (1)..(804): unsure at all n locations
gcggnnnnnnnnnnnnnnnnnnnnnnnnnnnnnnnnnnnnnnnnnnnnnnnnnnnnnnnnnnnnnnnnnnnnnnnccacgcgtccggtcgttcggaactctgcaacgagagttagggtttatacagagcaaagagaaggagaaagcgaaaccaaaaatcgacattaatggctgacgaagattacaacgacgtcgatgacttgggatatgaggatgagccagcagagcctgagattgaagaaggagtagaggaagatgttgaaatgaaggagaatgatgatgtcaatggtgagcctattgaagctgaagataaagtcgaaacagaacctgtgcaacgtccacgcaaaacgtcaaagtttatgaccaagtatgagcgtgctcgtatcctcggcactcgcgctttgcagattagcatgaatgctcctgtcatggttgagctagagggtgagactgatccacttgagattgcgatgaaggagcttaggcagcggaagataccattcactattagacgctatctacctgatgggagtttcgaggaatggggagttgatgaactgatcgtggaagactcatggaaacgtcaagttggtggtgattgataatctgaccagagacaaatcgacaaatacgtatgtaacttgcaagctttcctctcttatggatgataaattttctgatgttgtaatggaactaaaaatcagtgaaacttatggataaaaaaaaaaaaaaaaaaagnnnnnnnnnnnnnnnnnnnnnnnnnnnnnnnnnnnnnnnnnnnnnnnnnnnnnnnnnnnnnnnngtc

SEQ ID NO: 127250 - DNA, 1049 bp, Arabidopsis thaliana
tctgcagtacccgtccggaattcccgggtcgacccacgcgtccgagggcataaaggtgcagtttggagttcttgtctggataacaatgcattacgtgctgcatctgcttctgccgatttttcagccaaactttgggatgcgttaacaggggatgtgctgcattcttttgagcacaagcatattgtccgagcatgcgccttctcagaggatacaaaatcgttgctcacaggagggtttgagaaaattcttcgtgtttttgacatgaatcggttggatgcacctcctacagaagttgataaatctcctggttctatcagaaccctcacatggcttcacagtgatcaaacaatattaagttcatgtactgatattggcggtgtaaggttatgggatgtgaggagtgggaaaattgtgcaaacgttagaaactaagtctcctgtcaccagtgctgaagtgagccaagatggacggtatataacaactgctgatgggtcaactgttaaattctgggacgctaaccattttggactagtgaagagttacgacatgccctgcaatattgaatctgcatcgttggagccaaagtctggagaaaaatttgttgctggtggagaggatatgtgggtccgagtgtttgatttctacactggcgaagagattggatgcaacaagggacatcacggtccagtacactggggtaggtttactcccactgggttatcctatgcctcgggatctgaagacgggacaatcagaatttggcaacaacacccgcaaattccgaagagaaccaaacttgctcaaagccgaagcagagtgtggatgaggttgctcgtaagattgaaggctttcacattaacaaggaaggaaaaaccgcagagaaaccatctgatgcttaaaccaagaaaagagccaagaaaaatggctgcttctctttgtcttcttactgtgtttttacttccagactgaatatacggaaattcaaaacaagtgtttcaaaaacagtcgttgtcaatcttcattaaaatcaagtttatggatgtgagctg

SEQ ID NO: 127251 - DNA, 1635 bp, Arabidopsis thaliana
  unsure (1)..(1635): unsure at all n locations
nnnnnnnnnnnnnnnnnnnnnnnnnnnnnnnnnnnnnnnnnnnnnnnnnnnnnnnnnnnnnnnnnnncccacgcgtccccaccacttttttttcttttgtaattttcctttctttttttttttcttttgaattttcgggaagcagcatttccactggagctgcaaaatcttcctatcaaaattatagatcgatccaagttttagattcgagaattattttctccaaattagatttatatatcaaaaggaatcgaaaatagacagcaatttttgttttgtcggatcgtattgaatcagctgtgaattttagcgccaatttaaccactgaatcgtttgattagaagctaagatttggtcttacgatcgatctaagtagggttcttcttcttaagtgtgtgttttgttaaaattagtaaagagagatggagaagaagaaagtcgcgactccgctagtgtgccatggccattcgagacctgttgtggatttgttctacagtccaatcactcctgatggtttcttcctcatcagcgcaagtaaagattctcaaccaatgttgagaaatggggaaactggagattggattggtacatttgaaggtcataaaggtgctgtgtggagttcttgtcttgataacaatgctttacgtgcagcttctgcatctgctgatttttcagcgaagctttgggatgctttgactggggatgtcttgcattcttttgagcacaagcatattgttcgagcatgcgccttctctcaggatacgaaatatctaatcacaggaggatttgagaaaattcttcgtgttttcgacttgaatcgcttggatgcacctcctacagaaattgataaatctcctggttctatcagaacactaacatggcttcacggtgatcaaacaatattaagttcttgcactgatattggtggtgtgaggttatgggatgtgaggagtggcaaaatagtgcaaactctagaaacccagtctcctgtcaccagtgctgaagtgagtcaagatggacggtatataacaactgccgatgggtcaactgttaaattttgggatgcaaatcattttggactagtgaaaagttacgacatgccctgcaatatcgaatctgcatcgcttgagccaaaatctggcaacaaattcgttgctggtggagaagatatgtgggttcgactctttgatttccacaccggaaaggagattggatgcaacaagggacatcatggtccggttcactgtgtgagatttgccaccaacaggtgagtcttatgcttcagggtctgaagatggtacaatcagaatttggcaaactggaccggtgaatcctgaagagatcagcgagtcaaagccgaagcagagtgtggatgaggttgctcgtaagattgaaggctttcacattaacaaggaaggaaaaaccgcagagaaaccatctgatgcttaaaccaagaaaagaaccaagaaaaatggctgcttctctttgtcttcttactgtgtttttacttccagactgaatatacggaaattcaaaacaagtgtttgaaaaacagtcgttgtcaatcttcattcgagtcaagtttatggatgtggctgaaaatttacgnnnnnnnnnnnnnnnnnnnnnnnngcc

SEQ ID NO: 127252 - DNA, 464 bp, Arabidopsis thaliana
ttcattcttgtagctagtgcgctcgagagatgcaatgtacaaaccaaaagaaatggggcttctggagaatggggaagtagctaaattattttccttacgggttagtattaattctagtcaacttgtaacagctactggcttctgttactttctgtattaatatcaccttcccatttcttttagcagcatgtgaacacagatatgtcatcacctgatggaggccatgttagggagagagaatcgcatcctgaacatgacaaacgtgctcagctgagcaatcaagctgaagcagttggtgttgggagaatggaacagtctgattcaacaagtccattaccgaataatctggcagtagaaaggagtttaacgacctctcttcagaaagttgcaagttttttggcccgttttatcctccaacttcttggcagtctatgtctcatgttccggatcttgggaagacttgt

SEQ ID NO: 127253 - DNA, 505 bp, Arabidopsis thaliana
  unsure (1)..(505): unsure at all n locations
cccccntgcctgtnagcnttttgtcccggggcacgnccntgcttggcttgcccaggggaggncagttgggtaatggcanacntggcccccactgcctccttcacggctcggggaactgtggccgttgcaactntgctggaatttacaccgggaagaaatgtctcagtcactgtggtgaaccttctcaaagatggtaccatgtacctcgttcatggctaaaaccgtttgggaaccttctagttatatttgaggaatggggtggtgatccaagtggaatctctcttgttaaaaggacagccaaatgaagcttcttacttcaaattttttccggaagcatgcagagattgtcatgtacagatatagttgcattcattggctcattgtggaagaatattatatatatatgtatcctgctctaaaaatgtattgcaattgtataaaataatatttatacaatagaccaaaacaagccaatctcaatcnccccataagaggggttcttctt

SEQ ID NO: 127254 - DNA, 350 bp, Arabidopsis thaliana
ggtcctacaagattgggcttagcggtgaagctatgagccttcacaccttagctggcagttcagctgtgaaatggtggctcaaaggattcgtggtcaagaagcaacccttgacctgggacaagtcttcttttgatacaccgagaggcaacgaaccactggctttggacatgaacacaatggggaaaggtcaagtttgggtaaatggacataacattggacgccactggcctgcctacacggctcgtgggaactgtggacgttgcaactatgctggaatttacaacgagaagaaatgtctcagtcactgtggtgaaccttctcaaagatggtaccatgtacctcgttcatgg

SEQ ID NO: 127255 - DNA, 536 bp, Arabidopsis thaliana
agctctattacaactcactttagggaagagctggtccgcctgcaggtcccggtccggaattcccgggtcgacccacgcgtccgtgtaaaaccagagaattttctgcttgggcctcctggaactcctgaagagaaaaaacttttccttgtagacctcggcttagcatccaaatggcgagatactgcaactggactacatgttgaatatgaccagcgtcctgatgtttttagaggaacagtacgttatgctagtgtacatgctcatcttggcagaacttgcagtcggagggatgacctggaatctcttgcttacactcttgttttccttcttcgaggccggcttccatggcaagggtaccagggagagaacaaaggtttccttgtttgcaagaagaagatggccacttccccagaaactctttgctgcttctgtccccaaccttttcgtcagtttgtcgagtatgtggtcaatttgaagtttgatgaggagcctgattatgctaaatatgtctccctttttgatggaatagtcggccc

SEQ ID NO: 127256 - DNA, 589 bp, Arabidopsis thaliana
  unsure (1)..(589): unsure at all n locations
ctctnnnnnnnnnnnnnnnnnnnnnnnnnnnnnnnnnnnnnnnnnnnnnnnnnnnnnnnnnnnnnnnnccacgcgtccgcttctctctctctctctcgaagttcatcaatggctcttcatccacaccttcaagactccaagaatttcagagacttttgcggaatcgacggccagatttcgccggaattaggatttaaccgctcagagaatctccatgatcaatctcagcatcctccatatattcctccatttcatgttgctggttttgcaccgggaccggtggttcaaattgatggttctgatggtggtaatggagctgactttgagtggaactatggtcttggtcttgaaccaagacgtgagaggataaaggaacaagatttcttggaaaacaattctcagatatcttctattgattttttgcaagctcggtctgtatcaaccggattgggtctgtctcttgacaatgctcgtgtcgcttcttctgatggctctgcgttgttgtcgcttgttggagacgatattgatcgcgagttacagcggcaagatgcagatatcgataggtttctcaagattcagggggatcagt

SEQ ID NO: 127257 - DNA, 354 bp, Arabidopsis thaliana
atcatctctcttcttcttcttcctctcaagtatcgaaaccgaaacagagaaacatcaccaccaatgggatgttttatgggttgtttcggtctctcttccaacaaaaaacgcagaaattccattaggaagatccttcctcgagatcaaagaatctgtagctatgagccgctgctttcttcagatccgacagatttcagtactgtttcagataaccctgaaaagatctcaaattcgaacctcaggagtgaggtaggggacgaggaggagaagaagaaggtgactaagaagacgaggaagagagtcagatttgacttgaatgtacaaacctatgaacctattgtaccttcaagatat

SEQ ID NO: 127258 - DNA, 448 bp, Arabidopsis thaliana
  unsure (1)..(448): unsure at all n locations
cggancccagggccgagggagtcccacgcgtcctctcctatagttttgtttaatcgttttcgcggcggtgaaattcatgagagcttaactggtgttgttttgagcttttgagcgatcttttgggtcttgctcttgctcttgaggcagagaacccatagacagttgttttgtctgtttgttggtgtcagatccaaaatcaagaggctgttatagctttgacttggaagtgattcgacacaatgaaggaagaagattcaaaaaaaataagagggtaggaatctatttggtcgcttttgcttcctcctattctggggagaatttgggatcttggagtcgaatccgttgtgagaagaaggatctttttgagcttgtgtactgtgtcctctcagttgattcatcgcagagagaagaggtcctgtcatgtctatgagtattgtattcatctgaa

SEQ ID NO: 127259 - DNA, 385 bp, Arabidopsis thaliana
cgatattatccagaaacagtagtgtcgaagaagaagaagaagaagaaggagagattctgagtttagggttttgtttgtgttgcttcgaattgagcagctatggcttccgtgttgctacttcttctggtgttcgtgtttgatctcattgcttttggtcttgctgttgctgcagagcaacgaagaaccacctggcaaatttctagagaatcaagagatttgagctactgtgtgtatgacaaggacatagcaacgggtctcggagtcggttctttcttggtcttattagcgagtcagctcttaataatggtggcgagccgatgtttatgctgtggaagagcattgacaccaagtggttcaagatcttgggcaatttttctcttcatca

SEQ ID NO: 127260 - DNA, 735 bp, Arabidopsis thaliana
  unsure (1)..(735): unsure at all n locations
nnnnnnnnnnnnnnnnnnnnnnnnnnnnnnnnnnnnnnnnnnnnnnnnnnnnnnnnnnnnnnnnnnnnccacgcgtccgcgttaggaacatgggttgggacggagcgctagcgaacgagtcgtaccagtgggttgaagctaaggtggcgtttcagcctccgatggggcggtggcaaacggccgtgagagacggcttattggaggctgggattgtccctaataatggtttcacctatgatcatatcaatggcaccaaatttggcggtactatttttgaccgcaacggcaatagacacaccgccgccgatttgttagagtatgccgatcctaagggtattaccgtccttttgcatgccaccgtccaccggatcttgtttcgtactcgaggtacgaccaagccaatagccaacggagttgtggtaccgagaccggaccggtcaggctcacagagcttacctaaaggaaggcgccttgagtgagatcatcctatcggccggaaccctagggagcccacaacttcttatgctaagtggtgttggcccatcggctcaattacaggcccaaaacatcacggtggtgatggaccagcctcatgtgggtcaaggnatgtatggcaaccctatgaatgccgtgtttcgttcctttttccagtcccccgtttagggtcttactcatttgaggtttttggggatttaccgggggaaggcaacattttttggaagcccccggttnggt

SEQ ID NO: 127261 - DNA, 367 bp, Arabidopsis thaliana
tttcttcaatcgagattttatcgctttttgattcgagaatttcgaaatcggaacccaccaccaccaccctccatcgtcgccaacagatccaacggttctctgattatttttatttgaaaattgtcttctttgttctccctctcgctgggtttgattctgagattgattaatctaaatgggtcgcatcgagatttagaagaaaagggaaatgttggcaatggagaaagaatttgattcaaagcttgttcttcaagggaactcatccaacggtggctaatgtttctagaagcaaaaagcttctccctttaaagctcctcaagaaaatttcaccagccatgatttcgaatttggcaagatctatggtgtt

SEQ ID NO: 127262 - DNA, 441 bp, Arabidopsis thaliana
  unsure (1)..(441): unsure at all n locations
gggttgtggaccatggactaattatcaaaactcgatgcacggtggtgattgcagaagaaactgttgtaagaagtgttaccttgcagaccagtgcattggagggtggtgtacgaacctatggacagactttgcaaaagtagttcgtctcacacattaccgaaaacggtgatccattttgccagtcaatttataagtcagttcatagagcaatgccgtaacttctacaagttctttttctataatcagttcattccaaacaacaatcaaggtataaattgattgtactcattatataattctgtcgtcatcttatatgttggaaaaattcttaagattatattatagcctacgttacagggtcagtgatgtagtataccacaaattttccatgaaaatatcattaaataattatatttggtggtaggaaacatncatgaaccc

SEQ ID NO: 127263 - DNA, 628 bp, Arabidopsis thaliana
  unsure (1)..(628): unsure at all n locations
nnnnnnnnnntcagggaccnggcctgaattcccngggcggcccactgcagtccggactaaaagaagcaaaatcttgagtagaaacaaattttcctgtatctctctctcttgtaatctccgacgaagaaacacagttttatggcaaccaccagatcgaagagctttcagttgatcaccagcttaaggaaacacctagttaacacacgcgcttccacacgcgccaccgcctctgctctcttcccttcacgtcggagtggacattcctcggcgtatgacaagaacgtggaggatgaattgcatgcaagtgcagtacctgacgaagttataaagccagattctgataaatattggtctcctcaccccaaaacaggagtcttcggtccctctacgactgagcacagcgccaccgccgagggtgcacaccaggacacagcagtgctggaggagaccgcctggtttcgcccaacaagtctcgaggattcggacaagactcaccatgtttgagtctctctttctctctgctttttactggcgtaatgttgtaataaagttctacggaaacaaactgtaatgtaaatagggcccctgctaaaataaaatggttgacatgtgtaagggttgtncgttc

SEQ ID NO: 127264 - DNA, 1059 bp, Arabidopsis thaliana
accgttaccaaaactcgccggaagagatggcggacgagatggagaccaaaggagagaagaagtacaagtatagcatgatgattcctacctacaacgagcgcctcaacatcgctatcatagtctacctgattttcaagcatctccgggacgttgattttgagataattgttgtggatgatgggagtcctgatggcacacaggaaattgtcaagcaactgcagcaattgtatggtgccgcccgtccccttttaagagctagagccaagaagcttggtttgggaactgcatatattcatggtttgaagcatgctacgggtgatttcgtcgtgatcatggatgctgatctttcacatcatccaaaatacttaccaagtttcatcaagaaacaactagagacaaatgcaagtatagtaactggtacacgatatgtaaaaggtggtggtgtacacgggtggaatcttatgcggaaactcactagtagaggagcaaatgtgctagctcaaacacttttatggcctggtgtatctgatttaacaggatcattccggctatacaagaaatcggcgcttgaagacgtgattagctcatgtgtgagtaaagggtatgtctttcagatggaaatgattgttcgtgcaaccacaaaaggataccatattgaagaggtaccgatcccttttgttgacagagtctttgggacttccaaactcggaggatctgaaatagtggaatatctaaaaggcctcgtctatttcctgcttgcaacttaagacacacccagcaattcaaccacccacgagtctctctttaaactcctcatttgttccatggcttcatagatttctcttaacagttgaactctgatcatgtcgtttagaaacttcacttactttgacttcaaagagtcgcatcttttaagactcaaaagttcatattatagacaatgttgattttgaatgttggaaaaaaaaaaaaaaaaaaaaaaaaaaaaaacaaagggcggccgctctagaggatccaagcttacgtacgcgtgcatgcgacgtcatagctcagctatag

SEQ ID NO: 127265 - DNA, 569 bp, Arabidopsis thaliana
gacttactatagggaacgctggtacgcctgcaggtaccggtccggaattcccgggtggagccacgcgtccggtcgtctcttttcttctctccgagtagcttaagctttcgtcgtcgagctctttcccgcttctggcgatgttcatcctcagagttcattccgttgactccgagagaccaatctccgttgaagaagaagaatcaggtttcacttacgcatcgaaaagagctcagcctcctcttaaactcatacaaccatctctcaaactcaccgaccgcaaaggcttgatccatctctatcgcaaatcttcacatagctctctgcctaaccctagctcccgatccaccactctcttcatcgtcgctgttcccaattatctctcctctctcgattttatccgtttctgtgattcccgcatctcccaagtctccgacatcctcttcatcaggaacgatggaatggaagatagatataggggttcttatcacattttctgatcaacccgaagctggtggtttctacaaccccttggatgggaaaaagctcccacccatttgagggtgggggtt

SEQ ID NO: 127266 - DNA, 1184 bp, Arabidopsis thaliana
  unsure (1)..(1184): unsure at all n locations
accggactttccgggtcgacccacgcgtccgcagagtaaggagaaaacattggcaaagatggagagaggtgggctctctgaaaaggttgctagagacagtgttctcgttttccgttttgctgatgttgggaagcttccaccgccagtgcttcagtttgttgaagtgtcttttggttacacaccggactatcttatttacaagaacattgactttggtgtcgacttggactcgagggttgcccttgtgggacctaatggagctggaaagatacacttttgaagctcatgactggtgaattgcacccaactgaaggaatggtgcgacgtcacaaccacttgaagattgctcactaccatcagcatctggctgagaagctagacttggaattgcctgcacttctctacatgatgagggagttcccgggtactgaagaggagaaaatgagagctgcgattggtaggtttggtctaactggtaaggctcaagtgatgccaatgaagaatctatctgacggacaaaggagcagagtgatctttgcgtggttagcttataagcagcctaacatgcttcttcttgatgagcctactaaccatttggatatcgagacaatcgactcgcttgctgaggcattgaatgagtgggatggtggtttggttctggttagtcacgacttcaggttgatcaaccaagtggctcatgagatatgggtttgcgagaaacaatgcatcactaaatggaatggtgacattatggacttcaagaggcaccttaaggctaaagccggacttgaagattgaagatagagagtcgagtcttcttctcttgatggaaaatggaaaagactcagattggggtcacatgctaagagagagagagggaaggctttggtttttttgatgggtttgggaatggtttttaacgagttctaaagccacacacttgagagacagagaaaccatactcactaatctctgcatttccttaagaggtcagagattctttctatattagtattatcattatcatgtgcaccttctttttttttcgttattgttgttgaacgtttttttgaaggcgaaacagagagaaaagtaataaaaaaaaaaaaaaaaaataaaaacaaagggcgaccgctctagaggatccaagcttacgtacgcgnnnnnnnnnnnnggtgagcttg

SEQ ID NO: 127267 - DNA, 951 bp, Arabidopsis thaliana
  unsure (1)..(951): unsure at all n locations
ttctatccaactcattttagggaaggctggtccgcctgcaggtcccggcccggatttcccgggccgacccacgcgtccgaaaaaatctcaatttcaattctctcgatttctctatcatcatcatccatggcttcgcaagctagccttctccttcagaaacaactcaaagatctctgtaagcatcctgttgatggattctctgctggtctcgttgatgagaagaatatattcgaatggagcgttaccattatcggacctcctgatactctctatgaaggaggattctttaacgcgattatgacatttccgcaaaactatccgaatagtccgccaaccgtgaggtttacttcggatatgtggcatcctaacgtttattctgatggtcgtgtttgcatatctattcttcatcctcccggtgatgatcctagcggttatgagcttgcaagcgagcgttggactcctgttcatacagttgagagtattatgttgagtatcatatcaatgctttctggtcctaacgatgagtctccagcaaatgtttgaagctgccaaagaatggcgagataagagagatgagttcaagaagaaagtgacccgttgtgtcagaaagtctcaagaaatgttttgatcaacgtcaaacttcacacctttgagatctctggagtttcaatcaaaagttcttcatattcctatctgaaaccctttgaaacgcaacttgttataactcggtttacatctctttttgtcgcgttcgagaaccagagcgttttgaaaggtgtttggttgagaaaagtgctgttcttgaggagctggtattaaaattataaatttcatttgttaagaatcttctttgctaataaaaaaaaaaaaaaaagnnnnnnnnnnnnnnnnnnnnnnnnnnnnnnnnnnnnnnnnnnnnnnnnnnnnnnnnnnnnnnnnnnnnnnnnnnna

SEQ ID NO: 127268 - DNA, 530 bp, Arabidopsis thaliana
  unsure (1)..(530): unsure at all n locations
nnnnnnnnnnnnnnnnnnnnnnnnnnnnnnnnnnnnnnnnnnnnnnnnnnnnnnnnnnnnnnnnnnnnnccacgcgtccgcttgaaaagagaagaagaagattgcttcaatgagctgggtgtagtgtcaaattgtgatgctactgaatctgtaagcacggaaatattggaatctatgaacattggttgtagtcaaggtcttaaagattctggaaacataagaccacagaacaacattctaggatgttgtagtaatgctgtagagaattttaatagagtcggagaaactgaaaggagtgatgatcttgaacatctcacactgaaggagcggcgcaaaatgcttcttgaaaggggtgctataaggttgcctgaatctaacgtagaggataatactgaagattgcgatgaaactgaactttataaaataaaagcggagatttcatgcgaaaatgggatagcttcgtcttctggagtccaattcagcggctttctataaaaattgattctgtcctctgtagaaatttaatatat

SEQ ID NO: 127269 - DNA, 527 bp, Arabidopsis thaliana
  unsure (1)..(527): unsure at all n locations
nnnnnnnnnnnnnnnnnnnnnnnnnnnnnnnnnnnnnnnnnnnnnnnnnnnnnnnnnnnnnnnnnnnnnnnccacgcgtccgccattttcttcctctctgttccggcgacgcttctcctcgccgttccaatcctctccggcatagaaactcggtgtctccttcatcttcctttcccttctgttcgacttcttccttttcttctttctacattcctatggcgggaggagatggtcaggtgtctcattcgcttgagaagcagttcgagagtttccgtgttcaattggaagaatctgcagctttgagagagcagattcgtgctgtggttatggagattgagtctgctactaggcttattcaagctaatcttcttctcgttcatcaatcgcgtcctattcctgaggttatcgagaaagctaaggaaaaaatcgttgatttgaagcagtattatggtcggcttgctgaaattcttgaggagtgtcctggacaatactataggtaccatggagactggagaagtgaaacacag

SEQ ID NO: 127270 - DNA, 773 bp, Arabidopsis thaliana
  unsure (1)..(773): unsure at all n locations
cggacgcgtgggcggacgcgtgggcggacgcgtgggcggacgcgtgggtgaattctcaacgaagctaagatcaattcgatagagagtgaaaactatgaggaatctgcgaatcatctcctctcacttctcacgagttttgaaatccaccgagacacgctcaagttccgttcaattattcacgatccaatctcggagctactcatctccggcgacgcaatcggagaacgtgtccaaaatcgtcaatgagctatcgaatctcactcttttggaaacaatggatcttactgagatccttaggcagaagctaaacatcagtgaattgcctgtgatggcggcgatgatgccagggatgtcattaccgggatctggagctagtaaatccgccggcggagaagggaaagagaagaagaaggaagcaaagactgcgtttgatgtgatgcttcaagcgtacgatgcagtgtcgaagataaaggtgattaaagaagtgagaacgattacggcattggggttgaaggaagcgaaagatttggtggagaaagctccaacattgttgaagaaaggagttagtaaggaagaagcagagaagatcattgagaagttgaaggctgttggagctaaagttgctatggagtgaccatttttaggtggtattaaaattggacntgagcaagaccaaatgaagctcctcctgagagcctcccagtgttattccaatgnagatgtgatgaagcnccacagccttccttagnangaccanttttgcnccncaangc

SEQ ID NO: 127271 - DNA, 798 bp, Arabidopsis thaliana
  unsure (1)..(798): unsure at all n locations
gggaaggctggtccgcctgcaggtcccggtccggatttccggggtcgacccaggcgtccgggaacagctgaaattccccagatcattaaggggctatcgaaaatggttgatgatggtgacaacagaaacctacctttctatagagctaaaactccagaacttgttccagaaagcgctgaaccgatgagatcaggagtcccaaagaccgtaaaagcaactcagaaattgttgagcttatggaacagaatcaaagactacctagctgatccaagaatggggcctacattgcttctaggagcgttgttatctgcaggcaatgtttggtggatgagaagccgatcatcaacacaacaacctgctcagacaaatcagccatcaccaaatcaaccagccgataacgtggaggagaagaagaagaaagagagaaagagagaacaacgaaggaggaatgcaaaggaagaagaggttcctgcttcgatcactgataacgaacctaaagatgctgtccaaattctgtcttcaggttccgattctgactaatatattaagccttaggattcttcggactttcttttttttttgacattcacgtctgtgatttcttcttttctttgtgaaagtcataaggtttcaattttaagtggctaaatagagtaattcaccttactcattttgaacgcttccaaatgatctgggaaatttcagctgttcccgaacgcatagnnnnnnnnnnnnnnnnnnnnnnnnnnnnnnnnnnnnnnnnnnnnnnnnnnnnnnnnnnnnnnnnnnnnnnnnnnn

SEQ ID NO: 127272 - DNA, 553 bp, Arabidopsis thaliana
tcccacgcgtccgcttttccggaggaatagaaaattgggggctagggttcgcaattgtagttttcgagcgaagaagatgatcgaggtggttctcaacgatcgtttagggaaaaaagttagggtgaagtgtaacgatgatgacacgatcggtgatctgaagaagcttgtcgcggcacaaaccggaacacgagccgagaagatcagaattcagaagtggtacaacatctacaaggatcacatcactctcaaggactatgagatccatgacggcatgggtcttgagctttactacaactaggccaatcgaaggagctaagctgaaggagtgttgttgatttggacacctacataaactcatatcaaccatgttacatctaaaaaaggcacaagtatgttgtaagacgtgataacttcaaatttgtggtaataataatacattcactgtcaaaaaaaaaaaaaaaaaaaaaaaaaaaaaaaaaaaaaaaaaaaaaaaaaaaaaaaaaaagcggccgccccacaggatccatccttacttactcgtgcatgcgacgtc

SEQ ID NO: 127273 - DNA, 292 bp, Arabidopsis thaliana
tcttttgtttcacagaccactttagtaagtggcaccacaacatcgagagttactgaatcaggaaaagcaattcgcacatcatctcctgctcggcaagaaaacaatgcatgcggatcaagttgttctaacagttctagtagtgactcaggatcttgctctagtgatactgacagtgacagctcttcaggacgtggatcagataatggtaattaggccaacaagtcgaaagtcttttagctttagagtcagaaccgtcatgctgtttgatctctttcaatagcacagttagatt

SEQ ID NO: 127274 - DNA, 524 bp, Arabidopsis thaliana
accacgcgtccggttgggtaaggacaggcctgcttgtaaactggaaatggtgaaagctggagttatcgactgcgtacttgatattctccacgaagctccagattttctatgtgctgcgttttcagaactgcttcgaatcctcacaaataatgctactattgcgcaagggacaatctgctgcgaaagtggtggagccacttttccatttgctgacgaggttggagtttggagctgatggacagcacagtgctctgcaagttctggtaaatatcttagaacatccacaatgccgcgctgattatacacttacaccgcaccaagtaattgagcctctaattccgctactggaatctccatccccagcagtccagcagttggcagctgagcttctatctcatcttctctacgaggagcatctgcagaaagatccattaactcaacttgcgattggtcctctaatccatgtgctgggatccggcatacaccttttacagcagagagctgtgaaagctctcgtcagcatt

SEQ ID NO: 127275 - DNA, 228 bp, Arabidopsis thaliana
atttatttgacgaacacaaaaaattattataatttttttggttggtgttggagagagatttcatgagcgtttggttgtgttttcaattattattgagaaaattgtatgttcttgagaggatttgtgatactatttaatcatctctggattccaaaaatttctggggattattggatgttgatgagaaattaatttgattcattatttttgtttgacttcgttcggatt

SEQ ID NO: 127276 - DNA, 481 bp, Arabidopsis thaliana
  unsure (1)..(481): unsure at all n locations
atgannnnnnnnnnnnnnnnnnnnnnnnnnnnnnnnnnnnnnnnnnnnnnnnnnnnnnnnnnnnnnnnnnnnnnnnnnnnngccacgcgtccgaaaaaaaatggagaacgaaagctcagagagtagaaacagagctcgtcttgccattatggagcttgctaacatgattagcgttcccatgtctctcaatgccgccgtgcgactaggcattgccgacgccatttggaacggcggagccaattctcctctctctgccgccgagatcctccctcgcctccacctaccatctcacactaccattggtggcgaccccgagaatcttcagcgtatacttcggatgctcaccagctacggtgtcttctccgaacaccttgttggatccattgagaggaaatactctcttacggacgtcggaaaaactcttgtaaccgactccggcggcctctcttacgctgcctacgtcctccagcatcaccaggtt

SEQ ID NO: 127277 - DNA, 564 bp, Arabidopsis thaliana
gcttataccactcactatatggaagctggacgcctgcggtaccggccggaattccgggtcgaccacgcgtccgccacgcgtcgagcttggccacttgcaagaagcagctcgtgaaatgaggtatgagatgatttcgaatgtgtgttttcgacaacagattgaggtcttgcttatagcgcatcatgcagatgaccaggctgagttattcattctcaggttatctcgtagtagcggtgtacttggtcttgcgggtacagcttttgcttccgagattttctccagaaatctgcagttagatgcaaaacatatgaagaaccaatctattcgcttagtgcgtccgctactagatttatggaaagaagacatgtacaagatatgtcaatggggtagacaagattgggttgaagatccaactaatcgtagtcagttgtttgttcggaataggattcgaacatcaataggaaatctagaatcaggtagcttcaagtcagagctgcaagcagtcatttctgaatgcaggagaacacgttcatttgttgataaagtttgtacagacttaataca

SEQ ID NO: 127278 - DNA, 558 bp, Arabidopsis thaliana
tttattccaactatttttgggaaggctggtccgcctgcaggtcccggcccggatttcccgggtcgacccagccgtccgcccacgcgtccggaggaagtcatggatgcagcagaagctggtcagatcatcgaaagttgttgcccggttctttgtggcattgcatgcaagaaaggaagtcaatgtggatttaaagaaagaagctgagtactttggtgatattgtcatagtaccgtacatggatcattatgaccttgttgtgctcaagacagttgccatctgcgaatatggggtgaacacagtggcggcaaagtacgttatgaaatgtgacgatgatacatttgtgcgtgtggatgctgtgatccaggaagcagaaaaggttaagggaagagagagcctttatattggaaacattaattttaaccataagccattgcgtaccgggaaatgggctgtgacattcgaggaatggccagaagagtattatcctccatatgcaaatggtccgggttacatcttgtcatatgatgtagctaagttcattgtcgatgattttgaaca

SEQ ID NO: 127279 - DNA, 443 bp, Arabidopsis thaliana
accacgcgtccgagaatttcaaacaaagtttcaaactttgctcaccaacttttatttatttattttggtggtagaaaacagactttgatggctttgtaggaatactagatgtgtagatctaaagattataaccattttctgtgttcttgttctttcagaacataacctcatgtctttttgtctctctgttcactagctctctgtttccatggactccacactatcttcttcttacagatttatttcatacacatacactgacacacatgtgtgtatacgtatgtgtttatgtgtgcttagtatacgctttttggattcaagaaactaatctttagtatttttgacattctggtagatttatgctcacttcttaggccttgttgacttttacagtgatggattttgaaactctggttgatttgattttctttttggtttgatgc

SEQ ID NO: 127280 - DNA, 562 bp, Arabidopsis thaliana
atttagcagacagtcaccaaattggtgaaggaggctttggtgtagtctttaaaggcgttctagatgatggccaggttgttgccataaaacgagccaaaaaggaacactttgagaatctgcgaacggagtttaaaagtgaagttgaccttttgtctaaaattggccaccggaacctagtgaagcttcttggttatgttgacaaaggagacgagcgacttatcataactgagtatgtcagaaatggtacactccgcgatcacttggacggtgctcgtggaactaaacttaatttcaatcaaaggttggagattgttattgatgtctgccatggcttaagcctatctccattcttatgcagaaagacagataattcaccgtgacataaaatcgtcgaacattctactcacagatagcatgagagccaaagtagcagacttcggctttgcgagaggcggtcctactgactcgaaccagactcacattttaactcaagtgaaaggaaccgttggttatctcgatcctgagtacatgaaaacttatcatctcactgctaaaagcgatg

SEQ ID NO: 127281 - DNA, 534 bp, Arabidopsis thaliana
actatagggcaagctggtacgcctgcaggtaccggtccggaattcccgggtcgacccacgcgtccgggtaactggaggaacaggtttcattgcttcttacatcatcaaatcacttctcgaactcggacacaccgttcgaacaactgtccgaaacccacgtgatgaagaaaagggtggatttttatgggaatttcaaggagcggggcagaggctaaagattctccaagctgatctaacggtagaaggaagttttgatgaagcagtgaatggtgttgatggagtattccacactgcttctcctgttcttgttccacaggatcataacattcaggagactttggttgatcctattataaagggtacaacaaatgtgatgagctcttgtgccaagtctaaagccacattgaaaaggattggtcttacgtcttcttgctcttcgatacgctaccgtttcgatgcaactgaagcttctcctctcaatgagtctcattggagtgatcctgaatattgcaaacctttcaatctttgggatgg

SEQ ID NO: 127282 - DNA, 514 bp, Arabidopsis thaliana
taggtgacactatagaagatcttgacgtcgcatgcacgcgtacgtaagctcggaattcggctcgagatcacccactctgcttttacatccacaaagctcacttttattaaaccaaatcacaatctcaatatcacattcgttgcagagacaaagatgtctgagtatttggtaactggaggaacaggtttcattgcttcttacatcatcaaatcacttctcgaactcggacacaccgttcgaacaactgtccgaaacccacgtgatgaagaaaaggttggatttttatgggaatttcaaggagcaaaacagaggctaaagattctccaagctgatctaacggtagaaggaagttttgatgaagcagtgaatggtgttgatggagtattccacactgcttctcctgttcttgttccacaggatcataacattcaggagactttggttgatccttattataagggtacaacaaatgtgatgagctcttgtgccaagtctaaagccacattgaaaagga

SEQ ID NO: 127283 - DNA, 853 bp, Arabidopsis thaliana
  unsure (1)..(853): unsure at all n locations
caaggtgggcccacggaccaggtcttttcccccaccctggacaaaggggggacaagttaaggcccccacccacaaagtttaatgtggaggttagcttccccttcccttagggcaccccccaggccctgtacccttttagtgcgtccggggttagtatttttgtgtgacacttgccaagggattacnnnnnnnnnnnnnnnnnnnnnnnnnnnnnnnnnnnnnnnnnnnnnnnnngtcgacccacgcgtccgtactgctgcgaacgacagaagggggaagacacacatacacacactaccgataaagaaaaaccagagaagagagagagataacaacaatggtttcttcgcttcttatgtcatttgctccggccaccgtgagggtttacgccacaagcacaaagggaggttcaggcggcccaaaggaggagaagaatcccatcgactttgttcttgggtttatgacaaaacaagatcagttctatgagactaatccacttctaaagaaggtggatgagaaagaaggcaccaccaccggaggccgaggaaccgttcgcggtggtaaaaactcagctccgacgcctgtgccgaagaagagcgagggtggatttggtggcttaggaagcctcttcaagaaatagaagaaaaaaatgtatagtaatttgcattattcatgcctctgttttcattctctataattcttcggatttcacttatatataagctactctttcttaatcttatttgacaacaaaaaaaaacacaaagggcggccgctctacaggatccaagctcacgcacgcgtgcatgctacgtcatagctggtctannnnnnnnnnnnnnnnnnnnnnnnn

SEQ ID NO: 127284 - DNA, 859 bp, Arabidopsis thaliana
  unsure (1)..(859): unsure at all n locations
cnnnnnnnnnnnnnnnnnnnnnnnnnnnnnnnnnnnnnnnnnnnnnnnnnnnnnnnnnnnnnnnnnnnnnnccacgcgtccgcggaccctggggttcaagaaggcggagcaatctgactattcactgaagatccaagatctgcagaagcaactaacaatggataaagaagaagcagaaaaactgcaggttgacagggataactttctgaaacttgcattggagggttataaacgttgtctgggaaattggtgacaagtatgatgttcgagtggtatttcggcaagtatccatgtggttcagtcttgcctcccagaaaaatgttattgataacatgttgagcaccattaaagaggtccagtcctacaaatttatcccccttgtttatcaaattgcttcaaggttgggcagttccaaagatgaatcaggatctaacagctttcagtctgcattggtttcgcttatcagaaaaatggccattgatcatccataccatacaatcttgcagcttctggctttggcaaacggtgaccgtatcaaggataaccaacgcagtagaaattcttttgtggttgatatggataaaaagcttgcagcagagcatctcctgcaggatgtatcacattatnatgggcctatgattagacaaatgaaacaactggtagatatctacatcaagcttgcagagcttgaaacaaggagagaggataccantagaaaggtngcactaccaagaggggtttcgtagtgtgaacaactgggacctttttanccnttggnggcttnaannanttncntnttgatccggngnttgccaattacaatgaaggggtnattcccgttttttcaagagggtttatc

SEQ ID NO: 127285 - DNA, 536 bp, Arabidopsis thaliana
  unsure (1)..(536): unsure at all n locations
nnnnnnnnnnnnnnnnnnnnnnnnnnnnnnnnnnnnnnnnnnnnnnnnnnnnnnnnnnnnnnnnnnnnnccacgcgtccgcggacgcgtgggcggacgcgtgggcggacgcgtgggcggacgcgtggggaaaaagagagtcaagtacttcattgttgatgcattcgctgaatctgccttcaaagggaatccagctgctgtttgctttctagaagacgataacgagagagacgacgcgtggcttcagtctcttgccaccgagttcaatatctccgagacttgtttcctcactccgatcatcggagacttgcctcgcttccgtctccgttggttcactccagtcgctgagggttccgtgttttcttttggttttggaattcggaattgttcgggtgacttgttatcattgacttgatagatcctgataactagaacttgtactcattcactggctcttgtgaatctctctttgctttggctggattgtgcaagtggatttgtgtggtcatgcaactttaacatctgctcacgttctct

SEQ ID NO: 127286 - DNA, 613 bp, Arabidopsis thaliana
  unsure (1)..(613): unsure at all n locations
gttcagtaaaaagtagacgaagaagaagaaattaagtcacttgaacaatggcgttggtccgaaatgcaaggccttgagcttctccctcataacaccaacaacaactcacgaagctccagagaaactcaccggaaatggataatgacggtggtgctcctcctcctccgccgacactagtggtggaagagcctaagaaagcagagattcgtggagttgcttttaaagagctattcagattcgccgacggattagattatgtattgatgggaattggctctgttggtgcttttgtccatggctgctctttacctctgtttcttcgattcttcgccgatcttgttaattcctttggttctaattctaataacgttgaaaagatgatggaagaagttctcaagtatgcgctttactttttagtggttggtgctgcaatctgggcttcctcttgggcagagattccgtggtggatgtggagtggagagagccaaacaacgagatgangggtaaggaataagagcagcttgnatcaancatcagnccntggacanagncgaactcaaatgtgctcgcataaaccgcncgaanggcancnctagggaactggatnccnntc

SEQ ID NO: 127287 - DNA, 634 bp, Arabidopsis thaliana
  unsure (1)..(634): unsure at all n locations
actctcgtgaaattgtccccatccccaatcccaaaggaaaaggttatcccatgaacccttcagaggggcttaagtttgtaaaaaaagaaccaagttcacctggtgttattcttgatccggtttacagtgggaaagctgcgtatggtttgataaatgagatcacccaaagatcccaaatgttgggagggaaggaagatattgttcatacccactggtgggcttcttgggttgtatgataaggttgatcaaatggcatctctgatgggtaattggtcccggatggatgtttcagaatccgttccaagaaaagatggtgttgggaaaatgttctagcacaccaaaatctgatttgtaataatcctgtgaaaataagacagattgaaccatttgtgcctttggcagtgaataaacacatctctgttttctattctgatgtattatgttcataggcttgggacgattccgataaataaatggtgtgtccacactctctttgtttgtttataacnnnnnnnnnnnnnnnnnnnnnnnnnnnnnnnnnnnnnnnnnnnnnnnnnnnnnnnnnnnnnnnnnnnnnnnnnnnnnnnnnnnnnnnnnnnnnnnnnnnnnnnnnnnnnnnnnnnnnnnnnnnnnn

SEQ ID NO: 127288 - DNA, 721 bp, Arabidopsis thaliana
taatacgactcactttagggaaagcacgtacgcctgcaggtaccggtccggaattcccgggtcgacccacgcgtccgtacggctgcgagaagacgacagaagggggagcttgagtttgtaaagaaagtagcaagttccactggtgttattcttgatccggtttacagtgggaaagctgcgtatggtttgataaatgagatcaccaaagatcccaaatgttgggagggaaggaagatattgttcatacacactggtgggcttcttgggttgtatgataaggttgatcaaatggcatctctgatgggtaattggtcccggatggatgtttcagaatccgttccaaggaatgatggatgaagcggaaatgttaatcaccgagtaaaacactcttggcagtcacagagtctgcgacaacacgcagatagagttgagtctctaagtcatgtttgtacatatacatacaataactagacaagtcttttctgtaagacttggtatgaaatgtcgatatatccattatgtacgtcctgttaaaactggtttccccgaaaatgttgtatctcatgactcaatgtccccgagttcgttcctcaccaccatagttagactgtgtggccgttaagctccttaaaaaaaaaaaaaaaaaaaaaacaaaaaagcggccgctctagaggatccaagcttacgtacgcgtgcgtgcgacgtcataactcttctagag

SEQ ID NO: 127289 - DNA, 636 bp, Arabidopsis thaliana
  unsure (1)..(636): unsure at all n locations
cccacgcgtccgtctctctctatcctcaaacaaagtatggccctttatcctttcttcatctcaatcttcatcttctctttgaccctcttcactacgacgacccattccctcaacgaacccgacccggattcgatttccaccgtttacgaactcctcccaaagtacggtctcccaagcggtctcttaccggacaccgtcaccgatttcaccctctccgacgatggccgattcgtcgttcacttgcccaattcctgtgagattgaatttgactacctcgttcactacgataagaccatatctggtcgtatcggttacggttcaatcaccgagctcaagggtattcaggtgaagaaattctttatttggctcgatgtcgatgagatcaaggtcgatcttccaccttctgattcaatctacttcaaagttggctttatcaataagaagcttgatattgaccagtttaagactatacattcttgtcacgataatggtgtctctgggctcttgtggagattcatggaagagtttctcgagaaagggcaaggatgatggataagcggaaatgttaatcnccggggaaaaancncttgggagncaaanngnttnnggaanannncnnnanagttnnccccaagg

SEQ ID NO: 127290 - DNA, 768 bp, Arabidopsis thaliana
  unsure (1)..(768): unsure at all n locations
cnnnacaatacgactcacattagggaaagctggtacgcctgcaggtaccggtccggaattcacgggtcgacccacgcgtccgcacgagagaagtatgcaaatctatcaaaatctggaaagcagcctgatgttttacacattcacaactggcaaactgcaatagttggaccgttgttttgggatgtttttgttaatcagggacttgaaggtactagaatactcttgacatgccaagactttgacaagggtcttgtacctcctgaaaaattggagctatgtgggctcgatccagctgaacttcaccgtcttgatcgcttacaagataacacaaatccacattttgttaatattttgaagggcggtgttgtctactccaacaaagttgtaataatgtcatcctcacatagctcaatccctggtctcgaaccaactttagctatccacaaggacaagttgttttttgctccctttggaatggacaactcaatggagaaagacttgtgttgtgaccttcacgtctttgcatatacttccattaagaacctaatgaaaatccccattgatgaccaggatgaatgattatttatcataattttcccattaaaaaaaaaaatggggccctggggtttagtgggaatagtggtatctacttaaaggtttttccactaacaaaattggataaaaaaaaaaaaaaannnnnnnnnnnnnnnnnnnnnnnnnnnnnnnnnnnnnnnnnnnnnnnnnnnnnnnnnnnnnnnnnnnnnnnnn

SEQ ID NO: 127291 - DNA, 526 bp, Arabidopsis thaliana
  unsure (1)..(526): unsure at all n locations
nnnnnnnnnnnnnnnnnnnnnnnnnnnnnnnnnnnnnnnnnnnnnnnnnnnnnnnnnnnnnnnnnnnnnccacgcgtccgggagaaagaaaaaaatctgggtttttgggagctgattaggttttgttccttcaatctctgggaattttcgctatgcactcagattcaggcgaagcgaccgctgatggcgataaagcttctacagaaaacagcaaaaaacggaagcttaagactcctatgcaagttatggcgcttgagaatttctacaatgagcataagtatccgactgaagaaatgaagggcaagttagcagaggaagttggattaactgagaagcaagtttcaggttggttctgccatagaaggttaaaagacaaacgtcatgtaaaagaagatgggaatgccattgggagccaagatcggtcaagcgttgttcttcaggatcgtggaagtgggcttcgacaggattcatgtggtagtacaaagcaaacggattattggaaccccaagcctagggaagttgaaag

SEQ ID NO: 127292 - DNA, 454 bp, Arabidopsis thaliana
accacgcgtccgggaaaaaagatgcaaacgcttctctgtcagccatgtaagtctcttcctatactcactgcttcgtcgtcgtcgtcgttgattcgtagctccggtgatgtgcgagaatgtatcgattttagagcgtcggagaaagtctcgaagtttcaatttcatgtaaccctaagcccctttgcctttcgtggtttctcaatatgtcgcgaatttgctgttcgtggagcttatgggattagattttgctcacgagaagatgtttccggtgttggaaatggaggaatcgtggcggaggaggagattgagctattgaacaagccgaatcctttaccaaaatcagaaaatgaggagagtggtaaagcagacgatgacgcgattctggagccgtttttgaaattctttaaaccggaagaagaaggggaaggaattgaatcggaagtttcggatgaga

SEQ ID NO: 127293 - DNA, 383 bp, Arabidopsis thaliana
ttgttcattgccggttttatttgtgaagctattcagggtgttggagggatcgcggaactagcaccgggatatttgtcagcggcttacgatactgttaagaaagctggtggattgttcattgcggatgaagttcagtctggtttcgcacgtactggtaacttttggggattcgaggcacacaatgttgtccctgacatagtaaccatggcaaagggaattgggaatgggtttcctttgggagctgttgtgacaactccagagatagcaggagtgttgactcgccgtagctacttcaatacatttggtggaaattctgtgtctactacagctggtctcgctgttctgaatgtgattgagaaagagaagcttcaggaaaatgctgc

SEQ ID NO: 127294 - DNA, 692 bp, Arabidopsis thaliana
ctctgctccaattaaggctgcctagatcagattcagatggagagcacaagaatcttgttcagatttacggtccaaagatcaaatacgagcgtggatcttccgtggcattcaatatcagggatttgaaaagtggaatggttcatccagagatagtgcagaaactagctgaaagagaaggcatttctctaggaattggttacctaagtcacataaagatcatcgataatcgaagcgaagattcaagttcttggaaaccggtggatcgagaaggaagaaacaatgggttcataagagttgaggttgtcacagcttctcttgggttcttgacaaactttgaagatgtttacagattatggaatttcgtggccaagttcttgagtccaggttttgctaaacaggggacactcccaacagttattgaagaggatgattcgtcagaaacttaaaagacatgagcattggatatattttttccagcacttcctttactgtacttatatgttattatccgagaacattttcttgtatgattttgggaagttatgtgagcagagatgatctcagacacgatttcagatgtctgcatattggaactgttcatcccccctctatctttgtggtgccccattccttgattcatatccaaattaaaaaaccagaagaaatatttaaaaaaaaaaaaaagggcggcc

SEQ ID NO: 127295 - DNA, 866 bp, Arabidopsis thaliana
acgactcactattgggaaagctggcacgcctgcaggtaccggtccggaattcccgggtcgacccacgcgtgcgcggacgcgtgggcaattttctcatagctctattgttcgaaaattctgaaacgaacgttaccactatggacactaagatcggatctatcgacgcgtgtaacccgaccaaccacgatatcggcggtcctccaaacggcggagtctccaccgttcaaaacacaagtccacttcactccaccaccgtcagcccctgcgacgcgactcttggccgttacctagcaagacggttagtcgaaatcggcgtcaccgatgtcttctccgttcctggtgatttcaacctgacgcttctcgatcacctaatcgccgaaccaaacctcaagctgatcggttgctgcaacgagcttaacgccggatacgctgctgacggttacgctagatctcgcggtgttggtgcgtgcgtcgttacgttcaccgtcggtggattgagtgttctgaatgcgatcgccggtgcttacagtgagaatctgcctctgatttgcatcgtcggtggtccaaactccaacgattacggtaccaataggattcttcatcatacaattggtttacctgatttcactcaagagcttaggtgttttcaagctgttacttgttttcaagctgtgattaataacttagaagaggctcatgaacttatcgatactgcgatttcaactgctttgaaagaaagcatacctgtttatatcagtatcagctgtaatttaccggcgattcctcttccgacgtttagtcgtcatcctgttccgttcatgcttccgatgaaggttagcaatcagattggtttagatgcggcggtg

SEQ ID NO: 127296 - DNA, 591 bp, Arabidopsis thaliana
  unsure (1)..(591): unsure at all n locations
gagctctaatacgactcacttagggaacagctggtacgcctgcaggtaccggtccggaattcccgggtgcggcccacgcgtccggccagacaaagaacacgtggcggattctactatgtcggcggcggcgattgatggtgtggcggctctgagatcggtgtttcagcgggtaaaccaggcggcggagaaagcgggtcgtgggtcggatcagatacgggtcgtagcggtgagtaagacgaaaccagtttctctgattcgccaagtatacgacgctggtcagaggtcttttggagagaattatgtgcaagagatcattgagaaggcacctcagcttccagaagatatagagtggcatttcattgggaatttgcagagcaacaaagtgaagcctttgctatgtaaattgactttgctatttcaaagtcctcatctttagtttttttgtattgagttactaaattgggtgtaaaactccacacttgagttctattcttaattctttggtttgatcagctggtggtcctaaccttgtgaccgggaaagtggtaatgatgaaaagattgcaatatgcttgatcgngtgggtggaata

SEQ ID NO: 127297 - DNA, 433 bp, Arabidopsis thaliana
  unsure (1)..(433): unsure at all n locations
ctcccacaaagctgtgaccagaagatcagtgattntccgatgaacgaagaggagccagacaaagaacacgtggcggattctactatgtcggcggcggcgattgatggtgtggcggctctgagatcggtgtttcagcgggtaaaccaggcggcggagaaagcgggtcgtgggtcggatcagatacgggtcgtagcggtgagtaagacgaaaccagtttctctgattcgccaagtatacgacgctggtcagaggtcttttggagagaattatgtgcaagagatcattgagaaggcacctcagcttccagaagatatagagtggcatttcattgggaattttcagagcaccaaagtgaagcctttcctatctggggttcccaacctttttaacccggggaaagttttggttgataaaaatgcatatatgcttgatc

SEQ ID NO: 127298 - DNA, 476 bp, Arabidopsis thaliana
  unsure (1)..(476): unsure at all n locations
cctgggnggcccactgnngtccggacacaaaaaaaatccggtagtttcttctacagaatcagatctttgtatcgtcaatggctccttcttttatttttgtagaagatcgtccagctccgcgtgatgctacttccgatccaccgtctctcttcgacggaaccacaaggttgtacacaagctacgtttgcccatttgctcaacgagtttggatcactcgaaacttcaagggtttgcaagaaaagattaaacttgttcctttggatcttggggaataggcctgcttgggtacaacgaggaaaggtatatccaggcggaacaagggtgcccagcgctttgggcacaattggggaaaaatcattttgggggaggagtcttgggattttgattaaactatcctcgataacacttttttgaagggcccttttctctttaccccgaagatcatgcaaatacagagtttggggacgaattgctca

SEQ ID NO: 127299 - DNA, 418 bp, Arabidopsis thaliana
  unsure (1)..(418): unsure at all n locations
cggacgcgtgggccggaatttagagtctttattgagtttgatcgattttgggattataagtttcgcaaaattcatgttttttacattaagtctattcgatttcagctgtattgggaatttaagttttcctgtggcttgattctattgagacagttttgtagaagatcgtccagctccgcttgatgctacttctgatccaccgtctctcttcgacggaaccacaaggttgtacacaagctacgtttgcccatttgctcaacgagtttggatcactcgaaacttcaagggtttgcaagaaaagattaaacttgttcctttggatcttgggcaataggcctgcttggtacaaggaggaaaggtatatccagagaaccaaggtgcccagccgcttgngcaccaatgggaaaatcantngggg

SEQ ID NO: 127300 - DNA, 509 bp, Arabidopsis thaliana
gcttgccattgagcgtggatggagcgagtcttcctttcccaacgtccgtagcccaccagctgtcggttatgatttctctgagcgtcgcgagaagctcaaatccggctacaaagctacaacaactgggaaattcactgaggctctccgtctcttcctttctatcctgcacaccatccctctagtggtagtcgagacaagaagagaagtggatgaggtcaaggaattaatcgttatcgttaaagaatatgtccttggtcttcaaatggagctcaagaggagagagatgaaagatgatccggtgaggcagcaagagctcgctgcttacttcactcactgcaacctccaaacacctcacttacggcttgcgctgcttagtgcaatgggtgtctgctacaaggcaaagaacctcgccactgcttctaatttcgccagaagactgttggaaacaagcccagttgatagccaagccaagatggctagacaagttgtgcaagccgctgaacgtaaca

SEQ ID NO: 127301 - DNA, 641 bp, Arabidopsis thaliana
  unsure (1)..(641): unsure at all n locations
tttttcgcgtgggtggctatcgataataatagtggatcagaggcacatgctccctcaaagaaattaggatttgggcttgtgggatccggaaagcgaacttctgtgcctttctgttttctatgaggaggatgaagatgaagcacgtaaggctaaaaagatgaaacctttggttcctatagattactcaaccgaggaacaagaggctgtggcccatggtggctcagggaatacaccacctcatttggctttagccgctgaatttgcaaaacgaatttcgagtaccaatcccaaggaagagacgatagaaaccgaaaaacaaaggagcagacgttctcatgataaggcaagccaccgggacagggaaagggaaagggaaagggacagggacagggatagagtcagggaccgaggtgacgggcatagtggtcccaccaaagacggcaaagagtctggaaaagcaaagataattgatactaagtttctggatgcgaaacaattgataggtacaatcccaaagacaaaggaagatttttttttcttacgggataaactgggcttattttatnacaaggcaccaagttnacgnaagaattagaccntggttttaaagaaaattattgngttntcggggnngnggaaac

SEQ ID NO: 127302 - DNA, 656 bp, Arabidopsis thaliana
  unsure (1)..(656): unsure at all n locations
tatacgactcttttagggaaagctggcacgcctgcaggtaccggtccggaattcccgggtcgacccacgcgtccgtacaacttggccaatcaggctattgacagagcagctggagtggatggctcagacggttacttacactctcatcaaacatcgcttgggagatcttttctaccgcttagtgtttcagaagtttgaagatccagctgagggagaagatacacttgtagccaaattcaagaaactgtaataatgatctgacttctggagaacgcgccttggaagatggaactcgagaagcaagcagttttcagaaatcggaagtattcgagcatcgagcatcatctcagtggggtaatgatgagtccatgaatccaggttttgagcccgaaagaaataagtggttgttgtgatatatgttctcgcttcctctcttcatgatttcatttagttgttggtgtacagacaaaaggaatattaactcttacgacaaggttcacaaaggttaaatttcacaattttttagaaagtgagaagcagaagtgatatttcaagagcatgataggaacaatagaaagaacagaaaggtcgannnnnnnnnnnnnnnnnnnnnnnnnnnnnnnnnnnnnnnnnnnnnnnnnnnnnnnnnnnnnnnn

SEQ ID NO: 127303 - DNA, 441 bp, Arabidopsis thaliana
ctcaaattttgaaactaatcatctctctccttttttcaaacatacacagagaatggtggattcgaaaacccctgcgaaaaccaaattgttagattcgtcttcgatttctaatgtcagagtcgtccttagggttcgtccttttcttccccgggagatttcggacgagagttgtgacgggagatcgtgcgtttccgtaatcggcggcgatggaggagataccagcgaagtggcggtttacctcaaagatccagatagctgtcgtaacgaaagctatcagctggatgcgttttacgggagagaggatgataatgtgaagcatatattcgatagagaagtaagccctttgattcctgggatctttcatggtttcaatgctactgtgcttgcttatggagccaccggaagcggaaagacttttacgatgcagggaatcgatgagct

SEQ ID NO: 127304 - DNA, 724 bp, Arabidopsis thaliana
tccggaatcgccggacgcacccacgcgtccggagatttcatgagagatacagttcgatgagtatcagatcgattacattatccatggtgatgatccttgtgttcttgctgatggtactgatgcttatgcacttgctaagaaggctggtcgttacccgcgcgtccggcgcactgaaggagtttctagcactgatatcgttggtcgtatgcttctttgtgtaagagaaagatccattagtgacactcatagtcgttcctctctgcaaaggcaatttagtcatgggcatagtagcccaaagtttgaggatggagcttcttctgctggtactcgtgtctcgcattttcttcctacttcccgcaggattgttcagttctccaatggaaaggggccaggacctgatgcacgcattatctacatagatggtgcttttgatcttttccatgctggccatgttgagattcttagacgtgctcgagagcttggagactttcttcttgttggtatacataatgaccagactgtcagtgctaaacgaggagcgcatcgccctattatgaatctccatgaaaggagcttaagcgttctggcgtgccgctacgtggatgaggtgataattggtgctccatgggaagtgtcgagagatacgatcacgacatttgacatcacgttggtggtacatgggacagtagccgagagcgatgattttcgaaaggaggaagataat

SEQ ID NO: 127305 - DNA, 878 bp, Arabidopsis thaliana
acgacttactatagggaacgctggtgcgcctgcaggtaccggtccggaattcccgggtcggccacgcgtccggcgcaagcaatggtggatgcagctataaaggctgcatcatctgtgaaggaaggggaagatgtgaacacaatgatccaagaagccttagagttggttggcaaaaatcagctattacgcagctctatggtcaaacatcacgagcatgtaaatggcagtatagagcatcatcacaacccatctccttcaaatggatcagagcctgtggctaacaacgatttaaactcacaagatggttcagagaaaaacgctcaaatgccttcagagcttatcacctcctgtgttgccacttggctcatgattcagatgtgcacggagagacagtaccctccagctgatgtcgcacagcttatagacgcagcagtcacaagcttgcagccacgatgcccacagaacctaccgatctacagagaaatccaaacgtgcatgggacggatcaagactcaaatcatgtcccttgtaccaacttgaaaagctaactcatttgggttggttttgttttgaatcttcgttaggtaagtctagtctcctttttactagagtagatgatgacatcttcacctgagaaaatggtgttataagttcacgaattcaagatagcttgaccagaggtattgtagttgctgaacaagcttttggcttattcaggggcttttggtagtgaaccattggttctgcaacgtaaaatgatgtttatgcttatattaaaattctcatcaatgtcgttcagcaatcgctaaaaaaaaaaaaaaaaaaagggcggccgctctagaggatccaagcttacgtacgcgtgcatgcgacgtcgt

SEQ ID NO: 127306 - DNA, 898 bp, Arabidopsis thaliana
  unsure (1)..(898): unsure at all n locations
nnnnnnnnnnnnnnnnnnnnnnnnnnnnnnnnnnnnnnnnnnnnnnnnnnnnnnnnnnnnnnnnnnnnnnccacgcgtccgttcttcttcttctcctctgcttttggaatcattatagtgataagaggagatggcggatataacagaatatctagagagatcgatgcagaattgttcacttattgatcggagaagtagtatgggagatggatttggtatgagcgatgaacatatcccgatctcagatagattcttggagctcagttctcacttctctgttccttctcatttggaacagtgtcttgatcttaagacaggagagatttactacagaagctggaatagtggaatgagagtgaaagaagatccgagaaaatcgatgagtcgtggtaactatgcagaccaatccagtggtgaatcgtctggaacagttttttcatcagaagaagttagctcgtattatgaaagcgaagagtcttcatcagagtcgtctccttcatcaagaaagtatcacaaagaggaacaagacgaagatgttcttgtggtagctggttgcaaagcttgtttaatgtatttcatggtacctaaactctttaaggattgccccaaatgtgcaactcagcttctccactttgatctacttcactctacttctccttgaacctatctttcgttgctgatttttttctcatttcattttcaggttttcttcacatagatttgagggttgtcttctctcgtttcgtcttttaatctcttaactcgtatatgtataaactagtgttcgtgttgtggcattatatttaaaaaaaaaaaaaaaaaaaagnnnnnnnnnnnnnnnnnnnnnnnnnnnnnnnnnnnnnnnnnnnnnnnnnnnnnnnnnnnnnnnnnnnnnnnn

SEQ ID NO: 127307 - DNA, 531 bp, Arabidopsis thaliana
gaaaaagcctacggttgttctgttcctttcaatctcaccaaattttcatcttcaccttcacttttgatagattctcttcaccgaaccaaatccgtaaccctagcttcttcgtaaattatagagaaagagagttaattcgaatctggatgaaattggttttgtctagatggaaatctagatgtgtctgattccgaaatctgagtctgagagatgctaggagcgattcatttgggagtattagcagcttgtttcgtcctcttcgttcccatggcaatggctggttggcatctgagcaggaacaagatgctcttctttagtggcgctttgtttatttctctcccggtttgtgttcatctcacgccttatttcccttccgtttccgacatcggtgcctctggttactgtgctgttgtctacgatcatcgtatctcttgtatcaacgaggttaatcagattgtctgggatgttaaaccggtaccgaatcccgagtctgctcgtttgaacaatggctcaacaaagcttgattatttc

SEQ ID NO: 127308 - DNA, 473 bp, Arabidopsis thaliana
  unsure (1)..(473): unsure at all n locations
ccgagcnnnnnnnnnnnnnnnnnnnnnnnnnnnnnnnnnnnnnnnnnnnnnnnnnnnnnnnnnnnnnnnnngccacgcgtccgattcgatctagtagtcacgcgactccgccgtcgattacatggcttctcaccaccaccacaaccataaccacgtgtgctcacgccaccaaaaccaccacaataacacccctcaattcgccacgtcaccaaactgctgcaacgagatccaaccacccttctccgccgccagcggaggataatcttctccatctcgtcgctacttacctccaaaatcatcaacaagaaactcaatgctcctgcgagacttcttggcaaaacttcaatggtattagaaggcagaaccgtgttttgcgtcagcataagaatggtccacgagaataccaaccaagctggtctggcttggcttctccgcaaaatcgatgatcttgaatcttcactcaacaagttttc

SEQ ID NO: 127309 - DNA, 1130 bp, Arabidopsis thaliana
gcaagtgcgtgatggaagtactattcgggtttatcttcttccagagttccagtttgtgcaaggatttgttgcgggagtccaggctccatcaatgggaaggcgaaccacaaatggaagtgttgttgagacagttccagatgagccgaatggagatgtttctgctgagtcacgaggtcctctaacgacagctcagagacttgctgcctctgcagcatcgtctgtcgaggtttcctctgatccatttgcaactgaagccaagtactttaccgaacaccgtgttcttagtagagatgttcgcattgttcttgaaggcgttgacaaattcaacaatctgattggttcagttcattattctgatggggaaacagttaaagacttggggttggagctcgttgaaaatggtcttgctaaatttggtgaatggagtgccaacatgatggaggaggaagctaagaaaaagttgaaagctgcagaacttcaatgcaagaaagataaggttaaaatgtgggcaaactacgttcctccagctacaaactctaaggcaattcatgaccagaactttacgggaaaggtagtggaagtggtgagtggggaggggctaatagttgccgatggtgctgttccatttgggagtccagcagcagagagacgggtctgtctttcgagtatcagatctccaaaaatgggcaacccacgtagagaagagaaaccagctccttatgctcgggaagcaagagaatttctgtgaccccgacttattggcaaacaggttattgttcaaatggaatattcaaggaaagtcacccaaggagatggtcctaccacatctggagctgctgataggttcatggattttggctcagtgttccttccatctgctgccaaagccgattctgatgaagtgactgcaccacctgctgcagcaattgctggcagtcagccggttggtgtgaatattgctgagctcgttcttgtccgtggttttggaaatgtggttagacatagagattttgaagagcgatcaaaccattatgatgctcttctggctgctgaagctcgtgctctggctggaaagaaaggaatccattctgcaaaagaatctccagccatgcacatcacagacctaactg

SEQ ID NO: 127310 - DNA, 312 bp, Arabidopsis thaliana
gtcttcgtacctttctgcttctacgccgtcaaaatctaactgctcgacagtgaccatgcaaagctcaatgacaatggaactacgaccatcaggtgattccggttcatctgacgtcgattgctgagatcagcgatggcttttcaccgctcgatacttctcacagagactgtcccgtgatgaaggttcgttgctgagaagagcagagatgtatcaagactacatgaagcaagtaccaatcccgacgaatcgtggctcgttgattccgttcacaagctgggttggattaacgatttcaatgaaactgctttatgg

SEQ ID NO: 127311 - DNA, 546 bp, Arabidopsis thaliana
  unsure (1)..(546): unsure at all n locations
nnnnnngtattaattgggttttgagaaaaggagaaaactttcgtcgatcggaagatttttcagatacgaaaaatggcggtacagtggcttttggtgtgtcacgggatgatgacgttgacggtggtcatctccttcctctgtggtcaatggccaatcttcaaaggcacaccttttcaatggattcactacttcctcactttcggcgcctacgattacttcctgagatttgtcggatttgtgtttggttccaagggtacggacgtgattctttctgtggagtatttctgctgcgatcgtcctaatccgattctgcaagtcatatatatagccattatgggatcaacctactttttgactgcaaaatcttctttcatctatatacctggatattatcttggcgatgttcacaagtacacaagctttctagctgttattggtggtgtcatacttttcttattaacatgcttttctgatccaggtactgtgaacgctgagaaatgttcacggtacatttctgcttacccctatgatgatatcatttactcc

SEQ ID NO: 127312 - DNA, 284 bp, Arabidopsis thaliana
ttgtgacccgtgtggggacaataagttggtggaacactggctcggcccacgggtcggatctgttgtggcattgttccgggctgcccagtccaagctgagagtgatccgtgtgtgttaagcgaaggcttggctcaggcggttcttgcagtggagggcaatgcgtgaggctggtttcacagagcagcgatcacctcccgctctcagcagtggacggatcacagctcgacgccactcagattcaccatggcctgctggctcgttcccagctggaccaccaatttttg

SEQ ID NO: 127313 - DNA, 431 bp, Arabidopsis thaliana
gccgccgatgaatccttctcacggtggcgacgacaagcaacgaccggcgatgtatccccaagttgatcaatccattcctgataatccttttgcttctacaaatccttacgtcgcttcttccccttatctctatccttctctatcctctcacaatctcggacctaatctcttcccagaccacggagatgcatccaacgaccaatcaccatctgctcctcctcaggcgacggaggaggttctcatccgtgttcccggcgctattctcaaccttatcgacaaatcctacagcgttgaactcgcgtgcggtgatttcaccatctttcgaatcatccaggggcaaaatattgtagcggttctagctaatgttgggaatgagattcaatggccgttgacgaagaacgaggttgctgcgaaggttgatggatcacact

SEQ ID NO: 127314 - DNA, 827 bp, Arabidopsis thaliana
agctctctacgactcactatatggaaagctggcacgcctgcaggtaccggtccggaattcccgggtcgacccacgcgtccgcggacgcgtgggcggacgcgtgggcttccttgattatcggccaatcatagaacaagaagtagagaaagcagaagatacactacagagacagagagagatcttgacaagatgggtaaagcaagaggagtgaacaatggcgtgaatgaaagttctctcggttatctttttggttccggccagccttcttccgctgctgctgccacaatggggactactactactacaaccaccacaactaccaccgatgggaccggaggcagaccgataaccaccacgacgaccacagtcactgataacaagaagacatctgcaggtgttagaggaagtcctaataattacttcagatcagaaggccaaaactgtggaaactttctcacggacaggccatctactaaggttcatgcagctcctggtggaggatcttctcttgattatctgtttggaggaccaagtcctgctggatctggaaacaaatgaagttacttgtagtttttttcccactattcagattcgtgtaaatcatcaaaagtgttggcttttatcccttagtgaaccctgtgtgattcaattgtgatgtttgccttttgttctcttctttgtcttgttaaaaggaattttcagacaatgttctctttaagagttccaagaaaataaactaagtactgagcaaaaaaaaaaaaaaaggacggccgctctagaggatccaagcttacgtacgcggctatgccacgtcaaagctcttctat

SEQ ID NO: 127315 - DNA, 772 bp, Arabidopsis thaliana
  unsure (1)..(772): unsure at all n locations
ataggaaaagctggaccgcctgcaggtaccggtccgaatttcccgggtcgacccacgcgtccgccgattcttataactgtttccctctcatctttacacaaaagtattctaatcgatttcaatggcgggtcgtggtaaaacactcggatctgggtctgcgaagaaggcaacaacaagaagcagcaaagccggtctccaattccctgtgggtcgtatcgctcgtttcttgaagaaaggcaaatacgccgaacgtgttggtgccggagctccggtttacttagccgccgttctcgaatacctcgccgctgaggtattggaattggctggaaacgcagcgagggataacaagaagacgaggattgttccaaggcatattcaattggcggtgaggaacgatgaagaattgagcaaattgcttggagatgtgactattgctaatggaggtgtgatgcctaacattcacaatcttcttcttcctaagaagaccggtgcttccaagccatctgctgaagacgattgattaatcaaccaaatccactctcttgtgttttttgagtttttaaggctttttaagagtaatttagattagatctatggtgaagaaagaatctatcttctgtgttttttgaattgaattgaatgttcatatgcttccaattcttatggaatcaagattttaacttttcaaaaaaaaaaaaaaagnnnnnnnnnnnnnnnnnnnnnnnnnnnnnnnnnnnnnnnnnnnnnnnnnnnnnnnnnnnnnnnnnnnaac

SEQ ID NO: 127316 - DNA, 709 bp, Arabidopsis thaliana
  unsure (1)..(709): unsure at all n locations
ctctaatacaactcattttagggaaagctggtccgcctgcaggtcccggtccggaattcccgggtcgacccacgcgtccgcccacgcgtccgtacggttgcgagaagacgacagaaggggataacaccaaattcgattcttataactgtttccctctcatctttacacaaaagtattctaatcgatttcaatggcgggtcgtggtaaaacactcggatctgggtctgcgaagaaggcaacaacaagaagcagcaaagccggtctccaattccctgtgggtcgtatcgctcgtttcttgaagaaaggcaaatacgccgaacgtgttggtgccggagctccggtttacttagccgccgttctcgaatacctcgccgctgaggtattggaattggctggaaacgcagcgagggataacaagaagacgaggattgttccaaggcatattcaattggcggtgaggaacgatgaagaattgagcaaattgcttggagatgtgactattgctaatggaggtgtgatgcctaacattcacaatcttcttcttcctaaagaagaccggtgcttccaagccatctgctgnaagccggttgnttaatcaaccaaancacccccttgnggttttttnagttttaaggttttaaanngaattntggtntnccaatggtnaaaaaaactacccctggggtttttnattaattnatgnccattg

SEQ ID NO: 127317 - DNA, 647 bp, Arabidopsis thaliana
atcacaaatcgtgtcatcactttgtggtataggccccctgaattgttacttggtgcaactaaatatggaccagcgattgacatgtggtcagttggatgcatatttgctgaacttttgaatggaaaaccaatcttgcctgggaaaactgagaatgaacaattgaataagatttatgagctttgtggatcacctgatgaaagcaactggcctggagtttccaagatgccttggtataaccaaatgaaatcatctcggcccttaaagagacgcgtaagggagatctacagacactttgatcgccatgcccttgaactacttgagaaaatgttggtacttgacccatctcagagaatatgcgcaaaggatgctcttgatgctgagtacttttggactgatccgctgccatgtgatccaaagagtctaccgacatatgaatcatcacatgagttccagacaaagaaaaaacggcaacagatgcgtcataatgaggaagcagccaaaaaacagaaactgcagcatccacagcagcaacattctcgtttacctccacagcaacatggtgttggccagtctcatgccgctccacttttggcctgctggacaaaccaccctatgaacaacaacgcaccaaacacccaaatacctgc

SEQ ID NO: 127318 - DNA, 550 bp, Arabidopsis thaliana
  unsure (1)..(550): unsure at all n locations
nnnnnnnnnnnnnnnnnnnnnnnnnnnnnnnnnnnnnnnnnnnnnnnnnnnnnnnnnnnnnnnnnnnnccacgcgtccgcaaaatgccaagaccaagagtttcagagttgtctcagaggcaagctccaaggctgaggtcatcgtcatctacttctgattccaatcattccaaccgtctgatcactacggatcaaagttttaagcccggtgttgacgcggaaatctcctcgaagcggtggacctaacagtgatccgcttggtcagaagaaacttgggggacgaatatcggatctagagtcgcagttaggacaagcgcaagaggaactgagattgctcaaggagcagttggctaatgctgaagctgtgaagaaacaagctcaagatgagcttcataagaagtccaagaaaccaaaccccctggctcgagtggaggaatctgcaactgaggctgagaggattgatagacaccaaatccctggtgatgtgcaaaaagaaactggtgtgtttgaggttcccgctgaaaagattgccgganaagaaaaagaactgg

SEQ ID NO: 127319 - DNA, 896 bp, Arabidopsis thaliana
  unsure (1)..(896): unsure at all n locations
aatatcttctggaagctaccatcactctctcctatataactcaaaattcaccatcatcttcatcatcatcatcatcatcatcctttctttatccaactttcttcaccaaatcgattcttcttcaaccatgtcttccttcacctccaaattcgccgatgagctgattgctaacgctgcttacatcggaacacctggaaaaggtatccttgcggcagatgaatcaactggtactattgggaaacgtctcgctagcatcaacgttgagaacgttgaatccaacagacgtgctcttcgtgagcttctcttcactactcctggagctcttccttgcctcagtggtgttatcctctttgaagaaactctttaccagaagagctctgatggtacgccttttgttgatatgttgaagagtgcaggagttttgcctggtattaaggttgataagggtaccgttgagcttgctggaaccaatggtgagactactactcaaggtcttgatggtcttggtgaccgttgcaagaaatactacgaggctggtgctcgtttcgccaagtggcgtgcggttcttaagattggtgttaatgagccatctcagttagctatccatgagaacgcttatggattggctaggtatgctgtcatttgtcaggagaacggtcttgtgccgattgtggagcctgagattcttgttgatggctctcatgacattcagaaagtgtnccncggtgacagagcgtgttctttcanncttnctacaagggtctgagtgatcaccatgtcttnctaagaaggnanactctttgaaacctaacaataggttactccanggtcacagagttcgaaggtttcaccnnaaggggtttcttnggacanatttccntgcncnttaaagggca

SEQ ID NO: 127320 - DNA, 556 bp, Arabidopsis thaliana
ttctatccaattcatttagggaagagctgtgccgcctgcaggacccggcccggatttccggggtcgacccacgcgtccgcccacgcgtccgtttttttatccaactttcttcaccaaatcgattcttcttaaaccatgtcttccttcacctccaaattcgccgatgagctgattgctaacgctgcttacatcggaacacctggaaaaggtatccttgcggcagatgaatcaactggtactattgggaaacgtctcgctagcatcaacgttgagaacgttgaatccaacagacgtgctcttcgtgagcttctcttcactactcctggagctcttccttgcctcagtggtgttatcctctttgaagaaactctttaccagaagagctctgatggtaattgacagtttaacatcgctatatgtctgaatctgtgtatcatcgttgactttgattggggttgattttggttgtgatgcaggcacgccttttgttgatatgttgaagagtgcaggagttttgcctggtattaaggttgataagggtaccgttgagcttgct

SEQ ID NO: 127321 - DNA, 883 bp, Arabidopsis thaliana
  unsure (1)..(883): unsure at all n locations
ccgaaacaaagtagcagaacaaagcatatacaaaagcttcattgcctcgagattaaacagcatcaagacaacatccaaaaattacccaggtttttgtgtttgaaactccaagattgttgcggtattcctgaaagactaaggcttttagctccaggtttccaagagtgctgtgaatcagctcccactctgtctctgcatattgcaagacaccggttttgtttcagaagtttgtttcttcttgtctcatgatcacgagttttcagcaatggggtatgtaaacgtggagaagagatgggtttttcctcttgtcatcacatctgtcgtctgcgtttttcttcttgcaacttctttcaacatgggactagtctcttccctccgaacaatcaacgggattttctccatcataccttcccgtctcgtcaagaaccaaacgagacttgattttgcagagtctaaagttgctagacaaacccgtgttttgcctcatgaagacaagcttccccgttttgcataccttgtttccgggtctaaaggggatgtagaaaagctttggagaacacttagagcagtgtaccatccaagaaaccagtatgttgttcacttggatcttgaatcacctgtgaatgagagattagagctggcctctcggattaataacgntcctatgtactctaaaaccgggaatgtatatatnataaccaagggtaaccttgtggcatnttaagggcccacggntggtggaaatacttttnaaggttnncctgttcttctcaaggggaattngncctggggttggtttttaaccttngnntttaaatttncctttggggcccaggtgnctggntnancggttaacantgggccggacctanttttttggcca

SEQ ID NO: 127322 - DNA, 483 bp, Arabidopsis thaliana
atacgactcactttagggaaagcacgtacgcctgcaggtaccggtccggaattcccgggtcgacccacgcgtccggccattattggataacagttattcgtctgggttcagtgaagatggagcagaacgagttcatggaggcaataatgtacgttaatggtgttcgtagagttttgcctgatggattagctcacatgacgcttctcgaatatctcagagatttaggattgaccgggacaaagctcggatgcggcgaaggtggttgtgggtcttgcaccgtgatggtgtctagttatgaccgagagtcaaagacatgtgtgcattatgctgtcaacgcttgcctagcacctctctactctgtagaagggatgcatgtaatatccattgaaggaggtggtcatcggaaacttggcttgcaccctctttaggagtcatgggcattttcgcatgggtcttaatgtggggttttgtacttccgggttt

SEQ ID NO: 127323 - DNA, 423 bp, Arabidopsis thaliana
  unsure (1)..(423): unsure at all n locations
gtactggttatggttatggaagcaatngtgtaggttatnggggttttggtgggtatggcaatccanctggtgcgcctnatgggaatcctagtgtccctggagctgggtttggaagtggtccaagaagttcatggggcgctcaagcaccatcgggttatgggaatgtgggatatggaaatgcagctccgtggggtggttctggtggtcctggttcagcagtaatgggtcaagctggtgcatctgcaggttatggcagtcaaggttatggctatggtggaaatgattcctcttacgggactccatctgcctatggtgcagtaggggggcgatctgggaatatgcctaacaagcatggtggcggtggctatgcggatgctttagatggctctggaggctatgggaatcaccaagggaacaacgggc

SEQ ID NO: 127324 - DNA, 657 bp, Arabidopsis thaliana
  unsure (1)..(657): unsure at all n locations
nnnnnnnnnnnnnnnnnnnnnnnnnnnnnnnnnnnnnnnnnnnnnnnnnnnnnnnnnnnnnnnnggagccaagcgtgcgcccacacgtgcgcccacgcgtccgtgttcgtgttcgtggagcggaggacaacgtagttggtttccgcgtgctgtacgagacagataacttctacagagagaaacaaagatcgagacaaaaagaaacccttaaaggatttgaacggagaagacgaggaaaaacaaagacacaactctaacctttagagagagaaaaacaaatgtcgttccgtagcatagttcgtgatgtgagagatagtataggaagtctatcgaggcgtagtttcgactttaagttaagcagcttgaacaaagaaggtggtaaatcccgtggttcggttcaagattctcatgaggaacaacttgtagtaacgattcaagaaacaccgtgggcgaatctacctccagagttattacgtgatgtgatcaaaagacttgaagagagtgaaagtgtgtggcctgctcgtagacatgttgttgcttgtgcttctgtttgcaggtcatggagagatatgtgtaaagagattgttcaaagtccggagctctcatgcaaaatcacattttcttgtttgttgaaaaagnctggaccaagagatgcaa

SEQ ID NO: 127325 - DNA, 1072 bp, Arabidopsis thaliana
  unsure (1)..(1072): unsure at all n locations
atgattcatnnnnnnnnnnnnnnnnnnnnnnnnnnnnnnnnnnnnnnnnnnnnnnnnnnnnnnnnnnnnnnnnnnnnnnnnnnccacgcgtccgaacgaacgaagatccaaagatgagtgaagaagcatatgaagaaactcaggaatcaagtcaatctcctcgtccggttccaaaactgaacgagaggattctctcaacactatccaggagatctgtagctgcacatccatggcacgaccttgagattggtcctgaagctccattggtcttcaatgtggtggttgagatcacaaagggaagcaaagtgaaatatgaactcgacaaaaagaccggtcttatcaaggttgaccggatcttgtactcctccgttgtttatccacacaattacggattcatcccacggacattgtgtgaagacaacgatcctcttgatgtccttgtccttatgcaggaaccagtgcttcccggatgtttcctccgtgctagagccattggattaatgcccatgattgatcagggagagaaagacgacaaaatcatagccgtatgtgctgatgatccagagtacaaacatttcacagacatcaaacaactcgctcctcatcgtctccaagaaatccgccgtttcttcgaagactataagaagagcgagaacaagaaagtggctgtcaacgatttcttgccatcagagagtgcccatgaagctattcagtactccatggatctatacgctgagtatattctccacacgttgaggagatgagcatcaacagcaacatatgattctcttcgcagcatccgcatataaatatatttaaatggaatattattttacataattcatagccatatgattggctttttgcagttttttgttttgttttgttttctgtttgtttttttccttgtgatgatgcaattttgttcaattgtataatttgaaactggtaagatataatgacaaacgcagttttgcctaaaaaaaaaaaaaaaaaagnnnnnnnnnnnnnnnnnnnnnnnnnnnnnnnnnnnnnnnnnnnnnnnnnnnnnnnnnnnnnnnnnnnnnnnnnn

SEQ ID NO: 127326 - DNA, 533 bp, Arabidopsis thaliana
  unsure (1)..(533): unsure at all n locations
tacttcagctctctacgactcactattgggaaagctggcacgcctgcaggtaccggtccggaattcccgggtcgacccacgcgtccgcggacgcgtgggcgtcgctgtcgctgtgtctctctttctccctctgttccatagatctgagcttctatcaatattctcggatcgctatcagtcaaatcttaagaatttcgtcgctttagctcaattcggattgtggaggaagttttaggatttgatctccatctcgtatccaagcatggttgctcctgtgcctccaggggcacctagacccaacagccagcaaaattccgggccacctaatttctacccgggttcacaagggaactcaaatgctttagccgacaatatgcagaacttgagcttgaatcgaccacctccgatgatgcctggctcaggtcctagaccacctcctccttttggtcagtcaccacagcctttccctcagcaatccccttcttatggagcntccgcacgtgngccttcacccatgtcccggcctggacctc

SEQ ID NO: 127327 - DNA, 636 bp, Arabidopsis thaliana
  unsure (1)..(636): unsure at all n locations
nnnnnnnnnnnnnnnnnnnnnnnnnnnnnnnnnnnnnnnnnnnnnnnnnnnnnnnnnnnnnnnnnnnnccacgcgtccgcccacgcgtacgaaaaaaaagtgtttactttttgggttcctcttcggtgggttcactacactagtaacatctctgaacctgttctctgtctctcagcagcaaaacctcgaggcttctttttctttcattctctcaatttcttctctctgatctgaattctcgccgagtgaatctagaaccaggcaagctccaattaggtttaaggttttcaagcactctgtttccaatgctgcttccgagatggtttgcagaagcgttgttgctcctactttcaattcttgcctgttcaaacgctgcatttatcggtgtaaacattggcactgatctcaccaacatgccaccgccttcagacattgtaacacttctcaaatcacaacagatcacacaccgtccgtctctatgatgctaatagccatatgctcaaagcatttgccaacactagcatcgaagttatggtcggtgtaccactgaagaaatcctcaaaatcggacggtttccttcagctgcagctgcttgggttacaaaaacgtcgctgctgatattccttcaactaatat

SEQ ID NO: 127328 - DNA, 606 bp, Arabidopsis thaliana
  unsure (1)..(606): unsure at all n locations
nnnnnnnnnnnnnnnnnnnnnnnnnnnnnnnnnnnnnnnnnnnnnnnnnnnnnnnnnnnnnnnnnnnnnnnnnnccacgcttccggtgaggggagatctttcagagtactgggtttcaaccagagtcaaagggccatttttgtacagactttgatgaggtatggagctggcaattttgattggaaggagtttgttcctcgcttaaagcagaagacctttgaagaaataaatgaatatggaatactcttcttgaagcacattgctgaagaaatagacgagaattctccaaccttttcagatggtgtgcccaaggaaggacttagaatagaagatgttctagtcagaattgctcttctgatactagttcaggagaaggtgaaatttgtagaagatcatccagggaaacctgttttcccctctcgcattcttgaaagattccccggactgagaagtggaaaaatttggaaggaggaacatgacaagataatgatacgtgctgttttaaagcatgggtacggacggtggcaagctattgttgatgacaaagagttggggatccaagagcttatctgcaaagaattgaatttccctcacataagtttgtct

SEQ ID NO: 127329 - DNA, 360 bp, Arabidopsis thaliana
tatattatgtaaagaacctgaaaatgattgatattagaagtgtgcgcagtttattagatgagttttttttctatagatcatttggaaccaactccgttgatggaaggtgaggggagatctttcagagtactgggtttcaaccagagtcaaagggccatttttgtacagactttgatgaggtatctactttccattaaggcctttagacgccagaagctattctgtctaaattttacagtttcatcccccgatgtatctaaattatcatcagtcgtgtggtgctcaagccccacaagtttttccaggttgcgcctaataattgcaggtatggagctggcgattttgattggtaggagtttg

SEQ ID NO: 127330 - DNA, 613 bp, Arabidopsis thaliana
  unsure (1)..(613): unsure at all n locations
accacgcgtccgcccacgcgtccgcccacgcgtccgctgattccaaagatgatcttctgaaaacatcgaccatgcaggaaaaagcaagcaccttcgccgtatagtcttcgctctgaccgtcctcacagctatctcagagatccaggaagggcgtcagtacctgtcctatgtcgtgatttcgacctcgatgccctctgcctaatataataagagtcagattggtcttatttgtggtttacatgacttggatttgatttagttttctttctagttgtagatatatctctttcgctagctgctcttatggtaagtctttcccactcgtgctcgacgtctctgttgtctggatcttgaaagtttcattcaatctaggagccaaagattgaaagcagggaagcgattagtactttatcgaacttttgttagagatatactgttgcttccagagttcttacttggaagttgattgtgttatatgtgaacggagctcttcaatatttgaattcatagtgaaaagtggtttaaaaaaaaaaaaaaaagnnnnnnnnnnnnnnnnnnnnnnnnnnnnnnnnnnnnnnnnnnnnnnnnnnnnnnnnnnnnnnnnnnnnnnnnn

SEQ ID NO: 127331 - DNA, 631 bp, Arabidopsis thaliana
gtaccggtaccggaaattcccgggtcgacccacgcgtccgccttttatatatgtggaaaactgcatttattaagaacagtttagaaagtgtcaacccctaaaggaatgtttttagtttagaggaaagagagagaagaagaagcagcagcagaagttgttaatttgaagactatttgaggaaagacacctatatctaaatactcaaagttacaaaaatattacttcagaaaacagttccattagagagactcataaagcttctcatctaattatgagtggattgatgagttttggtgaattagaagaccaatttggtcagattttcagacactactatggaagagaggataccatttctgcaaatgcttcaatgcttagaacacccttttcacaacaacagaaccaaatcagtttctccaatcacttctccagatccaaaccctagaatcaaagagctgtctcacccttgaaacaaacatcaaaagagatccgggtcaaacagatgacccggaaaaggatccaagaacagaaaacggagcagtaacggtcaaagaaaaaagaaaacggaaacgtacaagagctccaaagaacaaagacgaagttgaaaaccaaaggatgactcacattgccg

SEQ ID NO: 127332 - DNA, 726 bp, Arabidopsis thaliana
  unsure (1)..(726): unsure at all n locations
cctttccccaccttatcgccccttgggaactgtccccntcgntccgnccggatcccggcacccacccgtccggcataataggtggctcccaagaacgatgatgcccagttggcagtttttattgagagtgtgtttctgaacgaacaggtggaagccattaagaaaatctcagaatatggttctcaacttaggagacttggcaaaggacatggaacatggcatttcgatcaggagcttcttggtgctgctgcttaatctgagttttagctgtaatctcgcagtttggttaacttttgagttattttgagtatgagatgtaacttttaaggtagatttgatcaatatcgattctgttgtgagagaaaacaagctattacgctccttggggttaactttctttgtgttttcagtattatgggtttggccacttccgaatatcactttcctttagaacatttcaaatcagcagttgttttgaggtgtaatgccatggccactgattttttctaacaaaaaaaaaaaaaaagggcggccgctctagaggattcaaagcttacgtacgcgtgcacgcaaacctgtagcttttttattgtgtcacccaaaaataactcgctggccggcgttttacaacgtcgtgaagtggggaaaaacccctgggggggtacccccaaacctttaacattcccccttttgccaatataacaatatcctccccctttttttccg

SEQ ID NO: 127333 - DNA, 841 bp, Arabidopsis thaliana
  unsure (1)..(841): unsure at all n locations
atttctcctccaatttcgtcgcacacaggaaaacaaaatgcttctcaaagctgcttctactttcgctctattgaacattcatggggagaagaaagacatctctcctctcttctcctcctcctcctccatttcgtctccggtttcttctggaaaatccggcaatctctctttccctcttcgtgcttccaagagttcaaccactaccacaagcacgttgagcggcgttgtgttcgagcctttcgaagaggttaagaaagagatggatctagttccatctggtcaacagctttctcttgctcgtcatttgtactcccctgagtgcgaagccgccgtcaatgagcagatcaatgttgagtataacgtgtcgtatgtgtatcacgctttgtatgcatatttcgatcgtgacaacgttgccctcaagggtctcgccaagtttttcaaggaatcgagtgtggaagaacgagagcacgctgagctgttgatggagtatcagaacaaacgtggtgggagggtcaagttacagcccatggtgttgcctcagtctgagtttgatcatcctgagaaaggagatgctctctatgctatggagttggctctttcattggagaaactagtcaatgaaaagctcctaaacctgcacagtgtggcttccaagaacgatgatgtccagttggcagattntattgagagtgtgtttctgaacgaacaggtggaagccattaagaaaatctcagaatatgtttctcaacttaggagacttggcaaaggacatggaacatggcatttcgatcaggagcttcttggggctgctgcttaatctgagttttagctggaatctcgc

SEQ ID NO: 127334 - DNA, 553 bp, Arabidopsis thaliana
cggacgcatgggtcctaatgttcgttctgctctgggttcgccattagccaaatctatttactccattgatggtgtagttcgagttttctttgggtcagattttgtcactgtaactaagtcagatgatgtatcatgggatattctcaagcctgagatatttgcagcagtcatggatttctattcttctggccagcctttgtttctcgactcacaagctgctgctgccaaggatactgccatcagcgaggtaaaacccctcccgctctattaccctcgtgatcgcttcctcactttcccattagtttgttttgtttagagtgtgattttctggacctcctggattcttcagggtgattgtttcttatatagtttgtgttggttgtctggtgcatgattgaacatcttcttgagcatttgttgagggattggagagtgatagtttgctgtaaactttatatagacatgatatacttggttatggcatccatgccagttgctttaatgagctaatagaatatgagtaaagatcttcaagcgaacgcgtggatccccc

SEQ ID NO: 127335 - DNA, 461 bp, Arabidopsis thaliana
gctgacccgcctgcaggtaccggtccggaattcccgggtttacccacgcgtgcgggaacggtgacgattctatcaactcctctctctccaagacttacatttctctgtgaaacaaaactgtcattatctcggagcaatcgctcggtatgttgttcattgagtgaagaaccaaaagaccaatgcttgagtcggagaagtcttgtttatgttttagttgcttcgccgtgtttgttgttaccagcgttgtcttcatctgcgaagactaaatcaaagagtccttatgatgagagacgggtactagaacagaacaggagggtaccgagagggaacaatgcttcctgacgaggttcctaactttggtaagagaaggttttagggaaagggatcacgctctcgaaagttacataagggttggttcggggcctgaaatggggggggttggaagggcgggacagggcgcc

SEQ ID NO: 127336 - DNA, 609 bp, Arabidopsis thaliana
cgaaattgggatggtggggtaaatgcaaggagtattggaagaagatggatactgaaggtgttactaaggatcttttttcgtattccatttacatggatatcatgtgcaagagcgggaaaccgtggaaagctgtgaagttgtataaggaaatgaagagtagaaggatgaaactcgatgtggttgcttataacactgtgattcgagccattggagcgtcgcaaggtgttgaattcggtatcagggtatttcgggagatgagggaaagaggttgtgaacctaatgttgcgactcataacacaatcattaagcttctatgtgaagacgggaggatgagagacgcgtatcggatgcttgatgagatgcctaagagaggttgtcaacccgattcgattacttacatgtgtctcttttcccgtttggagaaaccgagtgagatcctaagtctgtttggtaggatgataaggagtggagtgaggccaaagatggatacttatgtgatgctaatgaggaagtttgagagatggggatttcttcagccggttttatatgtgcggaagacactgaaagagtctggggattctcctgattcaacggcatttaatgctgtga

SEQ ID NO: 127337 - DNA, 474 bp, Arabidopsis thaliana
gtgagagagaacgtaggaggatctccggtaagcgttgtaagctgtttctctcatgaagatgtaacgttcctggaggaacacgggaagagcatcggcgcaagtgtagaacattgttgacattgcgaatgcgaagaaccctaaccgctcttgaactccttttggtgaattatccaatcgccagaatacggtggctaagatgaatccggtgacgattacggtggctaatcgcattccgagtagctccggttgtcgtcgggagttgaggattgagcgtctggtgagagttttgatttcgatccagaacggattcgcgaatgcagggacggctaaggttccgccaccgtggtttatgacggaggaaccaccgccgccaccggagactagatttcctctgcttatgctggcggaaatcgcttctttcaaggttaaatttgggtttggagaagccggcggagttagggtttgaggattgct

SEQ ID NO: 127338 - DNA, 451 bp, Arabidopsis thaliana
ttcaccgtcacaacttgtgcttcctttcgtcctcgtcgccgtcgtcagagagaaaacgattaaagctggtggtatggggagagataaagaagataagacagagatggattcggttgttccatggatgagagctccggttgacgtcagcaatgtcgaaaactgcgctctcgataccctcccttgccttaatcccaagttgaagaaggcattggagaacatgggcatatcttcactatttccagtgcaagttgcagtttggcatgaaactatagggccaggtggttttgaaagagacatctgtgttaactctccaacaggaagtggaaagactctttcttatgctttaccaattgtgcagctccttgcatctcgtcctgtgagatgccctcgtgctttagtcgtattgccaacacgtgatttagccttgcaggttaaagatgtatttgatgca

SEQ ID NO: 127339 - DNA, 540 bp, Arabidopsis thaliana
  unsure (1)..(540): unsure at all n locations
nnnnnnnnnnnnnnnnnnnnnnnnntggtacgcctgcaggtaccggtccggattcccgggtcgacccacgcgtccggtttctcagtgtttcggctcggcccagaacaagatcgcaagacttcaagatgccgtcgcacaagtcgttcatgattaagaagaaattggggaagaaaatgaggcaaaacaggcctattcctcactggattcgtcttcgtaccgacaacaccatcaggtacaatgctaagcgtaggcattggcgcagaaccaagcttggattctaagaggtttacttttgcttattgtgagagctttgttcttttgaaaaagactttgttttctttatcagttttgattgttcacatttgtgtaagacgatctttaatcatttatgtttccaaagtttcctgtagtaacattgagtttttcattagtttaaagatttggaaaaaaataaaataaagaaaaaaaaaagggcggccgctctagaggatccaagcttacgtacgcgtgcatgcgacgtcatagatcttgtatagtgca

SEQ ID NO: 127340 - DNA, 505 bp, Arabidopsis thaliana
  unsure (1)..(505): unsure at all n locations
tgggaaaacttgntnccnccncaggntccccgggtcccgggaanttcccccccgggnnnggnccccnttggggnccccggntcgcncccccggtccgggcagttgggaattatcctggacttctaaagatgccgtcgcacaagtcgtttatgattaagaagaagttgggaaagaagatgagacagaacaggcctattcctcactggattcgtcttcgtaccgacaacaccatcaggtacaatgccaagcgcaggcactggcgtagaaccaagctcggattctaagtgataagccttctaaaagagtcttctttatctgtttggtttagcatttcctcaagtcttctttttgttttaagttatgacattttcatatttctgtaagacttttactctattatgattcatgttaccaaattttcttcgtattgggagttgattcttaacatttgcgtgatttgactattgaagtatctcttggtttgcttccatgtaaagttgtttct

SEQ ID NO: 127341 - DNA, 666 bp, Arabidopsis thaliana
  unsure (1)..(666): unsure at all n locations
tgcagtttcatcccttgatcatatccttagtcaagatgctacacgaatgcagaaagagcttgtgaatgtcttagtcaggtccaacagaggtgaagcttggagatggcaacttatgtccaagcatttctaccctgaatctgtttacggtgatgaaggagacaaacctcaaatgcgttggcgtagaccgtccgctttcactgaaattgcctcttcttatgatgatgtcaatgcaaccaaatctcagagaaaccccaatggcttaccaaacccttctcatcgaagaatttccggtggatctgatgcttcaaagactaaacagacgctccaaaatagctctggaaactcggatggcgaaatggcggaagaagatgttcttgacattgtatttggttgttcagaagcaacagagagcattcctgcgccagttatttcaaaacttgctagcaaaacgcaaactngcaaacagnaaagagctcaacggagacagaggcttaaaaaccgtgaagcttccacaaatactcctcagtatgaacttgcatagagaaaacaaaacaattatgcttcttctgctttatgtttatcacacatgtatttgtctctttatcgattgcttaagttcttattccaatttatcattttgaatctcattttatgaaggatgattat

SEQ ID NO: 127342 - DNA, 627 bp, Arabidopsis thaliana
gaatccagttcatcactattaggaagtggtcgctgcagtccggtcgattccgggcgccacgcgtcgcgtggaaactgagtcttgcttaaaaatgtggagcaagatcaaccattatcaatgcaaagtgccctaattccatccaggaatgctttggtatcagttgaccttttaagccatcctgattctgatgttagggtttcagttgtctcttgcttaaccgagattgtgaggattactgccccagaaaccccttacagtgatgatctaatgaaggagatcttcaggttgacaatagaagctttcgagaaattagctgatgcctcctctcggagttataagaaagccgagtttgttcttgataatgttgcaaaggtcaaatcgtgtttggtgatgttggacttggaatgctatgacctcatcctacaaatgtttcggaacttcttcaaattcataagatctgatcatcctcaactggtcttttcgtcaatggaattaataatgattgcaataatagatgaaaccgaacaagtgtccacggatttgcttgatagtctcttagcaactgtcaaaaaggaaaatcagaatgtttcaccaatgtcttggagtcttgcggagaaggttcttagt

SEQ ID NO: 127343 - DNA, 500 bp, Arabidopsis thaliana
ctgtgatccagagcttgactcctgctatttcaaaccccttcagggtttatagaatttttaggaatccgagagagaaaaattcagggaagctcatttccctttctcaattcctagacttggcaaaaacttacacttctctctccggtgttttgatcagtgtagagaatgcagcatacttgagagagaagcaagggcttgacgtggttcaagcggttctcgatacactcaccgaagctggttacagcaatggaacaaccacaacaaaggtcatgattcagtctacgaacagctcggttctagttgacttcaagaagcagagcaagtacgagactgtgtacaaaattgaagaaaccattggtaatattcgtgactcggccatcgaagacataaagaagttcgctaacgctgtttgtcatcaacaaagattcagtctttcccaaactctgattcgtttctcactggccaaaccaatgttgtgagagggttgcagaagtctcagc

SEQ ID NO: 127344 - DNA, 523 bp, Arabidopsis thaliana
cggtcgcgtgggttccattgagaatattcgtctcttctttctttcgttctcaattcccatcccatattccccatggcagcttctttttgcggcagccggagatacgatgttttcccgagcttcagtaaggtagatgtccgcaggtcattcctcgcgcatcttctcaaggagctcgaccgcagattaatcaatacgttcacagatcatggtatggagagaaacctcccaatcgacgctgaacttttatcggcgatagcagaatcgaggatctcaatagtcatcttctctaaaaactatgcttcttccacgtggtgcttagatgaattggttgagatccacacgtgttataaggaattggctcacatagtggttccggttttctttaacgtacatccttcgcaagttaaaaaacagaccggagaatttggtaaggtttttggaaagacatgcaaaggtaaaccagagaatcggaaactaagatggatgcaagctctagcagcggtagcaaatattgctggatatg

SEQ ID NO: 127345 - DNA, 739 bp, Arabidopsis thaliana
  unsure (1)..(739): unsure at all n locations
cccacgcgtccgccggaagcgaaaccatccgctcagctcggtctctgatatccgctcgacacgcaggagaaagactcctgagaagctggggtgggggaacgggctgggcagtggaagacgctaaagacaagatctggaaacttctagaagaatacgaagtaggaggagtaatatcagaggcttgtcgatgcatacgcgatctaggaatgccgttttttaaccacgaggtggttaagaaggctttggtaatggcaatggagaagaagaacgatcggatgcttaatctcttgcaggagtgttttgctgaagggatcattactactaaccaaatgacaaaagggtttggtcgagtcaaagatagtcttgatgacttatctttggatattccaaatgcagaagagaaatttaactcgtatgttgcgcacgctgaagagaacggttggctacaccgcgattttgggtgttctacagattcttgactgattctgagtctctacatatatagaaatatggagttggttggttttgggtgttcttcaaactgttctttgtacttgtttccgacgaaagatcattctatgtactttttacataggtttttataaacgtcacatgcatatgttctctgnnnnnnnnnnnnnnnnnnnnnnnnnnnnnnnnnnnnnnnnnnnnnnnnnnnnnnnnnnnnnnnnnnnnnnnnnnnnnnnnnnnnnnnnnnnnnnnnnnnnnnnnnnnnnnn

SEQ ID NO: 127346 - DNA, 651 bp, Arabidopsis thaliana
  unsure (1)..(651): unsure at all n locations
nnnnnnnnnnnnnnnnnnnnnnnnnnnnnnnnnnnnnnnnnnnnnnnnnnnnnnnnnnnnnnnnnnnnnnccacgcgtccggtttcgattcccacatttgaatcaaattcaatcgggatggagaattctgatattgacatggtaatcatacctgatactccagatagatcggtacaccatagagaggttaagagaaggccacattctccagtagcaccattaagatatcaaagagaggaataccgtaatcatcatcttcacggaagagccagaccagtccctgaaattggggacaaccgggaaagttctgatacacgaactgagagtggacatcgccctcgtgcttctgtaggcaatgctttgtttaggagaactgttgttgagaaggataaagggaaatccatctccactgatccatgtgcgcctcgtgtagagaaaaatccggttttaaatctgaatcagcgtaacggacatgttcatgttgctgcatcgagataccaaccatctgaagatataagagagttgcgcacaagntaatggttgttctcctttacgaggtgatcataactcctttgtgctgccggngaacagtaataaaggtaaagaaaaagcagattctggctctgttcctcatagagaaacaattgacct

SEQ ID NO: 127347 - DNA, 831 bp, Arabidopsis thaliana
ccccccttagagggttggacggggttatccaaataaagctgtggattttcagaatttcccccgtccccccttgccgaatttacgggatttgggttttggtttttctttaaaattgctccgtcgggttttcaccgacgcgggaatttctcacgccaggttttctggaattcaaaggttttaaagtcttcccgagtttgggtgatcagtcggccagtctgaggtcgaatcgtagaaccagaatcgctcgcggtggacgaatcgcctgtgaggctcaggaccccactcccgccgccgtcaaagtaccaaatctgtctgattcagaatggcaaacaaaggttctggaatcagatgtcccagttctggtcgagttctgggcaccatggtgtggaccttgccgtatgattcaccccatagttgaccagctagccaaagatttcgcagggaagttcaaattctacaaaatcaacactgacgagagcccaaatacagcaaaccgttacgggatacgaagcgttccaacagtaatcatcttcaaaggcggtgagaagaaagatagcatcattggagctgtgcctagagagacgttggagaaaactatagaaagattcttggtcgagtaacaaaatttgactcttttgtcactctgaaccattttaccttatcttctctcttgtaatctctgtaaagtcttttaagtttttgactattatgttatcgtgggtcctctttgtcttcttcaataaaaagcgaacacgaattcctgcagcccgggggatccactaggtctacagcggccgccagcacggtggagctccaactttgttagggtta

SEQ ID NO: 127348 - DNA, 708 bp, Arabidopsis thaliana
  unsure (1)..(708): unsure at all n locations
nnnnnnnnnnnnnnnnnnnnnnnnnnnnnnnnnnnnnnnnnnnnnnnnnnnnnnnnnnnnnnnnnaactgacacccgtatgtccccgcgtccctctaaccactcaaaaaaatatctctgctctgctccaatggcgtcgttactcgattccgtcaccgtgacccgcgtgttttctctgccgattgcggcttcggtctcgtcttcttcagctgctccgtcggtttcacgacgccggatttctcccgccaggtttctggaattcagaggtttgaagtcttcgcggagtttggtgactcagtcggccagtctgggtgcgaatcgtagaaccagaatcgctcgcggtggacgaatcgcctgtgaggctcaggacaccactgccgccgccgtcgaagtaccaaatctgtctgattcagaatggcaaacaaaggttctggaatcagatgtcccagttctggtcgagttctgggcaccatggtgtggaccttgccgtatgattcaccccatagttgaccagctagccaaagatttcgcagggaagttcaaattctacaaaatcaacactgacgagagcccaaatacagcaaaccgttacgggatacgaagcgttccaacagtaatcatcttcaaaggcggtgagatgaaagatgcccattgtgtgtccataaaacgttgngaaacttanaaatttggcggaanaatttnccttnga

SEQ ID NO: 127349 - DNA, 654 bp, Arabidopsis thaliana
  unsure (1)..(654): unsure at all n locations
nnnnnnnnnnnnnnnnnnnnnnnnnnnnnnnnnnnnnnnnnnnnnnnnnnnnnnnnnnnnnnnnnnnnnnccacgcgtccgagcagctcaagtttacttcattctctgcgaaactatactgcatataagcttactgggtttttcttggataagatttcaatttcgaaaaatgcagctttagcaataagataattcataggagttttgaggctagatttgttctttcaatctgaagtttctttctttttgtttgtctgaaatgagcagtgacagctttggttgctgtgaagaatgaattgaatgatccgtacaaagttcttgagaattgggatgtgaattcagttgatccttgtagctggagaatggtttcttgcactgatggctatgtctcttcactggatcttcctagccaaagcttgtctggtacattgtctcctagaatcggaaacctcacctatttacaatcagtggtgctgcaaaacaatgcaatcactggtccaattccggaaacgattgggaggttggagaagcttcagtcacttgatctttcgaacaatgcattcaccggggagataccggcctcacttggagaactcaagatcttgaattacttgcggctaaacaataacagtcttataggaacttgccctgagt

SEQ ID NO: 127350 - DNA, 837 bp, Arabidopsis thaliana
  unsure (1)..(837): unsure at all n locations
acgcctgcaggnaccgggccggaatacccgggtctgcccacgcgtgcgcagcaaaccaaagcagagncagacaacnccaagaggagancngccgagcccgaaccaagagaacagagnccgggacccgaagaaggcncagaananagccancnagcnncgngcacacaaagccacnacagaagaagnncgngttttttttccangggttaacgcagatacactggggactgaacttactgagagcttactgaagatggcaccgacaaaagttgaagagcgcaagttgcaagcgcacaatgatgattcgcctgttaagctcggacatgctgagaaattccttaaggcaatgttggacatccctttcgcctttaaaagagttgatgcaatgctctatgtagccaactttgagtccgaggttgaatacttgaagaaatcttttgagactcttgaggctgcttgtgaagaactgaggaacagtaggatgttcttaaagcttcttgaagcggttctaaagacaggaaaccgtatgaacgttggaacaaaccgaggagatgcacatgcgttcaagcttgatacacttctcaagctagtcgatgtcaaaggcgctgatgggaaaacaactctcttgcatttcgttgtacaagagataatccgagcagaaggcacacgtctctcaggtaacaatacacaaacagatgacattaaatgccgggaaactagggtctccaaggttgtatccaaggtctcctgtttctgagctttgggtaacgtcaaggaaaagcttcttccgatggcctcagaaggtnctttgnnngcttanggnnncaaaggtttttt

SEQ ID NO: 127351 - DNA, 870 bp, Arabidopsis thaliana
ctaactactcataaccctagcatgcagcattcaatgatgttatgccgatcgagcttctagcaataggtgagaggtatgaccacggatatcgaacatatcacctcaaagatttacagtgtggtgtgcctcccatcttctgctcctaccagcaccgttgccgttggggggacgacggagtcaggtgactactaaagcggacacaagtctaagaccgccttatgttacaccgacttcacatccttttgtgatcccatctgaaaacttaccagtgacttcgtatcctatggagactccagagacggtttgtgcgagtgaggcggtggaggaaactacgaaaccgaggctacaggcgttacattgggataaagttagagcaagttcggatcgtgagatggtttgggatcatcttcgatcaagctctttcaaattagatgaggagatgattgagacgttgtttgtggcgaagtcgttaaacaacaaaccaaatcagagtcagacaactccaagatgtgttctcccgagcccgaaccaagagaacagagtcctggacccgaagaaggctcagaatattgccatcttgcttcgtgcacttaatgtcactatagaagaagtttgtgaggctcttcttgaaggcaatgctgatacactggggactgaacttcttgagagcttactgaagatggcaccgacaaaagaagaagagcgcaagttgaaagcgtacaatgatgattcgcctgttaagcttggacatgctgagaaattccttaaggcaatgttggacatccctttcgcctttaaaagagttgatgcaatgctctatgtagccaactttgagtccgaggttgaatacttgaagaaatcttttgagac

SEQ ID NO: 127352 - DNA, 421 bp, Arabidopsis thaliana
gcttgattgcaggagataaaaacttcatttgccagcaggattggcacaaaactcgagcagaggacatctgtaggagttgtgtcgtggtcgtctttggttaagagaagaagaaatgggttcaatgttcagtggaaaccgaatgagcaaggaagagatggaggtggtggtgaacaaggctaaagagatcgtctctgcttatcccgttgttgtcttcagcaagacatactgtggttattgccagagggtgaagcagttactgacgcagctaggagcaacttttaaagtacttgagctcgatgaaatgagtgatggaggtgagatccaatcagctttatcagagtggactggacagaccacagttccaaacgtcttcatcaaaggaaaccacatcggtggatgcgatagagtgatggagaccaac

SEQ ID NO: 127353 - DNA, 612 bp, Arabidopsis thaliana
agctctccacgactcactattgggaaagctggtccgcctgcaggtaccggtccggaattcccgggtcgacccacgcgtgcggattaaaactgctgctcaagagaaagcacatgtagagcttctggaagaacagttagagaagcttcgtcatgaaatgatctcccctatagaaagtgatggttatgttctagctcttagcaaagagcttgaaacattgaagctggagaatctatctttgagaaacgatatagaaatgcttaagtcagaacttgacagtgttaaagataccggtgaacgtgtggttgtgttggaaaaggagtgctccggtttggaatcttctgtaaaggatttggaatctaagttatcggtttctcaggaagatgtctcgcagctttctactcttaaaatcgaatgcactgatctatgggcgaaggtagagactctacagctgttgttagatagagctaccaaacaagcagagcaagcagttatagtgttacaaccagaaccaagatctaagagataaggtcgacaaaattgaggaatcacttaaagaagccaacgtttataaagaatcttcagagaaaattcaacagtacaatgagctaatgc

SEQ ID NO: 127354 - DNA, 472 bp, Arabidopsis thaliana
cccacgcgtccgcatcttcttcgtgaactttttgttttctcctttttttgattttcaccgccggagatttttgtatttttccgattattcgccggcggtttagagataatgaaggggaggatatcaaaaataggaagctatgcaatctcgtcttccattagagatcagcatcagcaaccttgtagttcttgtactactttcaagatccctgctccgatctataaacgtctctctcacaaggatcaaagtcttcgcgaaagtgataatcgagcgtattggcttggaaggaatcatcgaatcattgattggctattgtatgaagagatcttcaatcatatgtttacaggagttttgggtaggcaatgaagagcttgttaatttgtacgacaagagacttggagacgctggttatctaagttacaaccttggtcgtacgaataatcgtggtgatggtttgcttacggctgttcat

SEQ ID NO: 127355 - DNA, 547 bp, Arabidopsis thaliana
ctttctttaacacagagaaagagcctgagagacaagtgagaaacgcaacaacaccaccgaaagagagagtccaaattcgaaagagaaaaagaatcaaattccttcttcttccttttttgattttcaattattactttaatcttctttcccgctctctattcttcttcttctttaggatcaatcaccgtttagctttcttcccatacgtctctccgtttacgaccagtatacagaggctggagctggggaagaaaaggattgtctatggagggagacgtcggaataggtttggtatgccagaatactatggatgggaaggcgagtaatggaaatggtttagagaagactgtaccttcttgttgccttaaggctatggcatgtgtacctgaggatgatgctaagtgtcactccactgttgtttctgggtggttttcggaacctcaccctcgctctgggaaaaaaggcggcaaagcagtctatttcaacaaccctatgtggccaggacttgctcacccactgaaagttgagaaagttctgttcaaagaca

SEQ ID NO: 127356 - DNA, 675 bp, Arabidopsis thaliana
  unsure (1)..(675): unsure at all n locations
cgcgtncggatttgcatagaatcgtcgctgatcgaagtgattctgctcgattttgctctcacttgaaagatctgagtgatttgtttcagatcttctccgaaaggatgaagcggattggagataaagaaatcgacggttctgggtctcaaaatcaacatccagtgggctcccctcgaaacgaattacaagggcaatctccaaaacctggaaacggtaacaccaaagatgctttgacaaccgatgatgctttggcctacttaaaggaaataaaggacgtgtttcatgatcaaaagtacaaataccatctgtttctcgagattatgagcgacttcaaggcacaaaggaccgatacttctgtcgtgattgcacgagtcaaagacctgttaaagggacataaccatttaattctcgtatttaacaaattcttgccacatgggtttgaaattactcttgacgatgaggatgaggattaaggatcaagacgctagcatttgaatgagacggatatatcaaattagctctctgttcgaccttttttttaatatcttcttagctctactacaagttacaattggttatttttagtattggagaaacaggttgtgttgttacttctgctcagaattatgaatgttttttctcatagatccaaagatctctgaagtctgacatgtg

SEQ ID NO: 127357 - DNA, 833 bp, Arabidopsis thaliana
  unsure (1)..(833): unsure at all n locations
gcaggtaccggtctggaattcccgggtcgacccacgcgtccgcgtactactaaaccttctctggatcttgctaaggttcttttagagatgttcacggccaacaaaatggccaaagcattttttacaagcggtggatcagatgccaacgatacccaggtcaagctggtttggtattacaataacgcacttggaaggcccgagaagaaaaagtttatcgcgagaaagaaatcgtaccatggctccactctaatatcagcaagtttgtccggccttcccccgctacaccaaaattttgatttacctgcaccatttgtgttgcacacagattgccctcattattggcgttttcatcttccaggcgaaacggaagaggagttctcaaccagattagccaagaatttagaggatctaatcatcaaagaaggaccagaaactattggtgcttttatagctgaaccagtcatgggtgctgggggtgtgatacctccacctgctacctactttgaaaaggttcaagctgttgttaagaaatatgatatcttgttcattgctgatgaggtgatatgtgcatttggaaggctcgggacaatgtttggctgtgacaaatacaacattaagccagatcttgtgaccttagctaaggcactgtcttcagcatatatgccgattggagccattcttatgagccaagaagtggcagatgtcataaattctcatagcagcaagctaggcgttttcccccatggatttcctaatcctgggcatccagttccgnggnctggaccaattgaagcgtaaaggtttccaggggggggcancccgnggntgccncc

SEQ ID NO: 127358 - DNA, 574 bp, Arabidopsis thaliana
  unsure (1)..(574): unsure at all n locations
taccggtctggaattcccggctcgacccacgcgtccgaccatttgtgttgcacacagattgccctcattattggcgttttcatcttccaggcgaaacggaagaggagttctcaaccagattagccaagaatttagaggatctaatcatcaaagaaggaccagaaactattggtgcttttatagctgaaccagtcatgggtgctgggggtgtgatacctccacctgctacctactttgaaaaggttcaagctgttgttaagaaatatgatatcttgttcattgctgatgaggtgatatgtgcatttggaaggctcgggacaatgtttggctgtgacaaatacaacattaagccagatcttgtgaccttagctaaggcactgtcttcagcatatatgccgattggggccattcttatgagcccagaagtggcagatgtcataaattctcatagcagcaagctaggcgttcccccccggggacttaccttggcaaccagttcgggtttgtgtaatnangggtaaaggtttccagggggggccatccnagttttngccaagttccccangtttannnc

SEQ ID NO: 127359 - DNA, 1038 bp, Arabidopsis thaliana
  unsure (1)..(1038): unsure at all n locations
cgatcatattcatattacagggagaggaacattctcagagtatgtcgccaaagttgccccaaggtttcaagatggagttaaagcgtttgcctctggtagtcctattattggagaggttaccatttctcttggtcctttacttaccagttttattcaataagaattatttgactgaggacattttgtgatggttatcagacaagaggaacaggtttgattcttcgggccgggtttgtagacaataaatctccgaacgaaccatttccaccagaatggggtgttggcgcattctttggagccgagtgccagaagcacgggatgttagtccgtgttgcaggtgatggcattttgatgtctccaccgctcattatctcacctgaagagattgatgagttgatttctatctatgggaaagcattgaaggcaacggaagagaaggtaaaagaactcaaggctcagcacaagaagtgaaaagcagagtcaaaatgatgttgatgaaaaatgttttttagattctcaaagtttggatcctttgtttttttttttaacacacaacaagtctttaaataagtacattttaatgaggaataaacaataatgggacaacatctgacgatgtgatcaagatcatctactaaaccaaaaatgcagccatagttaacaataaccaaactcttttgaattgtttatttgtacgaacattgaaaagcaaaacgaccatggatcatggtgatttttggaatcaagatttaggacgttttttgtttgcttctctctttgatcttctctcccttgaacttagagaagtcttgaacccaacttcgttctccgagtcggtacacatctttaaacgatttcccctctgatctcgggcaaagctaacngggcatagaatggttaccgaccgggactggngacgattnccaagacangggngtgncgaaaagggnttaacccctccaatttctcccctctttncccggagcgnggggnnancccgggaatccggnccgggacnngangggganagttncccaa

SEQ ID NO: 127360 - DNA, 599 bp, Arabidopsis thaliana
  unsure (1)..(599): unsure at all n locations
agagacaagaggaacagggangattcttgggtcttagngcgcagacaaagcnngggtgngacagatacatcattaagccagatcttgtgaccttagctaaggcactgtcttcagcatatatgccgattggagccattcttatgagccaagaagtggcagatgtcataaattctcatagcagcaagctaggcgtgttctcccatggatttacttattctggtcatccagtttcgtgtgctgtagcaattgaagcgttaaagatatacaaggagaggaacataccagagtatgtcgccaaagttgccccaaggtttcaagatggagttaaagcttttccctctggtagtcctattattggagagacaagaggaacaggtttgattcttgggactgagtttgtagacaataaatctccgaacgaaccatttccaccagaatggggtgttggcgcattctttggagccgagtgccagaagcacgggatgttagtccgtgttgcaggtgatggcattttgatgtctccaccgctcattatctcacctgaagagattgatgagttgatttctatctatgggaaagcattgaatgcatcggaagat

SEQ ID NO: 127361 - DNA, 715 bp, Arabidopsis thaliana
ccgggctgactggttgggtgttggggagatcggacttttcaattttaaaccaagcgtcaggcctgtaccaattgaagttcatattcagggttatcctggaaagtattactgcccaaggatgaatagcatgaacaagccagcatatgcagccatatgtactcattcacctacgaaacctgttcttatctttgtttcatcccgtaggcagacaaggcttactgcattggatcttattcagtttgctgcctccgacgaacatccgcggcaatttctgagtgtgtcagaggaagacttgcagatggtcctctcacagataactgatcaaaaccttcgacatacgttgcaattcggcatcggactgcatcatgcaggtttaaacgaccacgatagatctgcagtcgaagagcttttcacgaacaacaagattcaggttttggtctcaacaagtaccttggcatggggagtgaacctaccagctcacttagttattataaagggaacagaatatttcgacgggaaaaccaaaagatatgttgacttccctcttacagagatcttgcaaatgatgggacgtgcagggcgaccacagtttgaccaacatgggaaagcggttattcttgtacatgaacctaaaaaaagcttttacaaaaagttcttgtacgaaccattccccgtagaaagtagtttgaaagagaagctgcacgatcacttcaat

SEQ ID NO: 127362 - DNA, 660 bp, Arabidopsis thaliana
  unsure (1)..(660): unsure at all n locations
nnnnnnnnnnnnnnnnnnnnnnnnnnnnnnnnnnnnnnnnnnnnnnnnnnnnnnnnnnnnnnnnnnnnnnnnccacgcgtccgaccagcgagagtgagtgagagagtagagagtgtgtggagagatactaggaagttgaaggaaaaagcgagaaagatggctagaaacagtgacaatgatatgtgcaaagaagaacggaagagagagatcttcttcaaggttctacagagagttgatatttcttctgagaacatgagagcacttccttacgactttgtgagaagcttctccaacaatgagctctctcgtaagatgaagataaaagctcgatggggaagttcttgggaagtagaaatctgcaaaaatccaagattctatttcatggagaaatccggatgggagaagtttgtgagtgacaatgccttgggagccagtgagtttcttaccttcactcacaaagggaatatgcgttttacagtgaacatcttcatgcaagatggcaaggagatgctacagcctccacaatccatgtccttcatggcttcttctaggccacctaanagagaacaaggaataccttctcttgccacgacaatagcagctgaatctaatggaggagggaactacaaaaggaagctcaactntgagaagaagaaagct

SEQ ID NO: 127363 - DNA, 542 bp, Arabidopsis thaliana
cccacacgtccgaacagaaagaaagtccacgcgaggacataagcgcgtgtgatttaaaatcgtcgtcgtcgtcttccacaccgactttaatctgattcttagaatcgccgtttggtttttaaccagagagattatctaccaaggaacgatgattattgaaagagctcgagttccgttgagccgatggcaacaagcggccgtggcgatgggatctgctctcggtgcgttggttgatcctcgtagagcggatctaatcgctgctctcggcgaaactaccggtaaaccagcttttgaaatggttcttgagagaatgaagaagagcgaagcaaggtagagctatatttttgcgagcgtccctcgaggtttgtgtcagagcaagtaggtcatgccttgggatctaccagaaaacacatttggagctgcatatgctaaattcatgggatctagaaacttctctcccgatgatcgtccgcccgtaagattcatggagacggatgaattggcttacgtagcgacacgggcacgcgaagttcacgacttat

SEQ ID NO: 127364 - DNA, 652 bp, Arabidopsis thaliana
  unsure (1)..(652): unsure at all n locations
tgattcttnnnnnnnnnnnnnnnnnnnnnnnnnnnnnnnnnnnnnnnnnnnnnnnnnnnnnnnnnnnnnnnnnnnnnnnnnnccacgcgtccgcccacgcgtccgaacagaaagaaagtccacgcgaggacataagcgcgtgtgatttaaaatcgtcgtcgtcgtcttccacaccgactttaatctgattcttagaatcgccgtttggtttttaaccagagagattatctaccaaggaacgatgattattgaaagagctcgagttccgttgagccgatggcaacaagcggccgtggcgatgggatctgctctcggtgcgttggttgatcctcgtagagcggatctaatcgctgctctcggcgaaactaccggtaaaccagcttttgaaatggttcttgagagaatgaagaagagcgaagaaggaagagtacgtttttcaaatcactcaatttctctcttattgttgatcaaatcattgattttgcttaagaatgattgatttagaaattgttcgatttagtaattctggagtaagcaatgagtgatgttaaattgattaacatttttacttgatgttggttatattgttgagtaagcaatggtgttttgatctttggtggtatctttactttgaaggctatattattggagc

SEQ ID NO: 127365 - DNA, 525 bp, Arabidopsis thaliana
  unsure (1)..(525): unsure at all n locations
nnnnnnnnnnnnnnnnnnnnnnnnnnnnnnnnnnnnnnnnnnnnnnnnnnnnnnnnnnnnnnnnnnnnnccacgcgtccgaaatctttctctcctctctctctctgatattcttcgtcgtcccatctgcgaattgtttacacagagatatagagaggaagagaaccgcctaaggaaaatggcgaacagtcacaccgatgacttggacgagcttctcgatagtgcattggatgatttcaaagatctcaatctttctcatcaaagaaatcaaagggaagctcaagaggaggaggaaaagaagaggaaagaagagacggttttattaccgagtggagttcaaggtcttggaatgggattaccagatatgagaagcaagaagagaggaaaacaaaaggtttccaaagaggatcatgttgctgaagctcttgataagcttatggaacaaactacggaaactgtcaaaggattggaatccatttcttctaagcagatgcctgcttctgattatgatggaatgggtgaggat

SEQ ID NO: 127366 - DNA, 790 bp, Arabidopsis thaliana
ccagctctatacgactcactatagggaaagctggcacgcctgcaggtaccggtccggaattcccgggatacgcttggccctttagacggagagactgatatgcgacagaggatccaacgtcgcgactgaaacctagatcccaattctccgtttccaccactgtctctcctccgtcgttagggtttctcaggttcacatctgttggaaacttattgcaactcctaaaggcatttcacatatttgcttttatgcgtacgaggcttgggggatatttatataatccgaaataactcttttcttatcatggagactctgtggactcttttgtatttgctagaacctgctccagctactctcattgtcacagctgtcaccgtgacatttgcatccgctttccgtgcacttaactacgggaaagagatggagagaaaccgtgacttctctgaagcatccataacactagatagctctcaggccttgatgatcccagttatgagctcttgcagtttgcttctcatgttctatttgttctcttctgtttctcagctcctgaccgcgtttacagccatcgcctctgtttcttctctcttctattggttatcaccatatgcggtatatatgaagacgcagcttggtctatctgatccctttctttcacgctgctgcttcaaatcgtttacaagaatccaaggattgctacttgtggcttgtgctatgcaattgtggcatggctatttttggcattgggtgttgaacaatttgcttgggaatctcatttgtattgcgtttg

SEQ ID NO: 127367 - DNA, 497 bp, Arabidopsis thaliana
gaatgacgaaaccaggatcgtgaccgtcagggcgatagctcgtgggaggccaggatcgtttgacgatggtgacccacaaactacgaatctgtatgttgggaatctgtccccacaggttgatgagaatttccttctgcgcactttcggaagatttgggcccatagctagtgtcaagattatgtggccaagaacagatgaggagaagaggcgacaaagaaactgtggctttgtttccttcatgaatagggctgatggacaagctgcaaaagatgaaatgcaagggatcatcgtgtacgagtatgaactgaaaattggatggggtaaagcagtttctctaccgtcacaagcattacccgctccaccacctggacatatggctattcggagtaaggagggctgcaacttggttttttctggtcaaacgggtccaccgataataacttctgttccaaatcaaaattctgagctggttcttacccctaatgttccggatatca

SEQ ID NO: 127368 - DNA, 476 bp, Arabidopsis thaliana
  unsure (1)..(476): unsure at all n locations
ggtagagagagagcaaaagtactttcattcagacttcagtttaagctatggcggcgaacgattcttcaaatgctattgacatcgacgggaatctcgactccgattcgaatcttaacactgacggtgacgaagcgaccgataatgattcctcgaaggcattggttactatccctgctccagccgtttgtcttttccggttcgccggagatgctgctggtggcgccgttatgggctctatcttcggatatggttcaggattgttcaagaagaaaggcttcaaaggatcatttgcagatgcagggcagtctgctaagacttttgctgttttatctggagtccacagtttggttgtttgccttctgaagcaaatccgaggcaaagatgacgccattaatgttggagtagcacgggtgttcacttggactttcccttaagttnccccggggntccaaagggttttttaaaaaggtttnnnc

SEQ ID NO: 127369 - DNA, 630 bp, Arabidopsis thaliana
tcgcgttcgcgtgggctttccttgtgttccctccaccgaacgaggccgcggcattttgatctccggcgattccaaatccgacaccattctctactgcaacggccgctctgtcttcatccggagcctccgccaactccaagacgtccaagtttacggcgaacatggctatgctgttaccgttgctcgctactctcccaacggcgaatggatcgcttccgctgatgtctctggtactgttcgcgtttggggaacgcacaacggcttcgtgctgaagaacgagttcagagtccttgctggtcgtgtcgatgatctccaatggtctttcgatggacttcgaattgttgcttccggcgatggaaaaggcaaatctcttgttcgatccttcgcatgggactctggcaatacaatgggggattttgatggccattctcgtagggttttgagttgtgccttcaagccaacgagacctttccgaattgccacatgcggtgaagacttcttggttaacttttatgatggaccaccttttaagtttcactcttctcacagggagcattccaacttcgtcaactgcatcagatattcacctgatggtactaaattcattaccgtaagctctgacaaaaaggg

SEQ ID NO: 127370 - DNA, 590 bp, Arabidopsis thaliana
gccaagccctatacgactctcttagggaaagctggtacgcctgcaggtaccggtccggaattcccgggtcgcccacgcgtccgcccacgcgtccgccttgaccggatctagacacataagctactcaggttctctcctcttattctctctccctgtctcttggtctccagtaggaaagttgaacactttctgtcttctcatctcttacaagactgtttttgtgttcaattttgagtagatatggaagtggttgctgttgggtcaatgaagacgcagagacaggagacatgggcttgctctgtcactgagtcttttctcctcctcgtcggaaagaatctggcttgtcttctccttgtggcagaatcattactgataggtttggttgctgttgaccagaggttgtctgtcaaggagggttacaaaagaggaagccgtattgaggaaaacaaagatgctagtgacagtgacgatgacgacgatgatgaagacgctgatgaggacgacgatgatgaggatgatgctaatgatgaagatttctcagggggtgaaggggatgaagggagaagaagaagctgatccagaggatgatc

SEQ ID NO: 127371 - DNA, 362 bp, Arabidopsis thaliana
aattaacttacccaaacaagaaacccaagaatccaaaatggaaatgctcaacgcaataattctcatcctatttccaatcatagggtttgtattaatcttctcattcccaacaaaaaccctaaaagccaaaaccgcatcaccctctaatccgacatcgtaccaactcatcggctctattctctccttcaacaaaaaccgccaccgtcttctccaatggtacacagatctcctccgtctctctccgtctcaaaccatcaccgtcgatctcctcttcggtcgtcggactatcatcactgcaaaccctgaaaacgttgagcacattctcaaaacaaatttttataacttccctaaaagcaaacctt

SEQ ID NO: 127372 - DNA, 259 bp, Arabidopsis thaliana
gtgatgcccgcaatactctctcctctctctttttttttttttttttctgggtcgaagtttggttctttgttggataatgatggtttttgacagtgaatcgggccgacacccattcgtacccatgcactacaccgattgtgcctgcctattccctcccaaagacacagatcaagaaccttaatcctctatggtatccgttggagagccagagcgtcgagtatttcacgttgggagatttttgggattggttcgacgagtg

SEQ ID NO: 127373 - DNA, 506 bp, Arabidopsis thaliana
ggaaagctggcacgcctgcaggtaccggtccggaattcccgggtcgacccacgcgtgcgcggacgcgtggggtcagctatagctcaatcagtccgcgttttatatggtgaagactctacaaccattccaccggttgtgataccagagccgccacctcctgctcccagagatccaagacacagtctgcgtaagaaaaggaaacgtaaattgcattcatcggagtcgaaagactacagacattggtagtagcagccacaatgctgtagaaagcagctctcaaggcaatccacaaacatctgcaactcctcctttgcctccacccgctctggcgggggaaacttcagggtcttctcaacccaaattacctcctcacaacctaaatagcacagaacccctggcctctgaagcattcataattccaccacctgaagaagattctgggatagcagcagcgccatttgaagaccagggcctagtctagggggatcactggtccacaaagtcat

SEQ ID NO: 127374 - DNA, 714 bp, Arabidopsis thaliana
  unsure (1)..(714): unsure at all n locations
nnnnnnnnnnnnnnnnnnnnnnnnnnnnnnnnnnnnnnnnnnnnnnnnnnnnnnnnnnnnnnnnnnnnnnnnccacgcgtccgcggacgcgtgggcggacgcgtgggctctcgtatgctacatcaaaggcattctttctcccaaaatgttcaaagttgctgtgacacttgttgtgtctatcggcatggttgtgtgtttcatagttgtggcaattcttgtggcattggtggcttcaagtccaacaggaggatggagtggtaggagtttaagtttacttgatccaacttatgcaagcaagtatattccaattattgcaagtgtcagtgaacatcaacctccaacttggccatcttatttcatggatatcaatgttttggctttcttggtccctgctggcatcattgcgtgcttttcgcctctatctgatgccagctcttttgtggtcctttacattgtaatgtctgtatacttttctggagttatggttcgtcttatgctcgtgcttgctccagcagcatgcatcatgtctgggattgcgctctctcaagcttttgatgttttcacgggttccatcaaataccagttaggcgcatcgtctaattccacagatgatgcagacgacaacacttccacgaacaatgccccaaaagatgatgtttctgctggtaagactgacaagggtgaagagattgtaaaagagcggtcttccaaaaa

SEQ ID NO: 127375 - DNA, 319 bp, Arabidopsis thaliana
attctatgagcggtgatgataaggcgatcttgtatatgaagaggcaagatacacaagctgaactaagaacatgcataaacatactcgcattgacagaggttttgcatgcagaagtgccttcctttatcggggacaccaatgttgttaagctttcttggaaagaagccacaaagccattagcctatacaagagctttatatacagacctaatgtatggcatacccccggatattgatgcgtgtcataattttatggacaaactctcagaagacttgctgaataaactagatatggagggaatgtgcgaattagaagatga

SEQ ID NO: 127376 - DNA, 741 bp, Arabidopsis thaliana
ctcagccgttgctgagataagccgtgttcttagacctggaggagtatttgtggccaccacatttatctatgacggtccattcagttttatccccttcttgaagaatcttcgtcaggaaataatgagatattcaggttctcacattttcctaaatgaacgtgagcttgaagatatctgcaaagcctgtggtctcgttaacttcactcgtgttagaaacgggccatttataatgctatctgcaacaaaacccagctaagctcaccctctttaaagtatatatacttttctgtaaaaaattggtataaagttataaacattataacaacttgagttccatacagtatacctaatttgtaaagctttttgcaaatgttcctattatctagcttgtaaattggggttaacatggtttgcaaaggggtcttcttcttgtgaaaactcaatgtctcgattggaactttctggaagaagttcacgcatctcagaatctataaaagcttccatccgagcacgatctctgtctagaggataggaacggtaaagaaaggagtatatgaagcagcaagccgccattgggagtcctatagatgtataaagagcttttgccagagatgctgcattctctctatctgtggctatctctgttgacctcgatgacccttcagggattggcttgtatccataaacatgttgtgccaggattccaactataggaggtgcatacgatgacaagatagactc

SEQ ID NO: 127377 - DNA, 395 bp, Arabidopsis thaliana
aataaatatcccaaaatttagtggcggcgagagggaaaccaaaattcgcgagagagaagtatgtcgaagacgctggtgcaaccggtagggcaaaagaggttgactaatgttgcagtggttcgtctcaaaaagcaaggcaatcgcttcgagatcgcttgttacaagaataaggtcctttcatggcggtctggcgtggagaaggatatagatgaagtgctacagtcgcatactgtttattcaaatgttttcgaaaggagttcttgcaaaatcgaaagacttgatgaagtcgtttgtgttcagatgatcatacggcaattatgcatcgatattttttggagaaaggagagcttcaagttgctggaaaagaaagagaatcacagttctcaagccagttt

SEQ ID NO: 127378 - DNA, 1029 bp, Arabidopsis thaliana
  unsure (1)..(1029): unsure at all n locations
gcactccagtnnnnnnnnnnnnnnnnnnnnnnnnnnnnnnnnnactcctgcagtaccggttcggaattcccgggtcgaccacgcgtccggatattctcgaaatcgtttcagaattacttagacagatctgctcctaacattgttcgaagatggcttgtgactttagtcgctgcagtgatctatatctatagggtttactctgtttatggatacttcgttatctcttatggcttagctacttatatcttaaatctcttgattggtttcctttcccctaaagttgatcctgaacttgaagctttggatcctgattctttacctgttgatgagtctgatgagtataagccctttgttcgtcgtcttcctgagttcaagttctggtatgcagcgactaaagcatttgttgttgcatttgtgatgacattcttctctttcctggatgtgcctgtgttctggccgatcttgttgtgttactggttggttttgtattctttaactatgaaacgcttaatcgtgcacatgttcaagtatagatactttcctttcgatgtaagaaagcctgtgaagctgctcaagtttcttgtaaacagtgtcctgacctttttaagactcaagaagggtgatggtggagatgataggcccagcagcagcaattcatctcagggaaatgaaaaacaagattagatgcgaacagtagatcaggtactgatctcgacgtggtgataggcgaagcaagaaaggattccaactaaggatatcaaagtaaaatatactatagccatgctggtggaataggaaaacaaagttcttgaagcttaacagaactaagaaatctctctgagttttgagtaatctcctgcattttccggtttttgcattgtaatgtgtaacagtgtattttacaattatacgtttaaatgaatttgggaatcccaagtaaaaaaaaaaaaaaaaaaggcgcnnnnnnnnnnnnnnnnnnnnnnnnnnnnnnnnnnnnnnnnnnnnnnnnnnnnnnnnnnnnnnnnnnnn

SEQ ID NO: 127379 - DNA, 669 bp, Arabidopsis thaliana
tctattctgacttacattagggaaagctggtacgcctgcatgtaccggtccggaatttcacgggtcgacccacgcgtccgcgactaacaaaaattcagacgacactgccaagcgtccgatttaattggttcaaaatcatcctaaatcgagtagattgttttgaatcgatttttgaagttgattcgaagttcagtgattgtgattagaatttataaccagacccagtttttgaggtgaagaaaaagcagattttgtgttcaatttccatggaagacgaaccaggaagcgaaaatgaagcagacaccatagttgcttcaccacttgcaaaatggagaatcgaattctcgaaatcgtttcagaattacttagacagatctgctcctaacattgttcgaagatggcttgtgactttagtcgctgcagtgatctatatctatagggtttactctgtttatggatacttcgttatctcttatggcttagctacttatatcttaaatctcttgattggtttcctttcccctaaagttgatcctgaacttgaagctttggatcctgattctttacctgttgatgagtctgatgagtataagccctttgttcgtcgtcttcctgagttcaagttctggttagatttctctgttactttagatgatggatgattttgat

SEQ ID NO: 127380 - DNA, 649 bp, Arabidopsis thaliana
  unsure (1)..(649): unsure at all n locations
tgatactctcnnnnnnnnnnnnnnnnnnnnnnnnnnnnnnnnnnnnnnnnnnnnnnnnnnnnnnnnnnnnnnnnnnnnnnnccacgcgtgcgcgcagcgccgattctccttcaaaaacttttcctaagtcgtcactttttacgatggcagaaacgaagaagatgatcatccttaagagctccgacggtgaatccttcgagatcgaggaagccgtcgctgttaagtcccagacgattaagcacatgattgaggacgactgtgccgataacggaattccacttcccaatgtcaccggagccatcctcgccaaggttattgagtattgcaagaagcacgttgaagccgctgctgaagctggtggagacaaggatttctatggttccgctgagaacgacgagcttaagaattgggacagcgaattcgtcaaagtcgatcagcctactctcttcgatctcatcttggctgcgaactatttgaacatcggtggacttcttgaccttacgtgcaaggccgtggctgatcagatgagaggcaaaactccagagcagatgcgtgcacacttcaacatcaagaacgattacacacctgaggaagaggcggaggttcgcaatgagaacaagtgggcgttcgagtgattggatcggatctg

SEQ ID NO: 127381 - DNA, 414 bp, Arabidopsis thaliana
  unsure (1)..(414): unsure at all n locations
ctccgacagaccaacccttcttttccacctcnagggnnctaattgtgcgattaggataatggccggcgccatggttagttccgccggtgggttactggcaatgctcaacgaaccccatccttccttgaaacttcacgctctctcatatctcatcagattggttgaccaattttggcccgagatctccactagtgtcccaatcatagagagcttatacgaagatgaagagtttgatcagcatcaaagacagcttgctgccttgttggcctccaagggtttctattacttgggtgagcgtaacgattccttggcctatgcccttggagctggatccttgtttgatgtgtcagaggattctgattatattcatactcttctatccaaagcaatagatgagtatgctattctcagatc

SEQ ID NO: 127382 - DNA, 540 bp, Arabidopsis thaliana
  unsure (1)..(540): unsure at all n locations
nnnnnnnnnnnnnnnnnnnnnnnnnnnnnnnnnnnnnnnnnnnnnnnnnnnnnnnnnnnnnnnnnnnnnnnnnnnnnnnnncaccacgcgtccgtactaaacaaaaagcttgcgaggaagaagacgaagaaaatggcggatttgattttgagttcctcctctgcacaatcctctctccttcacgtcagacctaatcactatctactcaatacctccactgcttcaccgatccgaagtgtcagattccaaaattccaacggttttcatcctctggcgttcgcatctggtcaccgacgacttcctctcggtgcagtagttccctctgactccactaagacgatcaccagtacgattactgctaactgcgttgattcgggagtcaaagctgttgaagtcgagcctatgatcgattacggaggtggtggtggaattggaggtgataaatttggcggcggtggtggaggcggcgatggaaatgacgacggaggggaagacgattaggaggagagtgacgggaagaagagcacgcctctgtctatg

SEQ ID NO: 127383 - DNA, 614 bp, Arabidopsis thaliana
cggacgcgtgggcggacgcgtgggcggacgcgtgggaagcgatcatgtgaaaacaaggcagacgttgtatcacaagatgagaaagaaggcggccggcgcgccacctttaatttgggtcatacctttggccatgccatagaaactggctttggttatggagagtgcctccatggagaagctgttgcagctggcacggtaatggcagtggacatgtcatatcgtcttggttggatcgatgaatcgattgttaagagagtgaacaagatcctagtacgggcgaaattgcctacaactccgccagagagcatgaccgtcagcatgttcaagtccataatggcggtggacaagaaagtggcagatggactgctgaggctgattcttctcaaaggcccgctgggaaactgcgtgttcactggagattatgatcgggaagcgttggatgccacgcttcgtgcattctccaaatcctgagcatttcatatttgagataattttggtgttgttttgttcacatacgcatatgtactcatatatactgaccttgtaactagctttgtggaatgtgataataatgagatatttaaccgaaaaaataaatatttattaatatattt

SEQ ID NO: 127384 - DNA, 570 bp, Arabidopsis thaliana
agctctctacgactcactattagggaagctggcacgcctgcaggtaccggtccggaattcccgggtcgacccacgcgtgccatttccaaattatttctaagctaagaaaatctttaaaaataacaaagcttctaaaataataatccgacctaccggattcaaaccattgatctgaagatcatctataaaccagtccttgatctataaactaaaataagggaagaaaaaaacaagagagagaaatagagaatgaagtcttttgcggctaaggtagaagagggagttaaaggaatagacggaaagccgtcggtaggtccggtgtaccggaatcttctgtcggaaaaaggttttcctccgattgattctgagatcaccactgcttgggacattttcagtaaatcagtggagaaattccctgacaataatatgcttggatggcgtcgaattgttgatgagaaggttggaccatatatgtggaaaacgtacaaggaggtttccgaagaagggttgcggattggctctgcactacgagccgccggagctgaacctgggagtcgagtggggatctac

SEQ ID NO: 127385 - DNA, 406 bp, Arabidopsis thaliana
tcgcttgcaatgtgtagaatgtgtgctgttaatctctttagggtctttcctccgaattatcggtctagttctggtggcgaaaacgatgatgatgaaccgatgtttgaccctgcttggcctcatttgcagattgtgtatgatttgttgcttaagtttatcacttctccgtgtcttgatgctaaagtggcaaaaaagtatttagatcatgctttcactgtgaggttgcttgacttgtttgattcggaggatcctagagaacgggagtgtttgaagacgattctgcatcgggtatatgggaagttcatggttcataggccatttgtacgcaagtccatgagcaatatattctaccggtttgtgtttgagacagagaagcatagcggaatcgctgagcttttggagattt

SEQ ID NO: 127386 - DNA, 504 bp, Arabidopsis thaliana
gtccgcaaaatcctgattgataccaaaggatcatcaaatgacataactgggatggaacaaattgtggagacaatgaaaagtgaaggtgttgagcttgaccttcgtgcacgagctctcattgcaagacactatgcatcagctgggcttaaagagaaggctgagaaagtgctgaaagagatggaaggtgaaagcttggaggaaaatcggcatatgtgcaaggatttgctttccgtctatggctatctccagagggaggatgaagtgcgcagagtttgggagatctgtgaagaaaacccccgttataacgaggtccttgctgcaatcttggcttttggaaagatcgataaagtcaaagatgcagaggcggtttttgagaaggtgttgaagatgtcccatagagtttcttctaatgtttactccgttctcttgagggtttacgtggatcacaagatggtctcagagggtaaggatcttgttaagcagatgtcagacagcgggtgcaat

SEQ ID NO: 127387 - DNA, 765 bp, Arabidopsis thaliana
cgactcactattgggaaagctggcacgcctgcaggtaccggtccggaattcccgggtcgacccacgcgtccggggcactggtttgccgctggtctctctcctcatgtatcagggagaaccagaatcccgatgcacaatagtccccattttcagatgatgccttattcacatgcaaatagttatgggagcattggaagctatggtagctacaatgatggtactatacaggacaatagctatgggagctatggagggactggcaatatgtttgcatactattctcctgtgaatcatccaggcctatacatgcaaaaccaaggtggggtctcaatgcttggaactagtcctgatgccagacgtcgggttatgcagtacccacatggaaatgggccaaatggccttggtacaagtccatctgctggaaattttgcaccactaccccttggcactagtccgtcacaatttactccaaatacaaacaatcaatttttagctgggtctcctggacaccatggcccgacatctccagtacgacacagctgccatgggtctcctttgggaaagatggctgcatttagtcagggtaatagaagaatgagcgctggatattctggaggttctcagtcccaagattcttccctgtcacaggcccaagggcatgggatggataacttttatcaaaatgaggggtattctggacaattctctggttcaccttcacgccggcaactggattctggtgtcaaaaatcgtaaacaggacaca

SEQ ID NO: 127388 - DNA, 661 bp, Arabidopsis thaliana
  unsure (1)..(661): unsure at all n locations
nnnnnnnnnnnnnnnnnnnnnnnnnnnnnnnnnnnnnnnnnnnnnnnnnnnnnnnnnnnnnnnnnnnnnnnnnnnnnnnnccacgcgtccggagagatcggagctaaaaagccatctctcgccggaaaatttctcagttttcttattaccttagccacagacaacaagacgacagaggaatctaatcttagccccctttcctctctgtctctctctatatctctgtctttaggctttgagatatcttcaacacgaagctttttgcttcttttttttatctctttaaaaaattccagccaatggttcgaatccaatagtagcttcaaaggtcatggatttagtcaggggtttgtggaggaaacatagaaggaagattttggtgacgacgacttgtttgggaagtgggtatttgctctataaactatacaatgcccatactcgtaagctcgctgatttggaacgagagcttgctaatgagcgtgaaaacgacgagatcatcaaaacccaaatgaaggcacatttcgataacattcagatgattgctgatactactacattgcctcacgcaattcatcacttgagtagtcgtgtagttgaagagattgatgtctcgagtattatggataagctaagcaaaggcaaaggaatattgattccttct

SEQ ID NO: 127389 - DNA, 637 bp, Arabidopsis thaliana
  unsure (1)..(637): unsure at all n locations
atgttctccagctctatacgactcactatagggaaagctggacgcctgcaggtaccggccggattccggtcgcccacgcgtcggggattatcgatgagtttcgtatgttctcgttcaagatccgcccatgttctcgagcatattcccatgactggactgaatgtccatttgcacacccaggtgagaatgcaaggagaagagacccgaggaagtttcactatacgtgtgttccatgcccggattttaagaaaggatcctgtaagcaaggtgatatgtgtgaatatgctcatggggtttttgaatgctggctacaccctgctcagtacagaacacgattgtgcaaggacggaatgggttgcaaccgaagggtttgcttctttgctcacgcaaatgaggagttgcgtcccttgtacccttccacaggatctggattgccatctcctcgggcttcgtctgctgtttccgcctctactatggacatggcgtcagttntgaacatgttaccaggctcaccatctgctgctcaacattcgttcaccccaccaatatctncttctggaaatggtagtatgccccattcatcgatggggttggcctcagcagaacatacccggcgttgaatcttgctggaagcata

SEQ ID NO: 127390 - DNA, 742 bp, Arabidopsis thaliana
  unsure (1)..(742): unsure at all n locations
nnnnnnnnngccagctctatacgacttatatagggaaagctggtacgcctgcaggtaccggtccggaattcccgggtcggcccacgcgtccgtgtcggcgagacatcatcaatggaggaagtagcgagagaagaagtagagatcgacaaggatctgcggaggaaaataaagaagacggtgaagaagatcttggaaagttcgaacttgtacaagataacagagattaaggcgcgagaagaagcttcacttaaattggatcttgatctgtctcaagatccttacaaggtaatcgtgaaagaagaagttgaaaatttcctcgaagaagcagtaaagttgatcggcaataaacttgcgatgcttcccaagagaatagagtcgacgagtatttagatattattaatctaaaagtatgtcgatccaaaattggatagttttaatgtaatttcctcaaagattgtctctgtttgtttttttaatagtgtttctggttcatggaagctaatgtttttgtccgatatgaaacatgtgtctaagcaataagacaatgtgtctgaggaatttgagctcttgcaagaaaatttgcaggacacctcttcaaacttggcttgccaagtcctaatgtgtcgaattcagttacagattctggaaaaaaaaaaaaaaaaaaaaaaaaaaaaaaaaaaaaagggcggccgctttaaaggatcccagcctacggacgggggccagccacgtcaaaagtctt

SEQ ID NO: 127391 - DNA, 856 bp, Arabidopsis thaliana
ctcactatatggaaagctggtacgcctgcaggtaccggtccggaattcccgggtcgacccacgcgtccgaaaaggacagctctttagggaactgtttgaagaagaactatatatatggctcatacataaagtgactgaagagggtaaaggtccaaacatattggatgaagatggacagggtattttacactttgttgcagcgcttgggtatgactgggccattaaaccggtgttagcagcaggagttaacattaacttccgtgatgccaatggctggtctgcccttcattgggctgcgtttagtggcagggaggaaactgtcgctgtgcttgtctctctaggtgctgatgctggggcattaacggatccatctccagagcttccattgggtaaaacagcagctgatttggcttacgcaaatggacacaggggaatttcgggatttcttgcagagtcttccttaactagttatcttgaaaagctaacagtggactcaaaggaaaatagccctgccaactcttgtggagaaaaagctgttcaaacagtctctgagcgaaccgctgctcctatgacctatggcgatgtaccagagaaactttccttgaaggattcacttactgctgtccgtaatgctacgcaagcggctgatcctctccatcaagtatttcaggatgcaatcatttcaacgggaacagctgtgtgatattggcgttgatgaaaagattgatatctccggccagctagctgttttcttttgcagcttctaaaacttagaattcctgggcaaggggggtgcttcttttagatgggctggtacccatatccaaaagaaatatcgtgcttgtgaagaagaaaa

SEQ ID NO: 127392 - DNA, 961 bp, Arabidopsis thaliana
cccccctcgaggtcgacggtatcgataagcttgatatcgaattcgcggccgcaaatctgcaaccttttggaattagttatcaagctcctccttcaaatatggactctgaatatatgcctgtaatgaaaatattgcgaagaagcgaagatagtttgaaaaaagtcgatagtttttctaagtgggctattaaagaacttggggagatggaggatttgcagatgcagtcttcacgtggagatattgcatggaccactgttgaatgtgaaactgcagcagctgggatctccttgagcccttctctctctgaggatcagcgtttcaccatagttgatttttggccaaaaagtgcaaagacagacgcagaagttgaggtcatggttattgggacatttctacttagtccgcaagaagtaactaaatataattggtcatgcatgtttggtgaagtggaagttcctgctgagattttagtagatggtgttctttgctgtcatgctccaccgcatacagctggtcacgtccccttttatgttacatgttccaacagatttgcttgcagtgaagtacgagaatttgatttcctttctggttctacccaaaaaatcaatgcttcagatgtttatggtacctatgcagatgaagcatcacttcagttgcggttcgagaagatgcttgctcacagggattttgttcacgaacaccatatattcgaagatgttggggacaaacgaagacaaatcagtaaaattatgttgctaaaggaggagaaagagtatctccttccagggacatatcagagagactcaaccaaacaagaaccaaaaggacagctttttatggaactgtttgaagaagaactatatatatggctcatacataaagtgactgaagagggtaaaggtccaaacattttggatgaaaatggacagggtattttacacttttgtgcagcgcttgggta

SEQ ID NO: 127393 - DNA, 913 bp, Arabidopsis thaliana
  unsure (1)..(913): unsure at all n locations
nacgcgcnnnnnnnnnnnnnnnnnnnnnnnnnnnnnnnnnnnnnnnnnnnnnnnnnnnnnnnnnnnnnnnnnnnnnnccacgcgtccggagagaaggagcttaagagagcattcgtcgtcgtcaatggagatcttctctgcgtctgcttctctaactttaactggattcgttcctcgtcttcttcccttgctctctcctcaagctcgaactactctctgcaagccgttgctgtcttcttcttctactagactcatttcttgtcacagtcgtatagctccgtctcggtctctcgcagatcaatccgcctctactgggatcagtgttgttgattcggatcccattgatgttgtaaagaggaaagctatggacatagcccctgaactgaaaggagcttccatatttctggttggaattaataactctattaaaacgaacacggggaagcttttggctgaggcattacgatattactactttgatagtgataatttgatcacagaggcggctggtggaaatgtgtctgctcaagctttgaaggaagctgatgagaaggcttttcaagaatcagagactgaagtgctgaagcagctatcatctatgggtcggcttgtagtttgcgctggagatggtgcgggccaaagcttgagaaatcttgcacttcttagacacgggatctccatatggatcgatgttcctctggatatcactgctaaaggggatgatgattcattccactcagaaccttccctgagttgtttgacacactaanagcgagttacgagaaatcaagaaagggttacgaaacagcagatgtatccatttcccttgaaaaatagctacaagctagaatttgagacttggaagcagaacttctgagacttgctttgagatctgaagaatagagagtggcag

SEQ ID NO: 127394 - DNA, 412 bp, Arabidopsis thaliana
acggacgcgtgggtttaaagatagggatgagctgaagaaggcggtggactggtgttccattagagggcagcaaaagtgtgtagtacaagagattgagaaggacgagtatacgtttaaatgcatcagatggaaatgcaattggtcgcgtcgggcagattgaatagaagaacatggacttgttaagataactaagtgtagttggtccacatacttgttgctctattaagccggaaaacttcaacttgtaatttgcagcagaagagattgagtgtctgatcatgaatttgcatccttcggtggcgcgttttgggcgtttccacagtccattgaagggtttcaacactgtagacctctgatcatagtggattcaaaagacttgaacggcaagtaccctatgaaattgatgatttcc

SEQ ID NO: 127395 - DNA, 433 bp, Arabidopsis thaliana
ttgtaaattccgattctgcagaaatgggaaatctgaaacttgctttgatcatcaagagccctagagacgacgttgagttccgactcgagaagcacaaacagccggcgaaatttggagatgaagcttacgattcctttgtcgattccgatctctgggacttaccgtcaacagatttacaggctctggaagacggagtgaggtccggatttagtatttctagacttgactcatgctcggaggaggttgatttgatgaatttcgacttcgaatccacactgattctgctgctggagaatttagggattgatattagcgatgtaggagagtggagattcgtcaggtctgtagaaggacctgagtttggacctgactcttgtgtccgtacgtgttttatctccgggaagctcttaaatacagatcaaagtttacaaga

SEQ ID NO: 127396 - DNA, 419 bp, Arabidopsis thaliana
cgcgtccgatcaatctcttttctctatctcagtctcaccttctcaatttacagttttgccatccatcaacaacgagagacgacgccttgctatcgccgctcgatctcaccgactatcacgccggaagattcgtaagagacctcctgatagagatatgtcctccatagtttcaatcccggagcttcctcgccggcgggattctgaggaaagcctgcttttagattctcgaatcagtgtagctgaaggagatacatcgaatacagatgtagaaggagacagagatactacttctagtattagaacacagcctccccctcgtaaaggaagaaatcttagtagcagcagaatcaaattctacggtgttgaattatcaccagataatgttgctgtagcaatggtgtattttgttcaaggtgttt

SEQ ID NO: 127397 - DNA, 516 bp, Arabidopsis thaliana
cgactcactattgggaaagctggtccgcctgcaggtaccggtccggaattcccgggtcgacccacgcgtgcggtgagaactggagtaatggcccaattcaagaatagttttgtcgctgcaacgccatcaaatccacaaaaccaagcttatccaaacaagagaccatccctaatgggctttgtctcaggtggtactattggtggagacatgggtagaactcagagtcaagctcccccagggagcacctactcaaaacgcctcatcacacaactccagccagaatcactcacagagttctgagaatcggcctagagagaggaacagaagatctggttgggataattgagtgagccacgttttgcatgatgatagtggaagtggtttgcacaacaatgtaatgaatgtggtataattgggtaatgctttgcgtgtgacgctttggattttagaggggggagagggaacaggaaaagtgcgccgcttctaaggcgctctgttccacgcggggcccgtgga

SEQ ID NO: 127398 - DNA, 533 bp, Arabidopsis thaliana
  unsure (1)..(533): unsure at all n locations
gagaaaaggaggtaagaaaggccgaggaggaggtggtggaaacaaaggngtacgtggagttgattttggtcttggtattggatttagctcggaatctagtaggacaccttcttctaaagctgcaccaagtagaagtggggcaatcaattcagtgagaactggagtaatggcccaattcaagaatagttttgtcgctgcaacgccatcaaatccacaaaaccaagcttatccaaacaagagaccatccctaatgggctttgtctcaggtggtactattggtggagacatgggtagaactcagagtcaagctcccccagtagcacctactcaaaacggctcatcacacaactccagccagaatcactcacaagagttctgagaatcggccttgaagagaggaaggtgaaggttcttggtttggggataattttgaggttgagccacgttttgcattgattgtaagtgggagtgttttgcacaacaatgtaatgaaatgttngtataaatttggtttttatccttttcccggtttc

SEQ ID NO: 127399 - DNA, 429 bp, Arabidopsis thaliana
  unsure (1)..(429): unsure at all n locations
atctctcattactctctagtcaatatcccaaaatccctaattcatatctttgaaactgataaagataacaaagaaatggcctctcaattgcttttacctccaaaccaattcactaaatcagtctcacctcaagttttcattactggtgattgtcaaggatttagtgacttaactctgaaaagaaaatcaaaccaagctacaagagtttcaaatggatctagcttaagagtaaaagcagctttgagatctactcacaacaaatcagtggttgagattccaaaacaatggtataatctggttgctgatctttcagtcaagcctccttcaccgttgcatccaaagnctttcggaccgntaaaaccngtngatttggctcancttttccccaatgngttgntttaacaaggggntcacangnggggttttttg

SEQ ID NO: 127400 - DNA, 475 bp, Arabidopsis thaliana
  unsure (1)..(475): unsure at all n locations
cccacgcgtccggtggaaattcaaataaagatggatgattatgaaacccctcttttgtccaaggactcatcatcatcatcatctgtgattacttcatctttggaatggatattgaaagttgtaatgtctatgatttttgtgacttgggttgtttttcttatgatgatgtaccctgaacaactcggtgatgatttcctcacatttgtctcctccaagactttcctaggcaccacaggaaccatgttcttgattttcagttgtccgattcttgtcatctctgtcttagcttctctctatctcattatctccggggaagacaaggtcttcactaagaagaagatatcgaaattcccgaggtttaggctatggacattccctgttcttgtggatggaccatttggagttgtttctgcagctgagtttcttggaaatatgggcttctctggttttttcctttggnctatctatgcttata

SEQ ID NO: 127401 - DNA, 364 bp, Arabidopsis thaliana
actttcagagtttggaattcataccataagcaaagatgtgcagagaacagaggatataattgcatgacaccttcccaaatgtttgggatgaactaatcaagaagcttcagtgtctcacactatgtgttaaaccagcaaaggatggatgttccactggcgttgcaagattatgttcctctgaagaccttgctgtagatgtacaagctttgaaagattgtataccaggaattcctccacacactctttctaagacacatgggatgattgagatgccaaatcctactccagaactcttgatttttgaaccatttgtcgaaaccgatgaaatcatagtttcatccaaagccaagcagcagctctcttg

SEQ ID NO: 127402 - DNA, 519 bp, Arabidopsis thaliana
cccaacgggtcctgagcttcttacttatatgcatatcttgtatgaagcctgcccttatttcaaattcggttatgaatctgctaatggagctatagctgaagctgtgaagaacgaaagttttgtgcacattatcgatttccagatttctcaaggtggtcaatgggtgagtttgatccgtgctcttggtgctagacctggtggacctccgaacgttaggataacgggaattgatgatccgagatcatcgtttgctcgtcaaggaggacttgagttagttggacaaagacttgggaagctagctgaaatgtgcggtgttccgtttgagttccatggagctgctttatgctgcacggaagtcgaaatcgagaagctaggagttagaaatggagaagcgctcgcggttaacttcccgcttgttcttcaccacatgcctgatgaggagtgtaactgtggagaatcacagagatagattgttgagattggtcaaacacttgtcaccaaacgttgtgactctggttg

SEQ ID NO: 127403 - DNA, 506 bp, Arabidopsis thaliana
tcgggagactgctacacagcgaagcaaatccagaagcaattcacactcttctctgaatcattcgatgacttctacagataatgaggttcaaaagtatcaggatttcagtagggaatttaaagatgtgtatgaaacatggcagtcacctcagaaggtgagtcgctcaagggattgctcgcctagaaaaggaagatatgatgaaagtacgactgagaaacaaatggctcttgttcgtcaaaagttctcagaagcaaaacgccttgtaacagatgatagtcttcaccaatccaaagagttccaagatgcacttgaagtgttaagctcgaacaaggatttgtttgttcaatttctccaggaatcaaattctttctctcagcagaatctttctgactttcaccatgttcctcctcattcagaggcgaagcggatcacagtattgagaccttcaaaggctggtgaaactgaaaaatatgtggttcaagggaggaggaacaagcaggttaaga

SEQ ID NO: 127404 - DNA, 550 bp, Arabidopsis thaliana
cccaaaacaacctttagtattggaacggaagcgatttctctctcgtcgccgtcgtatcaaacctcgccgccgtagccgtcaacgcatctttcatttcgggaatggcgaacaagattgcaatgtttctctcggaagcaatgaacaacaatgctgtgataaacacgtgtctaggagtatcgtttgtggttttgggattgagatctgataaacagcagaagtatgttgaggccttagcagagcagaaggagtcactcttcaagtctaataaggcaatgaaactcaccatgtgggagtggaaacagcagctctttgctgaagctgcctctgcgggtaatgccgcggttgttcctttgtcgacgcttaaggccatctatggtgaagttaccaccacaaccaatcaatctggtgacacagccaaggaagattctaaagtgtccactcccaagatcatgatatgagaggttgttaaatttttggtaggttcatttcacttcaaattattcactcggctaaagtaaagattagcatttagtctcatcatttgcataaa

SEQ ID NO: 127405 - DNA, 371 bp, Arabidopsis thaliana
cggacgcgtgggcggacgcgtgggcccggagatcgtgttctaggctcttatgcatttgagataacaaaacaacctattgcagtgcacttgcgctccacctctgagaaacctgaaaggacattgttgctatctatctgtgctgaaggagctacaaaggttttcagtgttgtagattcaggttatcacgccataaaagatataaaggaaacatttgactccagattccatgagaagggaaagaaaaagcttcaaactgacaatatcatccgttacacagaaacgttcttgcttgtcctgccaagcattggtatagctttggttaattctcattcacacgaattggtttatgcttgtgcatcaaatgttgtgtt

SEQ ID NO: 127406 - DNA, 813 bp, Arabidopsis thaliana
  unsure (1)..(813): unsure at all n locations
gagttagtaagaagttggggtttgattaacgttttgcatcggagatgggtttggtcatgaggtttgatctttaccgtatgtttgtgatgttgatgggtttagggtttacgatatcaaatggatacaagttctatgttggtgggaaagatggttgggtcccgactccttccgaagattattctcattggtctcaccgaaaccggtttcaagtcaacgacactcttcattttaagtacgccaagggaaaagattcagtgttggaggtgactgaacaagagtacaacacatgcaacacgacacaccccctgacttccctctcagacggagactctctcttcctacttagccactcaggttcctactttttcattagtggcaactctcaaaactgtcttaaaggtcagaagctagccgtcaaggtcttgtccaccgtccaccacagccactctcctcgtcatacctctccctccccgtctccggtccatcaggagttgtcttcgccggggccttctccaggagtggaaccatcatctgattcaaactctcgtgttccagctccaggaccggctacagctcccaattcggccggtttggttggtccggggatggtggttcttgtgattatgataagttctctgctttgaggggtttatatattgtcgctagtcattaaatttgtgaggggcattaattactctaccatttgagattcaatattaaggggccttttaatttgaatgntttaaggatcttggaacccattttaaaggttccggtggctggttttgtctaccaaagaaatnttaaggggtt

SEQ ID NO: 127407 - DNA, 650 bp, Arabidopsis thaliana
  unsure (1)..(650): unsure at all n locations
nnnnnnnnnnnnnnnnnnnnnnnnnnnnnnnnnnnnnnnnnnnnnnnnnnnnnnnnnnnnnnnccacgcgtccgcccacgcgtccggagtatcttagcccgcgtctcgagattgtcttatcgatctctctccttagtctgcaagcgcttccactcgctccttacttcaggagagatttaccggttccggtcactatcaggttataccgagaattgtctctatgtgtgcttacgtttctctcatactggccgtagccatcgctggttcatgcttcgtgagaagaacaagtcaagtgggtatgttttggcaccaatcccaatttcccattctccttctttgcacgcgtcgagtatcgtggcggttggttctaaaatctacaaaattggcggagtcatggatggatctagtgtttcaatcctagactgctggtctcacaggtggctcgaagctccaagcatgcagatggaacgggaccgcccatcagccaatttaattgatggaaagatatacgtaacaggaggctgtcacagaggctcctacaatccatcaaagtggatggaggttttcgatctaaaaaccgaaacttgngagcctgtattgtgccgttcagatagattgacgttcgagagttatcatgaacgaactaataa

SEQ ID NO: 127408 - DNA, 698 bp, Arabidopsis thaliana
  unsure (1)..(698): unsure at all n locations
ttctnnnnnnnnnngactcactatagggaacagctggtacgcctgcaggtaccggtccggaattcccgggtcgggccacgcgtccgcccacgcgtccgcttacatacatacacgtcttccacaagactcaaactccacagcatgggattctcacggtcgctcaaccgcaccgtgggcgtcttcgtcttcttcatcctcgacattgttgatttcctgctttgctttacctacaagactcttgatttcttcttcgagtccgagtggaaaccctgctactgctgtccgccgcccgaggccaaaccaatctcggctggagggaacagaggcggtaagatgatagtgtcggaaagatcaggagactactcgaaggtggtctcactcacaaggacaaagatctatctggatgagatctccgacacactctactctcgcccttcactcctcaccaagctcactaagctggtgaagtgcttcaagaaagatgttgttaaatgctgtgatgagtccaagaagagatcaccgtcaactaaaaagacattactcactgtcaactccacggtggtcgagaagttgcanagaacaccaagatggtctgattgccattgcactntctgcacttcttggctttcctcttccaaccaatctctctgtgtcaatgtccaacagcccacagacaancaggcacaagagaacgtagt

SEQ ID NO: 127409 - DNA, 504 bp, Arabidopsis thaliana
gtctggttttgttgcgttcttccgatttgggttggagaggaaatggcgtcgggatggggaataacgggaaacaaagggagatgctacgatttctggatggatttcagtgaatgtatgtctcactgcagagagcccaaagattgtacccttcttcgtgaagattacctcgagtgtctccaccattccaaagagtttcaaagaaggaacaggatatacaaggaggagcagcgtaaactaagagcagcttcgaggaaaggtgaagaagccggagatgggactcacaaccatcactagtctcaacaatcctccttcaagcttcatccgattccagagaagaataataaaaggttcatggaagattttgtatcttggaatctctaaacgctttgattgtttttcagttttcaattttatccaatcatggtcagctttctttttatgttaaatcgtctctttgagacgtatacttttccacctgaattatggacatgtggattgtggatc

SEQ ID NO: 127410 - DNA, 567 bp, Arabidopsis thaliana
ataatatattgcttcctatagtgtctttatccctctcaaattttcttttctctctgcctctcccacaatcacaagataggaaaattgatccacaaagaatcgtctgaatgaagacaacagttgtttatctggtgattctatgtctcattgtttcatgtaccaatggagaaaccaaacatgtaagaaaaattaactccgatggatccgaagcttggggatacgtcgaagttagaccaaaagcacacatgttttggtggcattataaaagtccatatagagttgaaaatccttccaagccatggcctatcatcctctggctccaaggtggacctggagcttcaggggttggtatagggaattttcaggaggttggaccattagacacatttctcaagcccagaaactcaacttggttgaagaaagccgatcttttgtttgtggatagtccagttggggcagggtacagtttcgtggagggcaatcaaaaggatttgtatgtgaaaagtgatgaagaagcagcacaagatttgaccaaactgttgcaacaactcttcaacaaaaaccaga

SEQ ID NO: 127411 - DNA, 481 bp, Arabidopsis thaliana
tcgttgatgtgactaaagatgagaaacaggtgatgcacatgtggaactcgtttgtgaggaagcagcgagtattagcagatggtcacattccatgggcatgcgaggcattctcaagattgcacggacccatcatggttcgaacaccgcacttgatttggtgctggagagtgtttatggtgaaactgtggaaccacggtcttcttgatgcccgaaccatgaacaactgtaatacctttctcgaacagctccaaatttgaaaacccaagaaatcattaatttaagtagaaaaacaaagaaagacaagagaagaagagttttgggttctcatttaactacttttggtgttttaagagaaagaggagcatatttatgcatgaatttgtcctcatcttttttttttttttttttaattataaatgtgtacattggcttatctttgacgcttgttcttcgagtaatgctttatacatgttccttactc

SEQ ID NO: 127412 - DNA, 494 bp, Arabidopsis thaliana
tttccacgcgtccgttctcatttctctctggtctatatcgctctcagaatgcaattggaaaaaagaacaagggaagagaacacaaaacgaaatggttagagaagaggagaaatcgagatggtggtggttcgagagccacaagagctccaaacattctcaatggcttcaatcaacactcgctgagattgatgcaaagacaaaggcaatgttgaagttgttagacggaaacgcagactctttcgctcagcgtgctgagacttactacaagaaacgtcctgagcttatcagctttgtcgaagacttttatcgagctcaccgttccttagccgtgaacttcgaccacctcaagtcttccgaccactatggatctcgctccgctaaggttccccaacaatccatggagtccgtttgtgacagcaattctcactttgaagatgccgattctgagattgaagacccccttcaagatgatgcctccgcagctgattgcaaag

SEQ ID NO: 127413 - DNA, 855 bp, Arabidopsis thaliana
acgactcactattgggaaagctggcacgcctgcaggtaccggtccggaattcccgggtcgcccacgcgtgggacaaacggttttatcagttaaagcttttttaaacaatgcacttcttcttcgtgccgaattcttcgtcttcatctccttctccggccaatacttcttcattctcgctatcgtttctcactcctcaaattcctgagaatctctgtaagtcaccgacgaaaatccacatcggaactcatggaatctccggtcaatcgtttctcagtcatcctactttctcatctaagaacacgtatctgtatgcagtcgtcgacaggtcttcttcaggtgtattttcgccgcaaaaggaatctgccaatggcgagggagaggaatctaacacggaggagggagtattagtagttcgacggccgttgttggagaattccgataaggaatctagtgaggaagagggaaaaaagtatccagcgaggatcgatgctggtctgagtaatatagctaagaagatgccgatatttgagccggagagatcggaatcgtcgtcgtcatcttcagccgctgctgctgcaagagctcaagagagaccgcttgcggtgaatttggacttgtctctgtacaaagcaaaggttttggcgagaaatttcagatacaaagacgccgagaagattctagagaagtgcatagcttactggccggaggatgggagaccgtacgtggcattggggaagatactaagcaaaccaatccaagttagctgaagctccgaatcctgtttgaaaaggggtgtcaatcttacccaaggggggattccatttttttggcagtgttgggctgtcctggaaaaca

SEQ ID NO: 127414 - DNA, 359 bp, Arabidopsis thaliana
caagaaaatgttggagattgggtacaagagaagtgccaaaagatgcaaagagaaatgggaaaacatcaacaagtattttaggaagacaaaagatgttaacaagaagagaccacttgactcaaggacttgtccttattttcaccaactcacagctttatacagccagccaccagcagggaccaccgccaccaccgccaccacggccacgtcagccagagatctagacacccgacccgaggaaaaccgggttggatcccaagatcctgatatttctgtacccatgcatgtagatggagatggtgctggcgataaaagcaatgttcagttttcaggtttcgatcttgagttctaataaatcc

SEQ ID NO: 127415 - DNA, 389 bp, Arabidopsis thaliana
ctctatggtctaatgcggggattgccctccctgcgttggacccgtttacccgacccgggtcgatactcacgccgccacccggaaactctcctctgacaattaatttattatgggttgcttcaactccaagcattcttctccggcgggtcctccacgccctgtccgccgtcgcttggacaccaacgtccaccgaagtcatacccaagatccccataaccgccatgttcttcccggtccaccatctcaccgccgtgtcgtcaactcatctccgaaaaaacatcgcaacaatgacgacgatgctccaaaatcgaggacgactggtgttagcctaagatcgggattgccgcacagcaatgtagaggctgagcacgtggcggctggttggccct

SEQ ID NO: 127416 - DNA, 512 bp, Arabidopsis thaliana
catgtgagagccttttctttcggagttttcaacgcaattcttcagagaagcagaagagatgttgtacattatagggttaggtttaggagatgaaaaagatataaccttgagaggactcgaggctgttaagaaatcacagaaagtatacatggaagcttacacttctcttttgtcctttggtctctctgctgatggactttccaatcttgaaaagttctatgggaaaccaattatacttgctgatagagaaatggtggaagaaaaggctggtgatatgattgatgaagccattgataatgatgtcgcttttctcgttgttggtgatcctttcggagctacaacgcatagtgatcttgttgttcgagctaagacactcggtgtaaaagtagaggtagtgcacaatgcatcggtgatgaatgctgatgggatttgtggattgcagctttaccattatggagagactgtttcgatcccattctttaccgagacttggagacctgatagtttttatg

SEQ ID NO: 127417 - DNA, 581 bp, Arabidopsis thaliana
gctccctacgactcactatagggaaagctggcacgcctgcaggtaccggtccggaattcccgggtcgacccacgcctggcgaaccgatacaagatcgaagctttgccttctgtttcttcgaaaatctaccatggctgctctacaataccttgaatcgcagaaaaatgcgcacccagagcttggtgagtggtacaattcgctcgcagatctgtaccagaagaagctctggcatcagctcactcttaagctcgagcagttcatcgctctctctgtctttcaggctggagatgctttaatacagctttacaacaatttcatcactgactttgagacgaggatcaatcttctgaagcttgcgcatttcgctgttgtagtctcccgacagtatcctgagaaagaagctgcagttagttatcttgaaggagtgattgagaagcttaaagctactaaagagtcaagggttaatgaagccaattagctatatagaaacacaaatagctttggtcaagcttgagcaaggtgaccagaaggagtgcaagaaaatcttggacgatggaaaaagcctgcttgatagtatgact

SEQ ID NO: 127418 - DNA, 506 bp, Arabidopsis thaliana
acgcactcacaatagggaaagctgacacgcctgcaggtaccggtccggaattcccgggttgacccacgcgtgcgataaagtaaagcaagaggttcaaatcaagcttcagaatgttgaatctggtgaactagaactagaaatgcagtggctacctcttgagcaataaataatcaactatataatagggtcattatatataccaaacaaattttattactgtattcattattttaactttccccccgggggctggcccgacaactttttgaaactttgatatcatcgacaccttgtttcgtcctctgatgctgccatgtccctttctgattctcatctctcgtagtcttccgctttttccaccgcatctctaccctgcccccacgcgagaaaagaaagaatatctatctcccctctttctttagtttataatttataatgtgattgtgtgtggagtcgttgggcgccccccctccccacttacacgtttcacctatgagcgaccttca

SEQ ID NO: 127419 - DNA, 535 bp, Arabidopsis thaliana
agtgaaatgcaagttgtttgaatatgacacattttcttctgatgacataatggaagaagctgagatttatatccagcctctgattacatctgcaatggcttttggaaacccttaaatgtttggagatatgcagattggaaaatggctgaaatcgcacgacaatgctcttatagaagatagcatcatcaacattgcagatggtaaagtgaagcaagaggttcaaatcaagcttcagaatgttgaatctggtgaactagaactagaaatggagtggctacctcttgagcaataaataatcaactatataatagggtcattatatataccaaacaaattttattactgtattcattattttaacattcccccttggttcttgtttgacaaatttttgaaactttgatctcattgaaaactttctttcgtactttgttgttgtaatgttcttttggcagattacatatttgtataactcatatgattatatgttttgactcatgttcttcaaaaaaaaaaaaaaaaagggcggccgctc

SEQ ID NO: 127420 - DNA, 532 bp, Arabidopsis thaliana
  unsure (1)..(532): unsure at all n locations
tgcnnnnnnnnnnnnnnnnnnnnnnnnnnnnnnnnnnnnnnnnnnnnnnnnnnnnnnnnnnnnnnnnnnnnnnnnnnnccacgcgtccgcggacgcgtgggctaagaaacacgaaaatctctgaaagtctttttgtttgaagaagatgacgcatgttgaagatgataaggaattcaaggagaaacctttggttcaggttctgagcgacgacgacagtgaagtgaaggaagccaaagacggaggaggtgaagaagttaccggcggcgacggtgaaggagaggctaatgtagaagaggaagacgacgaagcagaaaatgaagacgatgatgatgatgatgatgatgatgatgacgacgacgaggacgaggacgatgaagaaggggaggaggatcttgggacagagtacctagtgaggccggttggtgaggttgaagatgaggatgatgcaagtgattttgaccctgaggagaatggcttggatgaagaagaaggtgatgaagagattgaagaagatgatgttgatgaggacatc

SEQ ID NO: 127421 - DNA, 426 bp, Arabidopsis thaliana
gtagagttttcgaaaccagcgagattaatggcatcttccaccggtctcaccgtcgccggagctctgcttgccggagattttcgattaccagctgtatcgtctctaatacccagaaagacttcttcttcattgtcatgccttagcaacagagatttatcgtctccttataattgctgttggcgactatccagaggcaaaattttgacttctctcagtaactcacggaaatttgctgtgggaaaggaagcagaagatgggtttctatcgaatgtgagcgaagatactgatgagatgttcgacgacttgttcaacaaatatgggaaggttgtttttagaagcactgatgttaagtctccaacagctgaggttgacgatgatgcagagagtttagcatttgctgttgaattggctaaagttgctagtgat

SEQ ID NO: 127422 - DNA, 468 bp, Arabidopsis thaliana
  unsure (1)..(468): unsure at all n locations
ccctatcttcttcatcagattttgctagttcgtcacacacacggatcatgtaatctgcttcttcttcgtttttacgatttgatcccaaagtttttcaattctataaatttgtgaaagcgaatcgtttgatttgacttataggttgactcttttctttggaaatggcagcgtcatcatcttctcttcttcttctccacaagcccacctacaatttccatttcgccgcttcctctgttcccacttacatcaattccgctcgatttcgaatttcgagctcaatcttccctttggatcgaagaagaagaagaagaatctggtctgtctctggctttaaatctatggccgatttggttaaaaccaatgctcgcagaggacgggtgaagatcgattctcaagcgctctgagcaagcaggctttcatcaataattcgggctccggggctccaanacggggttnggttccgcggcg

SEQ ID NO: 127423 - DNA, 601 bp, Arabidopsis thaliana
  unsure (1)..(601): unsure at all n locations
atgatactgccagctgnnnnnnnnnnnnnnnnnnnnnnnnnnnnnnnnnnnnnnnnnnnnnnnnnnnnnnnnnnnnnnnnnnnccacgcgtccgcggacgcgtgggcggacgcgtgggtgagagtattgagcaagattctgattcaatttctgcaatatcatcgatggcgttatccaaagatttgatgttgaaatgctcggaagacatgatgagtgcttacaaatctgcttgtgaagaacacccaaaactaaaatcctttgatgcttcccttcagcagcgaaccaacaaaatgatagactcactcaccgttgaagacaagaatggttcgtcctccccacacgacgcacacatggagctctccaagcacctagttgaagttacccaaggtgtggcagacttcattaccgaaatcgaagacgatgtgtgggacaaccaagctctaaagtatttggtcctggcctattttgaaaatactaaaaagactttagagattttcaaaactatagagaactgcgtcgagaacgcagaaatgggccaacttctcattcgagaggccttggccgagtttgagaaagagtcggcagaaaaagatgttggtgg

SEQ ID NO: 127424 - DNA, 405 bp, Arabidopsis thaliana
ataatatttcagtatttgaacttcactgaagattctaattggcttgtggagtataatgcagcactagcatctatttgcttcaggattttgcttggatttgtagatgatgtccttgatgtgccttggagagtaaagcttgtcctgccatcttttgctacccttccacttttgatggcttatgctggtcagacaactattgttataccaatacctcttgttgcttatattggcttggaagtgcttaatctacgaaggatatataacttatatatggggctacttgctgtcttttgtacaaactctattaacatccacgctggtctgaatggccttgaaatcggtcatacagttgttattgccgctgctatcctgatacacaacgttatgcatatcggagcatctgtt

SEQ ID NO: 127425 - DNA, 765 bp, Arabidopsis thaliana
  unsure (1)..(765): unsure at all n locations
nnnnnnnnnnnnnnnnnnnnnnnnnnnnnnnnnnnnnnnnnnnnnnnnctctctatctctcttagccagctctgaccatttcgatttttttccggtgaaaagggaggagaaacatggttgtacgtatcagactgtcgagatttggatgcaaaaatcggccattttttagggttatggctgctgatagcagatctccaagagacgggaagcatcttgaggtcttaggttacttcaatcctttgccaggccaggacggtggtaagaggatgggtctcaagttcgatcgaattaagtactggttatctgttggtgctcagccatcagacccggttcaacgtctcctattcagatccggtttacttcctcctcctccaatggtggctatgggacgtaaaggtggagcacgagacacacgcccagttgatccgatgactggtcgctatgtggatgcagagaataaaacagttaatgccaatgataaccagcctaaggaagaggatacagaagccaagagtgcatgattcattagccttctgtcagcgtaaccttttcaagttcactttgttgtcgattatattgtgtaatgcagcattagacaactgacttgtttcctttgtttggcgataaacggcaaggtgtttggcactttttgccggtagtgttgttgttaaagaaaaaaacaaaaacacataaagggcggccgctctagaggatccaagcttacgtacgcgtgcatgcgacgtcaagctcttctataagtcacct

SEQ ID NO: 127426 - DNA, 791 bp, Arabidopsis thaliana
  unsure (1)..(791): unsure at all n locations
aacccaccaatattaatatagggcccgggttggaaacccccttatattgcaaataagtttttttcaaaacttcctttttcaatctaaaaattggagacaccctaaggctatttgggtttcaaccggtttttttgcagaagtcaaagcggaaccaactcttctcacttcaacactcaagggaaactctacttctcttgttgcatctgctatctcttggaaaaacaatggcaaagattacatacgcataaaggctgtaaacttcggagctaactcagaaaatatgcaagtgttggtaactggattggacccgaacgtgatgagagtttcgggatcaaagaagacagtacttacctctaccaatgtgatggatgaaaattccttctcacagccagagaaggttgtaccacatgaaagcttgctagagttggcagaggaggatatgaccgttgttctcccgccacattccttttcttcattcgatttgttgaaggaatctgcaaagataagaatgccaatctctgattcttcttcccatcagaaaactaccactgtgtgaagagaaacaatgacaaggaagtatcaactttcatgtcaaaagtctctttgtggttcaaatctaattacattccataaatgcttataacgtacccttgtgtatatataataatagtctggtgaataaatttactttctttaaaaaaaaaaaaaaaaaaagggcggccgctctagaggatccaagcttacgtacgcgtgcatgcgacgtcaagctcgtgttgggtgtnntagaatcg

SEQ ID NO: 127427 - DNA, 852 bp, Arabidopsis thaliana
  unsure (1)..(852): unsure at all n locations
ccggctggaaaaccgggccgccacgcgtcgagggtcgtttcacgcaaaggccangttaatttagngaaangcngnacaaagaagatgttgggacaggaagccttcttgcctctcttgcagaagctgcgtttctcattggtcttgaaaagaatagtgacattgttgaaatggcaagttatgctccactctttgtgaacacaaatgatagacggtggaaccctgatgcaatagtcttcaactcctctcatctatatggaacacctagctattgggttcaacggttttttgcagagtcaagcggagcaactcttctcacttcaacactcaagggaaactctacttctcttgttgcatctgctatctcttggaaaaacaatggcaaagattacatacgcataaaggctgtaaacttcggagctaactcagaaaatatgcaagtgttggtaactggattggacccgaacgtgatgagagtttcgggatcaaagaagacagtacttacctctaccaatgtgatggatgaaaattccttctcacagcccgtgaagggttgttccacatgaaagcttgctagagttggcagaggaggatatgaccgttgttctnccggcacattccttttcttcattcgntttgttgaaggaatcttcaaagntaaggatgccaatctctgatcttctttcccatcagnaacntccnctttgtgaagggnacaattgcaaggaggntcacctttcatggaaaaggctttttgnggtnaaactaattacatncntaaatcgtttaacgncccttggnanataaaanagcctggggnaaattncttnttaccaaaaaaaaaggggcggtngc

SEQ ID NO: 127428 - DNA, 460 bp, Arabidopsis thaliana
acgcgtccgaccacgcgtccgttaaagagagcaaattaattttgttttgaataaaaatttcaatttcattatggaatataattatattagcatctacaatatgggtagcttgaaataagtgttatatgttttgttgattttgaactcattaaatttgtttttcttttgttataatttatatgaattcatgtggtgtaaaataatttattaataaatatataattaaagtttcaattagcatgtcaatatgacatattacatttttactttcacaataaataatatctactcaagatttggttttttaatcgacaaaattgatatattggtaagtcctgattttcaaaatcaactgacgacctttatgttattgaaaaaactaaaatgatctcctaacttctaaattacacactttcattgtttcacatcatcatcatcatctattgtttgagagaaatgc

SEQ ID NO: 127429 - DNA, 380 bp, Arabidopsis thaliana
acattcttcaaagtggttccgttagtgacaggatatgtctctgagatccaaaccttgagcttgaagttgaaaggctttgtagaaaaggacattcccactgcttgcttaaagataataatcgaacaacgggcagaatttcgacccggagcaggtattccagagctgtacgatgcatccctatcggttgaatccggtcttcccttcttcagaaaaattatatggaaatggcggaagactttgttcgtctggatcagcatgagtttgttcattacggaattgcttttcacgttggtttgttgtagacctcttagcatcccaagaacacaacctagagacagatcgccttcaaacccaactggagtctggaggtacattatgat

SEQ ID NO: 127430 - DNA, 594 bp, Arabidopsis thaliana
  unsure (1)..(594): unsure at all n locations
nnnnnnnnnnnnnnnnnnnnnnnnnnnnnnnnnnnnnnnnnnnnnnnnnnnnnnnnnnnnnnnnnnncgtgggtcgacccacgcgtccgtacggcggcgtgttgtccacagaagggggccgtttctgttttaacaaaacaagtatcaggccgttccaagcgttcactaacgacacgacgtttgtttatgaaccaaaaagacgaatttttcaaaacctcgtcggagaggtttaggcttaaagaaacaaattgttggaatctcaattctcgaatctgacatctcggagaagagatatggcgacagagtcatcggaatcggaagaagaaggaaagattagtggaggaaactataagctaatcatagacgacgatctaagagagatgggtaaaaacgcagcttggagcgttagctcttgtaagcccggcaatggcgtcaccactctccgcgacgacaatctcgagacttattggcaatcagatgggttacaaccacatttgattaacattcaattccagaagaaagtgaaactgcagttagtggttttgtacgttgaccttaagcttgatgagagctatacaccaagtaaaatctcta

SEQ ID NO: 127431 - DNA, 784 bp, Arabidopsis thaliana
  unsure (1)..(784): unsure at all n locations
tgattctccnnnnnnnnnnnnnnnnnnnnnnnnnnnnnnnnnnnnnnnnnnnnnnnnnnnnnnnnnnnnnnnnnnacccgccacgcgttcgtggacgcgtggacggacgcgtgggttgagaaacctcctctccccaaaaacgacgtagtttcacatttctcgacttcttgaatggagtttgaagacaacaacaacaacaacgacgaagagcaagaagaggatatgaatcttcatgaggaagaagaagacgacgacgccgtttacgactctcctcctctctctcgtgttctccccaaagcctcgacagaaagtcatgaaaccaccggaactacttccacaggcggtggcggaggattcatggttgttcacggcggtggagggagcaggtttaggttccgtgagtgtctcaagaaccaagcggtgaacataggaggacacgcggtcgatggttgtggtgagtttatgccagctggaatcgaaggtaccatcgacgctctaaaatgcgccgcttgtggctgtcaccgtaacttccaccgcaaggaattaccttacttgcatcacgcgccgccacaacatcagcctcctcctcccccgccaggggtttaccgtcttccagctccggttagctaccgaccaccaccgtcacaagctcctcctcttcagctcgctcttccccctccacaaagagagagatcagaagatccaatggagacgtcttcagctgaagcaggaggagggattaggaagaagcataggactaagtttacggctgagcaaaaggaat

SEQ ID NO: 127432 - DNA, 522 bp, Arabidopsis thaliana
  unsure (1)..(522): unsure at all n locations
aagacacccctagggagaataacgcagcaacggatttcataaagtgggtatttgacaacacaatggttaaggccacggaagtgtttgtgaaaataacaaaggtcgtgaccgagctcttcaattgttacaatggtgatggtgttaacaacaaggggaaagatgccaaattcaacaattggctcgaggaaaagctgaccacttcggtcctgctatccatcatcgttatgctggtcgtgatggtatcccgagcctgcaactagtcttgatcgtttcaaattagccgacaatacatttggtcttcatcatgctgcttgtttagcttttgtttcaggtcatattgtggtttgtttgatactactttggttctgtactccattgttgacattttagtagatttcgataataagaacactctgaatgtgtcaaaaaaaaaaaaaaaaagnnnnnnnnnnnnnnnnnnnnnnnnnnnnnnnnnnnnnnnnnnnnnnnnnnnnnnnnnnnnnnnnnnnnnnnnnnncattc

SEQ ID NO: 127433 - DNA, 680 bp, Arabidopsis thaliana
  unsure (1)..(680): unsure at all n locations
ggccgacccacgcggccgggaagaagaagatctgcttctgcaaaaaaccttatcctgctatggcttccactttcgtctgctctctaccaaatcctttctttgcttttccggtcaaagcaactactccttcgacggctaaccatacgcttctcggaagtcgaagaggttgtcttagaatcaaagcgatttccactaaatgggaaccgacaaaggttgttcctcaggcagacagagttcttgttcgtcttgaagatcttcctattaaatcctcaggtggagtattgttgcctaaagcagctgtgaagtttgagagatacctaacaggagagattatatctgttggttctgaggttggacaacaagttggacctggaaagagggttttgttctctgatgtgagcgcttatgaggtcgatttgggaaccgatgctaggcattgcttctgtaaagagagtgacttgttggccctcgttgagtgaagtcttgtccaagagggagagatttgaagattttacaagttttctgtaattttcagacagcaattgttgtttctagttaatccttcaatttaatatcaattgagatcactttcagagataaaaaaaaaaagtcatattcnnnnnnnnnnnnnnnnnnnnnnnnnnnnnnnnnnnnnnnnnnnnnnnnnnnnnnnnnnnaac

SEQ ID NO: 127434 - DNA, 1050 bp, Arabidopsis thaliana
aagatctgcttctgcaaaaaaccttatcctgctatggcttccactttcgtctgctctctaccaaatcctttctttgcttttccggtcaaagcaactactcctttgacgggtaaccatacgcttctgggaagtcgaagaggtttcttagaatcaaagcgatttccactaaatgggaaccgacaaaggtactgtcttttccgaaaaatgtattggtttctctgtttttaaaaactggtgattaatcttagtgttgaggtgataattgcaggttgttcctcaggcagacagagttcttgttcgtcttgaagatcttcctattgtcagtttagctcctttattgtctgaaatgtcatgattattatcaataagctattaatttgatgaatcattaaattgaatttccattgccaaaaaaactttattggggcttccttaaaaatgtggtttattttcctgaaaggaaaaattccccttcaagggttgggaagttattttgtttgcctctaaaaaggcaaggcttggttgaaaagttttttgaaggaaggaatattctcttaaaaccagggaaaggaaggaattttaataattcctggtttggggtttccttaaggggtttggggaaccaaacccaaggtttggggaaccccttgggaataaagaaaggggggttttttttggggttcctcccctgaaaaatggttgagaaggccggcccttttaatggaaaggggttccggaatttctttggggggaaaaaccccggaatagtgccttaggggggccaatattggccttttcttgggtaaaaaaggaaggaaggttgggaccttgggttgtggccccttcgttgaagtgaaagttttggtccaagagggagagatttgaagatttttccaggtttttggaattttcagccagccattggtggtttaaggttaatccttccatttaaaatccattgaggtccccttcagagaaagttattttccaaaaaaagaacaaagtttttcccaaaaaaaaaaaaaagggcggccgctctagaggatccca

SEQ ID NO: 127435 - DNA, 541 bp, Arabidopsis thaliana
cgattcattagaaaccaaattacaaaaaaaaacgtctatacacaaaaaaacaaatgggagagaaagaggaagtgaaactattaggagtatggtacagtccatacgccataagacctaagatcgctcttcgtctcaaatcagtggattatgattacgttgaggaaaatctgtttggatccaagagtgagcttcttctcaaatcaaacccggttcacaagaaagtccctgttctcctccacaacaacaaaccgattgtcgagtctctcaacatcgttgaatacattgatgagacgtggaactcatctgcaccgtccattcttccttcacatccttatgatcgtgctcttgctcgcttttggtctgacttcgttgataacaagtggtttccggcgttgagaatggcggcgatcactaaatcggaagacgcaaaagcgaaagcccatgggaagaaggtggaggaaggggtttttgcaactcgaggatgcgtttgtttctataagcaaagggaaaccctttttcggcggtgagcaatcgggttatg

SEQ ID NO: 127436 - DNA, 450 bp, Arabidopsis thaliana
caatggtcgtaatgcgtttaatccagctgatttcccagtgaaggagccatttgatttgcctcctcttggagatggcttgggtccagttgtgcagacaaagaatggagggttcttgcgatcaatgaatcccttactgttcaggaactctaaagctggaggcagcttgatcatgcaagtgtcaactccagtggtggtgcctgctgagatgggctctggtatcatggagatacttcaaaaactagccactgctggaattgagaagctctcgatgcaggcaaataaagtaatgcctttggacgatataacagggaaaaccatggaagaggtgtcgtgggaaacttcacctacaattgacattggggacagggatcatgtatcagagcgtgaatctggtgatgcatctggttttgtgaggggaggtgaaagacgaacatcatttgcagctaagcc

SEQ ID NO: 127437 - DNA, 884 bp, Arabidopsis thaliana
  unsure (1)..(884): unsure at all n locations
ccgacttatatggggaacgctggtacgcctgcaggtaccggtccggaatttccgggtcgacccacgcgtccgcccacgcgtccgggaatttgcagaatcggaggacgtgaaaatttctttcactgttaccaagtgtggcgtgttgttattcaatcctcctcaagaacggacacccttgtgtcgaaggagcaatgcatcacgactgccccatttgctttgagtttctgtttgaatcacggaacgatgtgacggttttaccatgtggacacacaattcatcagaagtgcttggaggaaatgagagatcattaccaatatgcgtgcccactttgctcaaaatctgtatgcgacatgtcaaaagtgtgggagaagtttgacatggagattgcggctacaccaatgccagaaccataccagaacagaatggttccagattctctgcaacgactgtggggaagaaagcagaaggtacagtaccattgtggtggctcagaaatgcccaaactgcaaatcatacaacactcgccaaccagaggctgaagcttttttgaaggtgttttgctttcaaaggcattaaaagctttcacttgatccaaaaggggcatggacccttaactgaggacggggcttccaggctactcttccaccttttcttaaaatttctgggccgcctttggtactagactttatgttctctggggggtggagggctgcgaatccccttgggatcatccccttggaattcgggggttattgaaagtccctaataaaaaaaaaaaaaggggggccctttagggtcaaatttacttccgcgcgtgcgggcctatttttttatagggcacaatataaaactggccggntttcaccgcggagggaaaccggggc

SEQ ID NO: 127438 - DNA, 645 bp, Arabidopsis thaliana
caccccgccgcccccatttgtttaaggttttgttttaatcccggacacgatgggacggtttttccatggtggaccccccaattcatcaaaaggtgttggaagaaaatgaaagatcattccccaatatgggtgccccctttgctcaaaatttgtaatccacatgttaaaaagggtggaggagtttgacatggagattgcggctacaccaatgccagaaccataccagaacagaatggttcagattctctgcaacgactgtgggaagaaagcaagaggtacagtaccatgtggtggctcagaaatgcccaaactgcaaatcatacaacactcgccaaaccagaggctgaagctttttttgaagttgatttgctatcaaatgcaattaagagcttttcacttgatccaatagtgtcattggatccttaacttgaggactgggtctctcgagtctatctcttctcactctcttcttcaatattctctgagtcgtctcttgttcactagtctatatgtttccttggtgttgtttgatggtctggttagtttccattgtgattcatctcctttgtaattctgcggctttattgaaaagtttcgtttaaaaaaaaaaaaaaaaaaagcgcgcccgctctagaggatccaagc

SEQ ID NO: 127439 - DNA, 347 bp, Arabidopsis thaliana
tttctcatttcctcttccgttttccacgggaagacacttcccttctcttctttatcttctctcaaattcttcagttccttctcgaaatcattgatcttgatttgagctttagagaagagaagaacaaaattcataagagaacatagaataagtagtgagatctaatcctcttcccatgtttttgtctataaagtagcaattagaacttcaatcttcaatttcatttccattaacattgtttcccattcacaaagttgacttttttttctttggttttagcttcagttcaagattcttcagttgggtgtactaaagttttgaaatttctttgtttaaacattaaaagt

SEQ ID NO: 127440 - DNA, 760 bp, Arabidopsis thaliana
  unsure (1)..(760): unsure at all n locations
ggtttgtggcggtggaggagacttcgggagggaagagaagagagattgagcttgttgttggtggagaagacgaagttgaggaggataggcggaggagtcgtcggagacatgttttcgaggggcttgatttaagtgagatagagatgaagacggagaagaaagagagaggagaagaagttggacggatgagtatttgttctccgccgaagaatgctttgttgttgatgcggtgtagatctgatccggttaaggttgcggcgttagctaaccgggttcgtgaaagacagttgtcgttaaacgacggcgtatacacagaggaggaagaagatgagagaagaagaaggtttgagctggaaattgaagataagaaacggatcgacttgtgtgagaaatggatctctggtgagactactgtggaaacagaagaagtttcagtagcagttgcagaagcagaagcagaagcagaagcagaagctcctttgccttcaaatccagctacagaggaagaagaaagagtcaaagttgtggaagattcgattnttgaagaagaacaagaagcttcgaaaattctggattcgtttgaggaagaaatagaagctacgatcatgaaaaaaattnaagacgnaatcagaaacgctatagaagaagaggagaaacttgctgagatggnagaattagcggttttngcggtggcttnagacggaggaggtagaagaagcaaagaggttgttcctcnttgtttacctcanaattangnaag

SEQ ID NO: 127441 - DNA, 424 bp, Arabidopsis thaliana
ttctaaaaccctagaaactcacttcctcagtttctccaactctgtacttcgtatcatcaagcgaaaccctaaaagaagcaatctttagtctcttctcttctttattttttctggggagaaagaaatttcacttttttttatccgatttctgcttcatctgggttttggatttttgcgatcgattttgagaaattagcaaacaatgtcgggttctggaggagtttcaatcgcacgtacagcgatccgtggtgagaatcggttttataatccacctccgatgcgtaggatgcagcaagaggcccaattgcagcaacagattagggagaagcaacgtcgtgatgatgaagatgaggttttgatggataaggaaaggagaaaggctgctactgttgctccgaggactactaggaaaggtcttggtgtg

SEQ ID NO: 127442 - DNA, 571 bp, Arabidopsis thaliana
  unsure (1)..(571): unsure at all n locations
gatcgtgcttctgattgttttggttaacggatcaaattatcgaacgatgatggcttctctcgcgacttccataagtggaagcttcagaattctggttaaatcatcttcgacgaggaatgggtttcctgtaatctctgatcaaaacccgagtttcgtcttgtttgcgaataaacgcagacatatctctagaacggcgatttttcaccgatctgcgataagtggttcgagtcaaggagaaaagatatcacctttagcatctggtgtatcttcaggtttatattcagctcagacttttgatttgacgcctcaaaacgttgatttggtgcttgaggatgttagaccgttcttgatctctgatggtggaaacgtcgacgttgtctccgttgaagatggggtagtctctcttaagctccaaggagcatgtaccagctgtccaagttcttcaacaactatgacaatgggaatagagagggtactcaaggaaaagtttttggaggttccatttaaaagntttttccggcaagntttttnattnaggggggaaaaccngttacccntngggggcagtnna

SEQ ID NO: 127443 - DNA, 810 bp, Arabidopsis thaliana
  unsure (1)..(810): unsure at all n locations
gcgatatgtggttcgagtcaaggagaaaagatatcacctttagcatctggtgtatcttcaggcttatattcagctcagacttttgatttgacgcctcaaaacgttgatttggtgcttgaggatgttagaccggtcttgatctctgatggtggaaacgtcgacgttgtctccgttgaagatggggtagtctctcttaagctccaaggagcatgtaccagctgtccaagttcttcaacaactatgacaatgggaatagagagggtactcaaggaaaagtttggagatgcattgaaagatattcgacaagtttttgatgaagaagtaaaacagataaccgtggaggcagtgaatgctcatctagatatactgaggccagctatcaagaactatggcggaagtgttgaagttttatcggttgaaggcgagcactgcgttgtaaaatatgttggacgcggagtcgattggaatgggaatccaggcagcgattaaagaaaagtttaaggacatatctaatgtagcctttacaagctacaaagcatgaagaaagccactatattatgtaaaagcattattgctctttgtttgagctaatgtccacttcaatagtcgtcctctccataactgtccttagccatcttgccaggttgatcaagaacggtgtgtagacaaagtagcaagttgttgtccacgtaaccagtcccttcaccagcaaacaaaacaagnaaggaacagagtcatgtgtatgtttttntttgatgatgnctgtataaacacttnattacctggccaaaagatttctatgtttgcttt

SEQ ID NO: 127444 - DNA, 440 bp, Arabidopsis thaliana
tcgcccacgcgtccggggttctcgggttgactacgaagctcctggtcgctggtgtacaacgatggcctacagtgctgatggaactaggctattttcttgtgggacgagtaaagatggggaatcgttcatagttgagtggaatgaaagcgaaggagctgtgaagagaacttatcaaggattccacaagcgttcccttggtgttgtccagtttgatactactaaaaaccgttatctcgctgcgggtgacgacttctccattaagttctgggatatggacaccatacagcttttgactgccattgatgctgatggaggtctccaggcaagtccacggatcagatttaacaaggaaggctctctcttggctgtttccgcaaatgacaatatgattaaggttatggcaaacttcagatggtctaaggctattgcacacagtcgag

SEQ ID NO: 127445 - DNA, 663 bp, Arabidopsis thaliana
  unsure (1)..(663): unsure at all n locations
nnnnnnntactgactcactatagggaaagctggtacgcctgcaggtaccggtccggaattcccgggtcgacccacgcgtccgattcggatttgtactccatactcatggaagcttcgatttcgtttctggggtcaacaaaacccaatatttccttgtttaacccttcttcaaacgtccttcctcgtagagatttccctcttcctgctttgaaattgaagaaagtttcagtgctgcctcgaatcttgcaccagaaacgactcatcagagctcagtgctctgatggattcaaaccagaggaagacgatgggtttgtcctagaagacgttcctcacttgaccaaatttctccctgatttaccgtcatatccaaatccattgaaagaaagccaagcatatgccattgttaagcgaacttttgtcagttccgaagatgtggttgcgcaaaatattgtagtccagaagggaagtaagcgaggagtacactttaggcgagcagggcctcgagaaagagtgtacttcagatcagatgaagtaaaagctgtgcatagtgacttgtggnggcttgtgccctggaatcaatactgttatacgggaaattgtatgtggattgaacaatatgtataggtgtaataacattctcggcattcagggaggatatagagg

SEQ ID NO: 127446 - DNA, 655 bp, Arabidopsis thaliana
  unsure (1)..(655): unsure at all n locations
nnnnnnnnnnnnnnnnnnnnnnnnnnnnnnnnnnnnnnnnnnnnnnnnnnnnnnnnnnnnnnnnnnnnnnccacgcgtgcgcccccttcatctcttagagccttttaaaagtaaccaacgccatgaatatcttccaagactggcctgagcctatagtccgtgtccaatccttatctgaaagcaacctcggagccataccaaatcgctacgtcaagcctctatctcagcgtccaaacataacccctcacaacaaacacaaccctcagaccaccaccatccccatcattgacttaggtcgcctatacacggacgacctaactctacaagccaaaacgcttgatgaaatctcaaaggcttgtagagaattgggatttttccaagtggtgaaccacgggatgagtcctcagctcatggaccaagctaaagcaacatggagagaattctttaatctccccatggaactcaaaaatatgcatgctaattcgccgaaaacttacgagggatatggaagccgactaggcgtagaaaagggtgctattcttgattggagcgactactattatctccattaccagccttcgtctttgaaggattacaccaagtggccttccttgcctcttcattgccgagaaatattggaggattattgcaaggg

SEQ ID NO: 127447 - DNA, 420 bp, Arabidopsis thaliana
acccgtctttgccggcgacacttctctactgaatatttcagtaaataatctcttcttagatctctccggcaatggcaattccgttgcctcttacctcttgctccccaatctcaacttcttcgtctatttcccgaacctccttcgtccctcttacacttcgcaatcgtactttcttctccaaccagaattacagtaggcgtgtacttatcagctgctcttcttctttgtcctcagacaatggttcatctccagactccatgaacggaaacgggaacgggaacgggagtagcttaaacgggcaatcatctttcccacgactgccttcctttgatggaacatccaaaccaccgcttaaatggagaatggttttactcaaagtcagtggagaagctcttgctggagacgaggagcagaatatcg

SEQ ID NO: 127448 - DNA, 914 bp, Arabidopsis thaliana
  unsure (1)..(914): unsure at all n locations
ctgcaggtcccggttccggattcccgggtcgaccacccgtccgtctgttgcagagctattagatttggatcctaaagaatttgaaaggccagatttccctctcatgttgtccggcgctaaacctttaccaggagcaatgtcttatgctcaatgctatggaggacaccagtttggcatgtgggctggacaactaggggatggacgtgccattactctgggagaagttttgaactccaaaggtgaaagatgggaacttcagcttaaaggtgcgggtagaactccatatagccgttttgctgatggccttgcagtgctccgtagtagcatcagggagttcctttgcagtgaaactatgcattgtcttgggatccctaccacgcgtgccctttgtcttctcaccacaggtcaaaatgtcactcgcgacatgttttatgatggcaatccgaaggaagaacccggcgcaatcgtttgcagggtttctcagtcatttctacgctttgggtcataccaaatacatgcctctagaggaaaagaggatcttgatattgttcgtaagttggcagactatgccattaaacatcatttcccacatatagagagcatggatagaagcgatagctatctttcaaaaccggtgatgaagatgattcggttgtggatctaacttccaacaagtatgcagcatggttcgttgaaattgctgagcgtacagctaccttagttgcaagatggcaaggtgtaggtttcacccatggtgtgctcaacactgacaatatgagcattttgggtcaaaccattgactatggcccatttggtttcttggatgcttttgatccaagttacaccccaaacacggcagatctcccagggaggaggttctgnttttncaattaancctcncangggttttggat

SEQ ID NO: 127449 - DNA, 552 bp, Arabidopsis thaliana
cagctctcactacgactcactattgggaaagctggcccgcctgcaggtaccggtccggaattcccgggtcgtcccacgcgtccgataagctcgaagattttaactgggaccattcctttgttaaggaattgcctggtgatcctagaaccgatgttatctcgcgcgaggtattacatgcttgctattcaaaagtttccccatcaggtcgaagtggatgatcctcagcttgtagcatggtctgtctctgttgcacagctatcagatttggatcctaaagaatgtgaaaggccagattgccctctcatgttcgccggcgctaaacctttaccaggagcaatgtcttatgctcaatgctatggaggacaccagtctggcttgtgggctggactactagggagatggacgtgccattactctgggagaagttttgaactccaaaggtgaaagatgggacctcgcagcttaaaggggcgggtagaactccatatagaccgttgcgctgatggccttgcagtagctccgcaggagcatcagggagttcctttgcagtga

SEQ ID NO: 127450 - DNA, 463 bp, Arabidopsis thaliana
aacccacgcgtccggtccgtcgtctttcttctacctccgaccgcttcatctcttcagttcaactgcgaaagttcctttttgtccctctcttcccagacaatttcgattaagcccttctcgatcttcttcctttcgtcggatggaatcttctccggcttcttcttcgtctccgacgccggtaaccgattcatctgctgattctttagcgaaagatctgcagaatcaaagtctgggagctgttgatgaaggtgttaagattaaaaagaagctcgaagattttaactgggaccattcctttgttaaggaattgcctggtgatcctagaaccgatgttatctcgcgtgaggtattacatgcttgctattcaaaagtttccccatcagtagaagtggatgatcctcagcttgtagcatggtctgtctctgttgcagagctattagatttggatcctaaagaatttgaa

SEQ ID NO: 127451 - DNA, 524 bp, Arabidopsis thaliana
ctgaagaacttatttttgatggcaaggctactgttaatggtattctctgcaacactccacagactcgagttgatccatcaagagacattatttatgttaatggaaatcgtattcctaagaaacttcctccaaaggtttattttgctctgaacaagcctaaaggatatatttgttcttccggagagaaagagatcaaatctgctattagtttgtttgacgagtacttgtcctcttgggataaaaggaatccggggactcccaaacctcgcctttttactgttggtcgtcttgatgttgccacaacgggattgatagttgttacaaatgatggagatttcgcacagaaactttcacatccttcatctagtttaccgaaagaatatattaccacggttgtcggtgatatacacaaacgacacttaatggctatcagtgaaggcacaatggtggaaggagtccactgtgtcccagattcagttgagttgatgccaaagcagcatgatataccaagagcaaggctgcgt

SEQ ID NO: 127452 - DNA, 541 bp, Arabidopsis thaliana
aggtctctacgactcactattgggaaagctggcacgcctgcaggtaccggtccggaattcccgggtcgacccacgcggggcgccacgcgtccgcccacgcgtccggcagaatcaaggagttcatattcaagagactcttctgctaactccaggggtagagaagataggcgttttgttgccaaagagttagatacatttcagggacgtgataaagcttatgatgaggtttataatcctcgaaggttcactgataatgagaaaggactcagaggaggatcacattcaaaaggctctgatactaactctcggggttggggtgataggcgttctgttgtatatacaagagatatggatgattggagagagaggaataaaaccaaggatactacgggagactggcttttttagccggaaaacttttgcagaaattggatgtagtgaagatatgatgaaggccttaagggaccagagtgttgatcgcccggacatattcaggctttggttgttcaccaggtattgttggaaagagtcgctgatacct

SEQ ID NO: 127453 - DNA, 514 bp, Arabidopsis thaliana
cggaaggaagaaggatcaaaaatgccgctctacgactgtatgcttctgttcaagcctataatcaggaaggagggcctcatcgacctcgttgcgcgcattggtaaacacgtttacagcagaaatggcgtcctcaccgagatcaaatcctttggcaaggtcgaattgggttacggtattagaaagctcgacggaagacactatcagggacaattgatgcagataacaatgatgacaactccaaacatgaacaaggagcttcactacctgaacaaggaagacaaactgctgcgctggctcttagttaaacaccgtgacatcaagattggacagtcggaaaaggaagatagtctgactgtgcctaacagactcactagtgggagcttatatgatggatcctcctcggacgaagatgacaacaacattttaggggtatccccgtggggaaatcacattctctgaaatgtttccccagacaatttcttcatgggagtccccttcaatggttatgaatgtt

SEQ ID NO: 127454 - DNA, 625 bp, Arabidopsis thaliana
tagatgatgacagtcttaaatcactcatacatgattgcaagtcattgaagaagcttgatgcatccagctgccagaatttaactcatagaggtttaacctcacttttaagcggggcaggatatcttcagcgacttgatctatcacactgttcttctgtgatatcattggattttgcgagtagcttaaagaaggtttcagcattacagtcgatcaggttggatggttgttctgttacgcctgatggtttgaaggcgataggcacattgtgcaattccctgaaagaggttagcctaagcaaatgcgtgagcgtaactgatgaaggtctttcttctctagtaatgaaactgaaagacctcagaaaacttgacatcacatgttgccggaaactaagtagagtttcaatcacccaaatcgccaattcgtgtcctttactagtctctttgaagatggagtcttgttctcttgtttccagagaagccttttggttgatcggacaaaagtgtcggctacttgaagagcttgacttaactgacaacgagattgatgatgaaggactgaaatccatatctagttgtctgagtcattcctcgttaaagctgggaatttgtcttaacataacagacaa

SEQ ID NO: 127455 - DNA, 754 bp, Arabidopsis thaliana
  unsure (1)..(754): unsure at all n locations
atgannnnnnnnnnnnnnnnnnnnnnnnnnnnnnnnnnnnnnnnnnnnnnnnnnnnnnnnnnnnnnnnnnnnnnnnnnnnnnnccacgcgtccggcagggagaagctcgtttctagaagctttaaagtttgggatcttgctacttgcactgtgaaccttcaggcttcacttgctagcgagtatactgcagcagtaaaccgagttgcttggagtcctgatggaggtctactgggtgtcgcatattccaagcatattgtgcatatatattcatatcatggtggcgaggatttacggaatcatctagagattgatgcccatgctggtaatgtcaacgatcttgctttctcccaaccaaaccagcaattatgtggtgtgacttcgggagaagacaagacactcaaggtctgggatagctgttaccggaaataaattgcacacttttgaaggtcatgaggcacctgtttattccgtgtgcccacaccagaaagagaatattcagttcatattctcaactgctgttgatgggaaaataaaggcttggttatatgacaacatgggttctagagtggattatgatgcccccggtcgatcttgcacgtcgatggcatattgtgctgatgggactagattatattcttgtggtctagtaatgnnnnnnnnnnnnnnnnnnnnnnnnnnnnnnnnnnnnnnnnnnnnnnnnnnnnnnnnnnnnnnnnnnnnnnnnnnnnnnnnnnnnnnnnnnnnnnnnnnnnnn

SEQ ID NO: 127456 - DNA, 500 bp, Arabidopsis thaliana
tccacgcgtccgcatctttcagagctagtaagcagaagctggaaagtttattacagaaatggtcagaatgggaggctgaaaatacgtccttggctcaggatcaagaacaactattcgaatctggtgaagagacatgtttccccgccatacgtgttggattgcagaagacttcgtctgtgtcattctggatcgacaaccaaactggtcataagccgttggaagattttgttctagtggaaagtagcaccactcctctttatgaccgtaaatttgctataggtttaaattcagcagatggctcaagaaacgtggaagggggattggagattattgatgatgatcctccacgttgcttcaattgaggtggctatagtcattctctaagagaatgtccaaggccttttgatcgatcagcggttaatagtgctcggaagcttcagaaatctaaacgaaatcacgatagtagtgggccccgtctaccatcaagatattatcaaaaa

SEQ ID NO: 127457 - DNA, 700 bp, Arabidopsis thaliana
cgccaacctctacttcgattcactctatggaaagctgtgccgcctgcaggtaccggtccgctattcccgggtcgacccacgcgtccgtacggctgcgataagacgagagaagggtacggctgccataatactacacatggggattgagggagaagaatcacattgatagattcgccgccgatctagagccgttgattttcttaatcggaaaaagaaaatgagtggaagcagaaggaaggcgacgccggcgagtaggacgcgagtagggaattacgagatgggacgaactctcggagaaggaagcttcactaaggtgaaatacgccaagaacaccgtcaccggagatcaagccgctatcaaaatcctcgaccgagaaaaggccttccgtcacaaaatggtcgaacagcttaaaagagaaatatctacaatgaaactgattaaacatccaaatgtggttgaaatcattgaggttatggcgagcaaaacgaagatctatatcgttcttgagcttggcaatggaggtgaactctttgataaatcgcgcacatgggacgcctaatgaggatgaagctcggagtatttccagcagctcgtcatgctgtggatactgccccgtcgaggtgctaccacgagatctcaaccctaaatctgatccttgacgcaaatggggtttgaaatctctgattttggttaagcccct

SEQ ID NO: 127458 - DNA, 511 bp, Arabidopsis thaliana
gtccgagaaactacggttgaaagttgctcttggtgctgcaaagggacttgcttttcttcacagttccgagacaagagtgatataccgagatttcaagacttctaatatccttcttgactcggagtacaacgcaaagctttctgattttgggttggctaaggatgggccaataggtgataaaagtcatgtctctacacgagtcatgggtacacacggatatgcagctcctgaataccttgcaaccggtcatctaacaacaaagagtgatgtctagagcttcggggttgtccttctggagctgttgtctggtcgtcgagcagtggacaggaaccgcccatctggagagaggaaccttgtggagtgggctaaaccatacctcgtaaacaaaggatagatattccgagtcattgataatcgtcttcaggaccagtactctatggaagaagcatgtaaagtggctactctgtctctgacatgtctcaccacagacattaagctgagaccaaacatg

SEQ ID NO: 127459 - DNA, 517 bp, Arabidopsis thaliana
  unsure (1)..(517): unsure at all n locations
aaaaaaagagagaattaaagtcattcattatttggggaatggagaagaagctcctttcctacagacgccatcattaacaacatcctcttaagcttctgcgattctctccgtttgtcggaagatttcacgacgattcttcaatccttatccgaaccggagaaatcatgtcggacgctttgatcaatggattggctggagctggtggtgggatcattgctcagcttctcacttatcctcttcaaactgtaaatacgcgccaacagacggagcgggatctgaagagggagaagaggaaacttggaactatcgaacacatgtgtcaggttgtcaaacaagaaggatgggagaggttatatggtggattggcgccgtctcttgctggaacggctgcatcacagggtgtgtactactacttctaccaagtgtttcggaatcgagctgaacgccacagctcttgcaccggaagaaggaaggttttggttaccggtccantttggggtnntttcctcactttaag

SEQ ID NO: 127460 - DNA, 552 bp, Arabidopsis thaliana
  unsure (1)..(552): unsure at all n locations
gctggtaccgcnnnctgcagggtacccgggtcccgggaaatttccccggggtcgaccccacgccgtcncgcgtttgtacttctacccggtcagctactatctctctgtctcatggcgaatccgacggagaacctcgacgcgaatccacaaatccgagaaccagaagctgaagaagaagttgaagaactgaacggatacgaaggtgacgatggaggagaagatgacgatggagaagacgatgacaccgagtcgaaatctcaaacgcgcgaaagcggatccagtgtagacagaatcaaggcggaatcgctattccgtcggatgcgagctgctcctgtgccggtgcgtgttcacgacgtgattatcggtggaaacgagaagactaaggaccatatcattgaagcggaagtggatgctgtgagagaggcgaccacgttgcaagagcttctcgaagcatctagggttgccaattcgaatctgccgtgcgttagatatctttgattccgtcaacattacgcttgattctggtccttctgagcttcctggtactaccaa

SEQ ID NO: 127461 - DNA, 582 bp, Arabidopsis thaliana
gataattctttacagtgtatgaggtaactgcacatacttttgttttctttatgtgtaactgtgggctacctgatgcctagtcttcacgtgcgtggtacttcattagttccatctttttgcttactactttattttgggtaatgttcaggcgaaaaagtcgttctatttctcctaggcgccatcgaagtcgatctgttactcctaagagacgttctccaaccccaaaacgttacaaaagacaaaagagtaggagttcaactccatctcctgcaaaaagatctcccgccgcaacccttgagtcagccaaaaataggaatggagaaaaacttaaaagagaagaggaagaacgaaaaaggcgacagcgtgaagcagaactgaagctaatagaggaagaaactgtgaaacgggttgaagaagctattcgaaagaaggtcgaagaaagcttacagtctgtggaaatcaaattggaaattctaacgctgtttgaggaagggcgaaagagacttattgaagaagtcgcggttcaactttgagaggagaaagaggcttcttttattgaggcttaagaaaaaaattgtgtta

SEQ ID NO: 127462 - DNA, 424 bp, Arabidopsis thaliana
  unsure (1)..(424): unsure at all n locations
cccacgcgaccgaggaatttctgcgcagagatttgccatgaacggaaagaagcatgagactccctcccgggtttcggttcgatcccgatgatgaagatcttgtgttccagtatctcgccaagaaggtcctccaccgtccaatggacttcgatctccctgagctccgttcttgcaatgttgatccatgggacttgccaggagagaagaacaaggaagtgtattacttcgggaagaaggaagagcgagagaggaagggaagagagacgttatccggttattgggaagagtgtgaagaagaggaagtaatggaggctggtggtcgtgattgtattcatttagaaggaaggagaaagacatttgctttctttattggaaaaaaacctcgagggacantaactccatggatcatgtacgagttccgact

SEQ ID NO: 127463 - DNA, 398 bp, Arabidopsis thaliana
cccacgcgatccgcggacgcgtgggactacacaagatggtcagaaagagtctgataaaagaagccaaaaacagaaagtctcggagctgaaggaaggagggattctgaaacctccaaagaaacggtaacccactctactaatttctgtcatcactttttggcgaggttcagccagctcagtgaaggaagttaaggggtttgaataattggtatgctcatgcaattctttttggtaattgcatacctgaaatttagttgcagttgtttttttgacgaagtctcaagcaggaaaggagatggtttcaggagctgcactctttagggttatgttgaatggagtcttcaacctgtttagaagctccatttttaatacctttatgctttaaactgttagctctg

SEQ ID NO: 127464 - DNA, 503 bp, Arabidopsis thaliana
  unsure (1)..(503): unsure at all n locations
nnnnnnnnnnnnnnnnnnnnnnnnnnnnnnnnnnnnnnnnnnnnnnnnnnnnnnnnnnnnnnnnnccacgcgtccgcccacgcgtccgaaacaatcgcttttttatttttctaaatttctctctgttcttttttcctctggttttgattttttcctggcattattattagggtttttttcatacgttgttgaaaatggcgtagttggagaaaggagacgaatcgatcatctacctacttgcccattctttgtcgtcgtttttcgattttccttgattcgccggagaaatagcgtttccggcaatgaaaacctctctccgacggttacgaggtgtgcttcacaagcatgaatctaaagaccggagagatcttcgagctctggttcagaaagatgagcttgcccaagcttctcaggacgtagaagacatgagagattgctatgatagcttgctcaatgccgctgctgctactgccaatagtgcttatgaattttctgaatctttg

SEQ ID NO: 127465 - DNA, 436 bp, Arabidopsis thaliana
catcatacaaacacatatatacaaatacacatacgcttatcaacataaacagcctaaagatgagttctaaaggagaaggctctagttctacggcggagagggaggtgaagaaacaagtagcgagtgtgattcccgttacgaggaagctggtgaagactatggccgcgaaagccattatctctgctctcacgccatccggttgtggccggcactctgactctaccggcgacggcaaaggtaacggagggcgcgtgtaccccggtactcatcgttgatcggccattttcttgggattgaagatatatatgccgtcatgatcgtttatgggttttctttttatgttttttttttatatatctaaatgttggtgttctcgttgataattataagcttttgataattatgcttctctctttctttcttcttaaagatttaa

SEQ ID NO: 127466 - DNA, 891 bp, Arabidopsis thaliana
tttattcgtccggaacttctgggggagatatatgctagaggagctggtgttgaaagaaattataccaaggcacttgaatggcttacacttgctgcaaaagaaggtctctattcagcatttaatggaattggctacttgtatgtcaaaggctatggagtagataagatctactatactaaggcaagagaatatttcgagaacgctgttgacaatgaagaccccagtgggcattataaccttggagttttgtatcttaaaggcatcggagtcaacagggatgtgaggcaggcaacaaaatacttctttgttgctgcaaatgctggtcaaccaaaggctttctatcaactcgccaagatgttccatactggtgttgggcttaagaagaatctggagatggcgacttcattttataagctagtagcacaaagggggccgtggagttctctctctagatgggctcttgaagcttacttaaaaggtgatgtgggtaaggctttgattttgtactcaaggagggcagagatgggttatgaagtggcacaaagtaatgctgcctggatcctcgataaatacggcgaaagaagcatgtgcatgggagtatctggattttgcacagacaaagagagacatgagcgggcacattctttgtgtggcgggcctctgaacaaggcaatgaacatgctgctctgcttattggagatgcatattactatggccggggaactgagagagattttgtgcgtgcggcagaagcatacatgcatgctaaatcacagtccaatgcgcaagcaatgttcaacctcgggtacatgcatgaacatggacaaggacttgcctttgatctccatttagcaaaaccgtactatgatgaatcccttcagagcgatgcaa

SEQ ID NO: 127467 - DNA, 648 bp, Arabidopsis thaliana
  unsure (1)..(648): unsure at all n locations
tgatctccagctcacatacgactcactatagggaaagctggtacgcctgcaggtaccggtccggtattgccgggtcgacccacgcgtncggcgatggaaggagagaagcaattggaagaaactattgaagcggcgtttcagataatttcagccatgaatgatgagctttgtaatccgtctttgtggtctacttcagctaccccgagttccgccgcgacgacgacgggttctaatggttcggctctcgtttccgccgatgcggctgcgattgatggaacatcgcatcattcggaatctgctggtggtggcgggggcggaggaagtggaaatagtgttttggatgaggcgagtcttcggtataagaactcagtgacttcgcttcgtgctgttcttgctgcgattccaaattcgcagaaggcaaaagcatctgaaatgcaaaatggtttaggatctcctgaaagtgaagacgagatcgaaaaattggaggagcaagccttaagtctcagaatggagattgcaaagaagaatgttcatgttaaagaacttatagataaacttcgggaacttatagcagatatctctacatggcanagcccttgntctgtttgagttttatttttttgacatagtgagatcagtttagacaaa

SEQ ID NO: 127468 - DNA, 547 bp, Arabidopsis thaliana
  unsure (1)..(547): unsure at all n locations
acgacgacgaacatggcaacgagcagtgcggcttctgttgatatggaagatattcagactgttgatctcatgtctgagcttcttcgccgtatgaaatgtgcctctaaacctgacaaacgtctcgttttcatcggtccacctggttcagggaaaggtacacagtctccggtcataaaggatgagttttgtttgtgtcatttgtctactggtgacatgcttagagctgctgttgctgctaagactcctcttggtgtgaaggcaaaggaagcaatggataagggagagcttgtttctgatgacttggttgttggtatcatggatgaagcaatgaacagacccaaatgtcagaaaggtttcattcttgatgggttcccgcggactgtgactcaagcagagaagcttgatgagatgcttaatagaaggggggcccagatggataaggggcttaatttttcgtccctgttcggtcccgagaaagatncttgaaggtggtcccctcaagtgnggagnttctctaaatcggcccccaagncngggcgtacttcta

SEQ ID NO: 127469 - DNA, 726 bp, Arabidopsis thaliana
tcccgggcgccactgattttggtgtaacccttgtttatttgcttatgtttatcttttgatctgatctataaatatatatacaggttatcaaaaggcctccaccaaaaccaactcaacatctccgcctccatctccgcctccatctccgccgcgagttccagacgctcaagaattggagtaccttaaatccgactcttttcccgaacacgatgcgtagagttgtcattcggacggaggtgtgcgttccgataaaattaggctaccgccgcggctttcagaccttctagaattggagaaattgtttcccgaacgcgaggcgctgagttgtcctttggacggagatgaggattccaatgaacttaggctacggccgctggttccagacgctcaagaatggaagtaccctaaatccaagttatttcccagacacgcggcgtggagttgtcattcggacggaggtggaggtgaaggcggtgtccgtgtatttacaaataaagtaaatgcggtagaagaattcaacttaggaggactgaaggacagcgaatccgattccgattccgagtagggaacttttaaaacaactttgattatggatttcgatatccagaataattttaattcactgctgttggacttgattaatttcctatcacataacgttttggtttaactttgtacgaccaccacacttgctttgctcgtgtcatccacagttttatttttaat

SEQ ID NO: 127470 - DNA, 658 bp, Arabidopsis thaliana
  unsure (1)..(658): unsure at all n locations
nnnnnnnnnnnnnnnnnnnnnnnnnnnnnnnnnnnnnnnnnnnnnnnnnnnnnnnnnnnnnnnnnnnnnnnnnnnnnnnnnnnccacgcgtccgcccacgcgtccgcacgagagtcacgagagatcgagagaagtctttgattctcttctctcatcaaatcaaaatatcatctcagagactccgattctctctgtttctcctccacttttcaacccaagtccaccctcaaaattctcagaatgattgctcggatccttgccgccttagccgattccatggagatgccggtggctgccggtggtggatcagtgctcggtaccatcaaaatcgctgtgatgccaattgcaaaggtattcaccatgtgcttcttgggtcttctcatggcctccaagtacgttaacatcttgcctccctctggccgcaaactcttgaacgggttggtcttctcgcttttgcttccctgcttgatcttttcccagctcggacaagccgtcactctccaaaaaatgcttcagtggtggttcattcccgttaacgtcgttcttggcaccatctctggctccataatgcggttcatcgntgcttccatcgttcgtccgccttacccttacttcaagtttacaatcatacanattgggagttggcaacattgggcat

SEQ ID NO: 127471 - DNA, 388 bp, Arabidopsis thaliana
ctaatcttgtgcctttagatttcttttcggggagatctagtagttgttggattcgttaaacggagaagtggatttggtacgagtctttaggtttccttcttcaccaaaagctctatatagagagaatctgcgagctctttttggtaggaaattagggttcgtgttgcttggtaaatatagaatcaatgacggaggttgttctgcatatatacgatgtgacgaacagtggatcggagaagactaacaacaccattgttcagatcaataggttcttcaaagacgggatcggtcttggcggtatattccacagcgctattcaggtatatggaaacgatgaatggtcttacgggtattgtgaactaggaactggtgtattcagctgcccgag

SEQ ID NO: 127472 - DNA, 877 bp, Arabidopsis thaliana
  unsure (1)..(877): unsure at all n locations
tgacactatagaagagctatgacgtcgcatggcacgcgttcgttaggctggattcttttaaagcggccgccttttttttttttttttaaaaggattttattttattataccatggacctcattatgtaaggttttggagataatttaatcgattttgagccgaaaataaggatgattaaggcttcgtaaataatataatggtaattttatcgactaaatagtcttctttccatcatgaggtcttccaaaaaaaaacttcaggtagtccgaatacacaatctttctataccgagccatctaatggttcttatctaacacctccggtaacggttcaataaccgaatcatgaaccggtccgaaaaaaaccggaatggaaacccggctacaatacttattgaccaccacacaatgctccacgctcctatacctatcattgctcaatatctgtaatacatctccgatattaacgacaatagctcccggaattggagggacatgaatccatttgtctccatcctcagtggctcgggcgtaaagactgcttaatacaccatcttcttgtaggaggagagtgagagtgttgatgtctgagtggcgaccagttcctatggccaggcttggctcaggacatttcggatagtagttgaagttcattctcattgttcccattagggtttctttattggactcatcgatgattgtgtttagattgttgatgaacagaaggccacgtggcagcgaagtcatgtcgttgaggaagatactcaaacttgaggaaatctctccattccaaaacactttctatgcaaggattgaaacttgtggtcaaccacgccgtctccgacactgaactcnctctccaataccttcttctctc

SEQ ID NO: 127473 - DNA, 679 bp, Arabidopsis thaliana
caaattggcgccttaatggcggggaagccacctccctttggcttgaaggccacggcttaaaaagggggacctccacccggtggtttccaaaatggggggggaaaaggctcattcggtcccaatctccccatcaccgaagcttcctttcttcgcctcaaaggtaagactggggaaagaccggaggggagcaagtgctagatctagggccactctcagcctttgaaaaggaaggcttagaagccctcaaggcagaactcaaatcctctatcgagaagggcatcaaatttgccaaccaatgagtttttgcatcttgaaactattgattttggactaaactttaggttaatgtttgtctttccaattttccggtagagttgtcttcttcctctgcggattttataatttcccttcaataaattctccatttctgctcttgaggaaccaaccattgggaactctgtaataaaaagaacaagctgttgtgctgctatgttggttatgattcgttttcctttttccttattgtttgctagaaaaaagaaagaaaataataaatcgttgtgagttgcgttatttgggcacctactactactattcataaaaaaaaaaaaaaaaaaaaaaaagggcggccgctctagaggatccaagcttacgtacgcgtgcatgcgacgtcaagctc

SEQ ID NO: 127474 - DNA, 1004 bp, Arabidopsis thaliana
  unsure (1)..(1004): unsure at all n locations
nnnnnnnnnnnnnnnnnnnnnnnnnnnnnnnnnnnnnnnnnnnnnnnnnnnnnnnnnnnnnnnnnnnnnnnccacgcgtgcgcccacgcgtccgtttcgattctctcaaaaaatcccataactttcccaacgaaaaatgttccgatcaatgattgttcgatctgcttccccagtgaagcagggtcttctccgcagaggattcgcctctgaatctgttcccgatcgcaaagtcgtcatcctcggtgccgccggtgggatcggccagccactttctcttctcatgaagcttaaccctctcgtctcttctctctccctctatgatatcgccaacactcccggcgttgctgctgacgtcggtcacatcaacacccgatctcaggtttctgggtacatgggtgatgatgatttggggaaagctctagaaggcgctgacctcgtcattattccagctggtgtcccaaggaagcctggcatgacccgtgatgatcttttcaacatcaatgctggcattgtcaagaacctcagcatcgccatcgccaagtattgcccacaagcacttgtcaacatgatcagcaaccctgtgaactccactgttccaattgcagctgagatttttaagaaggctggtacctatgatgagaagaaattattcggtgtcaccactcttgatgttgtcagggctaggactttctatgctggaaaatcggatgtcaatgttgcagaggttaatgctccagttgttggtggtcatgctggcatcacgattcttcctctcttttctcaggctagccctcaagccaacttgtcggatgatttaatcagggccctcacaaagcgtacccaggacggagggacagaagtcgtggaggcaaaagctggaaagggttcagctacattgtcaatggcctatgcgggagcactctctgctgatgcatgcttaaagggactcaacggtgttccaaatgtggtggaatgctcattcgtccaatctaccatcaccgagc

SEQ ID NO: 127475 - DNA, 446 bp, Arabidopsis thaliana
aatctacacacaattaacaaagctcaatctctctcttctcttactctctacctctgtagctgatagggtcagcttcgtcggcgctatttctgccggatttcacggacgatttgagatctgttcttccttcttcttttttcctctcctgatctgattcaactctaatctgcttcagtctctgtgttacgaactgattccggtcagtgaaaaaaaatgttgagcgtttcaagcttctgcagtttaatgggagactgtggtgtcatttgagtgatacgtttggaactttggaaacagatggagtgtcgtttggagttgaagaaggtattaactaaggaaagctcaaaggcatttacaccggataagtttagagacgataaacgcgggttatcttactccgatttccaccgcgagattacgagaaaagttgaagatgtatgtcctaaacg

SEQ ID NO: 127476 - DNA, 940 bp, Arabidopsis thaliana
cccacgcgtccgcaaggagaatagtgattattgaaggatgcaagatttttatattcagctctaatgaagaacggacaggagttgcagtcttctacccaagtttcacatgagtcccaaggtgaacagaaagttaatttatcagtagaagctccaatacaagattctggttctgtatctgcctcaagtaatgacggtaggaaagtgtcaagacaagatattgaacttgtccaaaatttgatagaaagatgtctccagttgtacatgagcagagatgaggtcgtaaagacactcttgacccgtgcaaggattgaccctggttttacaacattagtatggcaaaaactggaagaagaaaacgcagagtttttcaaggcatattacatcagactgaaactgaagaagcaaatagttgtattcaatcatttgcttgagcatcagtatcacctcacgaagtataatgtacattcaaaagttcctctggtcccaatgcagaacggtattcatcctatggcatctgcgcagtgaacaacatgcccatgggatacccagtactacaacatcctcagatgcatgctcaaggtcatccccatcttgatcctatgagctgtggaatgtcaagctgccatgtggttaatggagtccctgcacctgctaatttccaaccaatgaggatcaactcagggaatgatatggtaatagatacaaccatggctgaaccaacttccaatgattccaccaaaataggtggtatgtcgggatatgccagtcaagtccagccttctgtggcggtcaagcgggcaccttttccattttgctgcttcagacaattgtcaggggttgggaatggacacgtcagctcttgactctgctttcacatctgatgtcggaacttcagtagggttacaacttggatcagatggaggagctggaaattctagag

SEQ ID NO: 127477 - DNA, 559 bp, Arabidopsis thaliana
cctccttcttcaatctctctattctcttactaacgttatttcttcaatctcattgatcaaaaaaaaccaaaaccctaatctgcaaaaatctcaatttcctccaaaagtttcagtttttaaaaatgggttttcttcttttgtaacgaaaaaatgtgtcaaactttgaattgaccatttttttttataaggattcgatgaagaaattgagaagctattactcaaatgtgagacatcatcagaatcaccatcatcatcaccatcatcatagcaacattgtttcttcagagaggaaatggatatttttccctctattgattggttcaatcttcgctttgttcttactcttcctcacaacaaccctaacttcaccaaccggaggagtccgatttctcccttttacccgaccccgtttgttaaccggatctggttcatcagctttcgttgaatccaaaatcaaacctcaacaaatctcatcactcccgtcgccaccgcgttttgcttacttgatttctggatccgccggcgacgggaaatctctccggcgaactcttttggctct

SEQ ID NO: 127478 - DNA, 612 bp, Arabidopsis thaliana
  unsure (1)..(612): unsure at all n locations
cctntccacggctttagattggctgcccgngnanaccctgggnccccccagttncaagaaatgnnccatggngattctggaaccatgccgngttacctccgggcagaccttcacttcataaggngccatcccctgaagtggggagacttcatcnccctctgtaaagaacncagaaggattaaagtggcttgcttgaaaggtgagcagagagttagacggcccatggtgggcaccgtcttgtctatcccgtagtctttgttaaggcagccaaacgcaaccgacagtctcgtgttgtatctctcaagcttgaatcttgacattacactttggctgtttatgtacgtacttgtctctcttctcttctcttgttttcttttcctttttttttttttttttggtttgggtttgtttgtggcacatgcactaggaagaaacaaactcaagtcaaaaaagctgtttggcttggtgaaatcttgcaagcgggaaaaaaattatgcgttttgtactttggtggtgtatacaaagcttgctctcagatgtttaatatatggcttgtgcaatctttatgtgacagataatagtgtgacgcatccaaagtagtaatttgattat

SEQ ID NO: 127479 - DNA, 484 bp, Arabidopsis thaliana
  unsure (1)..(484): unsure at all n locations
gaatcccgttcctcttcctctgtctctctccccaagaaaatcactcagatcaaagctcaaatttcggatctcacagctgtcgcttcggtagaggaaaggatgaccagagaacatcctcccgagcctcttgatttcttcatctggactgttgaggatgttgggtcttggctcgaggagataaaccttgggggctaccgccagattttcaaagaaaatggtgtcaatggagaatatctagaaagcatgtctgtgtttactaccgagcagatccttcacttcataaggaggcatcacatgaagtggggagacttcatcaccctctgtaaagaactcagaaggattaaagtggcttgcttgaaaggtgagcagagagttagacgggccatggtgggcaccgccttcgtcctatcccgggggcctttggtaaagggagcccaaacggaaaccccngatcgcgtttggtgttgtacaacctttaaaggtt

SEQ ID NO: 127480 - DNA, 498 bp, Arabidopsis thaliana
  unsure (1)..(498): unsure at all n locations
nnnnnnnnnnnnnnnnnnnnnnnnnnnnnnnnnnnnnnnnnnnnnnnnnnnnnnnnnnnnnnnnnnnnnnnnnnnnnnnnnnccacgcgtccgctgtatttccatatctatttaaaattatgattaaacttgagaatcaactaaaatcatcatcatacatgttttgtaggtgatagcaagagaagcaagagagttcaagattggaggatcagtgttttactatgcattgatagtgatcacaggaataatatggcaaggtttcttcttaggagccatagggattgtgttttgtgcatcatcactagcttctggtgttctgataagtgttctgcttccggtgactgaagttttcgccgtcgtttgtttccgggagaagtttcaggcagagaaaggtgtctctctacttctttctctttggggatttgtctcttacttctacggcgagtttaaatccggcaagaaagttgttgataaacctcaaccgccggagacagaact

SEQ ID NO: 127481 - DNA, 521 bp, Arabidopsis thaliana
gccatagctgccattgccatttctgtctctgaagtcactcagtcgcctgaaattctcgagttatcggagaaaatcaaagagaagatgaaggaagcagatatccacgatcttgaaggcaaaatggatcttaagattagagctcttgagttagtcgaagagatgaggaccaagagagctgaccaacaggcggtgttgctgttggaagccttcaacaaagatagagcatccttgccacagcccgttccagctcaaccaccatcttccgaattacctccaccggatcctcgcactcaagaaatgataaatgagaaactgaagaaggcagaagatcttggtgaacaaggaatggttgatgaagcccagaaagccctggaagaggctgaagctcttaagaagcttacagttagacgagaacctccagcagattcaacgaagtacaccgctgttgatgtgcgcatcacagaccaaaagttgcgtctatgtgacatatgtggagcattcctgagcgtctatgacagtga

SEQ ID NO: 127482 - DNA, 510 bp, Arabidopsis thaliana
ccggcactaatcgactcatttagggaaagctggtacgcctgcaggtaccggtccggaattcccgggtcgacccacgcgtccggctagtattccaatggatccagcagccatatggaacactgagtttgtacaagcagaagaactcttcaggcagccttctgccactgataattgtttgaaaggcaacaggttttgtggcgtctccaattcttgtgtgaagcgcaatatagagggagccactgaaaatgttaccgccccgcgaactgaaagtgtgagaactacaggacaatctaaaagtagttcaaattttcaaaagagtacagtgccgtcaaaccagggaaagaatttccagcactcaagctcttatgtttggccatcaggctaagagtgaatctattgctgctccagctaaaaatcagtctgcgaaatcctctttggataaagaaaaagcttttcatgtgcccgctaataaaaagatggacagggcgagaagagcgtgactggaactgg

SEQ ID NO: 127483 - DNA, 580 bp, Arabidopsis thaliana
gcgggaaaattcagccatcgcctcgaagaaaaaacctcccaaatctgagaaatcggaaaagatgacccacaccgaaaccctaaatctgctcgatgaaatcgagtcttttgtctccgatcagcttcaagtggtatcttacaaatggctgagtcgaaatttctcgctttcatcaaatacggccaagaggttgctcaaggattttgtagagaaacatgggaagggtttggaagttgtatatattgtgtccggattgctaaagaacggaccttccgattaccacgcaaggcttgcttctagtaccgaacttccagaagtagagaaagagttcaatggaaaatattcagtacatatctacagtgttcaagctagtattccaatggatccagcagccatatggaacactgagtttgtacaagcagaagaactcttcaggcagccttctgccactgataattgtttgaaaggcaacaggttttgtggcgtctccaattcttgtgtgaagcgcaatatagagggagccactgaaaatgttaccgccccgcgaactgaaagtgtgagaactacaggacaatctaaaagt

SEQ ID NO: 127484 - DNA, 421 bp, Arabidopsis thaliana
ggaagcgaaatcggaaaagttaacgacggagatggctacagaggcaccaacgcaatcttacagcgagcaatggtattgggacgatcgttacaagaatgaatctgaaccgtttgattggtaccagaagtattcacctttagctcctctcatcaatctctatgttcctcaacgtaatcaacgagtcctcgtcattggctgtggaaactcagcgtttagcgaaggaatggtggatgatggatacgaagatgtagtcagtattgatatatcatcagtggtgattgataccatgattaagaaatactctgatcgtcctcagctcaaatatttgaagatggatgtgcgtgatatgaaagcatttgaagatgcttcttttgatgctgttatcgataaagggaaccttagactccattttgtgtgggag

SEQ ID NO: 127485 - DNA, 655 bp, Arabidopsis thaliana
  unsure (1)..(655): unsure at all n locations
nnnnnnnnnnnnnnnnnnnnnnnnnnnnnnnnnnnnnnnnnnnnnnnnnnnnnnnnnnnnnnnnncttcctcaacatgacatcaagaacattcacaagacattccagtctcattcatgtttttctcctgctttctctcgttttctcagggaatatactacaaacagtaacgtctcttggcatcaattacggacaagttgggaacaatttgccttcaccggataaagtcattaacctcttgagatctttaaggatcacagaaacaagaatttacgacactaaccctcaaatccttagtgcctttgcaaattcaaacatcgagatcatcgtcaccatcgaaaatcaggttttaccattactacaagatcctcaacaagctacccaatgggtagattctcacattaaaccctatgttccggccactaggattaccggaattatggtcggtaacgagcttttcaccgacgacgactctagtttaataggatacatgatgccggcgataatcaacatccacaaagccttggtccaattaggtttagatagatacattcaagtctcgtctccaagctctcttgccgtcctcggtgaatcttatcctccatctgccggaagtttcaagccggaggtttcctccgtgatgcaacaacttctag

SEQ ID NO: 127486 - DNA, 848 bp, Arabidopsis thaliana
ggtgaattaatccgacaatgtgcttaccgaattcatgccctgaattcatatcttaatgcagataatcaggtttcagttgatattaaaaagaaactaggagaaccattgagaagaatgagtttggagtccggcaaagcgatgaaagaaatgtcaatttcgttaaagaaaatgactaaaccatcttcttctgatcttcatgtccaaaacgcaaaatctgcctgtaaatcactcaccaacttacttaattcaggcatcttgaaagaagttgagcctctagaattggtctcccttctgaccgcgatctccttgctcatcgatattataaacctaacagagaaaatcttggaatccctacatgaactagcaaccgctgcaaaatttaagaacaagattgaacatcctttgttttccgagaaaccaaaagccaaaagctttgttagtgtccgatcgatcaaatgtcatgatgatcatgtggtcataattattgaagatcatggtaataatgatgccccatcaaaaaatgataatggctcgaaggaggtttcgatccatgagaaacatgaagccgatgatacgcatgtagacgcaagatgtgtttcatgtggtcaccccagcgtttgtgtgaaaccccgcatgtttattcactcataaaataatgtatgtttattttatttttttaattatgaaatttgttgtttttgtaaaatattggattcattgaagacttaacatggttaaataaaatatgcagattttttttttaataaatagatttgaaaaaaacacaaaccccaaagggcgcccgctctagaggatccaagcttacgtacgcgtgcaggcgacgtcaa

SEQ ID NO: 127487 - DNA, 915 bp, Arabidopsis thaliana
ttcagcgtctctacgactcactattgggaaagctggcacgcctgcaggtaccggtccggaattcccgggctttgttgcagaggatcacaatctaatggcgattccaatgtccatggcaatggcgactcctacagattccgtgagcagagtctggagtatgtcttctctcaaatcagctcttccctccaccgcatcactccgattaccttcctcgtcttctcgccgtccggttactcttcgtctcccaatctcttctccttcactcccatctttctccggtctctctccggtcaatcctctcctctcaatcggacttccagattggcaaagctttgagaatggattcaaaattgttgacggtggtggtcgtatctacgcgatgagacacggacgacgtgttccgaagctgaacagaccaccggaccagcgcaaagctcttctgcgaggactcacgactcagcttcttaagcatgggagaatcaagacgactcgagctagagctagtgcgatgaggaagttcgttgacaagatgattacattggctaaagacggttcgttgcacaagcgaagacaagccttgggatatatctacgagaaacagattgttcacgctctgtttgctgaggttcctgatagatacggtgagagaaacggtggatacacgaggatcatcagaactcttccaaggagaggtgataatgctccaatggcttacattgagcttgtctaaggtcaatatctcttttattttgctcaattgtttcacttttgctctgtaatattgaaaaacagttgttgatgcagatatgagatcattttgttttgtgaaaaaaaaaaaaaaaggatggccgctctagaggatccaagcttacgtacgcgtgcatgcgacgtcaaagctctctataggttcaccta

SEQ ID NO: 127488 - DNA, 516 bp, Arabidopsis thaliana
  unsure (1)..(516): unsure at all n locations
atctagagaaaccacttcgcaacgatgagggagataggtcactcctcaaaattaccaaacacaaattagctccaataattgcaacaaatcactctcacccaaacaaaacttttcaaaagccctaatccgagaaatcattcgacaacaacacgaaggagatggatctagaagattgggaaatactccccaaaatcaactacaagggtctcgaacttgatctcggtcatgaagaggatcatgaagttacgaagatgatgagaaacaccgcaaaaagcttcgacagtgattacttcatctgcccaattcaagattctgtcggaaagacagagtttcttcatcagagatctagcgtggtccccacacaactcctccagattccaataacttgggaacctttgtcccccgtggacgacaaagatcacaataggtcctggttccggattttttcgggaccagacccggancttttacggggtttttccgtggccgggatacctnaagnatngngggaccgta

SEQ ID NO: 127489 - DNA, 654 bp, Arabidopsis thaliana
  unsure (1)..(654): unsure at all n locations
tnnnnnnnnnnnnnnnnnnnnnnnnnnnnnnnnnnnnnnnnnnnnnnnnnnnnnnnnnnnnnnnnccacgcgtccgacggctgcgagaagacgacagaagggcacggcgaacggagaaagatgcggagcacaccgttggggacgacggcggtttcaccagcttcaatcaaacacaactcttatgggtatggccgcttcgtttcctcttcaggagtctctaatttctctatccatcgtcggagacgccactcgtcgttttctatctctcaagctccttcacaaatcaactcaggagcttgcaatgcaagtcaaatagttgatctttttccagcggtttcacctgaaatcgttgttcgtgaagcacggttagaggactgttgggaggtggcagagactcattgcagctctttcttcccgggatattcgttcccgcttgatgttgttctaagagtagataggttaatggcaatggtgatgggattttctattccacctgggtgccagaggacttgtttagtggctgtgatagggagttcagtagatgaaaccatctgctttggaagtgatgattccaaaattgggctttttatcaaanccccttaacaaaggtattttctgnacttncctttgaccttggtgtncctcnanaagcct

SEQ ID NO: 127490 - DNA, 680 bp, Arabidopsis thaliana
attcatcacaaccacaagaagacgattttttattcttgtttccaaactgaatctgacccgggccggcccccgcgtccgctccaggtgactgttattcaaggaaagaaactggtgatccgagatttcaagtcaagtgatccttatgtgattgtcaaattaggaaatgagtcagcgaagaccaaagtgatcaacaattgcctgaatccagtgtggaatgaggaactgaactttactctgaaagatcctgcagcagttctcgcattggaagtgtttgataaagataggttcaaggcagatgacaagatgggccatgcctctctcagccttcaaccgcttatctcagttgccagactaagacacgtagtccgcgtgtcccctggtgagacaacgctttggaaagtattcccggatccagagaactcgcgtatctcgggggagcacaatcagttgcatagacggagaggtggtgcagagtgtgtggctgaggctgtgtgctgttgaatcgggtgagattgagttgaagataaagttgattgatcctcctggaacaaacaagtagcaatagggtattttatgttagtttgtaacacgagacccgtttgtgactagtataattgcaacatcagtatggtcttgtcttgtttccaagtgtgcctttgtgactactcaccaatttatta

SEQ ID NO: 127491 - DNA, 490 bp, Arabidopsis thaliana
  unsure (1)..(490): unsure at all n locations
cacatccattaattctgctgctgcaaattctatcgaactggtgagttttgttaatctctttcctcgttcgtccttgtctgtatatcagatcgatctctattaccgttttagcttgttcttgatctttgtcaacataaaaacaatcaaacaaagtttcttctatgagttctggtctgaacgaagatttcctcgattgtatcgtgcgtttagaggagacacatgttcaacaaggcttcgatgagggttacgaagaaggtcttgtgtccggtcgtgaagacgctcgtcatctgggtttgaaactcgggttcgagacaggcgagctgattgggttctacagaaggttgctctgctccttttgggattcaagctctcccgtaattgatccctacacgcttcccctcctcagctcccataagcattctcaattgnttccnanggttttgncccggnaaaaaccccncttttnggtncccnggggcggggctaannc

SEQ ID NO: 127492 - DNA, 602 bp, Arabidopsis thaliana
ctgctatcatctgatccccaacccgaacttacgtctacatgtacctctcatagttgcggctggaagccttactctcattccaatgactttgctgccaacgcgttcctccttctcatcatcctcttctgttctttcatatgcgtcctctctctccacgctgctatccgttgttgcctccgtccagtcctccaacatgtccctaagcccgacccggaccttgaggccacccatccagacgctcccccgacacttgtctactccccgggcctaaacctagcaggcaatgaagcagagtgcatcatttgtttgtctgaattccaagacggtgacaccttacgcgtgttggagagatgcaaacatggattccacgtttattgcatccagaagtggctctcctcatcccattcttcttgtcccacttgccggacaaacatcttctcctccccacctcaacttcactcacagagcttaccactaacgagtacaccttagtcagatggtagctagttcctggtcttgcccactttttttttatctttattttctttacaacttcacaccactatcatgttttacaacttagtttattttttacctttctc

SEQ ID NO: 127493 - DNA, 536 bp, Arabidopsis thaliana
  unsure (1)..(536): unsure at all n locations
acgactcactattagggaaagctggcacgcctgcaggtaccggtccggattcccgggtcgacccacgcgggcgcttcttctttatctcagtaatggtgacttcatcgacgatctcgatcggttcttgtttaaaagagcatcagaagatctacaaggaatgggtcaacatcgccgattcagatggagatggtcgtgtttcgggtaacgatgctacaaagttcttcgcgatgtcaaagctttctcgccaggaactcacacaggtttgggcagttgcggattcaaagcggcaaggatttctcggtttagcggagttcatcactgcgatgaagctcgtctcagtggcacaagaaggacatgacattacttcagaccttctcaaaggctcaattgacatgaagagtgtggaacttccagtgttggaaggactagaaaacgttgtatcagtaagactctttcttatctgattatctcattttgtttttcaatctttacatgagttnggtttcctaatctaatatatttgcttacagaagcag

SEQ ID NO: 127494 - DNA, 555 bp, Arabidopsis thaliana
  unsure (1)..(555): unsure at all n locations
accngatttggactggttaacctgctgtttaggatccctggatncccaagncgncnaaccccagctgnttcttaggactgccncttagccggagaaggcgttttcttgttcttcccggagcttctggtttgtctgagaaccttatccaggaatgcatggggattggagtgaggaagttcaacgtgaccaccggagtaaggaccggcttacatggaagctcttagctctgggaagaagaccgacattgttgatgtcatgtccgcaacaaaagcagccatgaaagctgtgatcgcagataagatccgtctctttggctctgccggaaaagcttgagttgttgataaaaaaatgtccgatcaattagttaagtacaattgtacatcacatccaaagaataaaaaaacaacaaatattacatcacatccaaagaagatgaatgcattgtatgcaatgcagatgcagtgttgttggaaataaagaaatcatttttagtactgtttaactgttttttttttctttttctcagtcaaatatataaatagaaactaaatgggc

SEQ ID NO: 127495 - DNA, 533 bp, Arabidopsis thaliana
cagctctctacgactcactattgggaaagctggcacgcctgcaggtaccggtccggaattcccgggtcgacccacgcgtccgcacaagccaatggcgcaacttactaattccctcaattatctcttttctgtttctctcttattatttgtatcgttccactgcttatgttttcgtttttcgttggttgcagcttgttcaaactccactgacgatcaacagattcaacaccatcaccaccggaaatgggttggtccctcaggccacaaagtcatcaccgtctcacttaacggccacgctcagtttcgctccgtccaagacgctgtggattccataccaaagaacaataacaagagcatcacaatcaagattgctcccggattttacagagagaaagtggtggttccagctacaaaaccgtacataacgttcaaaggagctggtagggatgtgaccgctatagagtggcacgaccgtgcgtccgaccttggcgctaacggtcaacaggtacgtacctatcaaaccgcttccgtca

SEQ ID NO: 127496 - DNA, 482 bp, Arabidopsis thaliana
cccacgcgtccggcaatctgcatgtcaatctctgcaatgtcgttcatggtgtcagttggattcaacgcagctgccagtgtgagagttagtaacgaattaggtgctggaaatccaagatcagcagcattttcaaccgcggtaactacaggagtgtcatttttactgtcattgtttgaagccatcgtgatcctctcgtggcgacatgtcatcagttacatttttacggatagtccagcggttgcggaagccgtcgccgagctctctcctttcttagccattaccatagttctcaatggagttcaacctgttttatctggtgtggccgttggatgtggatggcaagcatatgtagcttacgttaacattggatgttattacattgtggggattccgattggttatgttcttggtttcacctatgatatgggagctaggggaatatggacagggatgattggtggcacactcatgcaaactattat

SEQ ID NO: 127497 - DNA, 510 bp, Arabidopsis thaliana
  unsure (1)..(510): unsure at all n locations
nnnnnnnnnnnnnnnnnnnnnnnnnnnnnnnnnnnnnnnnnnnnnnnnnnnnnnnnnnnnnnnnnnnnnnnnnnnnnnnnnnnccacgcgtccgctcagttccatggtgaagtatgttgtgttcaaccatatgagctctgatggtgattctgttatcttctctggtgataaggttccttgcgaggatcgagtattgctcattgcaaaccaccgaacagaagttgattggatgtacttctgggatcttgcactgcgtaaaggccagattgggaatatcaaatatgtgcttaagagtagtttgatgaaattacctctctttggttgggcgtttcacctctttgagtttattccagttgagaggagatgggaagtcgatgaagcaaacttgagacagatagtttcgagttttaaggatccccgagacgctttatggcttgctcttttccccgagggcacagattacacagaggctaaatgccaaaggagtaagaaatttgctgctgaaaatgg

SEQ ID NO: 127498 - DNA, 426 bp, Arabidopsis thaliana
gttactttctctgtctgaatttcttttttccaataataaattttacaaatgctgtgttcttgattggcttttttaatcctcactgagatttgtgcttgaatcttgattatcttggtgaagtatgttgtgttcaaccatatgagctctgatggtgattctggtaacaggaaattcatgaactttgtgattcattgcatcaagaatagaagactagaagggggaggttaattagattatcttaaggtgtataaaatggaaaaaaagagtgtaccaaattctgataagttgtctctgattagagtgttaagaggtataatatgtctgatggtgttagtttcaacagcttttatgatgttgatattctgggggttcttatcagctgtagtgttgaggcttttcagcattcgctatagccgtaaatgtgtt

SEQ ID NO: 127499 - DNA, 766 bp, Arabidopsis thaliana
  unsure (1)..(766): unsure at all n locations
atacgtcagctcctatacgacttactttttgggaaggctgttcccccggcaggtcccggcccggatttccgggtcggaccaagccgtccgccaagcgttccgccaagccttccggagagccaccggaggggggaatttgtttcacttctgaaaaaaaaaaaaaaaaatattgtttgctcatcatcttcacaaaccaaacttctcttcttctccgatctcagatttgaatttttatcgattttgagcttcgaagagctcaatctctaactgaatttcgagaaattagagagtttgaaatgggagaggaagtacaaatgagcgattacgatgtttccggcgacggagatagggtttctgaatgggagatgggattaccaagcgacgaagatctagcatctctttcttactctctgattccaccgaatttggcgatggcgtttagtatcacaccggagagaagccgtacgattcaggatgtgaatcgtgcatcggagacgacgctctcgtcgctacgtggtggatcttcaggtccaaatacctcgtcgtcgaataataacgtggaggaggaagatcgagttggatctagcagtcctgggtccggattcgaagaagcaaaacggcatcaaaccgggtgactggggatgacggtggccggtgtggttccggattcggcgatggcggnggangaaggagattcaggaactgaagatctatctgggaaaacacttaaacgaccgcgtttagtgtggacaccgcagcttacaca

SEQ ID NO: 127500 - DNA, 513 bp, Arabidopsis thaliana
  unsure (1)..(513): unsure at all n locations
nnnnnnnnnnnnnnnnnnnnnnnnnnnnnnnnnnnnnnnnnnnnnnnnnnnnnnnnnnnnnnnnnnnnnnnnnnnnnnnnnnnccacgcgtccgaattggccgtgggatttgcccgaggcttggaacgacaaattggtgttcgcggtggtgatgaagaatccgctgagatcaaaaaatgttttcgattttatcatcatcttcttcttcacaactcgtcaattcaactctcaatttccaaaattcgccgaaatctccgatcaccgttatgtcgaagacgtctaaattcaaaaccctgacggagaatttcaccgtgagagtgcttaaagcagagaatcgcgaactgaacgtggctctgctctcacctttcactatcgcttcttcacggcttgattctgtcagtaatgttgcgattcggattgagctcaacgatggatttgtgggttggggagaaactccgattttgccgtcggtnacggcggaagatcagataatgggtctggtaaaagcgcggg

SEQ ID NO: 127501 - DNA, 925 bp, Arabidopsis thaliana
  unsure (1)..(925): unsure at all n locations
tatttggtggacgaagcaaacgttcaagtggtttccataaccggtatgggtggtctaggtaaaaccacacttgctaaacaggtttttaaccatgaggatgttaaacatcagtttgatgggctctcatgggtgtgtgtttcacaagattttacccgaatgaatgtatggcaaaagatcttgagggacctcaaacccaaagaggaagaaaagaaaatcatggagatgacacaagatacactccaaggtgaactaattcgattgttggaaacgtctaagtcattaattgtcctcgatgacatatgggaaaaagaagattgggaactaatcaagccaatatttccaccgaccaaaggttggaaagtgttgcttacttctcgaaatgagagtgtcgccatgcgtagaaatacatcatatatcaactttaaaccagaatgcctaaccactgaagacagttggacactttttcagaggatagcccttcctatgaaagatgcagctgaatttaagattgatgaggaaaaggaagagttgggtgagctaatgatcaaacactgtggagggttaccattggccatcagagtgttaggaggtatgttagctgaaaaatacacatcgcatgattggagaagattatctgagaatattggatctcatctcgtgggaggaagaactaactttaatgacgacaacaacaatacatgtaactatgtattgtctctaagctttgaagaattgccaagttatttgaagcattgtttcctctacttggcccattttccagatgattatgagataaacgtaaagaatttgtcatnnnnnnnnnnnnnnnnnnnnnnnnnnnnnnnnnnnnnnnnnnnnnnnnnnnnnnnnnnnnnnnnnnnnnnnnnnnnnnnnnnnnnnnnnnnnnnnnnnnnnnnnnnnnnnn

SEQ ID NO: 127502 - DNA, 637 bp, Arabidopsis thaliana
  unsure (1)..(637): unsure at all n locations
actatatggaaagctggtacgcctgcaggtaccggtacggaattaccgggtcgaccacgcgtncgctgcagatcactacgcttatactaactttcatgagacacttggttctgagaaattttacagcaatggtagttcccgagataccgtagagatgagatttcatccggggcacgaagctaataatgtgaaggaagtatcagccacaagttggactggcaagagaaatccaagaattgttattgatcttgaagaacctcctcccacatgggtctcccatagagagactacagagcatgctcaggcttctgttagctatgttactgtgagaaatcctgacacaaaaccgtcgttctttgatcggatcagctcaaacattctgatggatgtagaccaatcactcgttgaggatgatagtgataagacaactagtaaggagtcaagtttactggatcttaatagcacaccggttgatgagtctgtttccgagcctcgttactctctcttacaagatctgaactgtgcatacatcgaggaggagacagtaacgagctacgagaagagtggaatagatgatggttctacaccgctttgctctcctcaatgccagaatgttcatgaaaaagactgcacatca

SEQ ID NO: 127503 - DNA, 680 bp, Arabidopsis thaliana
  unsure (1)..(680): unsure at all n locations
angnccnttggtggntttcaacnccttgnaaantcccatgnaaggtgccacgtcnaaccttcaanccctttgnccnggcntcngctttgnnctgcatcaccttgcganttgggccatggaaatgcagtggtgctacccaattgtggggngaaatcttctatcgggaaatggtcccgtgtcccaggctgagggagtctccaattcgaaactcggagttacaattctcggagacctcggttgcagttgaaaaccaggttgtggtgaccagcagtattgttcttccaaacaagacactgaacgtcagtgttcaagacgagatcattttgtaactgaaaaacggaagttgaaaaatggaaccaacccagtggggagcagccacactatctccctctgattcaatatctactggagaaccacataagcaaatatttgggaactgattcacatgtatcatttatttacaccaagaattttccaacattgtatcaattccattttctatactcacaacacagctactgtaaaaggcactgaatttttgcccagaataataaagcacttgtgtagttttggcattgataaaaaagaaacatgaaaaaaagatccggacacggnnnnnnnnnnnnnnnnnnnnnnnnnnnnnnnnnnnnnnnnnnnnnnnnnnnnnnnnnnnntagcat

SEQ ID NO: 127504 - DNA, 530 bp, Arabidopsis thaliana
  unsure (1)..(530): unsure at all n locations
tanccnactgctaaacccttaaaatncccgttgttggccggccgtcgggccttttgacctgcaaccancctttgccgatgttgagatcatgggaaaatccagtggttgcctaacgcaatttgttgggtggaaatcttcctatcggggagatggtccccgcgtccaggctgaggggggcctacaattccgaaactcggagtttacaattctcggagactcggttgcagttgaagacgaggttgtggtgaccagcagtattgttcttccaaacaagacactgaacgtcagtgttcaagacgagatcattttgtaactgaaaaacggaagttgaaaaatggaaccaacccagtggggagcagccacactatctccctctgattcaatatctactggagaaccacataagcaaatatttgggaactgattcacatgtatcatttatttacaccaagaattttccaacattgtatcaattccattttctatactcacaacacagctactgtaaaaggcactgaatttttgcccag

SEQ ID NO: 127505 - DNA, 520 bp, Arabidopsis thaliana
  unsure (1)..(520): unsure at all n locations
nnnnnnnnnnnnnnnnnnnnnnnnnnnnnnnnnnnnnnnnnnnnnnnnnnnnnnnnnnnnnnnnnnnnnnnnnccacgcgtccgcccacgcgtccgctacattcgtcagtttcgcctctcggtttcttgaattctccaaggattcatgcttacacaagttcaagctttcagttgagagggatgatgttgatatgtgtacaatcatgccgtggatccaagacgctgttaatcgtagaatccaacatcttgaagtcgactgtcgcttcagttttcattttgaggcagtgtatctaaccctttacttaagtgagactttggtttcattgagacttcattttgtgacgctgcatcgttacgagtttgtatctttgccaaatctcaaggtgatgcatctagaagagaatatatattattgtcttgagactctggagaacttcatctcatcatgcccggttcttgaagatttaaccgttgttagaattgtagatattatcaccgagaagattttacgggtgcgctc

SEQ ID NO: 127506 - DNA, 496 bp, Arabidopsis thaliana
atcatgaattcctcagtacatgagctcacggataactatgaaagtcatgcgaagaagaacgtccagattcccaaacccgaccacaggttccttcaggaggacgttcggaatctactgagacaacctctgtcgactcagagcccatggcacacggactatacccgtatccagatccttacgacagaagcgtctttgcacagcaagcgtatcgtccacatccctatcctggggtccaattgcagttaatgggaatgcagcagccaggagttccattgcaatgtgatgcagtcgaggaacctgtttttgttaacgcaaagcaataccatggtatactcaggcgcaggcaatcccgggcaaaacttgaggcacgaaatagagccatcaaagcaaaaaagccatacatgcatgaatctcggcatttacatgcgataagacggccaagaggatgtggtggccggtttctcaatgccaagaaggaaaatggagaccacaagga

SEQ ID NO: 127507 - DNA, 462 bp, Arabidopsis thaliana
gtgttcaaaagcatgtccaatcatttgaaagagcttaaggacaatgctgaagcagaatgcaatcgtgctcgtgaaaaggccgactacaaagccccgctaactccacagcaggagtcgttgagaatcattttcatcaaagaacagtatgacaccaagctgcaggaacttcaatatcaactgaccatgtccaagaagcatggtgaggaaattctgatgaaattacaagatgccattgatgagaatgaagcaaggaaaaaggcagaatccagccaattaaagagatctaaagagctggagggaaaaatattggaactggaggctgatcgacaatctgttatctatgataaacgtgagaaaaccacggcttatgacatgatgaaggcagagctggattgctcattattaagccttgagtgctgcaaagaagaaaaacagaagcttgaagctattctgcaacaatgc

SEQ ID NO: 127508 - DNA, 765 bp, Arabidopsis thaliana
cgcagtaccggtccggaattcccgggtcgacccacgcgtccgacaaagcaagagagagagagagagatagggttttttgagctttagcaaaaaccgaccagctgagaagatgtcttcatcgtacaacacaattgctttgtcctccactccgaccttcctcctctcaagtgccgctgccggacccggaccaaacaactttaaccgtcaagaggctgcgatgaccatggttcaacaacaacccacttcctccgttgctccaccacccaagaagcgaaggaaccaacccggaaacccaaatccagatgctgaagtgatagcgttatcgccaaagacgctaatggcgacgaacaggttcctatgtgaagtgtgcaacaaaggggttccagagggaacagaatctgcagctctcacaggaggggacacaaccttccatggaagctgaaacaaaagtccaccaaagaggtgaggaggaaggtgtacctttgtccggagccctcgtgcgtccaccatgaccccgcacgtgctctcggagacctcaccggaatcaagaagcattactaccggaagcacggcgagaagaagtggaagtgtgcgataagtgctctaagcgttacgctgttcaatctgattggaaagctcactctaagacctgtggtaccaaagagtatcgatgtgactgtggtaccatcttctctaggagagacagttacatcacccacagggcattctgggatgcactcatccaggagtcagcaagaaaccccc

SEQ ID NO: 127509 - DNA, 688 bp, Arabidopsis thaliana
  unsure (1)..(688): unsure at all n locations
tacgactcactatagggaagagctggcacgcctgcaggtaccggtccggaattcccgggtcgacccacgcgtccggtttctttctctagatctcagattattctcttccacgcaaagaagaagatctaaagatgtcgtcatcatcatataacacaagcgttattccttcatcatcatcctctgctcagcctttcttcatcaccagctccggcaccggagataacgactttaaccggaaagatacttttatgtcaatgattcaacaacctaactcctcagctccaccacccaagaaacgaagaaaccaacccggaaacccaaatcctgatgcggaagtggtagcattatctccaaagacactaatggctacaaacagattcatatgcgatgtatgtaacaaagggtttcaaagagaacaaaatctacagcttcaccgaagaggacacaatctcccatggaagctgaaacaaaaatcaaccaaagaagtgaagaggaaagtgtatctttgtccggagccaacgtgcgttcaccatgacccgtcacgtgctctcggagacctnaccggaatcaagaagcattattaccgtaaacatggcgnaaagnaagtggaaattttgagaaaatgttcttaagcgttncggcngtttcaaatcgggatttngaaagcggaccttttaggnnttttggg

SEQ ID NO: 127510 - DNA, 477 bp, Arabidopsis thaliana
taggtgcactatagaagagctatgacgtcgcacgcacgcgtacgtaagctcggaattcggctcgaggttctttctttgtctcagagttctagcgttctttattgacctttttcttctgggtttctgctctgcatctcaaagactaagaggctttagcagaaaccgaccagctgagaagatgtcctcatcgtacaacacaattgctttggcctccactccgaccttcctcctctcaagtgccgctgccggacccggaccaaacaactttaaccgtcaagaggctgcgatgaccatggttcaacaacaacccacttcctccgttgctccaccacccgagaagcgaaggagccaacccggaaacccaaatccagatgctgaagtgatagcgttatcgcccaagacgataatgggcgacgaacaggttcctatgtggaagtgtgcagcaaagggttccagagggaacagaatctggggctc

SEQ ID NO: 127511 - DNA, 336 bp, Arabidopsis thaliana
  unsure (1)..(336): unsure at all n locations
ttcatatatggcttatttttaaaagaagaagaacacaaaacagtagagagagaaagagatatagagatagagagagatagggctttgagattattctcttccacgcaaagaagaagatctaaagatgtcgtcatcatcatataacacaagcgttattccttcatcatcatcctctgctcagcctttcttcatcaccagctccggcaccggagataacgactttaaccggaaagatacttttatgtcaatgattcaacaacctaactcctcagctccaccacccaaggaacgangaaaccaacccgggaaacccaaatcctgatgcggaagtggtag

SEQ ID NO: 127512 - DNA, 771 bp, Arabidopsis thaliana
  unsure (1)..(771): unsure at all n locations
cgcgcaagctctactactgacttactatagggaacagctggtacgcctgcaggtaccggtccggaattcccgggtcgacccacgcgtccgaaaaaactcaagagacaaaaaaaaaaggaaggcgcgtcagtgatggagaagattattgacgtagcttatggcgcatcagtgaaggtgggtttgacgttgttggagatgaatctgttgccggatattgtcattaggcggctcacacgtctgcttctggccggtcgtctccgttccggttacaaacccacggcggagatgcaactctccgatctcctccgttttgttgactctataaagaagatgcctatagctatccataccgagaagccaaagactcaacactatgaattaccgacagctttcttcgaacttgtccttggaagaaacatgaagtacagctcttgttacttctcaaacgattcaagtagcttagaagatgcaggggaagcaattttggctctttattgtgaaagagctaaagtggaagatggtcaaagtgttcttgatatcggatgtggctggggatccttgtctttgtacattgcacgcaagtacagcacatgcaagttaaccggtatctgcaactccaaaacgcagaaagcatttatcgatgagaaatgccggaaactcgggcttcagaatgtcgaaatcattnctgcggatattagcactttttgagcatgaagggacatacgatcggatattctccatcgaaatgttcgagcatatgaaaaactatgg

SEQ ID NO: 127513 - DNA, 584 bp, Arabidopsis thaliana
acatgacagctcttgacgttacctgaaaatggggagacttcctgatgatattgagtatgacgttgatcttaaggtgacatttgcaaaccataggcttaagagagcgtatattgctctccaggcctggaaaaaggcggtgtattcagacccgtttaacaccacaggaaactggcatggccctcatgtgtgtggctatacgggtgtgttctgtgccccggctcttgatgatcctgacgtcgcggttgtggcgggggttgatttgaatggtgcggatatcgcagggcatttaccggctgaacttggtttgatgacagatgttgcgatgtttcatttgaattcaaaccggttctgtggtatcatacctaagagtttcgagaagttgagcctaatgcacgagtttgatgtcagcaacaaccggtttgtcggacctttcccttctgttgtcctctcgtggccggctgttaagttcattgacgtcagatacaatgatttcgaaggtcaagtccctcctgagcttttcaaaaaggatctcgacgccattttcctgaacaacaacagattcacgtctaccattcctgattccc

SEQ ID NO: 127514 - DNA, 454 bp, Arabidopsis thaliana
  unsure (1)..(454): unsure at all n locations
ctttcgcttttcccacaggcgagtnagaagtttgcggttgcgattgtnatcgctgcaacgatgatggcattggtgccttggaacaatctgattttggtggtgtttcttgaactgttcacaagatactcaccaccacgaagagcaagcacggaacggttgatgcggcggcttaaagagtggtggtttagcattccggctgctccggtccttcttgaacagagcatagacgataacaagaaaaccaagtaaaaacatctgaaaaaaaactacgtcgggttttccgtcccacgagagtacgaaaaaaaacaggagaacagagcaatgtgtaattagttacgtctgtttgtatatttacatgtattcatgtatgttgttgggaagtgggtggtttgttccgtgggtaaaatcccattttggctgnattaaatggtnttggnggnaaaatncccntttt

SEQ ID NO: 127515 - DNA, 526 bp, Arabidopsis thaliana
cagctctctacgactcacttagggaaagctgctacgcctgcaggtaccggtccggaattcccgggtcgacccacgcgtccgcccacgcgtgcgcccacgcgtccggaataaattcttctccttttcttttttgttgcaactagtgaaagagaaagagacgatcgcttattttcttcttctcctacactctgcgtttttgctctctttttactccgcattgctcctccgttactatcttcgccggcgaaaatttgttttctttttccctggaggtaaattcgaatcatgtcaaggcctgctccgcttccacctcgttgcccgattccaaagaaactttctttgagtccagttgcagatacattctactcttcttcctcacccattgaatcatacatgtggtcaatacaggtcttctactcaagattccaggctcgaagatcaacctgcttggcttgatgaggtgctctgggacaaaccgggtgggttgctcactagaggaggtcctctgcgccgctcagctagcgac

SEQ ID NO: 127516 - DNA, 401 bp, Arabidopsis thaliana
cccacgcgtccgcccacgcgtccgcccacgcgtccgcccacgcgtccgcggacgcgtgggtttgagtctcttggattctgaacgtgggatctggggatttgaatagttacacttttttgtttatgaaaaaacatacgatgaagtctggtgtgatcataaccattgctctgttattatacacaagctttcttcttgtttgtctggcgaaagagtgtacagacattcctacgaagctctcatcgcatactctccgcagcgagcttctgcaatcacagaacgcaaatttgaagtcagaggagttctctcattaccatttaactccaactgatgactctgcttggtctactttgttgccaaggaagatgttgaaagaagagactgatgattttgcttggactatg

SEQ ID NO: 127517 - DNA, 743 bp, Arabidopsis thaliana
tctctttttctctcatgacgagtagtagtggaagcctcaaactagagatccacactgatgacaagacgccgggaaagtggagcgtaccgctcggcgatgatgttttccgaaggttcttgagcgggggaggaggctcggagaaggctgtgttcggtgaggggtctctttttagcccgtttttgttcgggaagtactttgatccgtcagacgcctttccgttgtgggaatttgaagctgaggttttgctggcgagccttaggagcttaggacagtgtagagtcgattggtctcagacggatcaagcttatgtccttaaatccgatatccccgtggtggggaaaaataacgtgcaggtgtacgtggacattaacggaagagtgatggagattagtggccaatggaacagcaacaagaaagcggcgaccaacagtgactggagaagcggccggtggtgggaacatggctatgtccgccgtctcgagcttcctagcgatgccgacgccaaatactctgaagctttcctctctaacaacgacgattagctctttcttagagatccgaatccctaagataaattctaagaacaagttttaatctgatcatgtcgccttgacgagttttaactttagattcttttcgtaattttgttttctttagttaactattattatagatatgaaaattctgtggtagagacccaatggatgaatgatatgttatatatacatactataaaatatatc

SEQ ID NO: 127518 - DNA, 632 bp, Arabidopsis thaliana
  unsure (1)..(632): unsure at all n locations
tctgactcactatagggaaagctggtacgcctgcaggtaccggtccggaatatccgggtcgacccacgcgtccgaaagctttcatttttcaatctcatcagagagaaattaagctatggcgaagaagattggagtaacgatggaagttgggaacgatggtgttgctgtcatcaccatttctaaccctcctgttaactctttagccagtccaattatttctgggttgaaggagaagtttcgtgacgccaatcaaaggaatgatgttaaggccatcgtgttgatcgggaacaatggaagattttcgggtggttttgatatcaatgtctttcagcaagttcataagactggggatttatcgcttatgcctgaagtatctgttgagcttgtgtgtaacctgatggaagactccaggaagccggttgttgctgcagttgaaggattagctcttggtggtggtttggaacttgcaatggcgtgtcatgccagagttgctgctccgaaagctcaattaggcttaccagaactgactcttggagtgattcctagctntggaggaacccatcgtcttacatggttagtaagccttcgatatgcaacggatatgatactggtttctaagtcaatatcctcag

SEQ ID NO: 127519 - DNA, 509 bp, Arabidopsis thaliana
  unsure (1)..(509): unsure at all n locations
catcactcttcaaggttttccaacaactctaacaggtcttggagatcgaaatatcggttagatgaagatgaagaagaagaagactatacttcagactccagtgactctgagtctgagccaaaccaagtttctcatagacaagcacttggcctgagtccctcaggtcccttaaaccttaaagatgtcaaacatgcgtatcgaacttgtgcattaaaatggcatccagatcgtcatcaaggctctaccaaggaggcggctgaagcaaagttcaagctctgcagtgtggcttatcaatctttatgtgaaaagctatctgtgaactaagagttagataggtcttgattacttagagatacctcattacaataatttccgaattgtttcattttggctttgttcaagcaaaaatgcctcggttctgtcttttaaaaattcccccaaatctactnctgatgtgtaatttnaaaanctcttcctcatgaacaaaaaaaaacaanaaagggcggccg

SEQ ID NO: 127520 - DNA, 546 bp, Arabidopsis thaliana
  unsure (1)..(546): unsure at all n locations
cgactcactattgggaaagctgacacgcctgcaggtaccggtccggaattcccgggtcgacccacgcgtgcgtggaaactgcagcggcagagcttgagagactccaaattgaaatcctccacaaaatctccattcttgagagctcttttctcccacagaattcctctgctgctccgtcgccttctctaccggttgatgaaaacgaaactgtgactcgcctctccaccattctccagtccggcggcgttaacgacttctgcttcaagagagttgctaccgattactatgactggcctctcgaatctcgtcgcgacgttctcggcgcttcctcagtcgaccatctctgcaagagtattggtctggttaatactcaagctgcatcaaatattttggattgcagtgatccaaacaactcanaatactatggtgggtgtgggttcagtatactggctagattcaatgctgaagcagtgaagcaggtttttttattcactaaacgaggggcaagatccccaaggaaaagattaaattctgagacttgcttct

SEQ ID NO: 127521 - DNA, 802 bp, Arabidopsis thaliana
atagaatgcatgcttctcgtttgaagctgctaaatgcatgcgggaaacaaaacttagaagccttaaaggtcctcgcttcttattgctttgatgaatctataaaggatacggctatgacaatcattggcacaacgacttttggatcctctcgtacactggaagaagctcaagatggaaacttggaagcatgttatgctaaatctggagaggggtcaattcagatggccgcgcgtccgcatatgctctacaacgacagcctctctgcacttggaatttgtgtagaaggagatcttaaacactttcataaggcgagatacatgcttgctcaaggtctgtacagaaggggtgggagcagtgatctgcaaagagcaaaggaagaactttccttttgtttcaaatcatcacggtcaagttctacgatcaatatgtgggagattgatggcatggttaaaaagggaaggcgaaaaactccacgtttggctgggaacaagaaggctcttgaagttaacctgccagaaagttcacggaaattcataacttgcattcgcaaatacttactgttctatttgagactattggacgaaactgaacatgtcaacacactagaacgagcctttaattctcttcgatcagataagaggttctctctatgcgttgaagaccttgtaccagttgcaataggaagatacgtaaaagcactggtttcctcgatgagtcgggttgagtctgcaggagcaataatcaaccctgatagccagctagagaaaatattctccctctttatagaacaaggaagcatatg

SEQ ID NO: 127522 - DNA, 797 bp, Arabidopsis thaliana
gctctaatctgactcactatagggaaagctggtacgcctgcaggtaccggtccggaatatccgggtcgacccacgcgtccgtactttcacaaagccggagaagattatcggagatcgcaaactatggccggacgagatcgttatattccatcatcagcagtttcaacttcatcatcttcaagattattagaatctcaattaatcgaatccgatcgaaatcgagctcgatctgtaatcctcgaggatcgaatcgcaatccaacaccgtgaaatccaatctcttctcaacgacaatcaacgattagctgtagcacacatcggactcaaagaccagctcaatgtagctaagcgtgagctcgaacggttacttgaaaccgctgttaaagttaaagcggaaggagaagctaaagtgcgtgaggtttatcagaatgcgttgagaatggaggcggaggctcgtgtgattgatggacttggagctgagcttggtcaggttaggtctgatgtacagaggttaggtagtgatagacaggagttagctacggaattggctatgtttgatgatgagatggctaaggctaaaccgaattcggatcgagctattgaggctaaagtggagattgagattcttcgaggagagattcgtaaaggaaggtgaaaatttgaattctctttgttgtttttgttggaacattggatttgttatcttgtagtgtatactcatatgactggttttttggatgcttatgcagtagtaatgaatttgtttgaggtttaggatatgaaacagggctgctccga

SEQ ID NO: 127523 - DNA, 259 bp, Arabidopsis thaliana
tctgacgcgtgggggagatttcagggtccatgagattttaagggtatagatcagagggtagctttagttctgccattgatttaattgaattattgattttgtgtgttttggtgaattcattttgcttaacacgatatgaccactgtagtgttgttttgtgtcctctgtagctgaatctctctgtttgtttaagggaataagcttttgttctttgatgatgttatagtggtacactcttatatgtgatgtttctagttct

SEQ ID NO: 127524 - DNA, 550 bp, Arabidopsis thaliana
  unsure (1)..(550): unsure at all n locations
gctgtgtttcgctggaaagtctgagttccttgttgctgcatcccatattccaagacctgaactatctgtttggaatacatcaaagtnatctttatcatggtcatatgggttacgcatagaagctgtcacctctgcagtggattcgtcagcatttgcagtcttggctgtgatcccaaaaacttttaaaacagatgaatctaaggagaacatcttccgtggtagagatggtgccattcttttgtttaacggatcagatcccaagccggtatctatatggactgtgatgaaggctaggggaggatcaatctcatttttaggaaggagataagtctcagctttcgccttgcatatgtaaatggaagccatgaatatggttgtctttgatcccaatagtgatgagtcacatgagcgtagcgctggtttgactacgattggtcttcctggtctggaagaggcaggagaccgccgggtacacatccttttacgggcgggtaccccattatgccaggagggattgggggtttttagccgttggannccctttttttac

SEQ ID NO: 127525 - DNA, 412 bp, Arabidopsis thaliana
ccaaaacatgcactaaatgttttaccgcagatcgaagaagggatcatcagtgtaaaaatttggcgtcgcattcacaaaactatttatcgaaatcccagaaacgaatttggaacatagtgcgttaatcattcgattggtctttgttattgaaaaatcgattctttgttctggtttggatctgagaaagtgtcgatatgagagttcgatctagagggtttaagagacaatgagtggaatgtcctttggacttgagagttatggcttactcaaaccttgagcttttgagtctgcattatcttcttcttgtttcttcacaatgctcacttctaattctaaagagaaggaaaggtctctctcctttttatgttgctggtacttaggtcggcgacgagttgctatgcttctacttctc

SEQ ID NO: 127526 - DNA, 499 bp, Arabidopsis thaliana
  unsure (1)..(499): unsure at all n locations
nnnnnnnnnnnnnnnnnnnnnnnnnnnnnnnnnnnnnnnnnnnnnnnnnnnnnnnnnnnnnnnnnnnnnnnnnnccacgcgtccgattttctcgacgcgagctccggcaatgaaaagtttatcgatttctctaatccgtcggcttcatttccacaaaatcagaccaatcccactttcaatccaccttaatgctgcttcttcatcgtcttcgtcctcttctctgatctcgccagcacgcgaaatctccactagctgcagaagaaccaatgatctgatcaagcgtcagttctgggtcaatccatatcggaatttgaatacccatgtcgaggaacctccggagatttcgtcatctgataaagaaaaaatcgatctcgaagaagcgttcgagtcagcgaacaccactgatgaaatggtacgtttgttcaaggagatggagttatcattcgaagggaacgaattaggtttatctgctttgaaattagggctccatctcgatcgt

SEQ ID NO: 127527 - DNA, 1233 bp, Arabidopsis thaliana
  unsure (1)..(1233): unsure at all n locations
nnnnnnnnnnnnnnnnnnnnnnnnnnnnnnnnnnnnnnnnnnnnnnnnnnnnnnnnnnnnnnnnnnnnnnnnnnnnnccacgcgtccgcaccaccaccacttctggtaacgcagtgtctctgattttcacttggttaaagacctctagcttcacggtcaaacatcataaaccttttgccgccgtcactaataggaattaactgatctcgtcaatggcggaggtggaggagattgcgcacgaggagcagaatatcgagaagagggagaagaagaaaggtaaacacgagaagccgaagccatgggatgatgacccaaacatcgaccgttggacaatcgagaagtttgatccggcatggaaccccactggtatgactgaaaccagcacgttctcaacactctttcctcaatacagagagaagtatcttcaggagtgttggcctagagttgaatctgctcttaaggagtacggtgtcgcctgcaagctcaacttggttgaaggttctatgactgtttcgacgacgaggaagacaagagatccatacatcattgtcaaagctagggatttgattaagcttctttccagaagtgtccctgctcctcaggcaattaagattctcgaagatgaggtgcaatgtgatatcatcaagatcggtaacttggttagaaataaggaaagatttgttaaaagaaggcagcggcttgtgggtcctaattcttctaccttgaaggcgctggaaatattaaccaactgttacattctagttcagggaagtactgtagccgctatgggtccatttaaaggtctcaaacagctcagaaggattgtggaagactgcgtacagaatataatgcatcctgtataccatataaagactctcatgatgaaaaaagaactggagaaggatccagctcttgcaaatgaaagctgggataggtttcttcccacattcaggaagaaaaatgttaagcaaaagaaacccaaaagcaaggagaagaagccatacacacctttcccacctcctcaaccacctagcaagattgatatgcagttggagtctggagaatacttcatgagtgataaaaagaagtcagagaaaaaatggcaggagaagcaagagaaacagtcagagaagagcacagagaacaaaaaaaaaaaaaaagnnnnnnnnnnnnnnnnnnnnnnnnnnnnnnnnnnnnnnnnnnnnnnnnnnnnnnnnnnnnnnnngtccacct

SEQ ID NO: 127528 - DNA, 661 bp, Arabidopsis thaliana
  unsure (1)..(661): unsure at all n locations
nnnnnnnnnnnnnnnnnnnnnnnnnnnnnnnnnnnnnnnnnnnnnnnnnnnnnnnnnnnnnnnnnnnnnnccacgcgtccgcccacgcgtccgctctgtatctctctgtgtctctcttccccgttagtcttcgtcgtgacctttttgtagtattaagcaatgaagattaagacgttatcaagatcggttgatgaatacactcgagaaagaagtcaggatcttcagagggtctttcacaacttcgacccaagtcttcgacctatggagaaggccgtggaataccagagagctcttacagctgccaaattagaaaagatatttgcaaggccgtttgttggagcaatggatggtcatcgtgatggagtctcatgtatggcgaagaacccaaattacctcaaaggaatcttctctgcttctatggatggagatattcgcctttgggatatctcttcaaggcgtacagtttgccaattccctggtcatcaaggtgctgtgcgtggtcttactgcatcaaccgatggaaatgtattggttccatgcggaactgattgcactgttcgttaggggatgttcctcgtccttcacttgaagattctagcatttcatctgagaatttcattgaccctctgaacctatgcttgaagatgctttctggcctgtg

SEQ ID NO: 127529 - DNA, 618 bp, Arabidopsis thaliana
  unsure (1)..(618): unsure at all n locations
nnnnnnnnnnnnnnnnnnnnnnnnnnnnnnnnnnnnnnnnnnnnnnnnnnnnnnnnnnnnnnnnnnnnnnnnnnnnnnnnnnccacgcgtccgaaaggagacagctttctctctctgtctctctctaaaagttctgggtttagaaagagatctttcttatatgttgaatttgtgatcagaggtgagagagatgggaggttgcgtgtcaacgcctaagagctgtgtaggaggtaaaataaggtcaagcaaaaggagaaagactcggacaagacgaaagattcagaagaagagagttgtttcttcttctcgcttatctgacggatctttcgataataatcccactttcagagcaagtgttgatgaagcatggtttgattccaatctcgcctttgaaaccgattgtgatgatgactttcatagtgttcaggaagatacgttgtcagtgaacggatgtgagcgtatctcagtatcgagtatgtcatctgttaaagactctaaccttggtggttccgctcggaattctctaagcgatgtcatctcacaatccaaatcagagagtgctttgattgacactaagcaggctgttttcttcgacgagatatcttcaaatgctgatgg

SEQ ID NO: 127530 - DNA, 1095 bp, Arabidopsis thaliana
ggtaccggtccggaattcccgggtcgacccacgcgtccgggagcgaggacggccgccatggatccagcaggagcatcggtggccagcgcaatcggaggagaaggagagaaattcgcggtggggaatatttattcagtgaaggtgatcaccggagatgagttcagagggatcgtcatggcttacgaccccatccccaacttcgtcttttttgaagagggtacaaaacctagacctgggcatttgaagaacactcggatggtgaatgcgagttttattacagggctttcgtatttaggcaaaactgaagatccacttgattcagacaacttttctgttgatcttaatggtctccgagctaaagaggcacttgctatcaggcaagcggaagcagatgctgaaagaatgggagttggtgttaccgctgaggctcagagcatcttcgacgcgttgtctaagacgcttcctgtgcaatgggaaaactcagacattctggtgatgaaagaggtacgcgttcgtagcccgtatctttcagattgtgtctttggaggaactgatgctgccaacaaccgagtcaagaaagtgcttgagctggaaagacgaaggttgcaactctttggcacatgaggctagtgaaaagagtcggtcagtgaaatagcgagaaagggttcgttgctactaacccgaaaggcgtctatagatctgatcgaccagcgaaaagcggatatgtttgcttttcgcatgttgttgtctttacttagaatctgcttgtccttgtaaaagcagattagagatttcttgagttacagccttacagggattgaaatttggactaatttcaccctggttattgacaagaacagtgaggtcttgtcttgtccactttttaccagggcttggtttatttatcgcctggaactgtaaactattctgaaatgttgaactactttttagtgacttctccggtagatttttacatctcgtgtgctctagaactgagttccttgatcaatgcaaaagttataagaaataaaaaaaaaaaaaaagggcggccgctctagaggatccaagcttacgtacgcgtgcatgcgacgtcat

SEQ ID NO: 127531 - DNA, 518 bp, Arabidopsis thaliana
cctaacatgcttcttcgtcagccgttgcagcctaagttacagcctaatagagagttgcgtgagagggtacacttgaagcctatgagtcctttggtggctgagcaggccaagaagaagagtcctcccgggagcccggttctccccgatcttgttcttggacgagcagaggattcggagaaagcaggagatgtgcaagtaagagactttctcggctgcatatcgtctgaatcagtgcagaacaataataacatcagtgttttgcaaaaggagaatcttgggaattcgttagacattgatttgtttaagaagctgttgaagggaatgaccgagaaagtttggtggcagaatgatgcagccgctgcggtggctgcaactgttagtcagtgcaagcccgggaatgggaaacgacgcggtgttttatcaaagggagatgtctggttacttttttcaggaccggatagagtggggaagagaaaaatggtgtcagctctgtcttctcttgtgtatgggacgaatcc

SEQ ID NO: 127532 - DNA, 582 bp, Arabidopsis thaliana
tgttttcaccagagagactgctccggaaatttttgagagtgcaatcaagaaacagttgttgttgtttgtaaccaaaaatgaatctgaaaaggttcttacggaatttcaagaagcagcgaaatcattcaaaggaaagctcatctttgtatctgtggatctggataatgaggattatgggaagccagtcgctgaatactttggtgtgtctggaaatggtcctaaacttattggctacacagggaatgaagaccctaaaaaatactttttcgatggcgagatccagtcagataaaattaagatatttggggaggatttcctgaacgacaagttaaagcctttctataagtcagaccccattcctgaaaagaacgatgaagatgtgaaaatagtggttggagataactttgatgaaattgttctggacgattctaaagatgtgcttctcgaggtctacgcaccatggtgtggccattgccaagcccttgagccaatgtataacaaacttgccaagcatctacgaagtattgattctctcgtcataaccaagatggatggaacaaccaatgaacatcccaaggcaaa

SEQ ID NO: 127533 - DNA, 710 bp, Arabidopsis thaliana
  unsure (1)..(710): unsure at all n locations
aaanggccnttttgcttccccccggcccttntggngggggtttntggggggnttgcccccccccccccaaggnggggccaggggtccngcttccccnccctttgtccctttgaaancnncccctggaggttggggtccacttccccaaggcnatcgggaaatccctcaaccgccagacntgntgcccatttcataaatcttacnccttancgtgtacacagaatttcttttccaggctgcagttcccaaagtttctacaacttccacctggatcccgctagccagcaattctcttccagctaacggaaacatcaaacaaactatgagagttacaaatagccaaaaggggaagaaacccattgtgatgcggatgagggtaggttacaagattaatggcaaagatgtgttggaggaaggacaaatcaacaatttcccacgtgggttatgagaacgtttcaggtattccaagattcatatacatattcctaatttatataatcacttcccatagactaaaacaaacttcttcatagaacctttgtatgtgtgattcgttggctttgtgtgaaatctgggtttaaagtgagataactttttgatggtctgagttacttatgagaatgtgtgacgtcaaatgtattcttcttgctgcttcaagttcttctctatcatttatatcattaataaaacgtttttgttttttccatagt

SEQ ID NO: 127534 - DNA, 897 bp, Arabidopsis thaliana
agaccacgcgtccgttttttcctccaacttgcaaaatgttaaaccttaaaccttaaaccttagcttctctgttttgaaatctgtatcacggcccaagtatgaagcatcgtcttcgtcttcgtcttgttcgtccaaagccaaattacattctcacatggagcttccgtttccactccggcaagaccacaccatcgccgttggacccttacgacactctgcagcgtcgggtcgcgagatccggagatccctctgcttcgattatcaaagtgttggatggatggcttgatcaagggaatctggttaagacttcggagctccatagcatcatcaagatgcttcgaaagttcagccgtgtctctcacgctctccagatatcagattggatgagtgagcatagagttcatgagatctctgaaggagatgttgcgattcggcttgatttgattgctaaagttggtggtttgggagaagcagagaagtttttcgaaactattcctatggagaggaggaactaccatctctacggtgctctcttgaactgctatgcgagcaagaaggtgttgcacaaagctgagcaagtgtttcaggagatgaaagagctgggcttccttaaaggttgtcttccctacaatgtgatgctgaatctctatgtccggactgggaaatacacaatggttgagaagctgctgcgcgaaatggaggatgagactgtgaagccagacatcttcacagtgaacacgcggttgcatgcttattcggttgtatctgatgtagaggggatgagaaagctttctatgcgttgtgaggctgaccaggggcttcatttggactggcgcacttacgccgatacagcgaatggctacataaaggctggattaactgaaaaggctctagaga

SEQ ID NO: 127535 - DNA, 518 bp, Arabidopsis thaliana
  unsure (1)..(518): unsure at all n locations
actcctanatgggaagctggtacgcctgcaggtaccggtccgngattcccgggtcgacccacgcgtgcgtagagatatcgtttatctctcaagagactctcatcaactaaagctaattatttaatgtttgtttggtgatatggctgatcagcagcgaggccacaacacctcagattctcgccggaaatctctagccggaaaaagaacctcacagcaaactccgtcgtccccacttagttccggcggagtatccatggcagctgcaacgacggggacagggacggcttcgccttgtggggcttgcaagttcttgagaaggaagtgtgtgagtggatgcattttcgctccacattttgggtcagaccaaggagcggctaggttcgcggcggttcataaggttttcggagccagcaacgtgtcgaaactgttgcatcatattccggtgaaccgtcgtcatgatgcnnnnnnnnnnnnnnnnnnnnnnnnnnnnnnnnnnnnnnnnnnnnnnnnnnnnnnnn

SEQ ID NO: 127536 - DNA, 548 bp, Arabidopsis thaliana
ggtctctacgactcactatagggaaagctgacacgcctgcaggtaccggtccggaattcccgggtctgacccacgcgtgcgcatagctctgtctcggttaaagcatttgatgatgatacatttgatttctataccggtgacatatttgctgctacttatgctatttcgtcgagtgaaggcgaagagagcgatggggattatgctttgaatgtggttaccgaaactactgctcagaagctaggagagtttccaagaggtcgcaaaaagcacagaatcagatatgggattaatttgggggcttcttgcttttttgtcactggctgcttctactgatggactcttttgcttggaagattgttagactacctttgcctccatatttcttaagcatgcccctcttcacatgcggcgattctaggtaccttagctgggtatatttttggtccggttctagacagactgaaagggcatgaaccaataaggactttggggccagttccacataaccgaaaccaaacaatcccgacattgggggggttggtctttcg

SEQ ID NO: 127537 - DNA, 741 bp, Arabidopsis thaliana
atttaccggtccgcaattcccgggtcgacccacgcgtccgaatgggtctaccaaagcggatgaatcgaaacctaatcccggattttttactcggatcgcgacgtcggcttctgagcagcgaaagacgttatctactggaaccgttatactaatctttgcagtagctgtgcttttccttaacccgcttcttgcaccacctgctttcgctagctttcaaactgcagctaaatccggttggctaacaagtgcggggaccggtttccttgctgggttgcttgcacacgctctcaggacctgatcacactcgctgctttagctccgctttcgatcggacgcatcaaaatggaaagtgctgctgttggagctctctggggatgtgggcatgatgctggtcatgtcttgtttggtttactgattatggtacttaaagaccggctacacattgaagcattacaaacttgggggacaagaattgggggattgactcttggtattatcggtgcctatgggaattaaggaagcttctgtgattccacaaccttgtgtcgctttaaaaaccgacatcaggctggtgtcaacagagaaggaaaccctaccactggccaaaaaagaagaatatcgggtttgtttcatttgcaactggagtgggtcacgggtcgcaaccgggtgctccgatgaatgctttgcccggattagctcttccatacggttagcagggtctgcgcttctgataatgtttct

SEQ ID NO: 127538 - DNA, 674 bp, Arabidopsis thaliana
  unsure (1)..(674): unsure at all n locations
atgttcttcnnnnnnnnnnnnnnnnnnnnnnnnnnnnnnnnnnnnnnnnnnnnnnnnnnnnnnnnnnnnnnnnnnnnnnccacgcgtgcgctcattgcctcgccgagagagaaggagacgccatggaaaggcttcttcaaccatcttcttcttcttcctcaatttctccttccaaattcccttcacggacttctcctttccttccccgtctccgctcatcgggtctgagctttgtctcgactcaccggcccgagtcacgccgagtcagctcaatttcctgcaacagttcccagattccgtcactgtatacgcctataggatctaacacaactaacaattccttcaatgggtctcccaaatcggatgaatcgaaacctaatcccggatttctcacacggatcgcgacgtcggcttctgagcagcgaaagacgttatctactggaaccgttatactaatctctgcagtagctgtgcttttgcttaacccgcttcttgcaccacctgctttcgctagctttcaaactgcagctaaatcacggttggctaacatagtgcgtggactcggtttccttgctaggttgcttgcacacgctctcaggacctgatcacctcgctgctatagctccgctntcgatcggacgcagcanaatggaaagtgctgctgctggagctct

SEQ ID NO: 127539 - DNA, 731 bp, Arabidopsis thaliana
gcaacaatggccaaaagctctttcttcaacaagcatttgcttctctctcttctcattcttctccaaagctggctactctcttcttcttcaagtaccgattcagaaactctcttgaacttcaaactcaccgcagattccaccggaaaactaaactcatggaacacaacaacaaacccatgccaatggaccggagtctcctgcaaccgcaacagagtcacacgactcgtactcgaagacatcaatctcaccgggtcaatctcatcactaacctcactcacatcactcagagttctcagtctgaaacataacaatctctctggtccaatcccaaacctctcgaacctctcagctttaaagcttctctttttatcaaacaaccaattctccggtaacttccccacttcaatcacttcactcactcgtctctaccgtcttgatctctctttcaacaacttctccggccagattccaccggatttaaccgatttaacccatcttctcactctccggttagaatcaaaccggttctccggtcaaataccgaacatcaacctctccgatttacaagacttcaacgtctccgtgaacaactttaacggtcagaaaccaaattcattgtctcaattccctgaatcaggtcttacactaaacccattcttttgtggcgcttcaatgctggaatgctctaaactttctattagtcccctcttaaccggtttgctcttttaagt

SEQ ID NO: 127540 - DNA, 498 bp, Arabidopsis thaliana
  unsure (1)..(498): unsure at all n locations
cnnnnnnnnnnnnnnnnnnnnnnnnnnnnnnnnnnnnnnnnnnnnnnnnnnnnnnnnnnnnnnnnnnnnnccacgcgtccgagcattttctattttcttctgtgcctcaaaaaatcataattttctcggaaaattaaaaatcatgtttaagattttctcgagaaagtaaaaaaaggaagaagaagaagaagaaaccatgggaagagctttcgtgtatgtaattctcggaggaggtgttgctgctggttacgcagctctcgaattcacccgtcgaggtgtctccgatggcgaactctgtatcatttccgaagaacccgttgcaccgtatgagaggcctgccttaagcaaaggttttctgctgccagaagctcctgcacggcttccttctttccacacttgtgttggagctaatgatgagaagcttacaccgaaatggtacaaggatcatggaattgaattggtacttggaactcgtgttaagtccgttgatgtgaggag

SEQ ID NO: 127541 - DNA, 463 bp, Arabidopsis thaliana
atcaattttcaataaactaaatttgtgggggaaaatccccaattcacttgcagcttttgtaatttctctaatttgggtcggagactcgtaagcggcggtggaattcaagtcgccaccggttccgatcaaagtcttccgttatacgcaaaccctaattcctcactacacgactctttttgatctgaatcgagagatggtacaggaggagaaagctatggaagcaataaatgacgctttgagagctttgcggaagcgtcatcttctggaagaaggagctcatgctcctgcgatttctgctctctctaagcctttaatctctcagggttcagaatggaaggagaaaacagaaaagctggaaacagagttacagcaatgttacaaagctcaatctcgactatctgaacaactggtgatagaagtagctgaatccagaactttaaaggctaatttacaagagaaggag

SEQ ID NO: 127542 - DNA, 424 bp, Arabidopsis thaliana
cgtacaacacgggtatctaaccgctctcattcatggtgacatagattccttgttaggtgtgcatttgatgtttctctcgctcttcgccggtatttaaccaaaaatggcatctacagtcaagcatgtggactaaacaatgagcatgatgtcatggggccatgacgactacatgtacatggaatttacactcaaggatgtggattaaacaatatagttaagcaaagttcattttgacttgatcttcatcacgtcaacatgaactttgattttactgtataacttgtatttactgtaataacaacaatatataacaattagaggttgtagatattatgatcaattacttaatcatgtcttgatcctaataactacggtctctgaattgctgtatattattattattacagcaagtacaagttatacc

SEQ ID NO: 127543 - DNA, 751 bp, Arabidopsis thaliana
  unsure (1)..(751): unsure at all n locations
cagctctctacgactcactattgnggaaagctggcacgcctgcaggtaccggtccggaattcccgggtctacccancgcgtgcgagagcgagagaaagagcatcgttttgagcaaatgagtaggaacatggaagttaacgcaggcagttccggcgaaattccgtctccaataaggaaccgatttcagaaaagtgggagtcaagcggtgtacgaggtgacagagacgaagaaatcttgcgtgacgagagtcgacatgcctggttgtcccgagtcagatctcacctactgggtcgacgccaacaacgtccacttcttcgccgacgaaccagcaatgcctgagtacgaaaacgccggacgcaaatacggaggctccatgattttcaaccctgaggcttacgacgtcaagaaaactaaagtgaagcttatcaacggagtgctctggatcaccgtccctaagatcccaggcaaaaacgcttccattaatgtcaaggagaggatcctccattactgatttaacaacaccttggtttgtgtctcgtaatggtacttgtgtctagcgtctctatctatctatgaactttgatgcagctactgctttatgtttatcattttgtggtttagttaagaacgatcttgcttctatatgtcgtgatctcaataaagaaaaagttgtcccccaaaaccacaaaaatgggcaggccgcttctagannggatnccaagctnntacgtacgggcgtgcgatgcgacgt

SEQ ID NO: 127544 - DNA, 545 bp, Arabidopsis thaliana
gtaaggcttgaggaggtgtgcatcatccgtctatcaataccctgacaaggaaaaccctaattttttttggcccaaagggttttatactttaatctcatactccgattcattgtcgaaaaacgatgatgcataattcaaccgaagaatcggaatgggaggtgagacctggtggtatgctcgtccaacgaagagacgacgccgcttcctccgaccacaaacctctccaggatcccgactctgcttccgccgcttttgctcaaaccatcagaatcactgtttctcatggctcatcgcaccacgatcttcatatttctgctcacgccactttcggggatgtaaagaaagctctttgttcagaaaacctgggattggaagctaagtgaatttcgaagggtatcttgttcaagaggagttgagggggatgatgctgaacaattgcaagctgctggtgttaaggatgcgtctaagcttgttgttgttgttgaggatacgaataagagagtggaacaacagcctcctgtggtaactaaagagatggaaaaagc

SEQ ID NO: 127545 - DNA, 429 bp, Arabidopsis thaliana
ccccaaagcataattatatataacaataaacaattagtaccaaaacacataaaaaatctataactgttatctcaaccaaaaattgtttattgttatgcgaggggttaaactcttggccgcgtgcctctacctggccgctgccgcaacggtggtagtccgagccgaagatccttacttccatcacgtatggaacgtgacctacggaaccgtgtctcctctcggtgttccacaacaagtcattctcatcaacggacaattccctggtcccaacgtcaactcaacctccaacaacaacgtcatcattaatgtcttcaacaacctcgacgaacctttcctcctcacatggaatgggatccaacacaggaagaactgttggcaagatgggactccaggaactatgtgtccgatcatgcccggcaccaactacac

SEQ ID NO: 127546 - DNA, 500 bp, Arabidopsis thaliana
gccaaacctctctcagattcttcttcttcctcgcagatcgatttttttttgaagctaaatctcaaaaatggagaacgacgcaggtcaggtcacagagctctacattccaaggaaatgctcggcaacaaacagaatgatcacatcaaaggatcatgcttcagttcagcttaacattggtcatcttgatgctaatggtctctacactggccaattcaccacttttgctctctgcggatttgtccgtgctcagggagacgcagacagtggcgtggacaggctctggcagaagaagaaggtcgaagctaaacaacagtgagagacaatctgacaatgtcataagctcttgtttgttttttgaggtttcgatttattagctatgtggctttgtcattgaattgaaaatgttagtttctctttatgcgaattcatgttttcgatttttctgctttattaaagataattattaggctttgaggccaatggaatcagattctatctac

SEQ ID NO: 127547 - DNA, 1077 bp, Arabidopsis thaliana
  unsure (1)..(1077): unsure at all n locations
gaggcagctgagaaagaagtaatagttgtagctgcggtggcagcggaagaggaggagaagaagaggaagaaaccggttttgggagaagaccacactataatggaagcagtgttgaccgttgacttttgggtgctttttgtgtccttcttgtgtggtgtaggaactggtttagctgtgatgaacaatatgggtcagataggtcttgcccttggatacacaaatgtctcaatctttgtctccatgactagtatttggggattcttcggtcgcattctctccggttctctctccgaatactttctcaagaaagctggaacaccaagaccactatggaatgcagcctctcaaatccttatggccgtaggatatatactaatggctttagccgtgcctaattcactctacatcggttcaatggtggttggagtatgttacggtgtccgtctagccataactgtaccaacagcttccgaactctttggtctcaaatactacggtctcatctacaacatcttagtacttaacttgccacttggctcgtttctcttctcgggtctcctcgctggcttcctctacgatgcagaggcaacaccaactcctggtgggggcaacacgtgcgtaggagctcattgctaccgtctcatcttcatagtcatggcattagcttctgttatcggagtcggtttggatcttgtgttggcttataggacttaaggagatttacgctaagattcgacgctagcaagaagtcaaagaaatctggtggtagccttagttaagacactgtatatctagttccggtgcacccacattgttttcagatgctgattttgtatacatgatacaatatcggattcaagatattgttgaacaaaatttcaagtaccagagatcattgttgtagtagcatcgcccaatgtatttttttgtctttccgagatttgttcaaaattatataaatgtatgacattttgatagtccaattccaaaaaaaaaaaaaagaaaaaannnnnnnnnnnnnnnnnnnnnnnnnnnnnnnnnnnnnnnnnnnnnnnnnnnnnnnnnnnncgtcctaaa

SEQ ID NO: 127548 - DNA, 795 bp, Arabidopsis thaliana
  unsure (1)..(795): unsure at all n locations
gcgnnnnnnnnnnnnnnnnnnnnnnnnnnnnnnnnnnnnnnnnnnnnnnnnnnnnnnnnnnnnnnnnnnnnnnnccacgcgtccgtatcaccatcaacacatgcccatcaatgccatttcccagcaatctttaactttggtgactctaactccgataccggcggtctctccgctgcttttggccaagctggtcctcctcacggctcttccttcttcggctcacccgcgggacgatactgcgatggtcgcctcgtcattgacttcatagcggagagtcttggattaccatatctaagcgcgtttctagactccgttggttcaaacttcagccacggcgctaacttcgctaccgcgggatctccgataagagctcttaactctactctacgtcaaagtggattcagcccattttcactcgatgtacagttcgtacaattctataacttccacaacagatctcaaactgttcgtagtcgtggaggagtctacaagacaatggtgcctgaatccgacagcttctcaaaagctttgtacacttttgacattggtcagaacgatctcacagcaggttacttcgctaataaaccgtagaacaagtgaaaccgaagtcctgagatcataagcattcatgaatgcttcaagatatttatggacaagagggagaacttctggattcatacactggacctattggttgttagcttatggattgaacggttccgataaagcataaatttgatcacatggatgggttctccttgaacactagctcacattcatcacgcttgaacagct

SEQ ID NO: 127549 - DNA, 563 bp, Arabidopsis thaliana
  unsure (1)..(563): unsure at all n locations
tgatacttcagctctcnnnnnnnnnnnnnnnnnnnnnnnnnnnnnnnnnnnnnnnnnnnnnnnnnnnnnnnnnnnnnnnccacgcgtgcgtctaaaactactggcattatgagacaggataattcgtttgaaaagagctctagtaaatggaaaatgaaagttggaaaaggaccattggacctcagtagcgaaagtccttcaagtaaacaaatgcatgaagatggaggctcgagtttcaaagctatgtctagccaccttcaagataacagagaacctgaggcgcctaacactcacttgaaaactttagatacaaatgaagcttctgttaaaatttctgaagagctaatgcacgtggaacatagttcaaagaggcatagaggaactaaagatgatgggacactagttagggatgatcggaatgtgctgaggcgttcagagggctcagctttctcaaggtactttcttagaatcaaacctctgttttttcttccgtacacaaccttttgaatgccttattgaagaactatgagatcgactgttggacttgtgcaggtataatccag

SEQ ID NO: 127550 - DNA, 763 bp, Arabidopsis thaliana
aatcatgatgacaggaaaatggaatgagaaaatgagctaccaaccttgtgatgccgaaggggaaccccttccaggaacagagctgaaagaggtgtggcatttggctgatgtccccaaaaacgacaactttcagtacactcactttgctcacaagataaacagcttcgacacagcgcctgctaagctcttggcttcagactcacgtatccgtcctgatagatattcccttgagcagggtgacctttctaaagctggttccgagaaacacagccttgaggagagacaaagggccgaaaagaggaccagagagacaaagggacaaaagttcactccaagatggttcgatctaacggatgagatcacacctactccatggggagatattgaagtataccaatacaacgggaagtacaatgaacaccgagacacggcagagagctcaagtagtgcctccaacgaaacggacctcaaatcgatcgagtttaatccttggcaatatggtaatatctcaaccgaatgaagtaactcttatagtttaatttgttatctctatatacgaatgctgtgattcatgttcacttgaaagtgagtcccatgttgtttttaactttgtttcagactgaaaaatctgattatgtagtttgagtgataaaacataagttttgtgctaaaaaaaaaaaaaaaaaaagaaaaaaagggcggccgctctagaggatccaagcttacgtacgcgtgcatgcgacgtcatagactcttctatagg

SEQ ID NO: 127551 - DNA, 1221 bp, Arabidopsis thaliana
  unsure (1)..(1221): unsure at all n locations
nagtttatggaactcttttcgaggcagagcatcggtctactttctacttcccttattggaactttcctccagctacctcgcgtcctccgaggcaacgaaagttccaaagcgatctgaagattataaacgattgccttgatggcctcattcaaaatgctaaagagacaagacaggaaacagatgttgagaagctccaggaaagggactacactaatctcaaggatgcaagtcttttgcggttcttagtcgatatgcgcggtgttgacattgatgaccggcagctgagggatgacttgatgactatgctaattgctggtcatgagacaacagcagcagtacttacttgggctgttttccttctgtcacaaaatcctgaaaaaattaggaaagctcaagctgagattgatgctgtgcttggtcaaggtccacccacttatgaatcaatgaaaaagctcgagtacatacgactgatcgttgtagaagtccttcgtctctttcctcagccacctttgctcatcagacgcactctcaaaccagaaacattaccccggaggacacaaaggggaaaaagaaggtcataaagttccaaaagggactgatatcttcatttctgtgtataatctccatagatctccatacttttgggataatccccacgattttgagcctgagaggtttttaagaacaaaggagagcaatggaattgaaggatgggctggctttgatccatctcgtagccccggggcactatatccgaatgagataatagcagactttgcattcttaccatttggtggaggaccaagaaaatgcattggagaccagtttgcactaatggaatcgaccgtcgcactagctatgttgtttcagaaattcgatgtggagctgcgtggaacgccagaatctgttgaactcgtgagcggcgcaacgattcatgccaaaaatgggatgtggtgcaaactaaagagaagatcaaagtgaaatttatggataggcaaaaagactcaattttaacttgaaggaagctgagtgtaaatgagagatgatatgcttatgattcactaaacgtacattcttgagattttgaaaatgcaaaaaagctaacacagagattggatctgttggtgaaaaaaaaaaaaaaaaagnnnnnnnnnnnnnnnnnnnnnnnnnnnnnnnnnnnnnnnnnnnnnnnnnnnnnnnnnnnnnnnnnnnnnnnnnnnn

SEQ ID NO: 127552 - DNA, 419 bp, Arabidopsis thaliana
aaattttgaataaattatatataacagaaatagtattttaagagatcgtcgcctacgatggcttcaaaagcattgctttttttaagtctcattgttgttcttcttatagcttctgaggtggtagccagagacctcgctgagaaatcggcagagcagaaaaacaatgaaagagacgaagtaaagcaaacggagcagtttggcgggtttccaggaggagggtatggagggttcccgggaggagggtatggaggaaaccctggtggaggatatggaaaccgtggtggtggatatagaaaccgtgatggaggatatggtaaccgcggtggaggatatggaaaccgaggaggaggatattgtcgctatggttgctgctacagaggctactacggtggctgcttcaggtgttgtgcttatgctgg

SEQ ID NO: 127553 - DNA, 655 bp, Arabidopsis thaliana
  unsure (1)..(655): unsure at all n locations
ttgnnnnnnnnnnnnnnnnnnnnnnnnnnnnnnnnnnnnnnnnnnnnnnnnnnnnnnnnnnnnnnnnnnnnnnnnnnnnctttttttgtgttttttttaaaacaccaagttattgctttattattggaacatatgcttgattatacaatcttggtattagcttctaaattttaattttaatttttttgtagaagctaagaggaagaacttggattctttgtaattggaagctttccatcatatgtgctcttcagtacatctggtttcctcacaacccgaggtcctactggaaccttccgattctttggcctaatatcctgatcaaagatggctgtaggtattgctagtgtagcaacggcattcggagaatcaactatcccagatagtcttccttcacatggacaacatgagagtaagaggtacacctgttcttttgagtaaccaaatttgaaaagatagtctatggcgttgagaactgcccgtttgtaagcaactgttgcatctaggtaatgctgttttccgctctcatcgacactgataccttcgaagacaagccactctgagaacctcggttccactggtcctatctcaaagattgggtttacatggagaggggtaggtcccattggcgtaaggtactcttgcatcccatttc

SEQ ID NO: 127554 - DNA, 534 bp, Arabidopsis thaliana
tcactattgggaaagctgacccgcctgcaggtaccggtccggaattcccgggtcgacccacgcgtgcggctgcaacaccatcctcatccacaactttgatcggcccactcagtagagaggtctatgctcttaatatcgccagcagagccatcttctttgactgcacctcccgtccagtcaaccatttccaccctaaacaactcaccagtcttgacctctgcaactgatgggggctcaggatgccatctattgtgcagtggctgagtctgctgccatggcctcttcttcaaatccaccttcaccaccactcgtggacttgctggagccatcaaaccgaacccaataaaagctaagaggaagaacttggattctttgtaattggaagctttccatcatatgtgctcttcagtacatctggtttcctcacaccccgagttgctaacaaattattgagagacgaggggaagaccagagaaactcaggagggttatccagaagctggttgacttatgcaaagaacagaaggggcaaaat

SEQ ID NO: 127555 - DNA, 467 bp, Arabidopsis thaliana
cccacgcgtccgatcatggagtatttacctgggggtgacatcatgacactactcatgagagaagacattctttctgaagatgttgcccgtttttatattgctgagagcattcttgccatccattcaattcatcaacacaactatgttcacagggacatcaaacctgataatttgatactagacaaaagtgggcatttgaagctttcagattttggtttatgtaagccacttgatgacaagtattcttcattgctattagaagacgatgaaatgttgtctcaggattcagagaaccagtcaggaaaatcagacgctgacaaagcaccctggcaaatgcctaaagagcagttactgcagtggaaacgcaatcgccgtgcattggcttattcaaccgttggaactcttgattacatggctccagaagtactcctaaagaaaggatatggaatggaatgtgattggtggtc

SEQ ID NO: 127556 - DNA, 828 bp, Arabidopsis thaliana
  unsure (1)..(828): unsure at all n locations
aatacgactcactttagggaaagctcggtacgcctgcaggtaccggtccggaattcccgggtcgacccacgcgtccggtcgagatttgatgagacgacccatttccatcttctttttttctcaccactcaagcaagaggtgaagaaggactaatagagaagatggaaatgggtcgtcgagatttgatgagacgtggaacaaccaatcgattgtccaataatcaacattctggatctgggttttctacaaaatctaagaaaggaatgctgaagaaacttggttttgctgatgagaaactgaaacaggagatgagctacgatactcttccttctccagatttagaaaacgaggtttctaagaagaaatctaagcttccaaaaaagaatttgaaagacactaatggtgtggatcatgcctctgtaccacggaagcttcgttcagccatgaagaagcggaatcttgaatctgtttctaagctatcctctgtttcaaagagaccttaccggtttaaaaccggaactgaatcttcggttaagaaggagagtcaagaaatggaagcaatagctatcgttactgagtcgatgatgatgtcgaaagatgagatagaagctgcagagactttatatgggttagctggactgtttactgagactgactctcttggtgagaagaccagtgntgagacaggaaccagccaagttgtggacttaattttgggtgtggatgatgactatacaaaaccgaatcgttcaccggtggtttagttctctcttcagccaaccttagagattgtggatggccttagagcatctgttaacagtcacacac

SEQ ID NO: 127557 - DNA, 346 bp, Arabidopsis thaliana
acccacgcgaccgcacgagtaaacacgaagtaaaaatgataaagagacgattttacaagcttgagcatggtgataaagacagtggatccgattcatcgtgcttctcttctgactctgatcctgagacggaagaatcagaacaatctgaagaagaagactctgttgcagaagtttccgaggacggtgatgattcaggagatgatgaatccccagctgctggcgaagacgctgatgttgatgatggtgatgataactctgatgctgatgactatggtgggacattggagaagatgtcaatgaatcgttttttagaagaaccacccgaagaagaggaagagaactatat

SEQ ID NO: 127558 - DNA, 1019 bp, Arabidopsis thaliana
  unsure (1)..(1019): unsure at all n locations
cggacgcgtgggctcgaaaagaatgggtactttctgttgaatgaaaagggtgagaaaatgaaggagcagcttggtgttgtccgatcaaactgcatacattgcttagaccgtacaaatgttacccagagcatgataggtcgaaagatgttaaaagtttcaactcaaaaaggattggagtttttgggcgctaaagaacccattaggctcacatttgaatttttggcgaccactataaaatattatgggctaatcatggtaatgaaatcagcattcagtactgtggaactcctgcacttaaaggagatttcgttaggtatgggcatcggactgcccatggtgtccttaaagatggttggagctccctcagacgctattacctgaataactttgctgatggaactaagcaggatgcaattgatctcttgcaagggcactacatagttgctgtgagccgagacatggctcctgtacctcaaaagggaggccttgaggctgtagccaacttcccagtggcattgttcgtggttctgatgagtttctggtttgcaacaatgtctctaaaacaaactgggagtgattataagcataagcacttgttcttctcattgttgtggacgggaatttgcgtgggcatggctgcactggtgagggccaatggcaggatcttctgtaaccgacctcgtctgcacaagcccagaggctgattcatttcgtgagatcaattaattaaagacatggaactcaagtcggagacaaaagttttctcccttcgattgttttattttattgtatcaaaattggaccttgtgacaccatctagaggcaattgtctcaggtttggatcccgcggccgttaatactcccacagccatctaatgactcgatacagttacacatctttcttcatgttcattctatgattactcggtccgacaaaaaaaaaaaaaaaaaagggcggccgctctagaggatccaagcttacgtacgcgtgcaggcgacgtcataatcttnctatagtg

SEQ ID NO: 127559 - DNA, 1122 bp, Arabidopsis thaliana
  unsure (1)..(1122): unsure at all n locations
nnnnnnnnnnnncaattacatttaagggaaggttggtccccttgcaggacccggcccgaatttccggggtcgacccacgcgtccgattcagtatgtaaacacagttgaggttgagcctctggtgtataaggcaattgggcagttccaagcaggaaaatcgaaaaccgatgatctctttgatgagctagatacttcaaaactcaatactcatcttaaggagcttatggctggtctcacagccaaagtattccgtacgtataatgcatccatcacattggatttaatgttgagtaaagaaaccagagacggtgacgttcctgaaaaagtggtggtttatcagcaagcgaacaaggaggttgctatcatttgtaaccatcaacgtactgtctcgaaatctcacggagcacaagtggagaagctggctgtgaaaatagaagaactaagggagcaaataaaagagctgaatattgatctcgacagggctaagaaaggaagaacaccgttaatgggatctgatggaaagagaaagaggaacttaacacctgaagcattggagaagaagataatgcaaacgcaaggtaagatcgagaagatggaaagagatatgcaaacaaaagaagatatgaaaactgtcgcattgggcacatctaagatcaactacatggatcctaggatcactgttgcgtggtgcaaacgacatgatgtccccattgagaagatatttaacaagtctcttctggctaagttcgcttgggcaatggatgttgatcctgagttcagattctgttcaagtaccgatgaataaatacatgttcgttgaggccagtttcacctaactaccattcaccatacatttacagagatatagagagaaagagttaaaaagagaagaagaatgatagcgagaccctgtaaaagaggtttcgtctctcttattagtgaaccaaagactaatctatggatgttttatagaaaaacagttacaattttttactcccataaataaataattccggttaatgaggttaaaaaaacacaaaaaaagnnnnnnnnnnnnnnnnnnnnnnnnnnnnnnnnnnnnnnnnnnnnnnnnnnnnnnnnnnnnnnnnnnnnnnnnnntca

SEQ ID NO: 127560 - DNA, 400 bp, Arabidopsis thaliana
  unsure (1)..(400): unsure at all n locations
ctgttggttgttgtacattgaaagtaggaaacgtggagtgtattcctccaaataagttaaagtttgacttccttggtaaagactctattcagtatgtaaacacagttgaggttgagcctctggtgtataaggcaattgggcagttccaagcaggaaaatcgaaaaccgatgatctctttgatgagctagatacttcaaaactcaatactcatcttaaggagcttatggctggtctcacagccaaagtattccgtacgtataatgcatccatcacattggatttaatgttgagtaaagaaaccagagacggtgncgttcctgaaaaagtggtggtttatcagcaagcgaaccaaggagggttgctatcatttgtaaccatcaacggtactntctcggaaat

SEQ ID NO: 127561 - DNA, 539 bp, Arabidopsis thaliana
  unsure (1)..(539): unsure at all n locations
ctacgactcacttatgnggaaagctgagccgcctgcaggtaccggtccggaattcccgggtctacccacgcgtgcggatgacttggtgcactttgattttatggatccccctgctcccgaaacactgatgcgagccttagaagttttgaattacttgggagcactggatgatgatggtaacttgacaaagacaggtgagatcatgagtgagttccccttggatccacagatggcaaagatgctcatagtcagtcctgaattcaactgctcaaacgagattctctcagtttcagctatgctatcagtaccgaattgctttattcggcctagagaggctcaaaaagcagcagatgaagctaaagctaggtttggacacattgagggagatcacctcacattgttgaatgtctaccacgctttcaagcaaaacaatgaggatccaaattggtgctatgaaaacttcatcaacaatagagcgatgaaatctgcagaccatgttagaccagagctagtccggataatgtcaagattcaacctga

SEQ ID NO: 127562 - DNA, 519 bp, Arabidopsis thaliana
gtccgcgaacgcatgggtcatgagtgagttccccttggatccgcagatggctaagatgctcataggcagtcctgaattcaactgctcaaacgagattctctcagtttcagctatgctatcagtttctcagttattctctctcatgaagcaaatggtatcagtctcatcgcctctatgcatctgctgacctcttccctggacctcttctgttataattaccaattctttctctagtaccgaattgctttattcggcctagagaggctcaaaaagcagcagatgaagctaaagctaggtttggacacattgagggagatcacctcacattgttgaatgtctaccacgctttcaagcaaaacaatgaggatccaaattggtgctatgaaaacttcatcaacaatagagcgatgaaatctgcagacaatgttagacagcagctagtccggataatgtcaagattcaacctgaagatgtgcagcactgattttaacagccgcgactactacatcaacataagga

SEQ ID NO: 127563 - DNA, 681 bp, Arabidopsis thaliana
aagtggggcctattaaagtagtgccactgtattctactcttccacctgcgatgcagcagaagatatttgatcctgctccagagcctgtaacagaaggtggtcctcctgggagaaagattgttgtctccactaacattgctgagacttctctcaccatagatgggattgtctacgtcattgaccctggttttgctaagcaaaaagtctataaccctcgaatccgtgttgagtctttgttggtgtccccaatttcaaaggcaagtgctcaccagagatctggtcgtgccggtagaacacggcctggaaaaggcttcaggctttacacagagaggagttttaataatgacttgcagccgcagacgtatcctgaaatattgagatcaaaccttgcaaatacagttctgaccttgaaaaaactgggtattgatgacttggtgcactttgattttatggatccccctgctcccgaaacactgatgcgagccttagaagttttgaattacttgggagcactggatgatgatggtaacttgacaaagacaggtgagatcatgagtgagttccccttggatccacagatggcaaagatgctcatagtcagtcctgaattcaactgctcaaacgagattctctcagtttcagctatgctatcagtaccgaattgctttattcggcctagag

SEQ ID NO: 127564 - DNA, 866 bp, Arabidopsis thaliana
  unsure (1)..(866): unsure at all n locations
aaccancnncgggttcggtaaatttaanccnattaaangcttaaaccccaaaatnccattaaatgntaactccntnccacttnaaanaattcctttntacaatcaccaccgtccaaaatttaatctttacatctctgccctanacgtgtctcttcttcnccatctctccggcgataacagtgcctctggatctccgnatnttaaccggctcgatgagtgcggtgctgttctgaagaacatcggactcgtcatcgatttcgttcgccgcgatgagcttcccgtcgctggaatccgttctgatatcgggtaaaaaactcccgccgatgatctccgtcggaanaacggtgatttcgtgcttctgtagtaacggaacgagaacactcttgatttcgatattccgcgcccgcgcggtgattgacgtttgttccatgtagatctccggtatctccatggagacaccgtcgctggctccatcgttactctctctgattcagattctctctcgcattcgaacgagtacgatctcttcagctcccggaaccgagaaatcgccggtgatgattgctcttccaccgacgctctgatctcctgatcgttcgtcgtatcggcagcgattgtgttccaattgctccgcgacggtgtgatttcgccgcggatgatgatcgcgttattctcttcatcatcgagactcggacgaattcgaggagccattaacggaacgaacggcgacataggcgttaaaactccggcggatgcgagaatcgccgtacggcataacggacagttagggtgagatcggagccattcatcgatgcattcaaggtgaaaagcatggaagcataacggaagtgttcgtacataatcac

SEQ ID NO: 127565 - DNA, 509 bp, Arabidopsis thaliana
  unsure (1)..(509): unsure at all n locations
nnnnnnnnnnnnnnnnnnnnnnnnnnnnnnnnnnnnnnnnnnnnnnnnnnnnnnnnnnnnnnnnnnnnnnnnnnnnnnnnnnnccacgcgtccgcggacgcgtgggctgattctggcttgccatcccgcgtagagtcgctgatgcgaaagtctaacagtgaattcagtgtggttatatcgcagatgaatggacaagactatgcatctcgatcgcacgtttttaccgttggaaagacgaggataaagctgtctcgaggatggatcacaaaggcgagagaattatattcgacatccatgcagctctgtggagttagaggcaatattaaggctcctaccaaggcagtgttctggcaaccaagaaagagtctaactttcatactaacctttgagtcagaacacgaacgtaacgcagccatagcccttgctcgaaaatacgctttcgattgcagtgttacactgcttggtccagatgattaagtgaagaagacaatgtcattaacgaaccacct

SEQ ID NO: 127566 - DNA, 779 bp, Arabidopsis thaliana
  unsure (1)..(779): unsure at all n locations
nnnnnnnnnnnnnnnnnnnnnnnnnnnnnnnnnnnnnnnnnnnnnnnnnnnnnnnnnnnnnnnnnnnnnnnnnnnnnnnnnnnccacgcgtccgcccacgcgtccgtacggcttgcgagaagacgacagaaggggggagacggaagaaaattcgaatcatcagtgtttgtttcctcctctcttaaagcttagcccttctcaggtcattgttcttcaatggcttcgagcaacacgactactggggttgataatacgtttagaaagaagtttgatgtggaagagtttaaggagcgtgctcgtgaacgcgaaaagaaggaatcggatcggtctaaatctcggtccaaaggtcctcctgtgcaaagagcccctttgaagcatagagattatcatgtagacctagaatctcgtctgggcaagacacaggtcgttacaccggtagcgcctctaagtcagcaggctggttatttctgtcgcgtttgtgattgtgttgttaaagattcggcaaactacttggatcacataaatgggaaaaaacatcaaagggcattggggatgtctatgcgggtggagagatcgtcacttgaacaagtccaagagcggttcgaggttttaaagaagcggaaagcgccaggaactttcacagaacacggtaagacttctgagaggaaccatctcttagttatgtagtttgatgtatcttcagaaataagaaactattctctggaaaaaaagctagagcaaatctaagtaggttggaaaataacattgacgttgcgact

SEQ ID NO: 127567 - DNA, 520 bp, Arabidopsis thaliana
  unsure (1)..(520): unsure at all n locations
taaatgggaaaaaacatcaaagggcattggggatgtctatgcgggtggagagatcgtcacttgaacaagtccaagagcggttcgaggttttaaagaagcggaaagcgccaggaactttcacagaacaagatctggacgaacgcatccgaaaacagcaagaagaagaggaagaactaaaaaggcagcgtagagagaaaaagaaagagaagaagaaagggaaggtggtggaagaagagcctgagatggatcctgaggttgcagagatgatgggatttgggggctttggatcttcaaaaaaatcatgatgattatatgatcacttgtatctttgtcttgtagcgtttttgatccaaagtttgcaactttgtaatctgacacatcataacgatatttttctcattgtgcaagaagaggaatttgatggctnnnnnnnnnnnnnnnnnnnnnnnnnnnnnnnnnnnnnnnnnnnnnnnnnnnnnnnnnnnnnnnnnnnnnnnnnnnnnnnnnnnnnnnnnnnnnn

SEQ ID NO: 127568 - DNA, 501 bp, Arabidopsis thaliana
tatacgactcatatagggaaagctggtacgcctgcaggtaccggtccggaattcccgggtcgacccacgcgtccgcaatatttatggtacccatgtccttttggaagcttgtaaagtcactggccagatcaggaggttcatccatgtgagtactgatgaggtctatggagagactgatgaggatgcttcagtgggtaatcacgaggcttctcagttgctcccaactaatccatactccgccactaaagctggagctgagatgcttgtcatggcatatggtagatcatatgggttgccggttataacaactcgcgggaacaatgtttatggtcctaaccagtttcctgaaaagttgattcctaagttcatcctcttggccatgaatgggaagcctctcccaatccacggagatggatctaatgtgagaagttatctctactgcgaagatgttgctgaggcatctgaggttgctcttcacaaaggggaagttaaccatgtcta

SEQ ID NO: 127569 - DNA, 595 bp, Arabidopsis thaliana
  unsure (1)..(595): unsure at all n locations
ctctttcttcacactcctttttttatttatttccattgatctctctcctctcctcgatttttccctcctttaatccatctctgcatattcttcaagcttgggttcatcttcatcttgatctgaatcgatccgatggctacatataagcctaagaacatcctcatcactggggctgctggattcatagcctctcatgttgctaacagactagttcgcagctaccctgactacaaaattgttgtgcttgacaagcttgattactgttctaatctgaagaaccttaatccttctaaatcctctcccaacttcaagtttgtgaaaggagatatcgccagtgcctgatctcgtcaactaccttctcatcactgaagaaatcgacaccattatgcactttgctgctcaaacccatgttgacaattctttcggtaatagctttgagtttaccaagaacaatatctatggtacccatgtccttttggaagcttgtaaagtcactggccagatcaggaggttcatccatgtgagtactgatgaggtctatgggagagactggatgnggatnncttcagtggggtnattcacggagggcttctca

SEQ ID NO: 127570 - DNA, 674 bp, Arabidopsis thaliana
  unsure (1)..(674): unsure at all n locations
caacaatggattacgattacagaaacaagtctggtggtccttcttaccctcgacctgtgtatggacctccatcagcatcgtccggctccgtcatctaaccatcctatgtacggttaccctaagatcggtcaacaaaccggtcccggcccacagtttttctctccgccggagagaaactcttcgtttcaacataacacttctccttcatctggaataggaatcagagtgaatttgaagcctgagtatcggattactccgccgcctcagttgttgcctcgagtaggagatattcatcggagtagttttcagttcgatttcggattagagaggaaagttctcgcggaggcagagaaagataatccagattggagtaaatttgggagtgagaatccaccggctaagtttcatgaaccatcaccttcttcagtgggtcaaatgcagggtgtagatcatgtagtgatgaaatatactgctcctgggctcaacagagaagctgtcaacatagctgttgcaaactatggtgataatcccacaaaggttcaagaatttgcaaatgggttcacagcgatacgggagatgggttttccgacaaacgctngtgcagatgctctcttcatgtttgagaacgacactgataaggcattggcacatttgctccatgggtctttctaaat

SEQ ID NO: 127571 - DNA, 653 bp, Arabidopsis thaliana
  unsure (1)..(653): unsure at all n locations
tgttctccnnnnnnnnnnnnnnnnnnnnnnnnnnnnnnnnnnnnnnnnnnnnnnnnnnnnnnnnnnnnnnnnnnnnnnccacgcgtccgtattcctgatcttttgagtgtaagactcgggagcttttcttgaaaaatagagctgctgagctcgatagagaaatgggattgattcgaactcaggaagaaaccggaaggcatgtgagaatgctgactcatgagattagaagcactttagatagacatactattgtaaagactacacttgttgagcttggtaggacattagctttggaggagtgtgcattgtggatgcctactagaactgcgttagagctacagctttcttatacacttcgtcatcaacatcccgtggagtatacggttcctattcaattaccggtgattaaccaagtgtttgctactagtagggctgtaaaaatatctcctaattctcctgtggctaggttgagacctcgttctgggaaatatatgctaggggaggtgagcgctgcgagggttccgcttctgcacctttctaattctcagattaatgactaggctgagctctcaacagagagatatgctttgatggctttgatgcttccttcagatagtgcaaggcaatggcatgtccatgagttggaactcgtt

SEQ ID NO: 127572 - DNA, 933 bp, Arabidopsis thaliana
  unsure (1)..(933): unsure at all n locations
agctctatacgactcactatatggaaagctggtacgcctgcaggtaccggtccgggatttccgggtcgaccacgcgtncgtacggctgcgagaagacgacagaggggggaacagaacatagaacgaaagaaagaatggcttctgtaccatgttccttcaagctctctgctcatcgtagatcttcttccaagcttgatggaaacaacaaacagtgtagtagtttagtagaaagactgagagataaaacgaagagtcaagttcctaagtccattacttgcattaaccgcttagagatatcgcgtatagcaccattacacgcaacgatgaatagcccgaaaggatttggacctcctcctaagaaaaccaagaagtcgaaaaagccaaaacccggaaaccaaagtgatgaagacgacgacgatgaagacgaagatgatgatgatgaagaagatgaacgtgagagaggtgtaattccagagatagtgaccaacagaatgataagcagaatgggatttacagtggggttaccactcttcattggtcttttgttcttcccattcttttactatctcaaagtgggattgaaagttgatgtgcctacatgggttccgtttattgtttcgttcgtcttctttggtacggctttagctggtgtgagctatgggatcgtgtcttcgagctgggatccgttgagagaaggttccttgttaggctggaacgaagctaagaagaactggcctgtcttttggcagtccttttggaattcctcagacaagagatagactatgcaataaaagctctttggttttataaacagatgtaaattttgctgaggatttactttggagattttctataaaaaaaaaaaaaaaaaaaaaaaaaaaaaagcggccgctttagaggatcccagcttacggacgcgtgcatgcgacgtca

SEQ ID NO: 127573 - DNA, 409 bp, Arabidopsis thaliana
gaaagaatggcttctgtaccatgttccttcaagctctctgctcatcgtagatcttcttccaaggtaatcatcttctctctatctccttcaatctgtgtctctgtatagttcacttatgctgagtcaactcgttctctcttggtctcgatcaaaacttagtcaaatcgttccttccatttcctttcagtttgattccactttaatggcgtcataatcatctcttaaatcaaacaatgactccactatctcgtttccgatctcttgttacataaagttttctgtagcattgagatttgtccttttcggaattgcttttatttgcgcagcttgactggaaacaacaaacaagtgtagtagtttagtagaaagactgagagataaaacgaagagtcaagttcctaagtccatt

SEQ ID NO: 127574 - DNA, 522 bp, Arabidopsis thaliana
gatttccacaatatctttcttcacactttctttcactttcccgggaaaacagccgagaaaataaaagaaacgaagaaaagtttgttcctttgtggggatcaaagaagaatgtactcggcgattcggtcttcgcttcctctagatggcagcttgggagactactctgacggaaccaatcttcccatcgacgcttgtctggtcctaaccactgaccccaagcctcgccttcgttggacctctgagctccatgaaagattcgttgacgccgtcactcagctcggcggacccgacaaagcaacgcctaaaactataatgagaacaatgggagtgaagggtctcactctttaccatctcaaatctcatcttcagaaattccgcttggggaggcaatcttgtaaagaatcaattgacaactctaaggatgtttcttgtgttgcggagagtcaggacactggttcatcttcaacatcatccttaagattggctgctcaagaacagaacgagagttaccaggtcactgaa

SEQ ID NO: 127575 - DNA, 708 bp, Arabidopsis thaliana
  unsure (1)..(708): unsure at all n locations
aggccnnttnggaaccccnntggtcccntgcnaaagttccccggcccaaacccttggccgtncttcccgttgnaacccttcggggcctcttcnncccaagggcttcccatcacccatagaggatggaaacccaatccctggattattagatgggaatggaggatatcctcttacctatgaggaccatgaaggggacaagatgcttgtaggagatgttccatggcaaatgtttgtgtcttcggtgaagaggctgcgtgtgattaaaacttctgagatttcttcagcattaacatatggaaatggtaagcaagagaaaatgagaagatgaagaaaaagatcttttacagcttttaaagaagtagagagatgttattaattgcattttgcctttaaactttgatgagtttttggtcttggaaaagtttctgatataagtctgatgtacattctggtttgttacatcttcttttggcttttgagatatcatagagttttgttggaactcaaagaccaaacagtgcaatgatgattttggggtcttgagtaaatttacaaacccttttaggcatattataatagtcttctgtttttaagttttggtaatgattattcacacttgatcaacacttttaagtaatgtaactctccctatgtcagcaaagcatccttttcgaaaaacggagaaaagaaacaatctttttctctgcc

SEQ ID NO: 127576 - DNA, 904 bp, Arabidopsis thaliana
  unsure (1)..(904): unsure at all n locations
nnnnnnnnnnnnnnnnnnnnnnnnnnnnnnnnnnnnnnnnnnnnnnnnnnnnnnnnnnnnnnnnnnnnnnnccacgcgtccgctgttttaaaacagaggagaagaagcttgagctaaagcttggaccacctggtgaagaagatgatgatgaatcgatgataagacacatgaagaaagaaccaaaagacaaatctatcctctctctcgctggcaaatacttctctccttcttccaccaaaaccacatcccataaaagaactgctcctggtccagtggtgggatggcctccggttcgatccttcaggaagaatttagctagtggaagttcttcaaagcttggaaatgactcaaccacctccaatggtgttaccctcaagaaccaaaagtgtgatgctgctgctaagacaacagaaccaaagagacaaggaggcatgtttgtgaagatcaacatgtatggtgttcccattggtcgtaaagttgatctcagtgctcataatagctatgagcagttatctttcacagttgacaagctcttcagaggtcttcttgcagctcaaagagactttccatcatccatagaagatgaaaaaccaatcactggattattagatgggaatggagaatatactcttacatatgaagacaatgaaggagacaagatgcttgtaggagatgttccatggcaaatgtttgtgtcttcggtgaagaggctgcgtgtgattaaaacttctgagatttcttcagcattaacatatggaaatggtaagcaagagaaaatgagaagatgaagaaaaagatcttttacagcttttagagaagtagagagatgttattaattgcattttgcctttaaactttgatgagtttttggtcttggaaaagtttctgatataagtctgatgta

SEQ ID NO: 127577 - DNA, 838 bp, Arabidopsis thaliana
  unsure (1)..(838): unsure at all n locations
nnnnnnnnnnnnnnnnnnnnnnnnnnnnnnnnnnnnnnnnnnnnnnnnnnnnnnnnnnnnnnnnnnnnnnnnatgaaaaaatgtattgctatcatcggatggaaagagaattaagatcttccttttcaccacaaaagtaacaaagagtggttggccatttttttatgtacactgacttctacaatctttgttgcattgtttattcaagaaccctaactcctacacaggtaaactgtaaggagagatgagcttatcggttttggtgtgagcagaggcagtctactcggcgaaagagtgttcattcaattgctcggttggaagcggctcaaccttctcggccttcccgtctttctttgggattatcagaccgtaacctccttcttttctcttgtacactatgtttatctcaccagtttcttcattttggaagccatagaagtcgtgactgactagttccagctgctcgactgcctcagcgacagtcaatggtggcatctcgaaagtcttggtacggacaatctccttgatcaaatcatcctcttcttcttcttctcctacgctcgagtcagtactgtcctcaacatcctccacaaccggctcaatcactggttcccttaccttcaatctgttgaaacctttcatgtgccttccatggtctgagtccttctccttgatcttcctcagcttcctctgtattatcgttgataccaagtcgatacaagcgtatactgtctcagcatcttcctcagcacgcacaacaccatgcttctttgtaaacaatgtcaccttacatcttcgaatcctagggnctttaccaaactctccaccacgnanagag

SEQ ID NO: 127578 - DNA, 772 bp, Arabidopsis thaliana
caaaagataaacctctctctctctatctatcttatgtcaaaagacagatttattaacaaacgcaaatcataaatctttttcttcttccgagaaagaatgtctaaatcatcgtataatcacatcttcatcttgatcttgtgtttatgtttgagatcatcatcagccttcacgaatctcaacaccttaagctttgaagaatcactttctcctctctttggagatgccaatctcgtccgttcacctgatgatctctccgttcgtcttctcctcgatcgctataccggttctggtttcatatcatcgaatatgtatcaacatggattttacagctccatgattaagcttcccgctgattatactgccggcgtcgtcgtcgccttttatacatcaaacggagacgtgttcgagaaaacacacgacgagttagacatagagtttctagggaacataaaaggaaagccgtggaggtttcagacaaatctatacggaaatggaagtacacatagaggtcgtgaagagagatatcgtctctggtttgatccttctaaggagtttcatcgttatagcattctctggactcctcacaagatcatattttgggtagatgatgtgccaataagagaagtgatcagaaacgatgcaatgggagcagattatccggcaaagccaatggctctttacgccaccatttgggacgcttctgattgggctacttccggcggcaaatacaaagctaattacaaatttgccccattcgtagctgaattcaaat

SEQ ID NO: 127579 - DNA, 1284 bp, Arabidopsis thaliana
  unsure (1)..(1284): unsure at all n locations
atgattctgagccaataatgataagaatcaccggctgttcacatgtggattgattacctcacattcatatttattacataaactcatctctctgtttttctttcttagaatcattcatatttcagacacaaaggcagagaaacaaattcttgtaacaatggcaggcagagagattctccataagatgaaggttggattatgcggatctgacacaggcagaggtaaaaccaaggtgtggaagaacatcgcacacggttatgactttgtgaaaggcaaagcgggccatccgatggaggactatgttgtgtctgagttcaagaaagtagacggccatgatttgggtttgtttgctatctttgatggtcacttagggcatgatgtagccaagtacttgcaaaccaatctctttgataacatactcaaagagaaggatttttggactgatacgaaaaacgctataaggaatgcatacatatcaaccgatgctgtgatattagagcagtcacttaaacttggcaaaggtggatcaacggctgtaacaggcattctgatagatgggaaaacgctagtgattgctaacgttggagactcacgtgcagtgatgtcaaagaacggtgttgcttctcaactctctgttgatcatgaaccaagcaaggaacaaaaggaaatagaaagccgtggtggctttgtatcaaatattccaggggatgttccaagagttgatggacaactagcggttgctagggcgtttggagataagagcttaaagatacatctgagctcagatccagacataagagacgagaatatcgatcatgagactgagtttatccttttcgcaagtgatggagtttggaaggtgatgtcgaaccaagaagcggtggatttgatcaaaagcataaaagatccacaagcggcagccaaggagttgatagaagaagcagtctctaagcaaagcacagacgacatttcttgtatagttgtaaggttccagtgatagataaacttttgttgtctataaactttaccattccggtgtgtgtgagagggagaaacaaaagacgtataaaacgcctaagctgtgtgatcaaagtcatgtcttgcttaaacaattccattgacaataaatgttctggccacaatgtaaaatccatggttgttgagccaatactctaaatggtttcttttaaacaaaaaaaaaaagnnnnnnnnnnnnnnnnnnnnnnnnnnnnnnnnnnnnnnnnnnnnnnnnnnnnnnnnnnnnnnnnnnnnnnnnnnnacaat

SEQ ID NO: 127580 - DNA, 639 bp, Arabidopsis thaliana
  unsure (1)..(639): unsure at all n locations
cnngtcgtatcaggcttctaccatgctggntgtaaggcctcatgcncacgnggtactttnagggacngaactganncagaaccacgaaaattgcacgctctgtggcttcctctcccctggtcaaagccacctgtttatgggagagatcccaaactggggacgcatagctgcagctgctggctatgccggggtttctttttcagatggattaagctgaagatatcccctcggcgagttctcactcatggagagtggtcaacctcttccgtttgacagggatggagcaagtaactacctcaagaaaaccggtgaggttcacggaacagttacaatcgatatatccgtaggtgatggtgcagccatcggaaaggcatggggatgcgatcttagctatgactatgtcaagatcaacgctgagtacacctcatagaactgagaccgagagacagagtttcatttactgtttttgtgttatatctcaaattataaactgaatttggttcaaataagcggacaacgtttcaacaataaagttccattgacttattctcaaaaaaaaaccaaaaaagggaggccgctctagaggatccaagcttacgtacgcgtgcatgcgacgtcaagctcttctatagttcacct

SEQ ID NO: 127581 - DNA, 548 bp, Arabidopsis thaliana
cagctctactacgactcactatttggaaagctggcacgcctgcaggtaccggtccggaattcccgggtctacccacgcgtgcgggacttgctaaatcaatagcttgggatggtgaaggtgctacatgtctcatcgaggtaactgttaaaggaacagaaactgaagcagaagcagcgaaaattgcacgctctgtggcttcctcttccctggtcaaagcagctgtttatgggagagatccaaactggggacgcatagctgcagctgctggctatgccggggtttcttttcagatggataagctgaagatatccctcggcgagttctcactcatggagagtggtcaacctcttccgtttgacagggatggagcaagtaactacctcaagaaaaccggtgaggttcacggaacagttacaatcgatatatccgtaggtgatggtgcagccatcggaaaggcatggggatgcgatcttagctatgactatgtcaagatcaacgctgagtacacctcatagaactgagaccgagagacagagtttcatttactg

SEQ ID NO: 127582 - DNA, 418 bp, Arabidopsis thaliana
gagagatcgaaatttcctcttctcaaaaaactcaaaatttgaagatgaaggacagagaggaatcatcatcgtcttcttcttcaatgacaacaaaaaaaactaatggaataatcaacaacggcgaacacgaacctcgagatatcaacatccgatcattctcttctgttccttcttctcctcgtaacgcttcttccaaatacgatttcgtcaaggtcaaagtatggcttggagacaacgcagatcactactatgttctgtctcgattcttagtctgtagaatgttaactgttactaagatcccaaatcatgaagctataaagatttctcttgaactcaagaagcttctaattgacaacagtcttcttgatgtctctcagtctgatttggaaaccaatttgtttaagctaatggagcgacg

SEQ ID NO: 127583 - DNA, 610 bp, Arabidopsis thaliana
aattatgtcccaagagtcatcatttactcgctttaaacaccatgtatcagctcatcgattcacgggtttcaactatttcatactgccgtagaggtttcaaagtggcttggacttgattgtggacgacttggatgaagaagaagatgaaggtcccgtgatctatgaggacaaggacagtgatgaagacgaagaagaaggaatagaggaagcaatggagacagatgaagaggcagacgactcagcagatgaagctgctgatggtgtgaatgattttgaaggatttgacgacatgagtgattgataaagctcctgaaaatggcaaaagttttgatttgtgtgaggctgatgttagatgttaagaatatggctaaaaggttcaatctttcgtcaagaagtctgtaatacgtaatggttatatcgatatgaacgagactttgtgctaaggaagagttaatttttaagattaaaaaaaaatagacaagaataaggtgtatctaaaaatggaaagaatgaagttggaaaggtcaaaaaaaaaaaaaaaaaaaaagggcggccgctctagaggatccaagcttacgtacgcgtgcatgcgacgtcaaagctcttctat

SEQ ID NO: 127584 - DNA, 723 bp, Arabidopsis thaliana
tcagctctacacgactcatattgggaaagctggtacgcctgcaggtaccggtccggaattcccgggtcgacccacgcgtccgtcgtactcgagtaggtctcagttacgtaaaggatcgagcttaaaagatgagtggagttgaagagaaagtttctggaacgacaaagacacctgcagatttcctcaaatccatccgtgggagacccgttgttgtcaagctcaattctggtgttgattatcgaggcactcttacttgtcttgatggatatatgaacatagcaatggagcagacggaggagtatgtaaacgggcagctcaagaacaaatatggtgacgcctttatccgtggaaacaacgttctttacatcagtacagtaaacatgactgtagcagacggagcctaggcccatcatgatcatcaacaacaacaacagtggtcatgttatggctgccatttttgttgtcttcttctacctcatattaaaagagtagtagacatgtaccaagattgtcatcctatgttcttcagtagatttttgggaaacagacatcacttttttcttagtaatatgaaactcttccatgtggcccccgaaaaaaaaaaaaaaaaaaaaaaaaaaaaaaaaaaaaaaaaacaaaaaaagggcggccgctctagaggatccaagctacgtacggcgtgcatgcgacgtcatagctctactataagtcacctagatcaat

SEQ ID NO: 127585 - DNA, 532 bp, Arabidopsis thaliana
gctctctacgactcactatagggaaagctggcacgcctgcaggtaccggtccggaattcccgggtctacccacgcgtggcgcgtcgtcacatggctcacattccgatgctcagattaataccacgtaaccgttccctatgacgttgtctccgttcttcgtctcttcaaccttcaattttgcaaaccctaaacgtttcgttcgttagtcgcgcgtactcagatttcaatgttgatcgtcgattatgtggttgattgctacgtcgttacccagatgttccattgatattctaggcatggcacaaccatgaagagctttctggcgtgagatacaatatcatctttgttggatcaacatgtcttttcatttggataagaccgagctgatgaagagtcattgactcattgttcctatagtgcatcaactaaatctttttgtatgaggacacactcaaaagcattctcccttcgagtggccaaaggttgctgtgctactttcttctcttctatggaggtggttcggatcttgggacca

SEQ ID NO: 127586 - DNA, 497 bp, Arabidopsis thaliana
aggtagcactatagaagagttatgacgtcgcatgcacgcgtacgtaagctcggaattcggctcgagtggtaaatacactcttggttacaagtctgttctcaaatccctccgtggctccaaagggaaactgattctaatctccaccaattgcccaccgttgagaagatcagagattgagtactacgcaatgctcgctaaagttggtgtccaccattacaatggaaataacgttgatttgggaacagcttgcggaaagtacttccgtgtttcttgtctgagcattgttgatcctggtgattctgacattatcaagtcaattcctggtgaccagtgatacaattttcagattttatttttcccagactttttacccgtctttgtattcgagtctctcaaaattttatgagcaatagacattgtgtttcttctttgtcaagttttcttatattgaggaccggaaaagaaatttctttaaaaaaaaaaaaaaaaaaagggcg

SEQ ID NO: 127587 - DNA, 439 bp, Arabidopsis thaliana
  unsure (1)..(439): unsure at all n locations
tnctcctttcctcctccaccgcacagatccaagacattttgattacactccatcgccggcgaaaatggtgacggaaaagaaaacgaagaagtctcatgagggtatcaacagtaggttggctcttgttatgaagagtggtaaatacactcttggttacaagtctgttctcaaatccctccgtggctccaaagggaaactgattctaatctccaccaattgcccaccgttgagaagatcagagattgagtactacgcaatgctcgctaaagttggtgtccaccattacaatggaaataacgttgatttgggaacagcttgcggaaagtacttccgtgtttcttgtctgagcattgttgatcctggtgattctgacattatcaagtcaattcctggtgaccagtgatacaattttcagattttatttttcccagacttttta

SEQ ID NO: 127588 - DNA, 541 bp, Arabidopsis thaliana
  unsure (1)..(541): unsure at all n locations
cgaagaacggaagaaggacttcactttcacggcgaagttaggattcgtgttctttaatcgtataggaggtctcggagattctgagacgctaatgagtcggaaggatgataatcagtcaggagaagttggtcgtactctggtggactttatggaagtagccatcacaatgattgtatacctcaaaggtttttacccatctgcggcatttgaaaggaggagatatatgaatgtggtggtgcaaagagcaaggcatcctgagctacgcgactatattcactctgctgcttctggacttcttccttttattgaaaagggtcttgttgagagagtagcagtccgtgtttttcagcgaggataatgttccctgtagagaggttcatcttcaagatcacgattaaacccgtcttgcgctgctttagtagaagagggtcaacttgaagtttcccttaggtcctnttaatcaagctttccggctcaaaatccctaggnaaccntttcccnaaaatntnggtngngggaccgctntntnggcactccntnc

SEQ ID NO: 127589 - DNA, 505 bp, Arabidopsis thaliana
  unsure (1)..(505): unsure at all n locations
atgatatgnccnnnnnnnnnnnnnnnnnnnnnnnnnnnnnnnnnnnnnnnnnnnnnnnnnnnnnnnnnnnnnnnnnnnnnnnccacgcgtccgcccacgcgtccgagacgaagaacggaagaaggacttcactttcacggcgaagttaggattcgtgttctttaatcgtataggaggtctcggagattgtgagacgctaatgagtcggaaggatgataatcagtcaggtaagttcctgattctaaattttaatgtcataaacatgataacatcagttagtagtttggcttcgaaattttgtaattttgggtgattcaggacaagttggtcgtactctggtggactttatggaagtagccatcacaatgattgtatacctcaaacgtttttacccatctggtgagtaaagagcgatttgtgagattgacatgcatctccaagtgattgatcaattttgtgtgttgtatgtaaagcggcatttgaaaggaggagatatatgaatgtg

SEQ ID NO: 127590 - DNA, 595 bp, Arabidopsis thaliana
cagctctcctacgactcactatttggaaagctggtccgcctgcaggtaccggtccggaattcccgggtcgacccacgcgtgcgcccacgcgtccgcggacgcgtgggagcgaatcaaggttcctccaaagaaggaagatgactttaattcttatttaatttccctttctccttttgcttcaccaaaatccacacattcatcaattaaaaaacaaaccctagattcttgaaaactggaactcattcacgaatcctaaaaagagagctcctttggttttcttgaaacccagattcttcaagctcagctatggcggtcttcaaaaccctagctttcctattcgttttaagcatcgtgatttaccaatcagtggctgttacagatgtaaattcatcgttttcctttaatgggtttgtgaaagctccaagctttgacaataatgttgctctgtttggagattcgaagctcgttcatggcggtccatcgatacaattgactgactcagtgagtcgcagtgaaggggcgggttatttacaagaaacccatcagactgttcccaggtaaagggggaacttttcccggcactttatctcggtgc

SEQ ID NO: 127591 - DNA, 832 bp, Arabidopsis thaliana
aatacgactcactttagggaaagctcgtacgcctgcaggtaccggtccggaattcccgggtcgacccacgcgtccgcccacgcgtccggaaaaatgtcggcaagacctgaaggaagtccgccggaggttacgctcgagacctccatgggtcctttcaccgtcgagatgtattacaaacactccccgagaacttgccggaacttccttgagctatcccggagaggttactatgacaacgttctgtttcacagaatcgtcaaggatttcattgtgcaaggtggggatcctacaggaactggaagaggtggtgaatccatttatggttcgaagtttgaggatgagataaacaaagagttgaagcacacaggagccggaattttatcaatggcgaacgctggtcctaatacaaatgggagtcaatttttcatcaccttagccccacaaccgtccttggatggaaaacacacaatatttggtagagtgtgccgaggcatggaggtgatcaagaggctcggtagtgtccaaaccgataacaccgacaggccgatccatgaagtgaagattctaaggaccaaagtgatcgattgattggggcagaggagtttttgtcaaggagaagaagaagcatttagtaaaccgtttatgacatgaagaactataactctgtgtactgatcccttgatactattgtagactggtttttgtctaagtcttgactctactttgatggaaaaaaatgattgaaatacgttaaaaaaaaaacccaaaaagggcggccgctctagaggatccaagcttacgtacgcgtgcatgcgacgtcaagctcttctat

SEQ ID NO: 127592 - DNA, 512 bp, Arabidopsis thaliana
  unsure (1)..(512): unsure at all n locations
nnnnnnnnnnnnnnnnnnnnnnnnnnnnnnnnnnnnnnnnnnnnnnnnnnnnnnnnnnnnnnnnnnnnnnnnnnnnnnnnnnnccacgcgtccgctccgataaccaaaaaatccctattttccgagatgaataatacacgagaagaagtaggggaattcactcaaatcttcaacgctttaatgagtcttatgaggaaatttatattcaaagttctacgcgtcggtccaatccctactaacatttctttcatcatggatggaaaccgtaggttcgccaagaaacgcaatcttgaaggcctagacgcaggacacagagctggtttcatatccgtcaaatatattcttcaatactgcaaagagattggtgtaccgtatgtcacactctacgcatttggtatggacaatttcaagagaggacctgaagaagtcaagtgtgtgatggatctaatgcttgagaaagtcgagctcacgatcgatcaagctgtatcagggaatatgaacggcgtgagaat

SEQ ID NO: 127593 - DNA, 542 bp, Arabidopsis thaliana
  unsure (1)..(542): unsure at all n locations
nnnnnnnnnnnnnnnnnnnnnnnnnnnnnnnnnnnnnnnnnnnnnnnnnnnnnnnnnnnnnnnnnnnnnnnnnnnnnnnnnnnccacgcgtccgaagaaaccctaagacctcttcgaaatctccccagaaacacttatttcatttcttccttggccttgactacgcgtctttccttttactccggaaggaagatccagaaaggttttctttcgatcgttgcttttgactatgcatagatctggtacaacaatggcgtggaacgtattcaagttctgtactgccttacgaggtcttggatcgatcatgatccttttggttcttggtgttgtcggtgttacttattacgctgtcgttttgactaattatggtcctgcactctctcaaggtggccttgattctcttgctgctctcactatcttaatcctcttccatttcctcctggcaatgcttttgtggagctatttctcagtggtttttactgatcctggtgttgtgcctcctaattggagaccatctactgatgaagaaagaggtgaatctg

SEQ ID NO: 127594 - DNA, 507 bp, Arabidopsis thaliana
  unsure (1)..(507): unsure at all n locations
atgatatnnnnnnnnnnnnnnnnnnnnnnnnnnnnnnnnnnnnnnnnnnnnnnnnnnnnnnnnnnnnnnnnnnnnnnnnnnnccacgcgtccgtcaggacttacaatgctaggctgcttggattagccaatgaggcgaaatcgaaagagctagtaaatctctttggagaacttaaggctagtgggctcaaacctgatgttttcagtttcaatgctatgattagaggatctatcaacgaaggaaaaatggacgaagctgaagcgtggtacaaagaaattgtgaagcatggttatcgtcctgataaagctacctttgctttattgcttcctgctatgtgtaaagcaggtgactttgagtctgcgattgagctcttcaaggagacattcagtaagcggtatcttgtcggtcaaacaacgttgcagcagttagttgatgaattggtgaaagggtctaagagagaagaagctgaggagattgtgaagattgcaaagaccaatgatttcttaa

SEQ ID NO: 127595 - DNA, 535 bp, Arabidopsis thaliana
  unsure (1)..(535): unsure at all n locations
nnnnnnnnnnnnnnnnnnnnnnnnnnnnnnnnnnnnnnnnnnnnnnnnnnnnnnnnnnnngtttatctcaccacgcgttaacgtgagcaaggttgttcccaatagtccaattttagttaagagtgttaatgcttcaagatctcgaagagttctgttggcgtatgttcatcatcctttagctgctaataagggttcatctattgaagagttaaagcaaggtctttgttgtacaaagactgtcacttttgttagttctcggagatgttctacattgtgctttgttggaaagtctcaagacactgaaactaattcccaagttgtacaaaaagaaggtgagaagcaagtgatgccgaggaggaaaagtagtaactcaagccaacttttggtggaatatgtgtctaatgatgctaagtttgtgaatgaaagagctcgtaatgactttgttcttctatctcgtgggattatgagacttgatgctcgtgcacgacaggatgttgccattcttggttccgggttccttaaactcgatgctcgg

SEQ ID NO: 127596 - DNA, 756 bp, Arabidopsis thaliana
ggtacgcctgcaggtaccggtccggaattcccgggtcgacccacgcgtccgacacaaggcaatcgccatttacgctcctcatgagggtggttacgaaggtcgttatcttaaccgtctcaaaatgcagggctactactttcttgacatctctgctcgtggccttggtgaccctgagactacccttctcaagaactaccctgtttgccctgctcatcttgggaaacaacctatagcaagatggtattatccaccagaagttgattacaggctcgctgctcttccccctagtgccaagggtcttgttgtatgggtcctcgaagcaaaggtcctctcaaaatcggagcttcaatttctcgctttacttccctctcttcgtcctaacgtcagggttattgctgaatgtggcaactggagaaagttcgtgtggaagcctctagcagaaattgcaaatctagctgcacaagagtaacttaatggcacaagtggagctaccagtgtatagtttttcatgaatgcatctcccgcaagtgtagcaatactcatcccatagtaaaagttaaaatctgtatttgtaacttggtagtatattcccatggagtagttaaagataatttctgactctgctttgtcacaaataaaagtatgtataatcagtaagattgataggacaaaaccaacaccaaaaagggcggaccgctctagaggatccaagcttacgtacgcgtgcatgcgacgtcgtagctgttctatagggta

SEQ ID NO: 127597 - DNA, 509 bp, Arabidopsis thaliana
  unsure (1)..(509): unsure at all n locations
tacgactcactatanggaaagctgctacgcctgcaggtaccggtccggaattcccgggtctacccacgcctggcgggggtgtttattatgagctacttccacaagaagtcattgttagtaaagaaatgggaagccgtgcaatatgtatacaacgtgtggcaccaccgtgttttgaagcctcgcaagtgaagaagatcaaaacagttggttcctttttggtgaatactaggagtaagagaagaagaagcactggtgtgaaatgtagcagcatagctgactacatcggaggtgacttggtgaagccggacatcggacaatggcttcaagacgtggaagaacacaaggcaatcgccatttacgctcctcatgaggggtggtacgaaggtgcgttatcgttaaccgtctcaaaatgcagggctactactttcttgacatctctgctcgtgggcttgggtgaccttgagactaccctttctcaagacctaccctggttggccctgctaatcttg

SEQ ID NO: 127598 - DNA, 476 bp, Arabidopsis thaliana
tcattcatcattggatgttctctactgttcttgaccccaatgttcaaatttataccacagtgtgctttagcagcaatagttatctctgctgttagtggtttggtggactatgaaggggcaatctttctgtggcgtgtggacaagagagattttactctttggaccatcactagcaccaccactttgttctttggaatagagattggggtcctcattggtgttggtttttcacttgcatttgttatacacgagtctgcaaaccctcatatagctgtcttggggcgtcttccagggaccactgtgtacagaaacatgaaacagtatccagaggcatacacttacaacgggattgtgattgttcgaatcgatgctcccatttattttgccaacataagctacatcaaggacaggctacgagaatatgaagttgctatcgacaaacacacaagcaagggcccagatatggagaggatcta

SEQ ID NO: 127599 - DNA, 809 bp, Arabidopsis thaliana
  unsure (1)..(809): unsure at all n locations
nnnnnnnnnnnnnnnnnctcttcctgattgactctatttaaaaacccgatcggaaaattcgaaatccgttcaattgccacgcgaatcgtcgaaaaatggatcaaacagtatcggaaaatctcattcaggtgaagaaagaatcaggcgggatcgccgtcatcacaatcaaccgtccgaaatctctcaattcactcacgagagcgatgatggttgatctcgccaaggcattcaaggatatggactccgacgaatcggtccaggtcgtgattttcaccggatcaggtcgatctttctgctctggcgttgatttgactgcggcggagtctgttttcaaaggagacgtgaaggatccggaaaccgacccggttgtgcagatggagcggttacgtaaaccgatcatcggagctattaacggttttgccatcaccgccgggtttgaactcgccttggcctgtgatattttggtcgcttctagaggagctaagttcatggatactcacgccaggtttgggatatttccttcatggggtttgtctcagaagctgtcgaggatcatcggagcaaacaaagctcgagaagtttctttaacatcgatgccactgacagcagacgtggctgggaagttagggtttgtaaaccatgtggttgaagaaaggagaagcgttaaagaaaagctagagaaatcgcagacgcctattaattcaagaatgaacaagggcatgggttctgaaggagttaaatcccgtatcaaatgatgggcccttaagcttgatcttggcatcctctcacactagaaaggagcgagctcc

SEQ ID NO: 127600 - DNA, 857 bp, Arabidopsis thaliana
  unsure (1)..(857): unsure at all n locations
nnnnnnnnnnnnnnnnnnnnnnnnnnnnnnnnnnnnnnnnnnnnnnnnnnnnnnnnnnnnnnnnnnnnnnnnnnnncaccaccacgcgtccgataatttcctcttcatatttcaagaaaactttaatctttttttgtgtgtagaattctatatttctggtaactaaatggcgagcgagggagttgtagttgtcggaggggagagagaaggggctgagatcgtgtacggggcggaggaatgttacaagcaatcattggagcttctagaggagctagggtttccaaaaggagtcatgcctttgaagaatcttgttgagtgtggaagagttagagccactggttacgtttggatgaagcaagacactccttacgagcatttcttcgaagccaccaacactcgtgtctcctacggtctcgaagtcaccgcctatgtcgacaagtgttgtatgaagaagatgacaggagtgaagagtaagcagatgtttttgtgggtaccgatcgtggagatgagtatggaggagccaaaaagcaagaagatttacttcaagactcctatgggaatcggcaggtctttcccccgttaccggattcatggacgaggaagagaaacgcaacttttacttggagaatcccaaaaactaaaccaactaataattattcttatgattattacattttgtggtgctttttattttatttcttgtaaggttgctctatgctattaaattctatcaataatacattttctgggagtgttgattattaaaaaaaaaaaaaaaaaaagnnnnnnnnnnnnnnnnnnnnnnnnnnnnnnnnnnnnnnnnnnnnnnnnnnnnnnnnnnnnnnnnnnnnnnnnnn

SEQ ID NO: 127601 - DNA, 485 bp, Arabidopsis thaliana
actcactttagggaaagctcgtacgcctgcaggtaccggtccggaattcccgggtcgacccacgcgtgcgcccacgcgtccgaaaaatcgtttttttttttttttgccaggcttctctcactctccttcgccgcggaatcgtctctcggagccgcgaaaggactcttagggttaaagattcttccccaaatctccttctctcttcctcagctgatttcgactccgatcaattttctaggtgtttgaaggcatttgaaaggatgggagacaatggcaaagatgaaattatggtcgaggcatctcaatgcgctggtgctatggttgagataaagataaagacgttggattctcaaacgtacaccttacgtgtagataaatgtgtccctgttcccgcattgaaggagcaagttgcttccgttactggtgtcgttacggaacaacaacgcttgatatgtcgtggaaaagttatgaaggatgatcaactc

SEQ ID NO: 127602 - DNA, 1150 bp, Arabidopsis thaliana
  unsure (1)..(1150): unsure at all n locations
ggtcttaagatccagatccagactttgggtgatactgatccacgagttggtgaaacttgcaggtacttagcagaagcatatgttcaagcaatgcagttcaataaagcggaagagttatgcaagaagactctagagattcaccgagcgcatagtgaacctgcttcactggaggaagcagctgataggagattgatggcaattatctgcgaggctaaaggagattatgaaaacgctcttgagcatcttgttcttgctagtatggctatgattgcgagtggacaagaatctgaggttgcatcgattgatgttagtattgggaatatttacatgtcgctgtgccggtttgatgaagctgtgttttcatatcagaaggctcttactgtgtttaaggcttctaaaggagagactcatccgacggttgcgtcagtgtttgttagattggctgagctttaccatagaacagggaaacttcgtgagtctaagtcttactgtgagaatgcgttgaggatatacaataagccggtgcctgggacaactgtggaggagattgctggtggattaactgagatttctgctatttatgagtctgtagatgaacctgaggaagcattgaagctacttcagaagtctatgaaattccttgaggataagccaggacagcagagcgccattgcagggttagaggcacggatgggagttatgtattacacagtggggaggtacgaggacgcaagaaacgcgtttaagagccctgtgncaaagctacgggcagcaggtgagaaatctgccttcttcggtgttgtattaaaccagatgggactagcctgcgttcagcttttcaagattgatgaagcgggtgagctgtttgaagaagcaagaggtattcttgaacaagaacgtggaccgtgcgatcaggacactctcgggtgtttatagcaatctagctgctacctatgacgctatgggaaggatagaggatgcgattgagatattagagcaggttctgaagctgagagagggaaacctcgggccttcgatcccggtttttaagccggnagaacgtttgccaccttttaagaantngcggtccggacttcaagccagngtccaatntnttnccatcaagccccagaantttntctanattttc

SEQ ID NO: 127603 - DNA, 565 bp, Arabidopsis thaliana
  unsure (1)..(565): unsure at all n locations
gaggtattcttgaacaagaacgtggaccgtgcgatcaggacactctcggtgtttatagcaatctagctgctacctatgacgctatgggaaggatagaggatgcgattgagatattagagcaggttctgaagctgagagaggaaaagctcgggactgcgaatccggattttgaagacgagaagaaacgtttggccgagcttttgaaggaagctgggcggtcgcggaactacaaagccaagtcgctccagaatctgattgatccaaatgcaagacctccgaagaaagagtcttctgctaagaaatggcccagcctcggtttcaagttctgaggaaaaaattatcatataaaataaatcatccacatatatattcaatattttattttattgttattgttatattttttatctgatctattttctgtatcataatctgaggttgatgaattaatttcatgtatagtgtttttatttgagtttggtgaaatactgccaagatggtgagctgtttgtttgagtttgaaatttctttaattcaatcactttttatcttcttctgatnnntt

SEQ ID NO: 127604 - DNA, 463 bp, Arabidopsis thaliana
caatttcgtcggaagaagaaatcgccatggtagccgcaacagtaaacctcgcgaacatgacatggacgtcgttaaattcaaatccagcaatctctttctccatgttaagcggaatcagaaacttgggcatgttacctttcaggagatgtctaaagccgacagttatcggaatcgcgtcgtggccaccactccgttgttcttctgttaaggctatgtcttcatcatcgtcttcgtctggatcgacattggaggagactgttaaaacgactgtggcagagaaccctgtcgttgtttactccaaaacctggtgctcatactcgtctcaagtgaagtccttgttcaagagtcttcaagttgagccactggtttgttgaattggttcaacttggttcagaaggggtcgcagctgcagaatgtgttggagaaaattactggacaatacactgttcccaatgttttcatc

SEQ ID NO: 127605 - DNA, 665 bp, Arabidopsis thaliana
  unsure (1)..(665): unsure at all n locations
nnnnnnnnnnnnnnnnnnnnnnnnnnnnnnnnnnnnnnnnnnnnnnnnnnnnnnnnnnnnnnnnnnnnnnnccacgcgtccgcggacgcgtgggcggacgcgtggggtgaaagtttcctcgtcgacgacttcttcatcgtcatcgtcatctccagatgaagaaagcgatctccagaatctcctcgaggaatcagattctcaaatcgaccaatttcgtatcagcgacgaggcggcagagcaacgacctaccttcgatgtggagagtctccgatcacgtttacgacggagttttaagctcaatctcactaagaaacagtccatttttatcttcctccctatcgtcatcatcctcatctacttatctaccgatttcagcaattacttctccgtcaaagttcctaattctgcgttccggtcaaatacattaacgggtcgggttcatgaatcggatcttcaagcactgtatcttctcaggaagcaagagagcgatctcttctctatctggaaccacactgtatcaaatttatcaacgatcgacgacgtgaaatctgcagttttccggcagatttcgttgaatagacagatccaaaatgcattactatcgccgcataaaactggaaatgttgatatcggtggatcatcagatgggtacttcgccggcggaa

SEQ ID NO: 127606 - DNA, 1209 bp, Arabidopsis thaliana
  unsure (1)..(1209): unsure at all n locations
nnnnnnnnnnnnnnnnnnnnnnnnnnnnnnnnnnnnnnnnnnnnnnnnnnnnnnnnnnnnnnnnnnnnnnnnnnnnnnnnnnnccacgcgtccgcggacgcgtgggcggacgcgtgggggaaactagaatctattctctacttttgccagcgcatgactaatgccgctgtgatagccatgtcagagaactgtccagagcttactgtgtttaggctgtgcataatgggtcgacataggcctgaccatgtaacaggaaagcctatggacgagggatttggtgccattgttaaaaactgcaagaagctaactcgccttgcagtgtcgggattgctgacagatcaagcttttaggtatatgggtgagtatgggaaattggtccgtacgctttcagtagcttttgcaggggacagtgacatggctctgagacatgtcctagaaggttgccctagactgcagaaacttgagataagggacagtccctttggagatgttgcattacggtctggtatgcatcgctattacaacatgaggtttgtttggatgtcagcatgtagcttgtctaaaggatgctgcaaggatattgcacgagcaatgccgaatctagttgtggaagtaattggatcggatgatgatgatgacaatagggattatgtcgagactttatacatgtatcggtctcttgatggtccaaggaatgatgcaccaaagttcgtcacgattttatagaacgaggagcatttccgtgtttccgttttttaagacgggaatgaaatgggtaagtgtaggaagctcagatgatgatggtggtggcatcagaggcacactacatgattgttgatgatgaatgatggtggttgggacttgggaggaatgcaagattgttgtatcattattttctttttttatttttgggttcaaaagatgttatttgggtggttaggtggaacagtggatgtatgttttgggagcatcggtgttagttagacagctgagttggttctaataagctgcacttttggctctctctagttgttgttgttgagaaactaatgagacatctctctcttttgtctttcccatttttaaataattttgagatgtttcatcttaaaaaaaaaaaaaaaaaaaacccaaaaggcgaccgctctagaggatccaagcttacgtacgcgtgcgtgcgacgtcatagctcttnctatagtgcaccta

SEQ ID NO: 127607 - DNA, 473 bp, Arabidopsis thaliana
actattaggagctgctcctgcagtccgtcccgatcccggtcaccacgcgtgcgcagattcatgactgctgttgaattctcaaagcaacatccttatggtaaagctgtggggttactcgatttgaagttcggttctattgaggcaaatgagaaatggctggttttgcctggaatggtatcttctttcatactcagtgatcttcttaagaaggaaggctttagtgcagccgcaaaagacacggtgaaagctaatggaataacagaggaaagtacggagattgatgttttgagtcaagaaaagctagaagaagaaacaatgatggatgtggatacgactacaccagttgctgtagcggccgagaagatcaacggtggtgctaggtgcttttcgaaggagctaagtgggaacatgattgaagaagaaggtggtcactgtggtggttgtggaggttgtggtggatgtggagggtgaag

SEQ ID NO: 127608 - DNA, 522 bp, Arabidopsis thaliana
  unsure (1)..(522): unsure at all n locations
agggagatatcaggatgaactgtcaaccggttttggagccactgtcacagtaaaagtnatttatnatcttctatctatatctnccattggagcttctttggttttnccatggtctgcgctaaacaaagacaagtcctttctagctgaagtaggtgattgcttgtatttaattggctctgcgtacatactttgctggtgtcttctacagcaacttctccaacaaccaatcaactcgggccccatacttttgctgctcctccaaatcttagcaattttatgtctttcttctagtgattttcaagttaatgaatgggtcgagattactgcactctattacatgggaatggcaggtcactttgctcttgggaacagcaacactttagcaacaatcgattgttgctggtgcttttatcggaatctctaggcattctacaatactctctgggatcttgatgttcatgatcacctatgcatctcccatgctgttccttctatccctcgtcatgtaaattggtgcaaatc

SEQ ID NO: 127609 - DNA, 791 bp, Arabidopsis thaliana
  unsure (1)..(791): unsure at all n locations
cgactcactactgggagagctagctngcctgcaggtaccggtccggaattcccgggtctacccacgcgtgcgaaatcagcgaaaccgaagcaaccggcgttaccgatgattcggctccagcgattgagactgaaactgtttctgatgcgatggagcatacagcgatcggagtggttgaatcggtggaaggagccatagaaggagcagagaaatgggtgggtgatttgcaacggacggtgaaggaatcgaaggataccgcaatgcgttctgctcgttccctccgtgaaaattctacctctcagttccgctctatacaggatttcattccacatgctttgactcagtataagacctatgagaatgctttcttcagtaaagttacagacgaattgctatcaagcttagagctgaagtggcttccatgacttcgcttttgagacagaagaggattgcattgaacaaaaggatcatgggtatgtcggacctaggagtttccgtctgatatatccaacacaaatccacaatttcttgggttttcgcaaccaaagtttgttaggtattttccaattgaatcgcagtgtactctcgtccatcgaacatccaactctgtctgaaaccaaaatctgagcttgagacagaacttgtatactgtgtttttgcctgcttcctaagatttctcgctcagagagaattaattgagtcaaaaaaaaaaaaaaaagnnnnnnnnnnnnnnnnnnnnnnnnnnnnnnnnnnnnnnnnnnnnnnnnnnnnnnnnnnnnnnnnnnnnnnnn

SEQ ID NO: 127610 - DNA, 437 bp, Arabidopsis thaliana
ggagaaaggcaaatcggagacgatgagcgaaaccgaagcaaccggcgttaccgatgattcggctccagcgattgagactgaaactgtttctgatgcgatggagcatacagcgatcggagtggttgaatcggtggaaggagccatagaaggagcagagaaatgggtgggtgatttgcaacggacggtgaaggaatcgaaggataccgcaatgcgttctgctcgttccctccgtgaaaattctacctctcagttccgctctatacaggatttcattccacatgctttgactcagtataagacctatgagaatgctttcttcagtaaagttacagacgaattgatatacgcaaaagagcatccggctgctgctattgggattggtgtcgctgctagtctcgttctgatgcgaggcccaagaagattcttgtttcgtaata

SEQ ID NO: 127611 - DNA, 562 bp, Arabidopsis thaliana
  unsure (1)..(562): unsure at all n locations
ggaggcacaattcttgaaagctgagaagcatgtncaggagttaaacatgtctgtagacttgatgaaaaaggagagcaggaaattncttgagaggacggctttagcaggggaggatatgaaccgtggtccctctggagctcatgaactctggaaccgatatccaccgtcttgctaaagtccgtccacaaagctgaatgtgaagctgctgatttgatggccggacttcggcaaattcctggaagggatgctatcaagcttagagctgaagtggcttccatgacttcgcttttgagacagaagagggttgcattgaacaaaaggatcatgggtatgtcggacctaggagtttccgtcctgatatatcccaaccacaaatccacaatttcttgggttttcgcaaccaaagtttgttaggtattttccaattgaatcgcagtgtactctcgtccatcgaacatccaactctgtctgaaaccaaaatctgagcttgagacagaacttgtatactgtgtttttgcctgcttcctaagatttctcgctcagagagaattaattgagtcac

SEQ ID NO: 127612 - DNA, 530 bp, Arabidopsis thaliana
  unsure (1)..(530): unsure at all n locations
cagctctctacgactcactatanggaaagctggcacgcctgcaggtaccggtccggaattcccgggtctacccacgcgtccgctgctttcaagtctgaaacttgaactctgtttctaatttacttcaaaagctatggcgtcgacttcaacatcatctttaatggcttctaaaactgtaatctccaaaacagctctgttttcttccttaccgggaatagtcagccggagttttttaacattcgcaccggcttctccttccgttaaaccccttaggataagatcttcaaatgttactaagttcgatgaagtaaccaacagtcttgacgaagacatggaccagattcgacggttacaaaacggttctgacgtgagaggagtcgcattggaaggagagaaaggtcgaacagttgacctaacgcctgcagctgttgaagcaatcgcagagagctttggagaatgggttgcagcaacggagagtaacggaaacggcgtcattaagatttctctcggacgggatccacgtgtttccg

SEQ ID NO: 127613 - DNA, 692 bp, Arabidopsis thaliana
ttgctctctggcaacaatttctctcaaagatggcgttttttgggctctcccgtgtttcaagacggttgttgaaatcttccgtctccgtaactccatcttcttcctctgctcttttgcaatcacaacataaatccttgtccaatcctgtgactactcattacatatatcctttcactaagtgttatccttcatggaatgataattaccaagtatggagtaaaggaagagaattgcatcaggagaagttttttggtgttggttggaattacagattaatttgtggaatgtcgtcgtcttcttcggttttggagggaaagccgaagaaagatgataaggaggagagtgatggtgttgttgttaaggaagcttcttggatagatttgtatttaccagaagaagttagaggttatgctaagcttgctcgattggataaacccattggaacttggttgcttgcgtggccttgtatgtggtcgattgcgttggctgctgatcctggaagccttccaagttttaaatatatggctttatttggttgcggagcattacttcttagaggtgctggttgtactataaatgatctgcttgatcaggacatagatacaaaggttgatcgtacaaaactaagacctatcgccagtggtcttctgacaccatttcaagggattggatttctcgggctgcagttgctt

SEQ ID NO: 127614 - DNA, 872 bp, Arabidopsis thaliana
  unsure (1)..(872): unsure at all n locations
cagctctctacgactcactatttggaaagctgacacgcctgcaggtaccggtccggaattcccgggtctacccacgcgtgcgcggacgcgtgggcggacgcgtgggcggacgcgtgggtcttgtttggtctggtaggggactgcagatgaagtggttgattgttctcatggaaaacaactttgggaactttcaaaagaaaagtatgagcctttatgggtatctggaggaggacactgcaatctagaactctatccagagttcataaaacatctgaagaaatacgtaatttctatttccaagggaccaagaactggttcgaacaagactgcaacgacggatgcagccaaaaaacagagcaagcctgcagagaacgggcgtgctgatacgtttcaacttggctgttgccttccagaagtttctagaaacagtgtagacagtcagctggagaaatctaagaagactagtaaacccgagaagtctcgtatgagcattgataggtttagaaggaaaaaaggttcagtctggtgacatataaaggtccatcgacaaaacaggttatttgtaactcctgtttctgtaattcatatgtttctgcataaaattatgacgtgtggttttgttttttttctttctcaggtttgtgtatgtattttctaatagaaacagatcaaactcaaaagtcttgatttcatatttggttgtaactttgtcatggtacaaaacttgtaatcactgacaagtttgattttagtttggacttgcttttctcgaaaaaaaaaaaaaaaaaaaaaccccannaagnnnnnnnnnnnnnnnnnnnnnnnnnnnnnnnnnnnnnnnnnnnnnnnnnnnnnnnnnnnnnnnnnnnnnn

SEQ ID NO: 127615 - DNA, 516 bp, Arabidopsis thaliana
  unsure (1)..(516): unsure at all n locations
nnnnnnnnnnnnnnnnnnnnnnnnnnnnnnnnnnnnnnnnnnnnnnnnnnnnnnnnnnnnnnnnnnnnnnnnnnnnnnnnnnnccacgcgtccgcctgaatccattacttttactccaaaatcattaacaatggactcaggaagtgcagtggacatcatttcgacgctttcagacttcctgctcgtcctgatcatttcgaacctttccttcaaggaggctttgagcaccagtcgcctttccacccgctggagacacatatgtcgcgaaacgagaaacatctctttcagagaggacgagatcgtgacattcgctgatgattccgttgctcgctattaccaaagggctgcattagttgcctatatggttggttgggttaacaattttaccggtggagttgttgaaagcttcgagcttcgtctctctaattcgtatgcttttgaagaaggggtcaccacactgatcgaattcgctgtctccaagaatgtcaagcatctttttcttgacctctcagaacc

SEQ ID NO: 127616 - DNA, 581 bp, Arabidopsis thaliana
  unsure (1)..(581): unsure at all n locations
acgactcactattgggaaagctggtccgcctgcaggtaccggtccggaattcccgggtcgacccacgcgtccgcccacgcgtccggtgttgaagtcacagagcctgcgagcttcaaagtgaaagaagacaccaacatgtcccttatcgagtatgagctcgtaaacgtcgttgaatgagtgacaaattcctcgaaataccactaggagaaacgccctcaagaataaacaagtcaaatccgtaaccgtttatgttagcgtcaagaaaagagttaaaccctgatcagctgatgtcttgcactaagctatgtaagagtgatgatggctctaaaagttgaatgcagagcttttggcttaggttatgacttcgtgataccttttcttttgtaatgtcatcatacacgctaaggcttttgtgctacattattactctctttgtctttgcctcgtttccaaaaatccatattcttagtgaagtaaacagtaactgcaagccaaannnnnnnnnnnnnnnnnnnnnnnnnnnnnnnnnnnnnnnnnnnnnnnnnnnnnnnnnnnnnnnnnnnnnnnnnnnnnnnnnnnnn

SEQ ID NO: 127617 - DNA, 459 bp, Arabidopsis thaliana
ctcgattgtttttggaaatcgtcaatcagatatttctcgttcgtctccgccttcgatttatccaaaggctcttgttattgaaaatggcagattccaccaaagcagggttgaagaagccagctttcactaaggttgatcagctgcgtcctgggactagcggacacaatgtcaatgtgaagattgtcagcacgaaaatggtgttacagaaaggtcgtgctgatggtcctcaagctcgccagttgcggatttctgaatgcattgttggtgacgagacaggagtgatcgtctttaccgcaagaaatgaccaagtgggacttaatgaaagagggatcaactgtaactctacgcaatgcgaaaatcgacatgtataaaggatcaatgaggctagctgtagacaagtggggtcgtgttgaagtcacagagcctgcgagcttcaaagtgaaagaagacaccaacatg

SEQ ID NO: 127618 - DNA, 915 bp, Arabidopsis thaliana
  unsure (1)..(915): unsure at all n locations
ctatacgactctcttagggaaacctggtacgcctgcaggtaccggtccggaattcccgggtcgacccacgcgtccgccataaacttattcttgggctactttcaacctcaggaagggaaacctgcgctctgggagctggattctgattactatctccatgtttcagggattggagatgatattttcccagatatcggggtccattccattgctaaacctatgagtggtattggagtcaatcttgcaccagtgccagctttcagagacgacttctcgcggaagaagctgacatcgtttgacaaactgatagagcagacatgcagttcaataaagaacgtgaggctttgtagtgagacagaccaaaggccaggtggcaacacctggaagcactggtggagacttcctgatgcagctgagattcaactcaagagccccatttggctgtttggttcaagaaagcccgaagagagtagctctgccacaattctggtgcagacgatagggagaaaggagtaacctcgactgagagagcaacgatntctgcaacttggactggctntctaagtccgaccgtcatcaaggagatatcttccaaaggtatctatcgattacatcaaccaatgaacccatgggttgtattggtggcctctcctcggggaccagatgaaacagcgaatttacagacattcgcccaatttgtcagtgtccacgatggaccattgagacgatctgagtttgacaaacttgcggagttctcgctgaacacatcatgtatggcttgagaagagaacgggtggaagcattcatgatcctcaacggagcattcgatcttcatgatgcaccttgtaggtctggtgctacaatgttgcgatatagccaagtattatcaacatattcgccaacgaggaccttttg

SEQ ID NO: 127619 - DNA, 655 bp, Arabidopsis thaliana
acggacgcgtgggctcattagggtctctctgtttctgggcaaattttcttcatctccgccgttttgcttcaatacagatttctgggattttttttaccgatcaaatttaggttttcgttttcactcagaaccttagaaaccctaattttgatacattagctttagagaaccttccatcggatccgtgtacaataaaaaagtttgcgttttttttttccttaaatcgattgaacgtgtttgaagatgcctccaaagcaacaaccaaaggctgatttggcgaagaagcagaaacaagtggaagacaaaactttcggattgaaaaacaagaacaagagcaagaatgttcagaagtatgttcagagtctcaagcaatctgttcagcctaaacccgatgcaactaaagctgcagctaagaaaaagaaagaggaagagaaagcgagagaacaggaattgaatgagttgttcaaggtagctattagtcagcccaaagttcctgtaggtgtggatccaaagtctatactctgtgagtttttcaaggccgggcagtgtcaaaagggtttcaagtgcaaattctctcatgatttgaacattcaaaggaagggtgagaagattgatatttacagtgatacgcgtgatgaagatggagatatggatg

SEQ ID NO: 127620 - DNA, 604 bp, Arabidopsis thaliana
  unsure (1)..(604): unsure at all n locations
cnnnnnnnnnnnnnnnnnnnnnnnnnnnnnnnnnnnnnnnnnnnnnnnnnnnnnnnnnnnnnnnnnnnnnnnccacgctgccgcccacgcgtccgatgatgttgaagatgttgagaaacatttcccgggtacactaacagccattagagactggtttagagactacaagatcccagatggaaagcctgctaacagatttggtcttggagacaaaccagcaaacaaagactatgctttgaagatcatccaagaaacaaatgaatcatgggctaaacttgtgaagagatcagttgatgctggagacctttcactttactgaacatattttgcaatgtcgacttatgaggtcgaataatgaatagactcaagattcctatatcattcttgttgtttcctttcaattgagatgtaaacattgggatttggattttgtttttcaccattgatgactgagaagtaataaaatgactttctgctttgggaataaaaaaaaaaaaaaaagnnnnnnnnnnnnnnnnnnnnnnnnnnnnnnnnnnnnnnnnnnnnnnnnnnnnnnnnnnnnnnnnnnnnnnnnnnnnnnnnnnnnnnnnnnnnnnnnnnnnnn

SEQ ID NO: 127621 - DNA, 541 bp, Arabidopsis thaliana
  unsure (1)..(541): unsure at all n locations
gggagtgaagggaaaacaaaacagagaaaaagataagagatatatggatacacaaaggttgccgaagaaagaagaagaagaagaaggagatcatctactttcttcaaccttcgagtccatcaatggtcactctcgagaccaacacaatcattctatagatgatttcgagagcattttcgacatcaccattgacaatttaagctgctctaacgaactcacgtgggatttctgggaagaagacgaagatgaagatgtaggggaagaagaaaaaagatcgagtactgatcaagaaggctcaagttttgggttttgggagaataagccgacggattatgaagacaaagacttgggtctgaagctgaatctgaaccatcaagaagttatcgatgcttggtctgatcaccagaaacctctgtggacagatacttcaactctggacaattccgtttatgttagtttttatgaatctctttcctgttgtgcaagttatgagtagtgattaatcttgattagtcaatattaatgatttagcagttnnana

SEQ ID NO: 127622 - DNA, 559 bp, Arabidopsis thaliana
  unsure (1)..(559): unsure at all n locations
atgannnnnnnnnnnnnnnnnnnnnnnnnnnnnnnnnnnnnnnnnnnnnnnnnnnnnnnnnnnnnnnnnnnnnnnnnnnnnccacgcgtgcgcgagaacgaatcagagatttttaccgatatccgtcgctctctcctcctccgtcgtcgtgcttcgcttctcttgcgtgtcatctttttcgacaaacccaaaatcaaggcagaatctgataatcgaaaggacccagtagaaaacttcgcgaggaatcaagggttagaagccctaacttgatcgctaattcgagaatgaagcatttggattgagggcaaaaatcgacgtttttaaaaagtctgaactgaggtggattcgttgagatcatctgatcaaatgctcttcgtggaagtaaacatttgaggcaaaccaggtcggtaacaaggtaagggggtatgtcgagcaaaacccggaatatgcttgaaggtttggttagagatacttcttttaaatggttgctcgggaaacaaagttctttcgatgaagaaatcgaggaaatgggaagatctccatcagctgggactaattg

SEQ ID NO: 127623 - DNA, 704 bp, Arabidopsis thaliana
tatacgactttcttagggaaagctggtacgcctgcaggtaccggtccggaattcccgggtcgacccacgcgtccgagatagtttgcggtccattatgcacctcgaatccgttaacaacagttgaatggtatttggtgtttacatctctctgcatcgttctgtctcagctaccaaacctcaattctattgcgggactctccttaataggagcagtgactgcaataacttactccacaatggtttgggttctctctgtgagccaaccaagaccagccactatctcatacgagcctctttctatgccttcgacttctggttcactcttcgctgttttgaatgctcttggcattatagcttttgccttcagaggtcacaacttggttttggaaattcagtcgacgatgccatcaacgtttaagcatcctgctcacgtaccaatgtggagaggagccaaaatctcttacttcctcattgctctgtgtatctttccaatctccatcggaggcttttgggcttatgggaaccttatgccttcaggaggtatgcttgctgctttgatgcattccacattcacgatatcccgagaggctaattaccgacggcatttctccttatagtcttcagctgcttgagcagttttcagatatactccatgccctgctttagacagctttgaagctggctacacaagcagaaccaacaag

SEQ ID NO: 127624 - DNA, 754 bp, Arabidopsis thaliana
gccggccctatacgacttacttagggaacgctggtacgcctgcaggtaccggtccggaattcccgggtcgacccacgcgtccgattttaatttccaatggttttgcgtggcgaagagcttgagtttaatctaagagaatgggcacgacaaggccatttaactcgcgaagatcaaagttctagaaggttctctgcctcttgtatccgaagctttccgagaagaccacaagtcttgtacaacaaacgtcaccatctctagtactgcctcttctccgggttactccctcaaagatgagatcgatccatcaaattattccttcagtactgcactcaaggcattgcatgcaatatcagtgtacatgaagaattgggattggtcgataccagacggagttgagctaaactccaaatggaacgaagcagacaagtatatatgcaatcctttatctggtgaagttccttaggagtgcttgtcttctaaaaccctaacttcacgatcttgcataaactcatccaccaagcatgctccactcatgattttaccttctaataataatctcaacattccaagaacggttaatcctaaagcgagaatcatgcatgaggatcctagacctcccgatcctgttctaattcaagataagaaaggagtggggtctaaccgagatgtcgagactgcccagtgaattgctatggccctaaagaccacgccgatcatggagagattaacgaacgacaggtgggtgctgttgatt

SEQ ID NO: 127625 - DNA, 718 bp, Arabidopsis thaliana
  unsure (1)..(718): unsure at all n locations
gccagccctatacgactttcttagggaaagctggtacgcctgcaggtaccggtccggaattcccgggtcgacccacgcgtccgcttgaatccccagagtgcgacgaaaatgcagcagcaagggagtaagagtggatctgagatggaggtgacatgggaggaccagcagaacattaatatcttcagccgtctcaacaacagagtccatgacctcgatgacgatatcaaatccgccaaggaaaagtgtgaaaatctagaggatgcagggaacgagttgatccttgctgatgaggagatggtgcgttttcaaataggagaagtgtttgctcatgtgccgagggacgacgtagaaacaaagatagaagagatgaaagaagcgacctgcaaaagccttgagaaactcgagcaagagaaggaatcaattgtaacacaaatggcagcgctgaagaaggtattgtatgctaagttcaaagattctatcaatcttgaagaagactagttagtagttattcccaactttgtttttcttctattgcatcagtttatgattctactgtgagtgtagacccaaggattcttgaatttaacatactggttttgttcaaaaaaaaaaaaaaaaaaaggnnnnnnnnnnnnnnnnnnnnnnnnnnnnnnnnnnnnnnnnnnnnnnnnnnnnnnnnnnnnnnnnnnnnnnnnnnnnnnnnnnnnnnnnnnnnnac

SEQ ID NO: 127626 - DNA, 841 bp, Arabidopsis thaliana
  unsure (1)..(841): unsure at all n locations
atgattcttcaggtctctacgactcactatttggaaagctggtccgcctgcaggtaccggtccggaattcccgggtcgacccacgcgtgcgcgaacaagtcgtggtgagattttaggaagacgaagaagatggagagtatctggcgaatcgcgacgggacaagatccgagccgtgaagattacgaagggatcgagttctggtcaaaccctgagcgttctggttggctcacaaagcaaggcgattacatcaaaacctggcgtcgtcgttggttcgttctcaaacgagggaagcttctctggttcaaagatcaagccgctgctggaattcgtggatctacgccgcgtggtgtgatctccgttggtgattgtctcaccgtgaaaggagctgaggatgttgtgaataagccttttgcttttgagctatctagtggtagctataccatgttcttcattgctgataatgagaaggagaaagaagagtggattaattcgattggaagatcgattgtgcaacactcgaggtctgtgacggattctgaggttctcgattatgatcacaggcggtgattactatcattatgtatgattttgttggccttagggttttcgtggaatgtaacactctcttgtcttttaagttatgatgttattgtaccgtgatcgtgatgtatctaatgcctcaagtttcaaaaattgattctctctttgttatgatttttgattccagtgagttcctgtttatgttttgaaaaaaccaaaaaaagnnnnnnnnnnnnnnnnnnnnnnnnnnnnnnnnnnnnnnnnnnnnnnnnnnnnnnnnnnnnnnnnnnnnnnnnngcat

SEQ ID NO: 127627 - DNA, 550 bp, Arabidopsis thaliana
acgactcactatttggaaagctggtccgcctgcaggtaccggtccggaattcccgggtcgacccacgcgtgcgcaaaagtcaaaaggtttcgctttctagatcatgtccacatttctcctaacatggattattatgaccgtcgcgttaagcgtaacgctttttcttatgccgcaacaaacaaatgcggctagagcgttcttcgtgtttggcgactcactcgtggacagtggtaataacaattacttagtcaccactgctcgtgccgattctccaccgtatggaatcgattatccgactggtcgaccaaccggtcgtttctccaacggcttgaacctccctgacatcatcagtgaacaaattggatctgagcctacattaccaattcttagccctgaactcactggagagaagctattgatcggagctaactttgcctctgccggcattggaattctcaacgatactggcgttcaatttttgaacatactaaggatcggtaggcaattcgagctgttccaagagtatcaagagagagtgagtgagattata

SEQ ID NO: 127628 - DNA, 574 bp, Arabidopsis thaliana
tgatacttcagctctctacgactcactattgggaaagctggcacgcctgcaggtaccggtccggaattcccgggtcgacccacgcgtggcggaaattccaattttctcggatttttatttcttatatacaaatccctaaaaccctatagccctctttcttcgtcacctactactactaactccaagctcaagctcctctgtttcttctgcttgtggttaaaaatcatttcagacacagtgcttttgatgactctctgcaacaaacaacagcagctgcagacaaagcttatacgaagctgtatctactgactttgatggtgaaatatcaaaaaccctaaattaattttaaaaaaaaacacattttttttcttcttttggtttttcctctgagggtattcatcatcaatgcttacaaagtacagtgggtaaacaaaacaaaaacaaaaacccatttttttctccttctttaaatcccaaaccaaccctaaagttttgatttttaattttgggggtaaccaaaaaaaaacaaaaccctaattttttttctttagtgatgagattattggtgatgatg

SEQ ID NO: 127629 - DNA, 1003 bp, Arabidopsis thaliana
  unsure (1)..(1003): unsure at all n locations
atgattcttcagcgtctctacgactcactatatggaaagctggtcacgcctgcaggtaccggtccggaattcccgggtcgacccacgcgtgggcccacgcgtccgcacaaacaaaggagcttggactaaggaagaagacgataagctcatctcttacatcaaagctcacggtgaaggttgttggcgttctcttcctagatccgccggtcttcaacgttgcggaaaaagctgtcgtctccgatggattaactatctccgacctgatctcaagaggggtaacttcaccctcgaagaagatgatctcatcatcaaactacatagccttctcggtaacaagtggtctcttattgcgacgagattaccaggaagaacagataacgagattaagaattactggaacacacatgttaagaggaagctattaagaaaagggattgatccggcgactcatcgacctatcaacgagaccaaaacttctcaagattcgtctgattctagtaaaacagaggaccctcttgtcaagattctctcttttggtcctcagctggagaaaatagcaaatttcggggacgagagaattcaaaagagagttgagtactcagttgttgaagaaagatgtctggacttgaatcttgagcttaggatcagtccaccatggcaagacaagctccatgatgagaggaacctaaggtttgggagagtgaagtataggtgcagtgcgtgccgttttggattcgggaacggcaaggagtgtagctgtaataatgtgaaatgtcaaacagaggacagtagtagcagcagttattcttcaaccgacattagtagtagcattggttatgacttcttgggtctaaacaacactagggttttggattttagcactttggaaatgaaatgaaatgaaatactatattaatcaattaaaaaaacacaaaaaaagnnnnnnnnnnnnnnnnnnnnnnnnnnnnnnnnnnnnnnnnnnnnnnnnnnnnnnnnnnnnnnn

SEQ ID NO: 127630 - DNA, 603 bp, Arabidopsis thaliana
  unsure (1)..(603): unsure at all n locations
agctcatcatagctactggcgaattcccaaactctctagcactattacttgcaaattgttcttatttgccgttcttggcgattctcattctttcactgggtatgggcagtgtcctcaacttcaccatgtgtctttgcaccattgtgaactctgcactaacaccaaccatcgttggtgttctcaaaggcgttggttccactacgctcggttttgtcctcttgggtggtgttgaagtacatgctttgaacgtgtccggtttagtggtcaacacagctggtggtgtgtggtactcatatgccaagtaccgacagaaaaaggctaaaccggctaagctaatgtctgatttggaagctcacaaaaaatgagaatttcggtccggtttggtttcgtttgggaaggcattaccccggtttatagactttgccactcaaatcaatgatcagaacgaaccgatgtatttgagagttgaaccaggaaaatcggtcctagagtgagatttaattttgatgtgaaacttcattgatcagttaatttctcgtttaggttaagaaaaaaaaaataatcaatcccnaaaaaaaaaaaaaaaaaaaaaagggcggccgc

SEQ ID NO: 127631 - DNA, 792 bp, Arabidopsis thaliana
  unsure (1)..(792): unsure at all n locations
nnnnnnnnnnnnnnnnnnnnnnnnnnnnnnnnnnnnnnnnnnnnnnnnnnnnnnnnnnnnnnnnnnnnnnnnnnnnnccacgcgtccgcccacgcgtccgaagcaagcaaaatgaaagaacttgtgttgaagaaaaggtcagaactagaggagatatgtaggaaaacccacttgttgccagtgtcagacagtgctatagatcagactatcgtggcgatagaatctggtattgtggatgctacaatggtcctggagcatcttgagcaacatatatctaagatcaaagaggaagcactaagccgaaaagagatacttgaaagggttgagaaatggttatctgcctgcgatgaagaaagttggcttgaagaatacaacagggatgataaccgatacaatgctgggcgtggagctcatcttactctcaagcgcgctgaaaaagctcgtaatcttgttaccaagctcccaggtatggttgaagcactggcctcgaagacaatagtttgggaacaagaaaacgggattgaatttctctatgatggtatccgtctcctttctatgcttgaggagtataacatactcaggcaggaaagagatgaagaacaccgtcggcaacgggatcagaanaagcttcaaggacagctcatagcagaacaagaggcactttacgggtccaaacccagcccatctaaccccttggtggaaaaaggctccaagaatgcgaccgggtggtgatctaacagaagactttccttaggagcagcatgcatcagactcctaagcctaacaagaaag

SEQ ID NO: 127632 - DNA, 1080 bp, Arabidopsis thaliana
ctctaatacgattcactatagggcaaagctggtacgcctgcaggtaccggtccggaattcccgggtggacccacgcgtccgataaacatggccgaagtcaagtatcctctggaccattttaagacgttcaatgaattcttcgtacgggagttaaagcctggtgcaagaccaattgcgtgcatggatcaggatgatgttgctgtatctgctgctgattgtcgattaatggcatttcaatcggttgatgatagcacacggttctggatcaagggccgtaagttttcaatcaaaggcctccttggaaatgatgtgcagtcggatgctttccttgatggatctttggtgatattccgattggcgccacaggactatcatcgttttcattctcctgtctctggtgtcattgaaaagtttgtcaatgtttctggaagcttatatacggttaatccgattgctgtcaatagcaagtactgtaatgtgttcactgagaataaacggaccatcgtaattatatcaacagcagagtttggaaaggtcgcatttgttgcgattggagcaacaatggttggtagtatcagctttgttaggcaagagggagaccatgtgaagaaaggggacgagcttggttacttttcatttggtggaagcacagttatatgcgtctttgaaaaggactcgattaagattgatgaggatctcttagctaacagtgctaggtccttggagacattagttactgttggaatgcaacttggtgtctcctttccaaagctggaaaactgtgtacttgagccctgaactgcttcaaactatgtgagttagtacgaaacgacagatgattttctatggtttggtttgatttgatttagttttcacttttcatcaagaaagaactcaattcctctctgtttaatacacaatgactttgctctgtatatataaacaccagtatgtcccgggcagtgatacttgttaatgtttacggtatttcgcttaaaaaaaaaaaaaaaagggcggccgctctagaggatccaagcttacgtacgcgtgcatgcggcgtcatagctcatctatagtacg

SEQ ID NO: 127633 - DNA, 797 bp, Arabidopsis thaliana
tatacgacttacttagggaacgctggtacgcctgcaggtaccggtccggaattcccgggtcgacccacgcgtccggccaattataaatagttgtccggtttgcggtgaggctcttcaacttgacaagctcaatgcaatgatccatatgactctctgttttgacgaaggaactggtaatcaaatgaccggagggttcttgactgataggcaggcttcatatggatggatgttcaaactaagtgaatggactcatctatcaacttatgatgttggtttgaatactggttcaagtgcttcacatattgtggtgattgataggaagactaagaggctcgtggaagagttgattgattcaaagattgttatgtctatgagagctatttaccagtcaaaaataggactccggcttatggaccaaggagcaaaagagattttccagaacctttctgagaaacaggggaaaaaaatgaactcagttgaatctgcccaaaatattccccagctttctcgagttttttcaagggtcaaaataaacatggccgaagtcaagtatcctctggaccattttaagacgttcaatgaattcttcgtacgggagttaaagcctggtgcaagaccaattgcgtgcttggatcaagatgatgttgctgtatctgctgctgattgtcgataatggcatttcaatcggttgatgatagcacacggttctggatcaaggcccgtaagttttcaatcaaaggccctccttgaaatgatgtgcagtcggatgctttccttgtggatctttggtgatattc

SEQ ID NO: 127634 - DNA, 536 bp, Arabidopsis thaliana
  unsure (1)..(536): unsure at all n locations
cnnnnnnnnnnnnnnnnnnnnnnnnnnnnnnnnnnnnnnnnnnnnnnnnnnnnnnnnnnnnnnnnnnnnnnnccacgcgtgcggttactctgatgatattggatcaggacattgcatcgatgctgttaaaaaagttacttggttcatttcccctcgatccagaaaacaatctttatggaaagggtgatgataagtactttaaactcaacagtgtattgacagaaatctttttggaagtaagtgaatggagccaccttcctactgatctttccaatagatatctggaatttattgagaatacactactaggcaagatcaccaggagcattaggcttcgtaaagatattcacgaaaagactttacttgcactcttgccctttcttccaaaacttattctgagggtagaccgtgattggagagataatcttctggaggcatttactattaccttcagcgattgcaaaccagagtctaaactcaaattagcctgcatttcaactgttagagacatgattatccctaatggagatatcctt

SEQ ID NO: 127635 - DNA, 540 bp, Arabidopsis thaliana
ttcagctctctacgactcactatttggaaagctggtccgcctgcaggtaccggtccggaattcccgggtcgacccacgcgtgcgcggacgcgtgggaaaagaaaaaaattctataagtaatctttattttgctaaagaaaacatagaaatctgtttgcaaagaagaagatatgggaaacagtttacggtgttgtttggcttgtgtacttccatgtggagctttagatttgatccgtatcgtacatctcaacggccacgtcgacgagatcactagtccaatgaccgccggcgagattcttcaggcgaatcctaaccatgtcttaagcaaaccttgttctcaaggagttgtgcgtaagatcttgatcttgtctcctgaatctgagcttaagcgtggaagcatctattttcttatcccggatacttctatgccggagaagaagaaaacaaagaagagaaaagagctccgatgccggaaaaagcctcttgaaagcggcaacgatattaatagtgatcatgtgagtactaataaggatcttgatg

SEQ ID NO: 127636 - DNA, 826 bp, Arabidopsis thaliana
tctctacgactcactattgggaaagctggtcacgcctgcaggtaccggtccggaattcccgggtcgacccacgcgtgcgattaaccatagagatccctcagaagtggaggatataccacagacatcattaaatgagaagcagcaggaaaatcaagacctacttatccgctccattgttcaacacttgggattccaggggaaccgacctatcacagcatgtatcatttacaaatgtttactgcaatggaggtcatttgaagttgaacgaaccagtgtctttgatcgcattattcagacaataggccatgctattgagactcaagataacaacaatacattggcctattggttatccaatacctcgacactcctattactcctccagcgcacactcaaagctagtggtgcagctgggatggctccgcagcgccgccgttcatcttctgccactctatttggaaggatgagtcagagcttccgcggggcacccccaggtgtaaatcttgccatgataaacggtgctgcgggaggtggagcagatacctttagacaagttgaagcaaaatatccggctctactgtttaagcagcagctcacagcttatgttgaaaagatatacggaatgattcgcgataacttgaagaaggagatttctccactccttggattgtgcattcaggcaccaagaacatcggggggctagtttagtgaaaggaggcatctcggttcccgttggcaacaactgcagctcagcaggcactgatcgcccattggcaaggaattgtcaagagtcttacaaatttcctcaatactctaaaatcaaaca

SEQ ID NO: 127637 - DNA, 513 bp, Arabidopsis thaliana
gttctctaaaatcaaagtaacttttttccgaagagaagattagaaaatgtctaacaacagtcagagcatgagcttcaacgctggccaagctaaaggccaaactcacgagaaggcaagcaacttgatggacatggcctccaatgctgcccaatctgctaaggaatctatccaagagggtggacagcagctgaagcagaaggcacaaggtgcgagtgagaccattaagcaaaagaccggcatcagcaaaatgagaaagcacgttctaataataatttatgttttcagttttcgcttttattctaccagaaaaatacttagatacatatgtctatctaaatccaagaatatggatttgcatcgaagccatttaggcaattacttttgcttttctatgttttttttttatatatctatatatctaagagtttttgactcttgtctattgataatttgtagccatgcagttatttctataatatttaaataaatgacatgattacatgaaaaaaaaaa

SEQ ID NO: 127638 - DNA, 446 bp, Arabidopsis thaliana
acctgaacaacaacaacaacccctaaaatctcggaagccataatgagcagagcattgttcaggaacgtagccgtcgacaccgctcggctcatacggcggaacgcggcggcgtcaacagaccaatatggtaagaccggagttgctcaatcgagaccttatttccggtcacgtcagcttctcgaaagagcaaaagaaacaggagtctcaccttctccttctttgggtttctcttcttcttcatctccgtcgaggattgggttcgttggatggtatcttggtatggttaaatcacacccagttgtgaccaaaagtgtcacttcctctcttatttacattgccgccgacttgtcttctcagacgattgcgaaaacttcttctgagtcttatgacttggtgagaacagcaaggatgggaggatatgggttatttgtcttgggtccaacact

SEQ ID NO: 127639 - DNA, 764 bp, Arabidopsis thaliana
tatgtgttaacacgcttaaaagtgattgtttccgtagtcttgcgttaagacatgttctctctgttgtaaggtgcttattaatcgagccatttccagaatctgcattaaatgaacaagctggcaagatgctacttgaaaactatgacgagtatgcgaggcatgctaggctttacacaggtatccatgctaaaccaaaacccaagttcaagacaggagcaatctcagagtcaacaaccgctctaaatgttggccagacgaacaacgagacgcctggtgctgctactgcaataccctcttcaatgacagacataaagagagtaacaacgagtgcccaagaccaacaacacgtagctaatgtcgttgtagcagcctctgcaagtgtggtcactacgacgcaaaaaagggaagcaggtttggccaaggttcaggcagataagaagaaggtagacgctagaaagaaaagcttgaagagactatgatgatgctatcactcagtgtcttacgctctttgaacctaaactgttgtttcctttttacttgtaagagatctgttgtttgaggatttttcatttctgggaaataataatgtttgccaatgaagccgaatgttaaccattttggtgttctaatctacacatggttttgctgagtaaaaaaaaaaaaacccaaagggcggccgctctagaggatccaagcttacgtacgcgtgcatgcgacgtcatagtcttctataggcgaccaaataattagccggcgggggccgg

SEQ ID NO: 127640 - DNA, 1002 bp, Arabidopsis thaliana
  unsure (1)..(1002): unsure at all n locations
tgattctccagctctcctacgactcactattgggaaagctggcacgcctgcaggtaccggtccggaattcccgggtcgacccacgcgtgcgggaagatccagcttgtggtccacttagtgatggtgttgctatgagatctctttaccctcctagaccaactaataagaacattttgaaaaacggaggatttgaacaaggtccattagtagtacccggctcgacaactggagttttgatcccaccgtttatagaagacgaccactctcctttacctggatggatggtggagtctctcaaagctgtcaagtacgtagacgttgaacatttctcagtcccacagggtcgcagagctattgagcttgtagcgggtaaagagagtgccatcgctcaagtggttcggactgtcattgggaagacttacgtgctgtcttttgcggttggagacgccaacaatgcttgcaaaggatcaatggtggttgaggcttttgcaggaaaagatacacttaaggtcccttacgagtcgaaaggcacaggagggtttaaacgagcttctattcgatttgtggcggtttcgacccgatcaagaattatgttctacagcactttctatgccatgaggagcgatgatttctcgtcattgtgtgggcctgtgatcgatgatgtcaagcttataagcgttcgtaaaccatagatgaatcaccaatcctattacaagaaaatgcatcgtgtggtcttcttttattttccttaaactgtctttggtgtgtgttggattttattgaaacgagaaggtgaaaaaaacagagttttatttacgagagttagggttttatataggcagatgggcctttgcttatattgtattttcttgtatgagaaggcaaaagaaacgttcccaatcccatgaaccagggccttaaatttcggccgggaancntgancccggggggccncaagcccnaanggcccnnccgggggngcccncntttgccccttagggt

SEQ ID NO: 127641 - DNA, 540 bp, Arabidopsis thaliana
  unsure (1)..(540): unsure at all n locations
aggtcccttacgagtcgaaaggcacaggagggtttaaacgagcttctattcgatttgtggcggtttcgacccgatcaagaattatgttctacagcactttctatgccatgaggagcgatgatttctcgtcattgtgtgggcctgtgatcgatgatgtcaagcttataagcgttcgtaaaccatagatgaatcaccaatcctattacaagaaaatgcatcgtgtggtcttcttttattttccttaaactgtctttggtgtgtgttggattttattgaaacgagaaggtgaaaaaaacagagttttatttacgagagttagggttttatataggcagatgggcctttgcttatattgtattttcttgtatgagaaggcaaaagaaacgttgcctatatcttatgtatctaggccttttaatttttatggaagagttacaaaacttacaataaagttgtatgcatattttacttctcacgagcatataagactgannnnnnnnnnnnnnnnnnnnnnnnnnnnnnnnnnnnnnnnnnnnnnnn

SEQ ID NO: 127642 - DNA, 571 bp, Arabidopsis thaliana
  unsure (1)..(571): unsure at all n locations
nnnnnnnnnnnnnnnnnnnnnnnnnnnnnnnnnnnnnnnnnnnnnnnnnnnnnnnnnnnnnnnnnnnnnnnnnnnnnnccacgcgtccgcggacgcgtgggttcgatttgtggcggtttcgacccgatcaagaattatgttcttcagccctttctatcccatgaggagcgatgatttctcgtcattgtgtgggcctgtgatcgatgatgtcaagcttataagcgttcgtaaaccatagatgaatcgccaatcctattacaagaaaatgcatcgtgtgggcctccttttattttccttaaactgtctttggtgtgtgttggattttattgaaacgagaaggtgaaaaaaacagagttttatttacgagagttagggttttatataggcagatgggcctttgcttatattgtattttcttgtatgagaaggcaaaagaaacgttgcctatatcttatgtatctaggccttttaatttttatggaagagttacaaaacttacaataaaaaaaaaaaaaaaaaagggcggccgctctagaggatccaagcttacgtacgcgtgcgtgcgacgtca

SEQ ID NO: 127643 - DNA, 424 bp, Arabidopsis thaliana
gtagcacctgactccggtgtgattccgattcagacggtttatagtagtagtggttgggatttatatgcttgggcgtttcaagctgagagtgatgttgctgaagttgtgattcataatcctggtgttgaggaagatccagcttgtggtccacttattgatggtgttgctatgagatctctttaccctcctagaccaactaataagaacattttgaaaaacggaggatttgaagaaggtccattagtattacccggctcgacaactggagttttgatcccaccgtttatagaagacgaccactctcctttacctgcgatggatggtggagtctctcaaagctgtcaagtacgtagacgttgaacatttctcagtcccacagggtcgcagagctattgagcttgtagcgggtaaaggaggagtgcca

SEQ ID NO: 127644 - DNA, 397 bp, Arabidopsis thaliana
tcaagatcccccaaagcgagttcatcatcttcttcgcctggattcgatcaagactagcactttcatcagatttgattacaatctctcttatcttccaagttataatcataatatccgagcaatttgggatctgggtctttcctctacattcaatttcttaataaagctggcctctttcttccgagatggttcttgagcgatgatgagtgactctcagcgatcactttctgtgcgattgagccgccggggtgagagaagcaatcattactcacaatctaaagatgctgtggctggcttcttctctcccaccagattgcatgctgattacactttgaaaaaaatttggaaggcaggcttccttcgcttgcttcttgttggcggcattgtctggatgcta

SEQ ID NO: 127645 - DNA, 856 bp, Arabidopsis thaliana
  unsure (1)..(856): unsure at all n locations
nnnnnnnnnnnnnnnnnnnnnnnnnnnnnnnnnnnnnnnnnnnnnnnnnnnnnncttctcctaatttcaaaagagccacgcgtccggagagacagatcgagaaagaaccagagagagaaacctgagaaaatcgaagatggctacgaacattgggatgatggattctgcatatttcgtcgggagatcggagattctggcttggattaactctactctccaactcaatctctccaaagtcgaagaggcttgttcaggcgctgttcattgtcagctgatggattcggtgcatcctgggactgttccgatgcacaagggttaactttgatccgaagagtgaatatgagatgattcagaactataaggttcttcaggatgtgtttaataaactcaggatcactaagcccatcgaagggagcaaactcgttaagggaaggccattggataacttggagtttatgcagtggatgaaaaagtcctgtgattctggtaatggaggccagcatatttaccatgcacttgagagaagggaagccagcaaagggaggaaagaagcaacgaagagagctgcagctacacaacaatcaggcaagagttcgtcttcttcagctccacctcgaccttcatcttcaaatggaacccgtaggcatgagccacaatcaacaacaccggtactaccattcttaactgggatnaccaccctcttcaaaacatcagctaacatctaaaccatgcctgctatgatgaaagatcacaaactgnactttacattgcagcttaaaaaagagagagantctatttctctaactcaagatgagagatctctgtcaaaccagaacagagactttcctctgttggt

SEQ ID NO: 127646 - DNA, 1072 bp, Arabidopsis thaliana
caggtcactacgactcactattgggaaagctggcacgcctgcaggtaccggtccggaattcccgggtcgacccacgcgtccgcgttaaagctgtcttctccttagcgagcaagattgcgccaagtgtcatttttgttgatgaggttgatagcatgttgggtagacgtgaaaatccaggggaacatgaagctatgcgtaagatgaagaacgagttcatggtaaactgggatggtttaagaacaaaggatagagaacgggttctggtactcgctgccaccaacagaccatttgacctagacgaagctgttattagacggcttccccggagattgatggttaatcttccagatgcaacgaacagatcaaagatcttgagcgttattctagcaaaagaagaaatagcaccagacgtcgatttagaagctatagcaaatatgacagatgggtactcaggaagtgacttaaagaatctgtgtgtgaccgcagcacattttccaatccgagaaatactggagaaagaaaagaaggagaaaactgcagctcaggctgagaaccgtcccacaccgccattgtatagctgcacagatgttcgttccctgacaatgaacgatttcaaggctgcccatgatcaggtatgcgcaagtgtgtcttcagactcgtcgaacatgaacgaacttcagcaatggaacgagctgtatggtgaaggaggatcgaggaagaagacgtcgttgagctacttcatgtagaagagagacaaaagagagagggagggagatttgttcgtttttgatctctctcgtgttcggtttttttttttgaatctcattttggtcgtttaatttataaatttgtgtacagagagaaagggtgttgttcgttttgctgtctaattcattttctttctcaacataagatgaaaaaaacattcgctgtataatctaatacatgcgtatgtatatagaggctcggatcttttaaggataaggacataaattctaaatcaaaaaaaaaaaaaaaagggcggcccctctagaggatcccagcttacgtacgcgtgcatgcgaagtcatag

SEQ ID NO: 127647 - DNA, 813 bp, Arabidopsis thaliana
  unsure (1)..(813): unsure at all n locations
gatcaaacccttccttctgatagtgtggagaaagtggttggctttgctttcaatcaccatcttatgaactgcactgaacctatagttaaagacaacaagcttgtcatctctgcagagagcatttcatatggcctgcagacgttgcatgatattcagaacgaaaacaagagtttaaagaagtctctcaaggatgttgttactgagaacgaatttgagaaaaaactgttgtcggatgtcattccacctagcgatataggtgtttcctttgatgatattggagctctggaaaatgtgaaagaaacgttgaaggagttggtgatgcttcctcttcagagaccggaattgtttgacaaaggccagctcacaaagcctacgaaaggtatactgttgtttggacctcctggtactggaaagacgatgctggcaaaagcagtagcaactgaggctggcgcaaatttcatcaatatctcaatgtccagcattacttcgaagtggtttggtgagggagagaagtacgttaaagctgtcttctccttagcgagcaagattgcgccaagcgtcatttttgttgatgaggttgatagcatgctgggaagacgtgagaatccaggggaacatgaagctatgcgtaagatgaagaacgaattcatgataaactgggacggcttacgcacaaaggataaagaaagggttttagtatttggctgctacccaacaggccatttgacctttacggagcagtaaattnagacgggtttnccccngaaggtttgatgggttaaaccttncccggttttnnncaaaacanntccg

SEQ ID NO: 127648 - DNA, 633 bp, Arabidopsis thaliana
  unsure (1)..(633): unsure at all n locations
cagctctcnnnnnnnnnnnnnnnnnnnnnnnnnnnnnnnnnnnnnnnnnnnnnngaaacttagagagacagccacgcgtgacgctcaaattcaatcatcaatgttaacggacgagagagaagtagtctgtgtcaccggcgccagtggctgcatcggctcgtggctggtccatcagctcctcctccgcggctactccgtccacgccaccgtgaaaaacctccaggatgagaaagagacgaaacatctagaaggtctcgaaggtgcagccacacgcctccatctattcgagatggatctcctacaatacgacaccgtttccgccgccatcaatggttgctccggcgtattccacctcgcatcaccttgtatcgtcgatgaagtccaagatccccagaagcaactacttgacccggcggttaaaggaaccataaatgttctgacggcggcaaaagaagccagtgttaagagagttgttgtgacgtcttcgatatcggcgattactccaagtcccaactggcctgctgataagatcaagaatgaggaatgttgggctgctgaagactactgcacgcaaaatggattgcggtatccactgtcgaagacgcttgctgagaaggcagcttgggaatttgc

SEQ ID NO: 127649 - DNA, 514 bp, Arabidopsis thaliana
  unsure (1)..(514): unsure at all n locations
nnnnnnnnnnnnnnnnnnnnnnnnnnnnnnnnnnnnnnnnnnnnnnnnnnnnnnnnnnnnnnnnnnnnnnnnnnnnnnnnnnccacgcgtccgcagaaccctacagatcatcccctacctcgctgcttcgggtcgaatcagcgagtcgggtcaaaattcacctgagaaaaatgttcgcgaggcggttcacttcgttcttcaaaggatcttcaacctcaagcccggacaaaacagctgggacattgggctcttttggtcgcaaggcagtgtctttcgtcttgattacagtcactggtggtgttgctttgagtgctctcgatgatctttctatctatcgtggatgtagcagcaaggcgatggagaaggtgatgaatagtaaggtgatgattgaagccatcggagagccaattgagaaagggccatggtacaatgcttcactagctgtttctcaccaaaggcactcagtgtcttgttcattccctgtgattggaccacaaggcacaggaatcttgca

SEQ ID NO: 127650 - DNA, 659 bp, Arabidopsis thaliana
agaggatggaaaaacaatttgggccatgaggctgaaagcatctcttgatcgagcacgcagattaacagcagaatattctgatttgcttcttcaaatatttcctcctaatgtggagattttaggaaaagctctaggaattccagagaatagtgtcaagacctatacagaagcagagattcgtgctggaattattttccagatctcaaagctctgcactgttcttctaaaagctgtaagaaattcacttggttctgagggctgggatgtcgttgtacctggatcgacgtctgggacattagttcaggttgagagcattgttccgggatcattgccagcaacttctggtggtcctattattctcttggtcaataaagctgatggcgatgaagaggtaagtgctgctaatgggaacatagctggagtcatgcttctgcaggagctgcctcacttgtctcaccttggcgttagagcgcggcaggagaaaattgtctttgtgacatgtgatgatgatgacaaggttgctgatatacgacgacttgtggaaaatttgtgaggttggaagcatctccaagtcatgtgaatctgatactttcaactgagggtaggagtcgcacttccaaatccagtgcgaccaaaaaaacggataagaacagcttatc

SEQ ID NO: 127651 - DNA, 795 bp, Arabidopsis thaliana
cagctctcctacgactcactatatggaaagctggcacgcctgcaggtaccggtccggattcccgggtcgacccacgcgggcgggagcaccaaccgacacaagttttggatctcaaattgtgtctgcgaccgcgttgtttccaacactttgagcaagttaaagagagagagcttttattctttggaggatctaaataggtccaagctcgtcatgcagctaggaaaaagaagaggattaatatacagttattagaaacattaaagtttcttctgtgttttgtagaacaaggagatgatgcggtacaaagaggagaaagaggtgaagaaggaagctttcaggaagtatttggagtcaagtggagttcttgattctcttactaaagttctggtttctctgtatgagcagaatgacaagccttcctctgctctagaattcattcaacaaaagctaggtggtccatcagtctctgactatgagaagcttcaagctgagaagtctgatcttcaaataaagtacaatgagcttttggctaaacatcaggaaaccctgagagagttaaatggagtgaagagcttgcattcacgaaactcttcaaaagatgatgcagacagagagacccttgaagctgaacacacgaccttagtcactcctcaccactaactctgcacttactgtatatgtaattcctgttactatcttcgtttacatatttacggcagtaaaaaaaacaaaaaagggcggccgctctagaggatccaagcttacgtacgcgtgcatgcgacgtcatagctcttc

SEQ ID NO: 127652 - DNA, 818 bp, Arabidopsis thaliana
  unsure (1)..(818): unsure at all n locations
nnnnnnnnnnnnnnnnnnnnnnnnnnnnnnnnnnnnnnnnnnnnnnnnnnnnnnnnnnnnnnnnnnnnnnnnnccacgcgtccggcaaaaactactgcagaacttgagcaagaggaactggagaaggcaccaaagttcaaagcaaaacctttgaacaaaaagatatttgaaagtaaaggagaaatgggtatcttttgcaacaccaagaagcacataacgatacctcaagagtttcactttgcgacagatgagaggatatcacgaccagaatctgtcttagatatattcgacaagctctcactgaactccgaatcttgccatgaaaaacctctaccaaggaacactgctccaaaccccttcaatcttaagacagaagaaagaggcgctgagaaagagaagaaattttatatggaactcatgtataagaaattaggagatgtaaaggcaagagttccaaaggcaaatccatatccttacacgacggactatccagtggtaccaccaaaaccagaacctaagcaatgcacacaaccagaaccgttccagttagagagtctagtaaggcacgaagaggaaatgcgaagagaaagggaagagaggaggagaatggagacagaagaagcccagaagaggctcttcaaagcacaaccagttataaaagagggcccaatccctgttccagagaaagtacgaatgcccctcacagaatctcaggcgttcatgtaagatgactgtgagacagatttgtccaaaaaccaaaggcgccgttaaggatccagcttacgacgcggcaggacgtcaagtttctataggtcact

SEQ ID NO: 127653 - DNA, 941 bp, Arabidopsis thaliana
  unsure (1)..(941): unsure at all n locations
nnnnnnnnnnnnnnnnnnnnnnnnnnnnnnnnnnnnnnnnnnnnnnnnaagaaaatcctatttgcgccgcatctctctcgtcttcctttactccgtcaaaaccatgtttctaagtcagttccggagctgtaaacctttgctcgagtctcgtctacctttgctccgcctctctctctctaaatgtctcgatcagtccttcaaaaccacggctagtagcgaatacggtagtaagatcaacaaagtcacaaagcatgtcaatgaggaggatggtgcaactttctatgttactcgaaggggggcaatcgatagttctgcccctgctgaatcaaaagcatatccaaaagcagctaatatcagttcaatccatagtatgagggaatctcttctggaggaaacagaggaagactactacagacgcttggcactttttgccctgaggaatcatggtggagaggatgccataaatgttattatagaatctctaggtgttgagagttctatgattcgcattgaggctgcatttgtgttgggacaattggaatccaaaacagctatagcttctctaagcaagatcttgagagatgtgaaggagcaccccatggttcgagtagaggctgcaaaagcccttggtttcattgcagatgagaagagcagagaagtactccaagaactttcaggcgacctcgatcccattatcgctaaaggttgtgattcttcattgagtatcttggaatttaagaattcaaaaaaatatgaccctctcatataaaatggtgtgtgtgggtctgttgtgtaatgaaaacatctacgtttcatcttccttttgttaaactttgttttgtattcaaatgatttgcagacggtttaagctctgttttaagctattagcgcggccgctctagaggatccaagcttacgtacgcgtgcatgcggcgtcatag

SEQ ID NO: 127654 - DNA, 815 bp, Arabidopsis thaliana
  unsure (1)..(815): unsure at all n locations
gtgtaaacgtttttttctctgcactccacggtcatggcttcgtctacggctcagagcacgaagcagtttaagaggtctatgactaagaaatcacattcatggtggtgggatagtcacaattgtcccaagaactcaaaatggcttgcagagaatctagaaaagatggatgatcgagtgaaccacatgttaaaactgattgaagaagacgcagactcttttgcaaagaaagctcagatgtattttcagaaacgtccccgagttaatccagcctggtcgaggaattctaccgcatgtatcgcgcatcggctggagcgttatgatcaagctagtggtgaacttcagaagaaccatacatctgagatccagtcacagagctctcttgagatatcatctcctaccaaagagaagttgagtcggccgtcaatctagccataaagaagaggaagatacatcgtctttgacagattctggttctgattctgatcattcctctgccaatgatgaacacggtgaccaggcattgatccgtagaatggctgcactcgagcttgagcttcaagagacgaaacagaagctccttctccagcaggaaagtgttgatggtgacaacaatgttgatctccttcacaaagttactacatatgagggagagcttaaagaagctcatgagaagatgcgaatgcaccaagacgagattgctaatctgaaggatcagcttcagagcttcatgtcttttacacaggggtcattttggngctgacaaaagngtnttgttttggtnaannggcnctnnangaggttcagtgctcnaaagg

SEQ ID NO: 127655 - DNA, 936 bp, Arabidopsis thaliana
  unsure (1)..(936): unsure at all n locations
ctacgcgnnnnnnnnnnnnnnnnnnnnnnnnnnnnnnnnnnnnnnnnnnnnnnnnnnnnnnnnnnnnnnnnnnnnnnnccacgcgtccgcaaggatgaatttattgcggacaagactcgaagacaaacctttgggaggagctagcaaatcccaccgtaaattgtcgccgagagacttatccgaaccaaaaacaaacctttcgggaaagggaggaccaccacaaccgagacccagaacctcttctccccaacaagcaagaagagagacatcaaaactaacctttaattccaccgatgaacctttgaaccactccaagagcaaccacaccttcagatccgacaaagaggaagccaaatacggcggaataaaatggatgttggctcaaacaaaccatctactctcgagatctggccaaagatcacccgcaattagccatttaggatccggccaaagatccactgctaacccctttgcaaagtagcgaacccaccaatccatggttcaacttccgccgctcgccggagctacaattcacaaaccaccgaaccgtgagaaacaaaatctaatccactggagtccatanaccagcagagcacatgaaccgtttctctggctgtcgtgaaggagagctgccgtctagcatcgagccatggacctaaccacgcctcacaccaccggagaagagagatgctcaccaccacttaactctacagcccatcaactatctttgaagatcttcaaatcggaaagaaanagcanannaagtagatntaacatctagttttcaagagagagaagagagggtntttttcggaacgattgggcctttcaagtggatacgatttnatagctatgtcagtgtgggtgaaatttctcttagacggtgccaagcagtgccgcgctgctcgtttagacagatcctcaccgtgtctcgtt

SEQ ID NO: 127656 - DNA, 803 bp, Arabidopsis thaliana
  unsure (1)..(803): unsure at all n locations
tatacgacttactatagggaacgctggtacgcctgcaggtaccggtccggaattcccgggtcgacccacgcgtccgcgatgatagacagactgctgtaagaaatagcttttggaaccagtttgttgtcttcttcaatcaagtcttatcgcttggacctacgtttattgatgatgtcgaagacgagacttgcttctcaaacatgagcttgtatgatgaaagagaaactgaaaaccggcttgcactatgggaggactatgaactaagaggattcttgccactgcttccagctcagacgattctcaacttctcaaggaaacattcgtttggaactgaaggtcccaaggaaaagaaagctcgtataaagaggatctttgcagcagggaaagctttgaccagtgtgatcaaagttgatcagaatcatgtatattttgattcaaagaagaagaagtttcttgttggtgtaaaaccggcagatgactttctggattctcattcaagcccacctaaagcttgtaatgctttgcaagataaccaggtaatgatagatcataactcgccaataatgcagcttgatcaacagatttatatgggtgagggaagatgatgatgatgaagtattgttttcaagccgcttgttactgaaaagaggaaagaggcttctgaccaaatatatgttcctagtggaggcttcaggaaatctgatcaagntactactatggggggactnntaagctntaagtggatctgatgtagctnttcatgaaaatcaaattctgccagctagaggcaatgcgagatttca

SEQ ID NO: 127657 - DNA, 364 bp, Arabidopsis thaliana
gataaaaaaacaaaccttccttaaccagaaccaaatttcagatttttaaacaacataagctctaatggcgtcaccaaagtcacccacaagaccaacccaacaaaacccacaacccaatttccacgattttcttcctaccatggccggaaacctaggcggtgaaggtctgatcggagagctatgcaacggcttcgagcttttgatggacagagagaaaggtgtcatcacgttcgagagtctccgacgtaacgctgcggcggttctgggtttaggagatttgactgatgaagatgtccggtgtatgattaaagaaggtgattttgactgcgacggtgcgttgaatcagatggagttttgtgtgttg

SEQ ID NO: 127658 - DNA, 642 bp, Arabidopsis thaliana
  unsure (1)..(642): unsure at all n locations
nnnnnnnnnnnnnnnnnnnnnnnnnnnnnnnnnnnnnnnnnnnnnnnnnnnnnnnnnnnnnnnnnnnnnnnnnnccacgcgtccgcggacgcgtccgcccacgcgtccgcggacgcgtgggaaagatctctccttggacggtgctcttattgtagattccattgatgatgcagaggtaaaacttggaggtttgataaagaacaatggttggaccatggagagtgtagattacaaggacacatcggttccagaagaaataagaatcagaggttttagattcaacaagtggagcaactcgaaaagaagttaactcaacctggcaaattttctgttgaagattgaagttatctttgcacatttatgtgacacttttttaaaaagtgttatttggcaatatgatcaattagcaaattagctatttttttaagagaatgccaaatgatccattaatttgtccttctaatggagagcttaattctttctttcgttttgtttccaacgaaacacttccttttctttgtttttcaacaaaacccgaatatattgttctttatgttaaaaaaaaaaaaaaagnnnnnnnnnnnnnnnnnnnnnnnnnnnnnnnnnnnnnnnnnnnnnnnnnnnnnnnnnnnnnnnnnnnnn

SEQ ID NO: 127659 - DNA, 598 bp, Arabidopsis thaliana
  unsure (1)..(598): unsure at all n locations
ccaaatggggaatgatcttctctgatatcataaagaaagtcagcgggaactgcgaggtctctcagagatccccaatggcaatcaagggtcgtaatgtatttatcaaagatctctccttggacggtgctcttattgtagattccattgatgacgcagaggtaaaacttggaggtttgataaagaacaatggttggaccatggagagtgtagattacaaggacacatcggttccagaagaaataagaatcagaggttttagattcaacaaagtggagcaactcgaaaagaagttaactcaacctggcaaattttctgttgaagattgaagttatctttgcccatttatgtgacacttttttaaaaagtgttatttggcaatatgatcaattagcaaattagctttttttttaagagaatgccaaatgatccattaatttgtccttttaatggagaggttaattcttttttnnnnnnnnnnnnnnnnnnnnnnnnnnnnnnnnnnnnnnnnnnnnnnnnnnnnnnnnnnnnnnnnnnnnnnnnnnnnnnnnnnnnnnnnnnnnnnnnnnnnnnnnnnnnnnnnnnnnnnnnnnnnnnnnnn

SEQ ID NO: 127660 - DNA, 1024 bp, Arabidopsis thaliana
  unsure (1)..(1024): unsure at all n locations
nnnnnnnnnnnnnnnnnnnnnnnnnnnnnnnnnnnnnnnnnnnnnnnnnnnnnnnnnnnnnnnnnnnnnnnccacgcgtccgaaaaaaaaagaaagacaaagaggattgaacggtaggcgtagacgccattggagtttgaaagggaattagtcgacgttttatggatcattgtcgtttcggtgtcattttcttcttcttctttcgctagcacgatttaaagcctgactagatccatcatcggccatggaggattctacagccacggctacgtcttcgtcttccactcattatttctccattttcacgaattatcctctcatttccgccgtcacctctttcactatcgctcaattcatcaaactcttcacctcctggtatagggaacggagatgggatctcaaacagcttattgggtctggaggaatgccttcttcgcattcagcgaccgttacagctctcgctgtagctattggtttacaagaaggctttggtggatcacattttgccattgcttttgattttggcatctgtttgtgatgtatgatgctaccggtgttagattacatgctggtcgtcaagctgaggttctcaatcagattgtatatgaacttcctgcagaacatccgctggctgagagcagacctttgcgggaacttcttggtcatacccctccccaggtcgttgctggtggaatgcttggaagtgctacagcagtcaccggatacttatttttcaggatagctacaagctaacgtcaagaacatgcatagacacaactcttctgcttcattgcctattgaagccactggagagtaccaaaacagatttacaaccgaatccgagttaaaaatatatttattcttgtttaacattaccattaccatatgtaaagaaatcgtgaaaccccattacaaaaataacgtgattttatttgaaaaaaaaacaaaaaaagnnnnnnnnnnnnnnnnnnnnnnnnnnnnnnnnnnnnnnnnnnnnnnnnnnnnnnnnnnnnnnnnnnnnnnn

SEQ ID NO: 127661 - DNA, 1181 bp, Arabidopsis thaliana
ctatacgacttacttagggaaagctggtacgcctgcaggtaccggtccggaattcccgggtcgacccacgcgtccgggacgacaatctaagttctgaagagtcccattggatgaacaagaacaacaacttatgtagatcgattgtgtggcctgagagtaacacgagtctaaagcaacctgatgctgaacttacggagggtttcatggaagacgatgccgaattcaaaaatggtgaccacaagtacatctcagagataatgttggcatcagggcttctacgagatatcgactacagcatgataagcatccagctgcaccaagcacacctaccgatcaacccgagccttttccttgtactggaacagaacaagacaagcaatgtgagtctacaggacaacaagcacaaaggcagaggatttggacaacaacaaacggtgaacctggttgagagaagtaagaggaagctcatatttgacaccatcaacgagatcttagctcacagattcgctgcaagaagggtgtacaaagcaaccatccataacattatcaatcagcacgcaaaggacacacgaaaaaagttcaagaggggaagagcttctgcaaactctgtgttcagagattgatcgattacaagataactcaaagtgtatcttggatgaggacgatgaagacctcatttgggaggatctgcaaagccatggcatgaactggaaggagattgaaggagagacaccagggttagtgttagacattgagaggctaatcttcaaagacttgattggtgaagttgtgacaagcgagtttgcagcttttccaaggatgctcagtgggcaaccaaggcagctttttcattgctaatattcctaattaatcttcacttagaattgtaaatcaaggaatctaaatcatccattttacagagttgagaacatttggtttcctgtgttctctgaacccctttcttatgttcttttcttagttgtttatgtaaacttcataaaaatgttttgtaaaagactccactcaagataaagctcaaccaatgttatatccatcaagaagaatatttcagcaaacctccaaaaaaaaaaaaaaaaaaaaaaaaaaaaaaaagggcggccgctatagaggatccaagcttacgtacgcgtgcatgcgacgtcatagtaattctatagtgt

SEQ ID NO: 127662 - DNA, 653 bp, Arabidopsis thaliana
  unsure (1)..(653): unsure at all n locations
gcanaaacgntaccngtnaaaagtaggganccattttgcccanaccagncctagccananatcccttcaaaaggtgtacaaancaaccanccataacattancaatcagcacgcaaaggacacncgaaaaaaagttcaagaggggaagagcttctgcaaactctgtgttcagagattgatcgattacaagataactcaaagtgtatcttggatgaggacgatgaagacctcatttgggaggatctgcaaagccatggcatgaactggaaggagattgaaggagagacaccagggttagtgttagacattgagaggctaatcttcaaagacttgattggtgaagttgtgacaagcgagtttgcagcttttccaaggatgctcagtgggcaaccaaggcagctttttcattgctaatattcctaattaatcttcccttagaattgttaatccaggaatcttaatcatcccttttacaaaatttaaaaccattggtgtttttgggtcttttaacccccttcctaaggtccttttctaagtggttaaggtaaccttattaaaaatgtttggaaccgcccgcaaattcttacagcccggggaatccactagttttaaaccgccccccaccccggtgaagctccagcttttgttccctt

SEQ ID NO: 127663 - DNA, 556 bp, Arabidopsis thaliana
cggcacctaatccgactcactatgggaaagctggtacgcctgcaggtaccggtccggaattcccgggtcgacccacgcgtccgcccacgcgtccgtttcccctgaaaccgttcttgtctctctctctctctctctctctcttcttctctgctcaagacaagaacttgatgttcatgtcttgaaacttaacaaagtattgatctttccttttaagtaaagaatttgggggttacacaacttcgtctagatggagcaagagaaaagcttggatccacaactatggcatgcttgtgcaggatcaatggttcaaatcccttcactgaattcaacggttttttacttcgctcaaggccacacagagcacgctcacgcgcctcctgattttcacgcgccgcgcgttccacctcttatcctctgtcgtgtcgtctccgtgaagttcctcgccgacgctgaaacagacgaagtttttgctaaaattacgcttttgccacttccgggaaacgacttggatctagaaaacgacgccgttttgggtctaactcctccttcttctgac

SEQ ID NO: 127664 - DNA, 646 bp, Arabidopsis thaliana
cagctctcatacgactcactataggggaagctggtacgcctgcaagtaccggtcccgaattcccgggtccgaccacgccgtccgacgggtggcaaaagaacacagaaggggattccgccggaaaaaaataacgtctttttttttttcttccaatctctctgtctctctccccaattcccagattctcatttttgcagagattttaggaggaacatgattgtttgaattgggagagacattggttcgtgtaaaatgcgggtgcttggtttgagctcaagcttatgctctggtgaggataaggaagaagaagagattaatggagaaggctctctcacgcctgtttatctcaacgtctatgatctaactcctgtcaacaattatctctattggttcggccttggcatatttcactctggcattgaggctcatggtttcgaatatggatatggagctcatgagtattcgagcagtggggtatttgaggttgaacctaggagctgtccaggtttcatctttaggcgctcagttttgttgggaaccaccagcatgtcccgctctgatttccgctccttcatggagacgctttcgagaaagtatcatggggacacataccatttgattgccaaaaactgtaaccatttcactg

SEQ ID NO: 127665 - DNA, 548 bp, Arabidopsis thaliana
  unsure (1)..(548): unsure at all n locations
cagctannnnnnnnnnnnnnnnnnnnnnnnnnnnnnnnnnnnnnnnnnnnnnnnnnnnnnnnnnnnnnnnnnnccacgcgtccggttttctgaatcactgaacatgatgaggaaaaagtgaaatctgttgtccgaacaatcttcaccctgctaatgtctgctgacgccgatacaacaaagaaaattgtatccaaattaaaacgccgactgcatatggagagtcaggaacgccaattgacagacaaggaacggctggttttgaagctagagaagcaatatccaaatgatattggagtgatatctgcattcttcttcaactatgtgaagctcaatcctggcgaagccttgtatcttggtgcaaacgagccccacgcatacttattcggtgagtgccttgaggtcatggcgacttcagacaatgtagtacgagctggcctcacttccaagcctctggatattcaaacactttgttcaatgctctcttataaactgggatatccggaaatcctgaagggaacaaggattcgaccatacataacaagatacct

SEQ ID NO: 127666 - DNA, 667 bp, Arabidopsis thaliana
  unsure (1)..(667): unsure at all n locations
nnnnnnnnnnnnnnnnnnnnnnnnnnnnnnnnnnnnnnnnnnnnnnnnnnnnnnnnnnnnnnnnnnnnnnnnnnnnnnnnnnnnccacgcgtccgctctcttctccacgccatttccagaattttcaggtgttcgtgaaaagatgaattttaagaatgtcaaagttcccaaaggtcctggtggtggtgttatagctgcggtggttattggggggctcagtctttacggtgctacgcacactctctacaatgtcgatggaggtcatcgagccattgtctttaaccggcttgttggtatcaaagacaaggtctaccctgagggtactcaccttatgattccatggttcgaaaggccaatcatctatgacgttcgtgcaaagccttatctagttgagagcacatctgggagccgtgatctccagatggttaagattgggcttcgggttctcacccgtcctatggctgaccaattaccagaggtataccggtcccttggtgagaattaccgcgagagagtcttgccttctatcatccacgagaccttgaaagctgtggttgctcagtacaacgcaagccaacttattactcagagagagtcggtgagtagagaaatcaggaaaatgctaactctaagagccgcanacttccacattgcactggatgatgtg

SEQ ID NO: 127667 - DNA, 377 bp, Arabidopsis thaliana
acgcggacacgtgggcggacgcgtgggcggacgcgtggggcaaaacaacactaaacctgaaacaaacgtaaatccgccgcaacaacccagttttttccgacggcgtacaagcttcctccgccgtaacgccgtcgtttaataccaagaagcttgattaggtttccgtagtgtgtgatttttttaaggttctgaacactgatgtcaaacccattgaaagagtcaagagaggatattgcaaattctactcctcacatgagggataatgagtatgttcggctagttgtggctcatgaagcctccccagctgaaaccgtgttgtctctatcgcaatcagaggtgcagagtaagaaatttatgtggtggttaaaagctttggg

SEQ ID NO: 127668 - DNA, 561 bp, Arabidopsis thaliana
  unsure (1)..(561): unsure at all n locations
atgatactccagctctctacgactcactatatggaaagctggcacgcctgcaggtaccggtccggaattcccgggtcgacccacgcgtggggaaatgcatagaagaaggtcgagccagtggcatcatgtgtgcttataaccgagtcaacggcattccttcttgcgctgacccgaatcttttgactcgaaccgctcgtggtcaatgggctttccgcggatacattacttcagattgtgacgcagtctcaatcatctacgatgctcaaggctacgctaaaagccctgaagacgctgttgctgatgtcctcaaagctggcatggacgtaaactgtggatcatacttacaaaaacacaccaaatcagctcttcaacagaagaaagtgtctgaaacagacattgacagagctctactcaatcttttctctgttaggattcgtctcggtctctttaacggcgatccaaccaaattaccttacggaaacattagtcctaacgaagtttgttcaccggctcatcaagctntagcacttgatgctgctcgtaatggtatagttctcttga

SEQ ID NO: 127669 - DNA, 433 bp, Arabidopsis thaliana
ggcccaaaaaaaaacagaagaataagaagacacaactcttgttttaaatttgagtcccatttacttttgatgctaaataggagagaaaacgtttttgactcacacataacgtagagagacagagagagacaaaaaaaaagagacgggaatattccggcgaagattgagactctcaatatccaatggagaagtattcccggcggtctattctcctttccacggtggtcgccgccgtgttattctctttaattccggtttcaatctctattcccttcatactctttcacgttaatattaattatccaaaaaaaaaagaaaacaggaattggagataaatgttctggtggagttagtaacttcacgcaactcctaacaaacctctctggctctcctggctattgcttagaaataggaaatggagaaaaggactcat

SEQ ID NO: 127670 - DNA, 539 bp, Arabidopsis thaliana
  unsure (1)..(539): unsure at all n locations
tacgactcactatanggagagctgctacgcctgcaggtaccggtccggaattcccgggtcgacccacgcggccgctagactcttaggtctagttaccaaaatttgactagcaatcatatagctacaagttcctctatatcatatagctacacatatctctagctttttgtatgcaaccccaaatagcagcttaaagaaagcagagaggatcttcttttatttcccctctgagcaacagaagccattattcaaagaaaggcttctttaatttactcgcagggagagggaaaagagaaaaaattgaaaaactccattttcaagtcattaaaatggcatcttcttcaacaaactcaccatgcgccgcttgcaaattcctccggcgaaaatgtcaaccggaatgtgtattcgcgccctatttcccaccggaccagccacaaaaattcgcaaacgttcacaaagtgttttggagcaagtaacgtgacaaagctcctcaacgaggcttcacccttcacaacgtgaagacgcagtgaactctttgg

SEQ ID NO: 127671 - DNA, 508 bp, Arabidopsis thaliana
  unsure (1)..(508): unsure at all n locations
nnnnnnnnnnnnnnnnnnnnnnnnnnnnnnnnnnnnnnnnnnnnnnnnnnnnnnnnnnnnnnnnnnnnnnnnnnnnnnnnnnnccacgcgtccgcccacgcgtccgtgaagctctggagagccaagtgaagaccaaggtgtccatcaaggtgattttcagttcttttaatctcttagtcagcgtaattgggtagaagaaaatatccagttcgtgaattgggtggaagacgattaagagtttctaaactatcttgctctattcggttatcgttaagagtttctgtgagtaatgggttgaagctggatatcaaataatttagtgttaaaaagttcaacttgatagtaagatgtggattcagttatctgcctgataaggttattagatttgctagcacaggaaatactaacactgtcatggattcaatcaagttcatagtttctttggatgtcatatatgaataataggttgcagattcccattcctagagttaagtgtcaaccttagatt

SEQ ID NO: 127672 - DNA, 546 bp, Arabidopsis thaliana
  unsure (1)..(546): unsure at all n locations
cagctctctacgactcactatanggaaagctggcacgcctgcaggtaccggtccggaattcccgggtcgacccacgcgtgcgccataagtgatgaacagagaaagactgtcctccatcattcatgtcctggagctggagcctgtggtggcatgtacacagcgaatacaatggcttctgctatcgaagcaatgggaatgtcccttccttacagttcttcaatacctgctgaagacccattgaagttggacgagtgtcgcttagcaggaaaatatcttctagaattgctaaagatggacttaaaaccccgtgacattatcactccaaaatcacttcgtaatgcaatggtttccgtcatggcccttgggggatcgacaaatgcagtattgcatctaattgctattgcaaggtctgttggtttggagttgactcttgacgattttcagaaagttagcgatgcggttccatttctagcagatcttaaacccagtgggaagtatgttatggaggatatacataagataggtggtacgccagctgttctccgc

SEQ ID NO: 127673 - DNA, 503 bp, Arabidopsis thaliana
  unsure (1)..(503): unsure at all n locations
catannnnnnnnnnnnnnnnnnnnnnnnnnnnnnnnnnnnnnnnnnnnnnnnnnnnnnnnnnnnnnnnnnnccacgcgtccgggaagactagattcgatgtgttggtgaagaagatctcgactttgttcaaaattccaatttcgttcgcctcaaagatcattctctcatcttctcgactttgatgcgattgattaaatatggtggatacggttattcccggagatatggcttgtttggatgcagatttgttgcagcttcaggaaatgtcttcctttgttctcaattctaaacctggattcactcagaagctcttcgaccagtggctttctcttcccgaagctcagcgacaggttggatcattgcttaaggatgctgtagctggagctcctatcaatgttactggaagtgcatcgggttctaattctgccactataccatctatgtttcctgcgggaagcgctcctcctctttcaccaagaagttgtggttcaccccgtacacc

SEQ ID NO: 127674 - DNA, 475 bp, Arabidopsis thaliana
ctgggacgcctgcaggtaccggtccggcctccccggggggctccacccgccgcccacgcgtccgctttgcctttgtctttgatttttctctgtatcgtcggtctctcttttgcgtttctcgatcccaccgtctaatccttctccggccaatgactatgatgactccgcctcccgttgatcagccagaagatgaggagatgcttgtgccgaattcagatttggtcgacggtcctgctcagcccatggaagttacccaacccgagactgctgcgagtactgtggagaaccagccagctgaggatcctcctactctgaaattcacgtggactatccctaatttctctaggcaaaacaccaggaagcattactccgatgtatttgtcgttggaggttacaaatggcgcatattaattttcccgaaagggaacaatgttgatcatttgtccatgtacttggatgtttctgatgctgcgag

SEQ ID NO: 127675 - DNA, 546 bp, Arabidopsis thaliana
cccacgcgtccgcccacgcgtccggttgaaagagagaagatgctaagatctcaaaacagagtataacaacaccttgacctcgttgaagaagcctttgagattgtctcggggatctgaaaaatgtcaatccttcaagtctctacttcgtctctttcttcttctactcttctctccatatctcccagaaaatctctctcatctaccaagtcatgccggatagttcgatgttccgtcgagggaactactgtaaccgagagaaaagtctcggcaaccagcgagccacttcttctgagagctgttaaaggtgaagttgttgatagacctccggtttggcttatgaggcaagctgggaggtacatgaagagttatcaaactctctgtgagaagtatccttctttcagagataggtcagagaatgcagatcttgttggtggaaatttctttgcagccatggaaggtgtttaagccagatggggtgattctgttctcagacattctcactccattgtctggaatgaacatacctttcgacattgttaaaggaaa

SEQ ID NO: 127676 - DNA, 649 bp, Arabidopsis thaliana
  unsure (1)..(649): unsure at all n locations
aggataggttggtagttccatcacaggggcagaattcagttttgttaaaaaggcctccctcatctcatttttcttcgtggcatgaaggattactcgagcgtatgtctgacacagctagcagggcagcagcaagttcctatagtggaattgaaggaggtgtgagacgggaatcaggagcagcaggcccacaaagggtcaacgtcagaggcggcatcgtttagtgagatgttgaagaagagtaatagcatgaagaaggtggcggcagagtcaactgatgcaaccgaaggaagcaaaggtggcggtggtaagaagaaagggaagaaagggaggcaaatcgatccagctcttctcggtttcaaagtcactagcaatcgaattcttatgggcgagatccaccgcgctgatgatttttagcttttgttcgtttgtacaaaatctttacatgtaaagattagattctcatacttaggcgtataggtccttttcggacagatttcttacatcacataagagcacacgaaatgaaataataatgttttttaggtgatnnnnnnnnnnnnnnnnnnnnnnnnnnnnnnnnnnnnnnnnnnnnnnnnnnnnnnnnnnnnnnnnnnnnnnnnnnnnnnnnnnnnnnnnnnnnnnnnnnnnn

SEQ ID NO: 127677 - DNA, 552 bp, Arabidopsis thaliana
acgactcactatttggaaagctggcacgcctgcaggtaccggtccggaattcccgggtcgacccacgcgtgcggaaaatgttagtgttgcagagccaccaatgtctcttctctcttcctttaccaggatccgtcccggtataatccgattatccgccgtaaaagaaatcgccgatgtggcggaggtggaagaagatggtccaattgagcttcctacgtcgtccacgtctccgttttcgtctactaactccattttcgccacttccgatgatcctactcctctccaattggccaccagtgtgcttcttaccggtgccatcactgtcttcctcatccgctccgttcgacggcgcgctaaacgcgccaaagagctgacatttagatctactggagctaagaaatcgttgaaagaagaagcaatggataatctaaaagcgttaagttcaactccgatagaaggtggtaattcaactccatcggcggctcaggcgtttcttggtgcgatagccgcaggagtcattgctctcattctttacaaaatcactggtacagt

SEQ ID NO: 127678 - DNA, 565 bp, Arabidopsis thaliana
  unsure (1)..(565): unsure at all n locations
tgatacttcagcgtctcnnnnnnnnnnnnnnnnnnnnnnnnnnnnnnnnnnnnnnnnnnnnnnnnnnnnnnnnnnnnnnnccacgcgtgcgcccacgcgtccgcccacgcgtccgcccacgcgtccggaaaaaatcactaaacatgaagaatctggtcatatttgccttcttgttcttaagcatcactactgtaatcaatggtggaataacaagtaaatttgtccgccaagctttaccatcgatcgaaatgtctctcgacactttcccttctcctggtggctacaacactcctgaacaggttcatctgactcaaggagaccatgatggacgtggcatgattgtctcgtgggtcacaccgttgaatctcgctggttctaacgttgttacctactggatcgctactaatggtagtgacgtaaagccagcgaaaaagagagctcatgcctccactaaatcttacagattctatgaccatagttcaggatttctccatcacgccacanttaagggactcgagtacgataccaagtacatctatgaggttgggaccgataaaatccgtag

SEQ ID NO: 127679 - DNA, 239 bp, Arabidopsis thaliana
acttcttcgtacgttaattaaaatctgaagaaacaaaatcgtgaaatcgatctctttaagcatcatctagggttcatcactgaaatcaaaaatgcaattaaatctctacaaaatctctcagatctaatcccagatcgttgttggcttcttctccgtacaccaatcccacatatgaattaaagattcgatctcgaaatcgttggcttttgttgttgttgcattcttcggtgatggctccg

SEQ ID NO: 127680 - DNA, 871 bp, Arabidopsis thaliana
  unsure (1)..(871): unsure at all n locations
nnnnnnnnnnnnnnnnnnnnnnnnnnnnnnnnnnnnnnnnnnnnnnnnnnnnnnnnnnnnnnnnnnnnnnnnnnnnnnnnnnnccacgcgtccgacatgtcaaaatggccccaagctcttagcattcaggcgcatcctctgaatgtcccaacgagttttaagcaacgggcaatgttagttgatgagatatggcatgctgttggagatggagcctcggatttagattggtatgtcaagcgtactattcttggaggcgtttactcaactaccgagatttacatgctcaccgatgactccttagaacatcgcgatacatgggcattcttggatgacagagtcaaagatgcttttgatcttaagaagagcatacaagaggccaagtattttgcagaagacataggagctggagttgggaagtcggttcaaggactgatgaatggagttatgcagacaatgtccagaagaagtggtggctctgcgttttgaaaagatcacacctttacacatgattctgcttcacactccttacggattctccaatattttgagttgggatttactataataatgagattagacttatatgagttgaagtgaaggcatatgaactaatatattatcttctacgtttgaataaaccattgagtttgaaatctttaatttgtaaataaggatgaaacctgttctgtgtttggttgttctgtgcgtaaacagagttggaaacttgtaattttggtctacttcaatttggtagggtgtttattgttcgaaaacaaaaacccaaaaaagnnnnnnnnnnnnnnnnnnnnnnnnnnnnnnnnnnnnnnnnnnnnnnnnnnnnnnnnnnnnnnnnnnnnnnnnnnnnnnnttc

SEQ ID NO: 127681 - DNA, 511 bp, Arabidopsis thaliana
  unsure (1)..(511): unsure at all n locations
atgatatnnnnnnnnnnnnnnnnnnnnnnnnnnnnnnnnnnnnnnnnnnnnnnnnnnnnnnnnnnnnnnnnnnnnnnnnnnnccacgcgtccgcgcttttttattttgtaatttaatttcggttgctttttaaatatctaactccgagatttttaagggattgctatctatttttttttttttggggattggttagtttctcggttagttatgttaagtaacgaactttaaaattagggttttgatttggttttttttttatttcagtggttaagttcaatgtctgtgtatctttaataacgcaccagattcatgttgtaggtatcagtagtaaaggtgggacatttgtgtcgcattgaggaagaaactttggatttcagactcacttgggacctaccctttaatggcttcttcaacttctgggattttctttcaaggagatgatgaatctcaaagcttcattaactctcacttgacttcctcttatgggaattcatctaactctgctcct

SEQ ID NO: 127682 - DNA, 548 bp, Arabidopsis thaliana
cagctctcctacgactcactattgggaaagctggcacgcctgcaggtaccggtccggaattcccgggtcgacccacgcgtgcggtttttgattgcttagttttttcccgggagactgaaacatgttcacggcggcagcttcgtcaagcgtgggaaggtggcggacggcgtttctctctctcagggacgaaatctcaaccactccaccgccgccggttcctctgttgctcgaggatctactcttctctcaatcccattcccttatctctgccgtctctcacctcccactgcacgagctcacttccgattgcttgttcctgctcgatttggtttccaaagctgatggtcctgactggatccctgtctctcgtcatacttgtcaactgattcacgatgtttgtgctcgtctacttttccaactaaattcttcgtcatggccgctccttcttcactcttttgcttctgtcttggagtttcttcttcgccaacccatgccttcttcaccttattccgctgcctatttctccagaatcgaacctgtgatccaag

SEQ ID NO: 127683 - DNA, 939 bp, Arabidopsis thaliana
  unsure (1)..(939): unsure at all n locations
gccgagcctctnnnnnnnnnnnnnnnnnnnnnnnnnnnnnnnnnnnnnnnnnnnnnnnnnnnnnnnnnnnnnnnnccacgcgtccggaaggtggagaagcatcggataagcctattgatagtgctgttctctcaaggatgaagcaatttagagcgatgaataaactaaagaaacttgctttaaaggtcattgcggagaacattgacacggaagaaatacaaggcttaaaggcgatgtttgctaatatagatacagacaatagtggtactatcacatacgaagaattgaaagaaggattagccaaactgggatcaagactcactgaagctgaagtgaaacagctcatggatgctgctgacgttgatggaaatgggtcaatagattacattgagtttattactgcaacaatgcatagacataggcttgaaagtaatgagaacgtttacaaagccttccaacattttgacaaagatgggaggggatacattacgacagacgagctagaggctgctttgaaggaatatggaatgggagatgatgctactatcaaagagattttgtctgatgtcgaccctgataatgacggtagaatcaactatgacgagttttgtgctatgatgagaagtgggaatccacaaccaccaagattgttctaacatattttatttgtcttctgtctgaatctaatcaaaaaagacaagagtggtattattattgttgtttaggcaaaaatttaaggttgaaaagagagagagagagatgattgctttcattttttttggtactgctaaactggtcatctcatttggtttgaaggaccaataaaagtatataacagaggaagataaaaaaaaaaaaaaaagggcggccgctctagaggatccaagcttacgtacgcgtgcatgcgacgtcatagtaattctatagtgcgcctaaata

SEQ ID NO: 127684 - DNA, 642 bp, Arabidopsis thaliana
  unsure (1)..(642): unsure at all n locations
gannnnnnnnnnnnnnnnnnnnnnnnnnnnnnnnnnnnnnnnnnnnnnnnnnnnnnnnnnnnnnnnnnnnnnnnnnnnnnccacgcgtccgggttgtttttctcaacaatggtgtctctggccaagtttcactactgtgatcaaacactccacctccgactcgacactcaccgtaaaccgcagcctaaacctgtttcaataccgaatcttacataaacctcctccttctcgcgtcatcagagcttcttcgttttcatcaaaccctaaaccctctttcctcaaaaccacctgcgtgaccttaacaacagccgccgctttactctccgcttccctccacctctccaccaaacccgtcaccgcagcaactctcgtctcacctccccctccaccatccacggcggcggatctcacttccgatcaaatctcgtcgcgtccaaaggaagaagaagatgaagcagcgctggaaaagcactcactaagaatcaaacgangtcgaagctcttaatcactgatgaaaatcaaattccaaaccaaaaacatcgacaccgctttagagattctaaacccgttagatcgaaattcaaccccgaagaaacaagaatggcggatccctaaaagcttagggaccaacctacggggggg

SEQ ID NO: 127685 - DNA, 587 bp, Arabidopsis thaliana
  unsure (1)..(587): unsure at all n locations
tgannnnnnnnnnnnnnnnnnnnnnnnnnnnnnnnnnnnnnnnnnnnnnnnnnnnnnnnnnnnnnnnnnnnnnnnnnnnnnccacgcgtccgctttttcctcatatcccttttttctcaatataaatactctgcaaaaaaacacccacaaatcctcacacaaaaacgttttcgaaatccctaatctactctctcttctctatatctctactcttgagaaatggctcttagaactgtgctcgtctccgacgtccctagcctcccggattctgtctacggtttatccgaaggtttagagttgagcaaaccgacgtcgtttaggttaccggggttttcggtgattggacatagaggaatcggtatgaatgtgttgcaatcgtctgatcggagagcgagaggtgttaaagaaaactcgattctttcattcaattccgccgctaagtatccgattgatttcattgagttcgatgttcaggtgacaaaagatgattgccctgtcattttccatgatgatttcatctactctgaagaaaatggtattgttaatgagagtagagtgacggatctgagtctgtctgagtttctcct

SEQ ID NO: 127686 - DNA, 807 bp, Arabidopsis thaliana
  unsure (1)..(807): unsure at all n locations
nnnnnnnnnnnnnnnnnnnnnnnnnnnnnnnnnnnnnnnnnnnnnnnnnnnnnnnnnnnnnnnnnnnnnnnnnnnnnnnnntcccacgcgtcggcccacgcgtccgccgaatcctagttcgatcttgatcttcccggcggagtaaccaaaattccgtaaatggcgtcaaggagaagtgtacggtatgcacagcttccaggagatgaagatgatgaaggctatggaaatggtgttggtgaaaggagagatttcgatcctcggttcgattattcaccgaaagcatttgatagagttccatggaaatctatagcattagctgtgtttcttttgtttcttggttgcttgcttcttcttttgtcgttttttatcttcattggtcacatggaaggagatagctctcaaggttatgcgttacttgttcttgggatccttacttttctccctggtttctacgagacccgaattgcttactactcatggagaggagctgaagggtaccgttttgcagccattccctcttactgaactcaagtaactggagaagtaagaatattgtgcataggaaaagttttagaggttgtaatccaaaaagtactactatacttaagctgtttgatgaatctactgtgtggaacctcctctagttgggtttaggcagataaaagcttgggtttttggggnnnnnnnnnnnnnnnnnnnnnnnnnnnnnnnnnnnnnnnnnnnnnnnnnnnnnnnnnnnnnnnnnnnnnnnnnnnnnnnnnnnnnnnnnnnnnnnnnnnnnnnnnnnnnnnnnnnnnnnnnnnnnnn

SEQ ID NO: 127687 - DNA, 547 bp, Arabidopsis thaliana
ttcagctctctacgactcactattgggaaagctggcacgcctgcaggtaccggtccggaattcccgggtcgacccacgcgtccgcccacgcgtccgaaaacatggccgagtcaccctccgagtcaacctccgactcgcttagcaccaccacatccactaagcccgctcaatccgggactgtttctatttcaagccctcaaagtcaccatgtcgtcttccccgagatcccaatcgagatcgtcagtgaagaagaaatggctattctcgatgcagctcttgcagcctcccgctccatcctcccttccgtgatccgttctgtttctccgtcacggataaccgccggcggaagtcccaaaacaatccgctcaattactctcttctccaagaggaaattatcggcttgttcagatatcgaagagtcttatctacatcgatttaggagaaatcaagctttaggtgtcacagatctcaccggaactgaatggtgtgagaaacaaatggagaatgttctttgttttggcaggagaaaagtcaataaagctatgaa

SEQ ID NO: 127688 - DNA, 778 bp, Arabidopsis thaliana
tggggcctccacagatctaatcgctaaagtcatcgtcgtcgtctcttctctcaaaatcaaaaaggttgttataaaaatggctgaggcaacgtctgctttgaggaagcctgtgttcacaaaggttaatgagttgagaccaggaaccaatggccactctctgaatgtgaaagttgtcaacacgaagatggtgatgcagagaggaggaggtcgtcccatgggtcctcagtcacgtcagatgcggattgccgaatgcttagttggtgatgagactggaatcataatctttactgcaagaaatgaccaagtggatatgatgaaagaaggcagtgtagtgactctgcgtaatgcgaagatcgacatgtacaagggttctatgaggcttgcagttgatagatggggacgtgttgaagttgcagaggagcccacagacatcaccgtgaaggatgataacaatctttcgctgatcgagtatgagcttgtggagcgtcgaaacttgatatggttcctccacaaacgaaaacagagcgactcaaaaaaagacttacgttctagttggagaaagcctctttggttgggggttgagtcttttttattggacctatccggcttgcctctgatctactgtcctggttttgaaaatcaggtgcccgcctttttgtagattgattccctatttaaatatcatgggatgatctttctcaagatttaaaaaaaaaaaaaaaaagggcggccgctctagaggatccaagcttacgtacgcgtgcatgcgacgtaatag

SEQ ID NO: 127689 - DNA, 795 bp, Arabidopsis thaliana
  unsure (1)..(795): unsure at all n locations
aatcgctaaactcatcgtcgtcgtctcttctctcaacatcaaaaagtacgtgctgatcacagcagatgttgttgtttatggccaacttatgcacggttgttacaaaaatggctgaggcaacgtcggctttgacagaagcctgtgttcacaaaggttaatgacttgataccaggaagcaatggccactctctgaatgtgaaagttgtcaacacgaagatggtgatgcagatatgacgaggtcgtcccatgggtcctcagtcacgtcagatgcggattgccgaatgcttagttggtgatgagactggaatcataatctttactgcaagaaatgaccaagtggatatgatgaaagaaggcagtgtagtgactctgcgtaatgcgaagatcgacatgtacaagggttctatgaggcttgcagttgatagatggggacgtgttgaagttgcagaggagcccacagacatcaccgtgaaggatgataacaatctttcgctgatcgagtatgagcttgtgagcgtcgaaacttgatatggttcctccacaaacgaaaacagagcgactcaaaaaaagacttacgttctagttggagaaagcctcctttggtttggggttgagncctttttaatggacctatcccggcttgcctcctgancnactgtcctggttttnaaatcaggttccggcctttttgaanttgntnccccattaaannncctgggnngaccttcccntaaaaaaaaaaaaaaggggggccnncccaangngccaagnttccgaccnggnnatggggggcaa

SEQ ID NO: 127690 - DNA, 490 bp, Arabidopsis thaliana
  unsure (1)..(490): unsure at all n locations
cannnnnnnnnnnnnnnnnnnnnnnnnnnnnnnnnnnnnnnnnnnnnnnnnnnnnnnnnnnnnnnnnnnccacgcgtccgggaaaagatagctccggagctcttcctcgtcgccggtaacccggactctttcgtcgtcgacgacctcctcgacttctctaacgacgacggcgaagttgacgacggcttaaacactcttcccgattcttcaacactctccaccggcactctcaccgacagttccaactcctcctcgcttttcaccgacggcactggcttctccgacctatatattccggtaattttccgttattattttctcaaatccacgccaatatttatgaaatagtaacacttttttcttcttcttcttcttcttatttaatcagaatgacgatatagcagaattagaatggttatcaaattttgtggaagaatcattcgcaggagaagaccaagacaagcttcacttattttccggtttaaaaaac

SEQ ID NO: 127691 - DNA, 560 bp, Arabidopsis thaliana
  unsure (1)..(560): unsure at all n locations
gctctctacgactcactatttggaaagctggcacgcctgcaggtaccggtccggaattcccgggtctacccacgcgtgcgcaaaggagggatcaagctgcttcatcggtaatgtgaacgcaactgcggatgctttagtcaacttcaaaggaaaagactaccacgtaccggcttggtctgtaagtgttcttccggactgcgataaagaggcttacaacactgcaaaagtgaacactcaaacatcaatcatgaccgaggactctagtaagccagagaggctggaatggacctggagaccggagtccgctcagaagatgattcttaaaggcagtggagatctcattgccaagggtcttgtagaccaaaaagatgttacaaacgatgctagtgactatctttggtacatgactaggcttcatctcgacaagaaagatccactttggagccgaaacatgacggtacggggttcacagcaatgcccatgtttctacacgcttacgtcaaattggaaaatacggtcgggtaacccaatttcggtaaaggaccgggaaantttngatt

SEQ ID NO: 127692 - DNA, 539 bp, Arabidopsis thaliana
  unsure (1)..(539): unsure at all n locations
cagctctctacgactcactatanggaaagctggcacgcctgcaggtaccggtcccgaattcccgggtctacccacgcgggcggatctggaggttagtacacttacaaatgctggttcttgctctagtgtaacaaggtatgagtctggtggtggtggtactcaaggctatgttagagaaggttacaatcagcctgtgactggttatgttgacaatgatgcggtgattgctcagttttatcaagacgaattgtctagagttgctcgagccgaagcatcggggatcaatagtcttagtcctacttctgttgttgcacaagactggcctcatcctcatcaaggacaggaaaatcaaggggaagccattgatattactcaggaaagtgatattcttcataatcataacggtaacatggaagataagaatgttgcaaggataagatttgaaggagggcaaagttccccatctcgtgatgatgactcagtttgttctggagaaatagaagaccaatcttggtcagaggttgggaagcgactggacc

SEQ ID NO: 127693 - DNA, 516 bp, Arabidopsis thaliana
  unsure (1)..(516): unsure at all n locations
nnnnnnnnnnnnnnnnnnnnnnnnnnnnnnnnnnnnnnnnnnnnnnnnnnnnnnnnnnnnnnnnnnnnnnccacgcgtccgatcgagaaaaccattacacgagaaaggaaaaaaatggtgaatccttcttcacctggaattgccatactcggagctgggatcttcgtcaaaactcaatacattccgagattagctgagatctccgatctcgtcgacctgaaagcgatttggagccgtactgaggaatctgcaaaaggagctgtggagatagcaagaaagcattttcctgaagtgaagtgcaaatggggagatgagggtctcaatgagatcattcaagacagttcaatagttggtgttgctgtagttgtagctgcagaaaccatggttgaattgtcactgaagatgctcaaggcaggaaagcacgtccttcaagagaagccagctgctgcttcaatcagtgagatagaaactgcaatgtcaagctatagaaatatttctgctgattccccatgccgt

SEQ ID NO: 127694 - DNA, 550 bp, Arabidopsis thaliana
  unsure (1)..(550): unsure at all n locations
cagctctctacgactcactatanggaaagctggcacgcctgcaggtaccggtccggaattcccgggtcgacccacgcgtgcggttatgggtcgatgtgttgaagaaaacgttggagcatggcttagcaccaaaatcatggacggattacttgtatctaaccgttggaggtacactctccaatgcaggaatcagtggtcaagcttttcaccatggtcctcaaattagtaacgtccttgagctcgacgttgtaactgggaaaggagaggtgatgagatgctcagaagaagagaacacaaggctattccatggagttcttggtggattaggtcaatttgggatcatcactcgagcacgaatctctctcgaaccagctccccaaagggtgagatggatacgggtattgtattcgagcttcaaagtgtttacggaggaccaagagtacttaatctcaatgcatggtcaattaaagtttgattacgtggaaggctttgtgattgtggacgaaggactcgtcaacaattggagatcttctttcttctctccacgtaa

SEQ ID NO: 127695 - DNA, 556 bp, Arabidopsis thaliana
  unsure (1)..(556): unsure at all n locations
tctctacgactcactatatggaaagctggtcacgcctgcaggtaccggtccggaattcccgggtcgacccacgcgtgcggtttcgagaatggcctaatgtcctctcactcttgggtggtctgattgtgatcaaaacactgattataaccgcaatcggtccccgagttggcctcacaatacaagaaagcgtaagagttggctttcttctttcccagggaggagaatttgcatttgttgtgttctctctagccaacaggctaggagtgcttccaaatgagctgaacaaactgctcattatcgtagttgttttgtctatggcattaacaccttatcttaaccaacttggaagaaaagccgccgattttcttgatgagagacttgatcccggagagaaaataggtgaagatgtgaacttcgatgttagtgaatcaattgtcatcattggatttggacaaatgggtcaggttctggccaattttttgtcaacgccattggtctcagatagtgatcttgtgggatggccttatattggttntgatctgaatcctgctgtagt

SEQ ID NO: 127696 - DNA, 708 bp, Arabidopsis thaliana
ctaatacgacttctatagggaacgctggtacgcctgcaggtaccggtccggaattcccgggtcgacccacgcgtccgcttcgttgcttagtaagaaagtagaaagtttctgagaatctcgggcacgaattgaatcagataattcgctagaatcggtttaacgctttaaaggcaatcgctttgcattctcatgaattctcttatactcggtgctgctagaaggttcgtggggttgcatttgagagtttcagtgaaccttttgcaaaatgaatctttctcttcgtattcgttctcttctgctagtgctgctgatgtgagccctaaaggggagacctttaaatcctcgtccttccttgattcactgcgtttagctacaaaactcactgacaagggaaattctgattccgttctggatcttctcagaagttatgggttcactgattctcagatctccagcatcatcaggagtgattcaagagtgcttatagacaatgatgcgacatcccttggttcaaagcttcagtttttgcagtccagaggagcttcaagctctgagctcactgaggtttgtttcacagtttctaaaatcttggggaagagagagggcaaatctctcagcagattttatgatttcatcaaagtcattatagaagctgataagagttccaagtatgaaaagatatctcattctttggcacaggggaacaag

SEQ ID NO: 127697 - DNA, 786 bp, Arabidopsis thaliana
  unsure (1)..(786): unsure at all n locations
atgatacttcagctctcnnnnnnnnnnnnnnnnnnnnnnnnnnnnnnnnnnnnnnnnnnnnnnnnnnnnnnnnnnnnnnnccacgcgtgcgcttccaaaagatcaaaagcatttagttttctttcccatcctgtacccgaatgttcttgcattacgcgaacccatccggtttcaaatgccacaaatcttggggtgacacaccgttgtccgcaatgggtggatggtgctgtaagcgaaagattaaaggagtataagaacgcagagaaagaagaggatcttgatgaagaggacttgtcttcttcaggattgttctttggtcacaaggaaagtggagggaataataatggtaacaatgagactgtaaattccgaagctaacaataaggaagaaggtcagcttgaagatcaagaagaacttgaaggcagcgaaagataaggcttgtggttgaagatgcaacaatgagcaagtcgcagatagatctaaccttttctcaaaaatagtttatagcctgggtattacttattaggttgtgtattagaatatgtctttttttttttgatgatcaattttacaacagtttagtgatttttaagaacataattctatgggactatatatttttgtaacatgatctcagtggccaattggatgactcaactttttttttttccnnnnnnnnnnnnnnnnnnnnnnnnnnnnnnnnnnnnnnnnnnnnnnnnnnnnnnnnnnnnnnnnnnnnnnnnnnnnnnnnnnnnnnnnnnnnnnnnnnnnnnnnnnnnnnnnnnn

SEQ ID NO: 127698 - DNA, 703 bp, Arabidopsis thaliana
  unsure (1)..(703): unsure at all n locations
nnnnnnnnnnnnnnnnnnnnnnnnnnnnnnnnnnnnnnnnnnnnnnnnnnnnnnnnnnnnnnnnnnnnnnnnnnnnccacgcgtccgattctttggtaactttcgcttactctctccccattctctctcgaagagagcctcgccggagtttgtttttcttcttgtttcgcggccaaaaccgcctttgtgtaaagctaccttgttattttcctccgttaaccatctggtataggttgctgctggactctttagatggcagactctcggaatggtaatgcccgagcccctcctagtggagtgcctccaaaagctgggaatacttattccatagatgttaaaaactttatctcacgtgcaagagcattgtatgaacactggaagaagcacagtgcagacttatggggatctgccgacgctcttgccattgctacccctcctgcttctgatgatctgcgttacctgaaatcttcagcgttgaatatttggcttcttgggtatgagtttccagatacaattatggtttttaccaagaagcagatccatttnctgtgtagtaggaacaaggcttctctacttgaagttgtgaaaanacctgcacatgatgagttgaagcttgatgttatcatgcatgttaagcctaagggggatgatggaacagggctggtggatgccatatttcgtgccatccgtgatctatcccggg

SEQ ID NO: 127699 - DNA, 996 bp, Arabidopsis thaliana
  unsure (1)..(996): unsure at all n locations
cgcgnnnnnnnnnnnnnnnnnnnnnnnnnnnnnnnnnnnnnnnnnnnnnnnnnnnnnnnnnnnnnnnnnnnnnnnccacgcgtccggtacaatactgcaactgtcggagtggtaggagatggattcatggctcgtgatctaacgttccagaacacggcgggaccagacgctcaccaagcggtggcgtttagatccgacagcgatttttctctgatcgagaattgcgagttccttgggaaccaagacactctctatgcccatggtcttcgtcagttctacaaaaactgtcgtatccaaggaaatgttgactttatctttgggaattcagctgctgtcttccaagactgtgaaatcctaatcgcaccgcgtcaaattaaccctgaaaagggcgagaaaaacgcagtcactgcccaaggaaggattgacccgtcccagtccacgggtttcgtgttcttgaactgtttgattaacggaacagaggagtacatgaagctgtttaaagctaaccctaaggtgcataagaacttcttggggaggccatggaaagattactcaaggactgtgtttataggttgtaatttagaggctttgattactcctggtggatggttaccttggagcggggatttcgcgctcaagacactttattacggtgaatctaagaaccacgggtccgggatcagatagggcacaaagggtttcatggagcagtcagatcccggacgagcatgttcatgtgtattcggtggctaactttattcaggctgatgagtgggcttcgatgtctgcttaaatcaatctttaagactataaggggtttaggaatgttttaaaagaagaaaaccatctcattgtaatttagttgataaactgttttaaacataaaagcaaacattgcattcatgttaaaaaaaaaaaaaaaaaaaagnnnnnnnnnnnnnnnnnnnnnnnnnnnnnnnnnnnnnnnnnnnnnnnnnnnnnnnnnnnnnnnnnnnn

SEQ ID NO: 127700 - DNA, 473 bp, Arabidopsis thaliana
ctatacgactcacttttagggaagctcgtacgcctgcaggtaccggtccggaattcccgggtcgacccacgcgtccgggattattgtgtactagagggttcttttagcttctaggaacatgtctggtggaactccagttggtggtggtgggtacattaggcaaagacatagccaaggttatgcttctggtggtgatgatcttgaggatgatgcttgctctaggccacagcctttttctttagagaatcctagaagtaaaacctgggttgagattttggagaatgtgctttggattgcatctgctgtcttcattgtctattttggagacaggcactctaatatgatacatattctcttacgtgatgctcggatcaaaaggatgcctttgtatttcgggatgttgggaatagctgtgaacattataatcataatctacgaaagcatgttatcttggagcatgagaaggtttgatg

SEQ ID NO: 127701 - DNA, 447 bp, Arabidopsis thaliana
ttgtcgcgtgggggaacctaaaaaagcttcctttttgggacgaagtttcttagagaatttgtgattccgattcttagggttttcaccaagcgttccttcgcgacgagctctcaatttttgaggttattgatttcttcttctgatcgaattttccgtatctgctagtgaattcttctttctcagctcagggtttctcaattctccgttctcgatctcttgatacgatcgatctttcgaattgaatccatttgtcaatttttcgttgcagtctcgttggcggcgcaatcatcatagactttgggggatcgcttgtaatgagacgaatttcaaagtttggtatcttttacttgcctgaattgaccaattcgacttttatatagagacgtctattagggttttgtgttgctaaggaggtgggattattgtgtactagagggttcttttagc

SEQ ID NO: 127702 - DNA, 538 bp, Arabidopsis thaliana
ctctcctacgactcacttattgggaaagctggcacgcctgcaggtaccggtccggaattcccgggtcgacccacgcgtgcggattttgggcctgaatttgcggttcttgatgttgatggagaggaaccccatacaggcatcattgcgtctatctctaatgagaaccaggcatttatttcctgtgtcgacgatgagaggcttgagtttgaagatggtgacctagttgttttctcagaagttgagggtatgacagaattgaatgatgggaaaccaaggaagataaaaagtacacggccatattcattcacccttgatgaggacactactaactatggaacatatgtgaagggtggtattgtcactcaagtgaaacagccaaagttactgaatttcaagccattgagggaagcgcttaaggatccaggggattttctatttagtgatttctctaagtttgatcggcctccactccttcacttagcattccaggcacttgatcattttaaagctgaagctggcagatttcctgttgctggct

SEQ ID NO: 127703 - DNA, 628 bp, Arabidopsis thaliana
  unsure (1)..(628): unsure at all n locations
tacgactcactttagggaaagctgctacgcctgcaggtaccggtccggaattcccgggtcgacccacgcgtccgttcattatcgcgaatctgagatttcggaagattcgatcgatttgggggttttagggtttaatctcaactgctaatcaatggcgccacctccaggactttactccggtaccagcactcttgctctggttgctcgtgcttcggctttcgggttgggtctcatctacggcaacatcaagctcaaggctttaaagataaagaagaattcgcagattaaggccgaagcaaaggctcatcactaaaccaactcttcttctccttctcaataagattatgaagccaagtgattgttatctctaaatgtagttcttttcctccttaagctatatctccctcggtgacattttttccatctttctgtttttttaatcaaaatcttctgtctgacaaagcaatcgtatacccgttttggtttaaacctgagttcttctttggtactttcctgctattcaataaacaccatatttttatcaaaaaaaaccaaaaagnnnnnnnnnnnnnnnnnnnnnnnnnnnnnnnnnnnnnnnnnnnnnnnnnnnnnnnnnnnnnnnnnncac

SEQ ID NO: 127704 - DNA, 697 bp, Arabidopsis thaliana
ctatacgacttacttagggaacgctggtacgcctgcaggtaccggtccggaattcccgggtcgacccacgcgtccgcgatcgccggcgattcaaagaagcagatagaaaaatggcggagatgaagagtgtcggagtagttggtgctggacaaatgggttcaggaatcgcgcaactcgccgccacgagtggcctcgacgtttggctcatggacgctgatcgagatgccctctctcgagccaccgcagctatctcctcctccgtcaaacgattcgtctccaaaggtctaatctccaaggaagttggtgatgatgctatgcatcgtctacgattaacatcgaatcttgaagatttgtgttctgctgatatcatcgttgaagccattgtggaatcagaagacattaagaagaagctgtttaaggatctagatggtatagctaagagttctgcgattttagcttctaacacaagttctatatccattactcgtcttgcatctgctacgggaaggcccagccagggtcatttgggatgcactttactggacccctcctccaataatgaaactggttgaaatcattcgcggtgcagatacctcagaagagacgtttcttgctacaaaagttctggctgaaagggttggcaagacaacagtctgctcacaagactatgccgggattcgtagtgaaccgaatcctc

SEQ ID NO: 127705 - DNA, 423 bp, Arabidopsis thaliana
atatccttcatcgtcctcatggctctgctagttggtcacaaggggatacaaaagttctagctgcggtttatggacctaaagcaggaacgaaaaagaacgaaaatgctgagaaggcttgttttgaagtcatatggaagcctaaatccgggcagattggaaaagttgaaaaggagtatgagatgatattgaaaaggacgatacagagtatttgtgttttgactgttaatccaaataccaccacctcagtgataattcaggttgtgcatgatgatggttctcttctaccatgtgcgataaatgcagcatgtgcagcgcttgtcgatgcaggaatccctatgaagcatctggctgttgctatatgctgttgcctggctgagaatggatatctcgtactcgattcaaacaagcttgaagaaaagaaaa

SEQ ID NO: 127706 - DNA, 377 bp, Arabidopsis thaliana
gtcaaaaatggcgaaccgtcgaattctctgtatctcttgaatttcccagagattaatttgaatcttcatcatcttcttctctctggattcgccgagaaaccttcttcctctgcttctctcgtcgatattctcttccttcccgcttaagccttcggctagatatcaatggaaaggtcgtatagcaatgcaagaatggccaacagtttcacgttctggaatgattgtgttgagccagaggatttagaagaaatgtggatggatcctgcggtcagtgctgaatggattgatgttggagagactaaacgccagaaggttcacctctcaagggatcctgatggtcagccttatcttacacagaccgagatgagggctgtttc

SEQ ID NO: 127707 - DNA, 328 bp, Arabidopsis thaliana
atttcattgaacctcaagatccaagcaaattcgtctggagaggacagttttatggagagcaagatgatttcagacgcttctcgtagtttagccgagctggactacagttgcttcttcagtccggcaagaaaacccgacatcatacattgtcatgactggcaaacagcttttgttgcgccgctgtattgggatctgtatgctccaaagggattagattctgcaagaacatgctttacatgtcataattttgagtatcagagtaccgcgtctgcttcagaattgggatcctgcgggcttgatgttaaccagttaaatagaccagacagaa

SEQ ID NO: 127708 - DNA, 525 bp, Arabidopsis thaliana
  unsure (1)..(525): unsure at all n locations
atgatatnnnnnnnnnnnnnnnnnnnnnnnnnnnnnnnnnnnnnnnnnnnnnnnnnnnnnnnnnnnnnnnnnnnnnnnnnnnccacgcgtccgcccacgcgtccgctcaaaccctaaaataaattaaacgagttctacgtaagaaggagagagagaagaatgggtcgccaaaacattgtcgtcgtggttgccctcgtcttcatggccatcattggccttgccgcagctgcctcctctccatctccttcagcgtctccctccaaagctccagctgcctccaaaaccgatcatgtcgaggctccagtcaccgatgaccaaatcggaaccaccgatgacgatgcagctcctactcctggtgacggtgacgttgcagtggctggtcctctaggaagtgactcctcgtacgacaatgcgcctacaggctctgctgattctgccaaaagcggtgcggcagctcttggcgtctctgcggtcgtcgttggtgttacatccattgctggtcctttcttgttactctaagttggg

SEQ ID NO: 127709 - DNA, 439 bp, Arabidopsis thaliana
  unsure (1)..(439): unsure at all n locations
cgcgtccggttggtctgagatcatttgctgctggtgggaagttactgcagatcaatagaagaatggagtttgtgtttgctagccatagttttgacgtgtgggagagttggagtctagaaggttctctggacgaatgtcggcttgttaactgcaggaattcctctgcggtgttggacgctcgtgtggagatattggcaatggtaggagacgatggtatcacacgttggatcgattaaaaangaaaacagagtctctccatttgtgagcttctctcttttaattacttttgttactttaacatccttaggattcacagaccgaaaacagagacacccaatttttgtgtttcgagactgtgtcgtgtgttgtgtagttggtatcaaccaacttatatctgtaatcattgtttctttttatttattctcggtttgcagaaaca

SEQ ID NO: 127710 - DNA, 902 bp, Arabidopsis thaliana
cgaagagcttttccgattcttaaaagaacggtgttgatttctacatgaagtgacatgatcattgtcttcacaatatgagtgatgaagacagtcctatcaggtttctacctagtggtgctggatccaaggcttggagaggagatattaacccagtgaccatcaatcccaagctactggaattctattatgatggtcaaggattcatgtctgctcggttcactcactcggacgcagagatcgtctttctacgaatgtctttggtgagattttgcacaaatgggtcacttctaaacaacttcttcattcctctgtttgaagataaaaagccttaataaatttggcttcctttgtaattttgtaacatacatttaagattcttaagtcctattgcaggctaggtaggcttcctgcttagtttagcatccctatcatttttagcaatagcttattccatcccaataacatatataatgtacgatcttttcctcaaatttttgatacaagtgtaatgatacccttaatgggtatcttcttaatgctacataagttagtcaactgcattacagaccatgtttttagttcaatacaaagtgggacctcgcatctacatggctctcaacatcccaaaggaacgacccgaaagtaactgcctccaagacgagcctcttcattccaccgaagctgatctttatctgttcgtccttcgatgaatcgactgtgccctccggtgttattacaatctcaggcttaccaaacaatgcctctgtgtgcttctcgatgattccaactgcttctcttgatcttatagtggcgtatctctgcagcgtctccgcatcaaatgacatcacatatgaccttaatcgggatggtttaatctcgctgccgaagcccttagcactaac

SEQ ID NO: 127711 - DNA, 589 bp, Arabidopsis thaliana
  unsure (1)..(589): unsure at all n locations
nnnnnnnnnnnnnnnnnnnnnnnnnnnnnnnnnnnnnnnnnnnnnnnnnnnnnnnnnnnnnggtccggaatcccgggtcgacccacgcgtccgcggacgcgtggggtcctattcagtttctaactagtggtgctggatccaaggcttggagaggagatattaacccagtgaccatcaatcccgagctactgaaattctattatgatggtcaaggattcatgtctgctcggttcactcactcggacgcagagatcgtcttactacgatgtctttggtgagattttgcacaaatgggtcacttctaaacaacttcttcattcctctgtttgaagataaaaagccttaataaatttggcttcctttgtaattttgtaacatacatttaagattcttaagtcctattgcaggctaggtaggcttcctgcttagtttagcatccctatcatttttagcaatagcttattccatcacaataacatatataatgtacgatcttttcctcaaaaaaaaaaccaaaaagnnnnnnnnnnnnnnnnnnnnnnnnnnnnnnnnnnnnnnnnnnnnnnnnnnnnnnnnnnnnnnnnnnnnn

SEQ ID NO: 127712 - DNA, 536 bp, Arabidopsis thaliana
  unsure (1)..(536): unsure at all n locations
agctctcctacgactcactattnggaaagctggcacgcctgcaggtaccggtccggaattccggtcacccagcgtgcgatcaatggcttcacttcttattttcccccaccttcaccattttgattcttcactggaccgtagagaggtactagtagttcgccattcacaagcatcaaggcgatttctcactccgaaagcttcaattaatggcagcggaatcacaaacggagctgcagcggaaaccacctctaaacctagtcgcaaagggaggaagaagaagcaaacatcgacggtaattgagaaagataacaccgagactgatcctgaattgaatccggagttagctgattacgacgacgggatcgagtttccgtacgacgatccgcctcttgtgtgttgcttcggagctgtacagaaggagtttgttccggtggtgcgagtccatgataatccgatgcatcctgatatgtactcgcagtggaagatgctacagtgggatccaccggagtttggagagctccgggaggtccgccgtc

SEQ ID NO: 127713 - DNA, 953 bp, Arabidopsis thaliana
  unsure (1)..(953): unsure at all n locations
nnnnnnnnnnnnnnnnnnnnnnnnnnnnnnnnnnnnnnnnnnnnnnnnnnnnnnnnnnnnnnnnnnnnnnnnnnnnnnnnnnccacgcgtccgtgtttatgtgcttttaaaccctgctatcaatcacacacagaaggatcttccagtgactatttatgaaagtgaattgcatgtcattgatggaatcccgcagctaattttcgctcatacaagctacacaatcgagacagttgaagctgaacggatatcagttgatcatgttgcacatcttaaaccatctgacggaggctcagcagcaacccagttggctgctcatcttactggtatacatagtgccatcaagatgcttaatagcagaatcagagtgctttaccaaaatcttgctgcaatgcagaaaggtgataaatcttgtgacaactcagttctgagacaagtatctagcctgctaagaagattgcctgccatggaatcagagagatttcaagataatttcttgatggagtacaacgacaaattactaataacttacctagcgatgattacaaattgttccagcaacatgaacgagatggtcgacaaattcaacaccgcatatgacagaaacactcgaagaggtggaagaactgcattcatgtaaaagatcctttccagcgattctagttctaaagatcttctcttggttcctgaaaccatttttaacattgcctctgtgagaatctataactcagacggcaagactttatcctcttcattgtttctatatctataagaacatctgcttatctatcaaagctcttgtttgatcttgaacaagtttctattgttagtaaaaagattttaaggtttgattctaaaaaaaaaaaaaacccaaaccaannaagnnnnnnnnnnnnnnnnnnnnnnnnnnnnnnnnnnnnnnnnnnnnnnnnnnnnnnnnnnnnnnnnnnnnnnnn

SEQ ID NO: 127714 - DNA, 675 bp, Arabidopsis thaliana
  unsure (1)..(675): unsure at all n locations
ctattgcggnncngggnttncccaaatcttncncaagccnnaagggggtaanctgggnccacccnngtctggggccaggttcttgccctgctaggagattncctgccatggatccngggngtttccaggataattcttgatggngtncaccggccaaattnctaataacttncctagcgatgattacaaattgttcccagcaacatgaacggagatggtcgacaaattcaacaccgcatatgacagaaacactcgaagaggtggaagaactgcattcatgtaaaagatcctttccagcgattctagttctaaagatcttctcttggttcctgaaaccatttttaacattgcctctgtgagaatctataactcagacggcaagactttatcctcttcattgtttctatatctataagaacatctgcttatctatcaaagctcttgtttgatcttgaacaagtttctattgttagtaaaaagattttaaggtttgattctatcagtctctctagttacatccacatcagtctccagttagcaattgcagttttgccacacaacactcgcttttttcttctttgttgatttcaatataagatatagaacccgacaacaagaagactccacccaggcatgancaataaaacagccttaaccttccccaaagtttgaaac

SEQ ID NO: 127715 - DNA, 558 bp, Arabidopsis thaliana
tgattacttccagctctcctacgactcactatttggaaagctggcacgcctgcaggtaccggtccggaattcccgggtctacccacgcgtgcgcactttgatcccaagcaccttgtgggcacaagtcaacactctcttcgtcaaacaagggaccacgctggaccgaaaaattggatccaacttccagatccccgcggcttcattgggaagctttgttacgctctccatgcttctctctgtgcccatgtacgaccaatcctttgttcccttcatgcgcaagaaaaccggaaaccctagagggattactttactccaaagactaggggtagggtttgcgatacaaattgttgcaatcgcgattgcttcggctgtggaggtcaagaggatgcgcgtgataaaggaatttcacataactagtccgacacaagttgtgcctatgagcattttctggttgctccctcagtactctcttctaggcattggggatgtgtttaacgcaattggtttgcttgagtttttctatgatcagtcacctgaggagatgcagagccttggaac

SEQ ID NO: 127716 - DNA, 511 bp, Arabidopsis thaliana
  unsure (1)..(511): unsure at all n locations
nnnnnnnnnnnnnnnnnnnnnnnnnnnnnnnnnnnnnnnnnnnnnnnnnnnnnnnnnnnnnnnnnnccacgcgtccggagtgatagtaaagttgagaaaaaattggaagaatctgaaactcaagaggagatagtgaagaaccataagtgtaactcgggttctaaagataacagtctcatttctgagcaaaagcaggaggagaacgataaagagtgtcctgcaagcatggcaaagacttttgtggttcaagagatgtatgatgcaaaaatggttaatgttgtcgaaggattgaagctatacgacaaaatgcttgacgcaaacgaagtttctcaactcgtttctcttgtaaccaatctgagacttgctggaagaagaggtcaacttcaaagtgaggcatatgtgggttataaacggccaaatagaggacatggacgtgagatgatccaactcggtcttcctatagctgatacgccgcctgatgatgatagtatcaaagatcgaagaatagagc

SEQ ID NO: 127717 - DNA, 504 bp, Arabidopsis thaliana
  unsure (1)..(504): unsure at all n locations
nnnnnnnnnnnnnnnnnnnnnnnnnnnnnnnnnnnnnnnnnnnnnnnnnnnnnnnnnnnnnnnnnnnccacgcgtccggagaagaagaaagtggggaatgtgagaaaggttagtgttgaaggaagtaatagttatggtaatgggagagtttctcaaagagtaaagaaacctgaggggtttggtaggcgaaaggagattaaggaagatgtgaagttaaatgaaagatatgattgtgaacattgtgggaggagaaagaaaagttctgagttggagagtgaatctcggcgtggttctaaattggttactggtgagtatattggaaaaagttataggggggatgaagaaagagaagttcggccaagaaggagaaagagttcgagttgttcatcgtattattcccttgcttcttcaggggagtttgagagtgatactgaagatcaggacgaggatgtagagatttatcgcgaaaacgtgagaagttcagagaagaaggttgttgatcag

SEQ ID NO: 127718 - DNA, 552 bp, Arabidopsis thaliana
acgactcactatttggaaagctggtccgcctgcaggtaccggtccggaattcccgggtcgacccacgcgtgcgtatcttcttccccttgactttggaagctgctattcctctgtaaaacaatagcatgaagaagaagctccagacacgttttccagcgacaaggattaagaagattatgcaaactgatgaggaagttggcaaaatagcaatggcagtccctcttcttgtttctaaagctttggagctgtttttacaagacttgtgtaatcacacgtatgatgtaactctaagccgaggtgctaaaactgtcaacgcctttcatttgaagcagtgtgtgcaagcgactaatgtctttgattttctaagagacactgtcgctaaagttcctgatttgggtggctcagacactgaagaccaatcagctaccaaaagaaggaaagttgttgatggaagtagttgcaacgatgaagatatgataaagaccactcaaatgcatgaggtcaaacatactagctgtggcagaggaaggcgaggtagaggccgcggacgaa

SEQ ID NO: 127719 - DNA, 745 bp, Arabidopsis thaliana
caatcgagtcgccattaacatatttcatcaagctcagtccactcttctcatgaaacttcatcatcatcgaccttgaccctgataggtttcagacgacacccattattgtaaatctgctgctggagtcttttttgtctgaatcttcttcttgttgagacactgtttcttcttggtctgtgatttttgttttgttctcattaggacgttctttattccggttcagatttactggatcgtcattttctctttgaaattgtatttttttgttccttttctggtatgttgtgaaagctatgagattgctgtaagaatccaagactgaccaacatgtttcccctgtgctcggccacaagctgccgttaccattctcagattttatttcctggcaattggcgaggctgttcttccttcaggagagagttgattcacagatacagttcaggtgacaatgccttctttggtatctctaatggaacacgcctgcagaagagtttcgtacctcaagccactgggagtttcttgaccggtactatcgaaaaaacagaacaaccagtatcaacattcggaagtttgtgccagaatgagttggacagaataaactacatggtttataacatgagtgaagcttttgtagcgagtgatgagggactgacatatgtagaaaatggagaagatgtgttccctgttgaagcttgtgcagcagatgtttctcctgttgaagctgttgtaccagatgttttcccca

SEQ ID NO: 127720 - DNA, 540 bp, Arabidopsis thaliana
acgactcacttttggaaagctggtccgcctgcaggtaccggtccggaattcccgggtcgacccacgcgtccgctcttcgttactaatgtcatcgtattcttcagattccacggcggcgcgtgatcaacatgcgcctctactccgtccacgacacgacggctctttttcttcttcttcttcatcagccagacctacagctctcgccgttctattaggacggatcaccggccaccgagcaccgtcgatgctggttagagaaacagcggcgcgtgctctcgaggagagacgaatcgattggggttactcgaagcctgtagttgctgctgatatactatggaacgctgctttagttcttgcgtcagcggttatgcttgtcggtaccgttgaagaaagacctaatgaaccgattacggtttggatctgtgtgtatgggttacagtgtttgttccatgtggttttggtttggtctgagtattggagaagaactcaactcgtagagctagggatttggagtcttatgatcatgaagattacaccatt

SEQ ID NO: 127721 - DNA, 675 bp, Arabidopsis thaliana
  unsure (1)..(675): unsure at all n locations
ggaagatcagacagagctcaagagaagtaaagaaactgcgacaagagaaagaagattgactttggagaagagagagagtaacgatggaagatattcataatctcgatatagagaaaagtgatagatcgatttggttgatgaagtgtcctgtagttgtagacaaggcatggcacaagatagcagcttcgtcgtcttcttcttttgcttcctcggattctcctcccgacatggcaaagattgttcgcgaagttgatcctctacgggacgattctccccccgagttcaaaatgtatatggttggtgctgagtatgggaacatgccaaagtgctacgctttgaacatgttcacagactttgttccgatggggggcttttccgatgttaatcaaggttgtgcagctgctgaaggaaaggttgatcacaaattcgatatgaagccatatggtgaaaccattgaagaatatgctaggctttgtcgtgagagaacgaacaaanccatggttaaaaatcnacagattccgggttattgataatgancgcngaatttcatatgaaggccatgccntgggaaatgcttggttttagtttccctcccaattcccaacgggaaaaagaaggaaacctccccccantccaatccnaacccgaaggtgaaaaaaggancaaagaaaaaat

SEQ ID NO: 127722 - DNA, 798 bp, Arabidopsis thaliana
  unsure (1)..(798): unsure at all n locations
tgggggtaattttggggaaataagggccacggtagaaagcttagaaaaaggattgattcccaagccccccaaaaattgctttataaaacccaacagggctgggagtcgggatttgagatccgataaccgaggttccatcagtttgtactctttttggcaattcccatccggagactgaggagatatacatgatacttgacagtctgatctctttctgacacttttggaaggtcctagtttctttatatgacttgacacagctgcactctgctttataacagcgagctttgtgagaaattgttggtttgcaatatgtatggcttcagagaaaagcaggcattttcttcattgatccacacaggtcacatactttgtttctgatacacaaatgctggtccggtaattttgttgttctgtaagaagagccactagtacgtgataagccagcccacaacatgttgcttgattagaaagtaagtcttgccattcctttgtaacatgctatcacgtggtttctttctgtgattccagcaaaaaacttttagtttacaggtccatggacaatcaaacattcgagaagaggaagtctcttacgccaagcattagtactatttaattatgatcttttagttttctaacactttcctcatgtatctttattgagaatgatcaataaacaaggcacgcaatatagagactttgttacagaaaaaaaaaaaaaaaaaaaaggccgagggcggccgctttagaggatcccagcttgcgtgcgcgtgcattcaagctgtgttattgnnnnnn

SEQ ID NO: 127723 - DNA, 672 bp, Arabidopsis thaliana
  unsure (1)..(672): unsure at all n locations
tggcagcggaccttcngccttgggagccnagtccctaangcttgcccagntgcactctgcttnatacngcgngctcgtgcgaaattggtgggttgcaatatgtatggcttcagagaaaagcnggcatttcttcatggatctacacaggttacatactttgtttctgatacacaaatgctggtacngtaattttgttgtactgtaagaagaggaactagtacgtgataagccagcaaacaacatgttgcttgattagaaagtaagtcttgccattcctttctaacatgctatcacgtggtttctttctgtgattccngcaaaaaacttttagtttacaggtccatggacaatcaaacattcgagaagaggaagtctcttacgccaagcattagtnctatttaattatgatcttttagttttctaacactttcctcatgtatctttattgagaatgatcaataaacaaggcacgcaatatagagactttgttacagaatatattcgcgtgtagaacgagattacatagattctacagacattaaacacgggtcttgattcaaccatagttcttttgtgactaagcagaactgactttgccagtttgatcctcttcgaacgcaatatcaacaacccttggacctttgactttgtcttgggaaagcttactgatgg

SEQ ID NO: 127724 - DNA, 660 bp, Arabidopsis thaliana
  unsure (1)..(660): unsure at all n locations
cnnnnnnnnnnnnnnnnnnnnnnnnnnnnnnnnnnnnnnnnnnnnnnnnnnnnnnnnnnnnnnnnnnnnnnnccacgcgtgcgcggacgcgtgggcggacgcgtggggtccacgatgaagatgaaagcggatgaggctatttggggatcactgcttaatgcttgtaagatacatggccatctggatttggctgaagttgctgtaaaaaacctggttgctttaaatcctaataatggaggttatgtcgctatgatggcaaatttatatggagagatgggtaattgggaagaggcacgtagagctagaaagatgatcaagcaccaaaatgcttataaaccaccaggctggagtcggattgagatcgataacgaggtccatcagttctactctcttgacaaatcacatccggagactgaggagatatacatgatacttgacagtctgatctctttctgacactctttggaaggtcctagtttctctatatgacttgacacagctgcactctgctttataacagcgagcttcgtgcgaaatttttggtttgcaatatgtatggcttcanaggaaagcaggcatttcnttcattgnnctncacaggttacanactttgtttctngttccncaaatnctgggacgggaatttttttggnccntnag

SEQ ID NO: 127725 - DNA, 623 bp, Arabidopsis thaliana
  unsure (1)..(623): unsure at all n locations
acggacgcgtgggcgacgacaactttctcttgtctcttctcacttctctttcctctctcctctcttctcaaatctctctctctttcgtatttcttggagacatctttctctggaactgttcttcatcgaattctatcttttgagagaaactaaattaagttgataatcgaagaacttcctcgaaattaggacttcttctgctttttgttgtttcctagagattttcctagaacgtggtccaagaaaatcacacaaaaaggttcattccttttttcttaccagaaaccacaaatcaaaatcatctcccctgtctttgtttgaaatctctcaaatttaagaaggatcatccattcactaacctgagattttggataggtttcatctatttcaggtgggaattccagtgcatcgaccatgatcaacacctaaacttgcaaattgaccgttttgcccttgggnatcactataaatgtcgggnagnccagacctctangtggcagcgtggtcgcancgtggttccaggttnttcctcttaatntnccggccgattnttnatcgnccgtttggaanaagctttgttnggttaaaaaccgctngngggttttanaanattttnaatttgg

SEQ ID NO: 127726 - DNA, 1105 bp, Arabidopsis thaliana
  unsure (1)..(1105): unsure at all n locations
nnnnnnnnnnnnnnnnnnnnnnnnnnnnnnnnnnnnnnnnnnnnnnnnnnnnnnnnnnnnnnnnnnnccacgcgtccggtttgaatcttggagggatgggttgcagtgccggagttatagctgttgatgtcgctaagggattactacaagttcataggaacacttatgctattgtagtaagcacagagaacatcactcagaacttatacttggggaaaaacaaatcaatgctagtcacaaactgtttgttccgcgttggtggtgctgcggttctgctttcaaacagatctagagaccgtaaccgcgccaaatacgagcttgttcacaccgtacggatccataccggatcagatgataggtcgttcgaatgtgcgacacaagaagaggatgaagatggtataattggagttaccttgacaaagaatctacctatggtggctgcaaggactcttaagataaatatcgcaactttgggtcctcttgtacttccattaaaagagaagctagccttctttattacttgtgtcaagaagaagtatttcaagccagagttaaggaattatacaccagatttcaagcttgcctttgagcatttctgtatccacgctggtggaagagctctaatagatgagctggagaagaaccttaagctttctccgttacacgtagaggcgtcaagaatgacactacacaggtttggtaacacttcttctagctcaatctggtacgagttagcttatacagaagctaaaggaaggatgaaggaaggagataggatttggcagattgctttggggtcaggttttaagtgtaacagttcagtatgggtggctctgcgagacgttaagccttcagctaacagtccatgggaagactgtatggatagatatccggttgagattgatatttaattttatggttaaagagtccaatctatcttatcttatttattttcgttgacattttatcctatgtttgttttaaagagtttgcattgaataccatttgtggtctatttggtaaaaaaaaaaaaaaaagggcggccgctctagaggatccaagcttacgtacgcgtgcatgcggcgtcatagtcaatctataggtc

SEQ ID NO: 127727 - DNA, 853 bp, Arabidopsis thaliana
  unsure (1)..(853): unsure at all n locations
nnnnnnnnnnnnnnnnnnnnnnnnnnnnnnnnnnnnnnnnnnnnnnnnnnnnnnnnnnnnnnnnnnnnnnnnnnnnnnccacgcgtccgtgggtttgcaagagaaagataggctaccaagtgatgtttgcaaacctgtcagatcaaatgtgccgatgaatgcagatagttctgattcttcaaggaggcttgttccagtttcccgtgagctggagaagcctgtttgcaaagatactcacatggggagacatggtgtaaaatctgcattagatggtgaaagtcttcgtttatcaaagcaagaaaaaccaaagcgtatgaatgaaataagcgcacccaaagaagagaatgcggaacaatctttgggcgttgtatctgcgtctaattgcggaaagtcaaagatcaaaggcgtctcactgattgagctgttcactccagagcaagtagaggagcatatccgcggtcttcgtcagtgggtaggccagagtaaaaccaaggcagaaaaaaataaagcaatgggactctccatgtctgagaactcttgccagttatgtgctgttgagaggcttgcatttgagccaacacctatttactgcacaccttgtggggcacgtgtcaagagaaacgctatgcactatacggtagtggctggggagtcacggcattatgtctgcattccttgttacaacgaagcgcgtgcaacactggtttctgttgatggaactcctgtaccgaagtcaagggttgagaaaaagaaaatgatgaagaggttgaagaatcgggggtgcatggtgataaatgtcaagcatgggcagatcaaatttgtgctttggtcaccgggccgaggaatcatgggc

SEQ ID NO: 127728 - DNA, 389 bp, Arabidopsis thaliana
cccacgcgtccgatcagaatccttacaagaccatttgtgtctgtctccaccaaacccttcttttctccatttttcttttttgctttgtttctgtgctacgatttgtcaaaaaaaagaaacccaaatcaaaagcttcgaaatttcataagatttctttgtttttctgaagatccaaggcacacaaaaaaacagctttttttgtttcttcaatcaaggattttccagggttttgataaccccatgggttcagggttctctctgtttcaaaagaatttatcgtcttgttatggagatcgagatctgttgcagcctggtttaggagatttgcctgaaagttgtgtggctttgattctccagaatttggatcccgttgagatctgtagattctc

SEQ ID NO: 127729 - DNA, 683 bp, Arabidopsis thaliana
  unsure (1)..(683): unsure at all n locations
nnnnnnnnnnnnnnnnnnnnnnnnnnnnnnnnnnnnnnnnnnnnnnnnnnnnnnnnnnnnnnnnnnnnnnnnnnnnnccacgcgtccgtcggatagccttagctgtgtagctctaagaaatcggctcgggatctctcatggaagatgcattaattgtttgtgggagcttgatctgatccgtctagatgctggggattgtgacatacttgagatcattttaaactattgtcgacctaatgtgaacgtacatagaggatccattatcatagccgcaccaccgttcaaggatcatcgagtttatgctttcataaaacgtgcccagagctgagtttagcgatcaggttcctagatgataaccgcgtgaccaattcatcaaactcggttcacatctcatgtcatgtcctacgccacatatgtaagagaatcgatgcatctatgtaatggacttgagcaataaagatactctaactgtggcatatcatggttaagaaccagaattacttggtagctagtgaaagtccttttattaattcatagcttagaaacttgtgagttctatgcgatcaacggagacattcgagtatgtctctagtgatattcaatagttgaagtgggtgctaaagaactaacggatctatgagaatgtactgactctgggtatgttcctcagcaaataatagata

SEQ ID NO: 127730 - DNA, 1037 bp, Arabidopsis thaliana
  unsure (1)..(1037): unsure at all n locations
aantaanttnaggggcccaaanggaaggccaanaccgncnaangaanccggncctaaacctgggncccccnanncgggcccnccctttttttttattntttntttttaaccaaaaaccggtatatataaataaatcctccccaactattcattcaaaccctagattgctcgctaaaccaacctttctgttgtaaccagttttgggattatacaaataagaaactaagagaaccacaaaagagatcaaatatgaattgattagaagccccaaacaaagagtagaaaggtttgaatatgcgatgatgggatgtgaccaaataacacattttctccggttaggggattcaatgtctgtatagtacagacatgttgaatgatgatgatggcatttgttgttggattccacattccaaatactctgattcgcattatacacatacctttttctttgttttctcaagttttttcattggtctccattgattccaaatatgcggaccttgtgcatgtgcgggaatttcgcgaccaccatgacaaatacagccagtgtgttgagaaagagcatcgggtgctgatagcctgttgtgtgagaggctatcaagtacaagacaacaggaacaaccggtcagaaattgccgattaccgtgtaagctgctttgccattatcaatctgttcccaccaagtcaatctattatagactccttgatcatctccaaatggtgttcccttcttccaatggaaggaatgatacgtgacggtgaaatgagcgagatgaacaatggtccaagcgatgccaggagaacaatggaagacgcagagaacgaggagccaagagaagaagaggatgagaatataagtagtccatacaccaggatacgtgaaccactctgtgttccgattcacatccgtcgtcggaagtgctcttacgtacatcgtctttgtcaccggacagatttggaagaagatcggagatgatgattgatgaatcgtcgttgagcaagttttctttcggacgcgtggtcgcccgggattcgga

SEQ ID NO: 127731 - DNA, 463 bp, Arabidopsis thaliana
  unsure (1)..(463): unsure at all n locations
cttatcaaatgatttttttcctatgatatgcaataccactgggttagatatcgcaccttaataatgaagaatatatgtatcaaaaacggtatatataaataaatcttccccaactattcattcaaaccctagattgctcgctaaacaactttctgttgtaaccagttttgggattatacaaataagaaactaagagaaccacaaaagagatcaaatatgaattgattagaagccccaaacaaagagtagaaaggtttgaatatgcgatgatggggatgtgaccaaataacacattttctccgggtagggggatccaatgtctgtataggtacagacatgttggatgatgatgtgggcattggtgtggggttccncattccaaatacccnggatcgncttatacacanccttttccttggtttccccagntttccatgggcccatngntccaaaanngggcctg

SEQ ID NO: 127732 - DNA, 619 bp, Arabidopsis thaliana
  unsure (1)..(619): unsure at all n locations
gacacatctggaggcaaagtcaaagggcaaggcactggaactgaattcgttgtcactctcattgctgttgatgatgagatctctgtaaatgctgcaatgcttcaggaaggaatagcgagaatggagaaacgtcagaaatgggggcacaaaggcaaccaagctgctcttgatgctttagagaagttccaagaggaagctcgcaagtcgagaattggaatctggcagtacggtgacattgagtccgatgatgaggacactggtccggccagaaagcctgctggtggtcgccggtaaaattataaaaaccgataagtcgtgatatggttcaaagggcccatgaggtagggagagaagcttcggtgtgtttctctaaagagtttaaagacatgtcgaactttttgtaaggttttagatttgtttcttctctccttcttttaatttatcatacggtttaggctttttaaaggaattttccatgtaggacttgaaataaggggaagtttgaaccatgcttacagttaaaaaaaaaaaaaaaaaagnnnnnnnnnnnnnnnnnnnnnnnnnnnnnnnnnnnnnnnnnnnnnnnnnnnnnnnnnnnnnnnnnnnnnnnnnnnnnntt

SEQ ID NO: 127733 - DNA, 708 bp, Arabidopsis thaliana
  unsure (1)..(708): unsure at all n locations
agctctccacgactcactatttggaaagctggtccgcctgcaggtaccggtccggaattcccgggtcgtcccacgcgtgcgcaaactggaaagagtaaaggaaggaaaaaacggaattttgacgatggatgcagagatattccaagtgacgccgacgtttcacctggtggaagtgaagaaatgtaatggagatacaatggagtatcagaagttagtggaggaggatcttaggcctgctttggcagatattgtttgggtttggcaaggcgagaaggagaaagaggagcagttactgcaggatgaacaaggagagcaagaaccatcatagcaagttcagctacaagcctacaactgcaagcacatgaattgttgcaggaacatgaaaatggtaaccctcttgcgacttcagctgaaacagaagcaagcatcaagaaactctaacgaaaacagaggaaggaaaacaataacaattgcacaaaatggattctttttgcatatagactacaaaaattgtagatagttgattgatttgtaacaactacgagctttttttttaccttgcctcttgtgaagttttgaacgtatattgtttcatgagtacagtaattgaatttctttaagaaaaaaacaaaaaaaggannnnnnnnnnnnnnnnnnnnnnnnnnnnnnnnnnnnnnnnnnnnnnnnnnnnnnnnnnnnnnnnnnnnn

SEQ ID NO: 127734 - DNA, 549 bp, Arabidopsis thaliana
aggtctctacgactcactattgggaaagctggtcacgcctgcaggtaccggtccggaattcccgggtcgacccacgcgtccgcggacgcgtgggcggacgcgtgggctcgaggtggtatcgaaagggtggtgaacgatcggaaatggaaagaagtgattggtgcattcagttttccgacaacgataacaagtgcatcgtttgtcttgaggaagtattatctcaagtttctttttcagctggaacatgtgtattaccttgaaaaaccggtgtcttcactccaatcaacagatgaagcattgaagagccttgccaatgaatctccaaaccctgaggaaggtattgatgaaccacaagttgggtatgaggttcaaggattcattgatgggaagtttgatagcggctatctggtgacgatgaaattgggttctcaagagctgaaaggtgtcctttaccacattcctcaaacgccaagtcagtctcaacaaaccatggaaacaccttcagccattgtacaatcatcacaacgccggcataggaagaaacaaaga

SEQ ID NO: 127735 - DNA, 725 bp, Arabidopsis thaliana
  unsure (1)..(725): unsure at all n locations
atgcttnnnnnnnnnnnnnnnnnnnnnnnnnnnnnnnnnnnnnnnnnnnnnnnnnnnnnnnnnnnnnnnnnnnnnnnnnnnnccacgcgtccgggagagtgaaggaacatcatgggaagcagcacgggcgatcttgtgacacgtatccaatcagctcaccgtttcgatcacgatgccttgtttcgttttgccgccgacaacgtctctggctttccgaccaacccttcccaattcaaagtctcacagttcggacatgggcagtcgaatccaacgtttctgatagaggttggctcagggagttccttgaaacgatacgttttgaggaagaagcctcctggcaagcttcttcaatctgctcatgctgttgatcgagagtttcaggtgcttcgggctttaggtgaacatacacaggttcctgttcctaaagtcttctgcttatgcactgaccctgctgtcattgggactgctttttacatatggagtttatggaaggacgtattttcattgatccaaagttgccgaatgtagcacctgaaaggagaaatgcgatctatcgtgcaaccgccaaagccttggcatctcttcactctgctgatggggatgccattggtcttggaaatatgggcggcgagggcattactgcaaaaacagatagataggtggttcaaccatatttggcttcacagggaaggtaacctgaagggatcaaaatgttgagcttgtga

SEQ ID NO: 127736 - DNA, 548 bp, Arabidopsis thaliana
  unsure (1)..(548): unsure at all n locations
nnnnnnnnnnnnnnnnnnnnnnnnnnnnnnnnnnnnnnnnnnnnnnnnnnnnnnnnnnnnnnnnnnnnnnnccacgcgtgcgatcttctccgatacctctctatctatatctcttcgacgctgcaaattagccttaagcttctttctcctttaaacttttcgattattattccatttcctatctttttgtttcccccaaatcttttcacggaagcaaagaatacaattccaaaccctaatcccgatcatccgtctttcctctccggtttcaaaatatgagtaatcagaagaagaggaattttcagatagaggcgtttaagcatcgagtcgttgtggatcccaaatacgctgataaaacttggcagattcttgagcgtgcgatccatcagatttacaatcaagatgctagcggtctcagtttcgaagaactttacagaaatgcgtacaacatggtcctgcacaagtttggtgagaagctatatactgggtttattgctactatgacttctcatctcaaagaaaaatccaagcttatcgaggcagctcag

SEQ ID NO: 127737 - DNA, 456 bp, Arabidopsis thaliana
agagacttgaaaaaggtcgccggccattcttggttctgcttctggttttcttctgcgggctccttcagatagatgagatggatcaaatcgttaatgtggatgagtttcaagagctggctaaacaagccctccctaagatgtactatgatttctacaatggaggagcagaggatcaacacactctcaatgaaaatgtccaagctttccgtagaatcatgtttaggccgagggttctcgttgatgtgagcaaaatagatatgcctaccaaaatattgggttaccctatctctgctccaatcatgagggctccaacaggaaatcataagttggcccatcctgaaggagaaaccgctactgcgaaagctgcagctgcgtgtaatactatcatgatagtatcatacatgtcttcatgcacttttgaggagattgcttccagttgtaacgctgttcggtttc

SEQ ID NO: 127738 - DNA, 398 bp, Arabidopsis thaliana
gaccagagacttaaactggtttctgtatcttttactgggttctttcagatatataaatggatcaaatcgttaacgtggatgagtttcaagagctggccaaacaggccctccctaagatgtactatgatttctacaatggaggagcagaggatcaacacgctctcaatgaaaatgtccaagctttccgtagaatcatgtttaggcctagggttcttgttgatgtgagcaacatagacatgtctacaagtatgttgggttacccaatctcagctcccatcatgattgctccaacggcaatgcataagttggctcatcctaaaggagaaatcgccacagcgaaagctgcagctgcgtgtaacactatcatgatagtatcattcatgtctacttgcactatt

SEQ ID NO: 127739 - DNA, 614 bp, Arabidopsis thaliana
gctgtgactttcaatggaaaatcatataacttgcctgcatggtccgtaagcatcttgccggattgcaaaaatgtagctttcaataccgcaaagataaattctgcaactgagtctaccgcatttgctcgtcaatcattaaagcccgatggtggttcgtctgcggagttaggttcacaatggagttacattaaagaacctattggaatttccaaagctgatgcattcttgaaacctggtttgctagagcagattaacacaacagctgagaaaagcgattacttgggggactcactaaggacggatataaaaggcgatgagactttccttgacgagggatctaaagccgtccttcacattgaatctcttggtcaagggggctatgcttttataaatggaaaacttgcaggaagcggacatggcaaacagaagatttctttggatataccgattaatcttgtaaccgggacgaacacaaccgatctccttagtgttaccgaagggctggcgaattatggagctttctttgacttagtgggagcaggaataaccggacctgcgacacttaaaagcgctaaaggtggtagctcaattgattgggcttaacagcaatggac

SEQ ID NO: 127740 - DNA, 1306 bp, Arabidopsis thaliana
  unsure (1)..(1306): unsure at all n locations
tacgccggctctatacgacttacttagggaaagctggtacgcctgcaggtaccggtccggaattcccgggtcgacccacgcgtccgaaagaaaggaactccatggacagaggaagaacacaggatgttcttattaggtttacagaagctgggtaaaggtgattaggagaggtatctcaagaaactatgtgaccactaggacacctacacaagttgctagccatgctcagaagtatttcatcagacaatccaatgtctctcgtcgcaaaagacgttctagtctctttgatatggttcctgatgaggttggagatattcccatggatttgcaagaaccagaggaagataatattcctgtggaaactgaaatgcaaggtgctgactctattcatcagacacttgctcctagctcacttcacgcaccgtcaatcttggaaatcgaagaatgtgaatcaatggactccacaaactctaccaccggggaaccaaccgcaactgccgctgctgcttcttcttcttccagactagaagaaaccacacaactgcaatcacaactgcaaccgcagccgcaactacctggctcattccccatactatatccgacctacttttcaccatattacccgtttccattcccaatatggcctgctggttatgttcctgaaccacccaagaaagaggaaactcatgacattctcagaccaactgctgtgcactcgaaagctcctatcaatgttgacgagcttcttggtatgtctaagctcagccttgcagagtccaacaaacatggagaatccgatcagtctctttcattgaagctaggtggcgggtcatcttcaagacaatcagcatttcacccgaatcctagctctgatagttcagacatcaaaagcgtgatacacgctttataaaagacctgaggaagtgatggtctaaaatgggatctggtttggggtttacaggttagttgttggtcacagtaacttaaataagtttttctttgttaggttgtttaacttgggtaggatgttttagttcagctttgatcattagggaaaagaaaaaagaaaaaaaaaagggagaaaaacaaattattattttttgcttacatttctttatatttgtatgcttttattttgactctaggatgcgttaattttcgtttaatctgtactaacaattagaatttattagttttgaataaataaaatcacagtttgtttaaaaaaaaaaaaaaaagnnnnnnnnnnnnnnnnnnnnnnnnnnnnnnnnnnnnnnnnnnnnnnnnnnnnnnnnnnnnnnnngtc

SEQ ID NO: 127741 - DNA, 665 bp, Arabidopsis thaliana
  unsure (1)..(665): unsure at all n locations
cttctccaccggatctcgaaatcggagaattagccaaacgatggccgccgacggaatattccgcagcatcttcgagggttgtatctccggccttgattccgccatcgaacggcgtccttaccacaaaaactgcggatgtgctcttcacgataaatcaagtggcgctgggaaaaatcaaaatcagcgacggccgccgtcttgtcgccgccacggaagctcagagagcatctcgttcccgatccgaaggtcttggagcgaaggcaacatcatggctatgaatctcttctcctcatcgtcgtcttcttctaatctccaatcgctttcttcgtcttcttcgctctcaaatctggcatcagatttaccggtggataatgctgcgacggaggaaccgagcagatctaataaacagctacgatggacgattgatgaaggtgaagatgattgatgatgatgatgatcaattccaggttgttaacttttgctaatctctgtttaattaaacttctcaatcattgtatttgagaaccaaataatgtcagtcattgtatttttatttttttgtaaaagaaacgaaaatgtttgtttacgattgcaactttgaatgattagcatatacaccaatgaaaatttatttagccnnnnnnnnnnnnnnnnnnnnnnnnnnn

SEQ ID NO: 127742 - DNA, 564 bp, Arabidopsis thaliana
  unsure (1)..(564): unsure at all n locations
tgatcttcaggtctcnnnnnnnnnnnnnnnnnnnnnnnnnnnnnnnnnnnnnnnnnnnnnnnnnnnnnnnnnnnnnnnccacgcgtccgtgaaaatggtgcgcagcttcagaagagtacattgggtgggcaatggcaaggtaaagatgcgtcctttatgcgttctaatgatcatggtaacagagaagttggtagaagttgggatactagtggtcttgaaggcacagctcttaagatggttgagggtgatcgcaactctaagaactggtggagaaagcttgaaatggtacgcgaggttatagttgggagtgttgagagggaggaacgattgaaggcgctcatatactctgcaatttatttgaagtggataaacacaggtcagattccttgttttgaagatggagggcatcaccgtccaaacaggcatgccgagatttccagacttatattccgtgagttggagcacatttgcagtaagaaagatgctactccagaggaagtgcttgttgctcggaaaatccatccgtgtttaccttctttcaaagcagagtttactgcagctgtc

SEQ ID NO: 127743 - DNA, 422 bp, Arabidopsis thaliana
  unsure (1)..(422): unsure at all n locations
gaaagatcccatataatggagtatattatgaccctcctgaggaggataaatatgcgttcaaacatcctcgtccaaagaaacccacatcgctgcgtatatatgaatcacatgttggaatgagtagtacggaaccaaagataaatacatatgccaactttagagatgatgtacttccccgtataaaaaagctaggctataatgctgtgcagataatggccattcaagagcatgcctactatgccagctttgggtatcatgtgacaaattttttcgcacctagcagccgctttggaacacctgatgaccttaaatctttgatagacaaagctcatgagctaggtctggttgttctgatggatattgtgcacagccatgcatcaaaaaacacactggatggcctggacatgtntgatggtactgat

SEQ ID NO: 127744 - DNA, 816 bp, Arabidopsis thaliana
  unsure (1)..(816): unsure at all n locations
cagctctctacgactcactatatggaaagctggtcacgcctgcaggtaccggtccggaattcccgggtcgacccacgcgtgcgcccacgcgtccgaagaaactgagaagataaccataatctttgttgataaggacggagaggaaattcctgttaaagtaccaattggaatgtcagtgctcgaagctgctcatgaaaatgatatagaccttgaaggggcttgtgaggcttctctagcgtgttcaacgtgtcatgtgattgtgatggatactgaatactataacaaacttgaagaaccaacagatgaagagaatgatatgcttgatcttgcttttgggctcacagaaacgtcacgactcggatgccaagtcattgcaagaccagagctagatggtgtgcgcttggctattccttcagcaacaaggaatttcgcggttgacgggtttgttccaaaacctcattagtttccgcagagattcttcgacttgaggcattaatgatcaaagagctgattcatgtttctattggagttttgatgattgcttaccgagaggaaacagttcttagacctgaggcatgaaatgatcaaagagatgattatgtttctattggaggacttgatgattttttttattacttatcttagttttgatattggcatttctcgttgttgtctgagtttctaacagaacaacaagcgttaagcaaattttttggagaataaaaaaaaaaaaaacacaaaaaaagnnnnnnnnnnnnnnnnnnnnnnnnnnnnnnnnnnnnnnnnnnnnnnnnnnnnnnnnnnnnnnnnnnnnnn

SEQ ID NO: 127745 - DNA, 400 bp, Arabidopsis thaliana
agaagaatgactaatatggccggaaccgcctctcaccgagttccggtggaaatcaccaccacagcctccgtcacaagagcagcccatttcagattcagattcagactccggatctgattcagagaatcatcagcaccgtcacaatgatctatcaaactccatcttcgaagcttacctcgattgccactcatcttcgtccccttcctcaatcgatctcgctaagatccaatcttttctcgcctcgtcttcttccggtgctgtctcgtgccttatctgtctcgaacgcattaaacgaaccgatcctacatggtcctgcacttcctcatgcttcgccgtctttcaccttttctgcattcaatcatgggctcgtcagtgcttagatctacaagccgcgcgtgca

SEQ ID NO: 127746 - DNA, 858 bp, Arabidopsis thaliana
  unsure (1)..(858): unsure at all n locations
atgatcctccnnnnnnnnnnnnnnnnnnnnnnnnnnnnnnnnnnnnnnnnnnnnnnnnnnnnnnnnnnnnnnnnnnnnnnnnccatgcgtccgcggacgcgtgggcttacctcatcgtcgtctctttcttcgccaagtcatagattctccttcgtctcttgcctagccagataatattcgccgttctccatcggtaaacgcagctgaggagctagataattctctgatatctgcgttacgccggtgtggaagcaaaatttaggttaatcggatctcaattatggacgaagaggcagcaaaacctagagactccaccgtgaatcagcaacatcaatactattacggaacgtttcaaggcgttgcgaattttcctactcctactccaccaccgcaatttatgcaaccacagcatccgattactacgtttcctagacatgcttacactatctccaaggacatggtggtggtgaaatgatgctaaggattccagttgttgtcctgttatacagaggtgagggagaccatgtagagcataacttccttgctgggactggcataggcggtttctgctatcatggcttattgtcggcaggatcactagtacctaggtgcttattgtctagcacatgtgatgtcagcagagatgctggtacgttgctgtcaatcgcaggagtcctattctattcattgtcgagacaacggatggtcactcatcatatcagcattgcgctataatgcttttcttcatgattcttcagacgtggcatttattgccgatgctcgatgatggggattacattgggaactctgccagcaaccaactatctggtatttctcaattactcaacgagttattaa

SEQ ID NO: 127747 - DNA, 774 bp, Arabidopsis thaliana
  unsure (1)..(774): unsure at all n locations
ccacagcatccgattgntacgttttctggacatgcttccgaaatctccaaggtcatggtggtggtgtgaattatgctcaaggattcccagttgttgttcctgattatacagtggttgaggtgagacaagtgatagagcaagaacttcactgttgtggattgagcatgggctggtttctgtntatcatgggcttcctgttcggtgggatcccttggtacctcggtgcttttaatgttctagtcacatctgttgatcaccgcgagaaagctggatacgttgcctgttcaatcgcagtgagatcctctctctcattacattgtcgtagatcaccggcattggtcactcatctatattcatcattgtctctcataatttctttttctttttatgaattcttccagtccgttgtctatttgattgccgtcatgctcgggatgactggggatattaacatctggtgtaactactccccagcctaaacccaaactccatcttgtatatatatctacatatatactcgaaaacgtagatatatatcaatatcatttacaccagttattgctgattttagtgagttacagaagggaaatatttgtaactttgtgttgaattttatatcataactaaatattgtatatatgtggttgattcccttggtggcacatctatccatatgtaaaatattctgtgaaaaaaaaaaaaaaaaaagnnnnnnnnnnnnnnnnnnnnnnnnnnnnnnnnnnnnnnnnnnnnnnnnnnnnnnnnnnnnnnnnn

SEQ ID NO: 127748 - DNA, 506 bp, Arabidopsis thaliana
  unsure (1)..(506): unsure at all n locations
gattttnnnnnnnnnnnnnnnnnnnnnnnnnnnnnnnnnnnnnnnnnnnnnnnnnnnnnnnnnnnnnnnnnnnnnnnnnnnccacgcgtccgcaaatttctgaatttcgtctctaacatccacaaaatcgaatgcgttgtgtgaatcgcgttgattgttcttggtcacggccaagcgaagcttaccgtatcttaccctccggtggtcacctttcatctggattccatcaatgtcctttatcgtctctatctttccgttcctctttcgtgtgttgctcctcctccacatctggaccgtccgattcaaatcccgaatcatcttcaaatcgctcttacagccgtagatggcagaatcctcttccccggcgtcaacatcccgatcaaataccgtcttctcagattgctcgtgattggatcgattcagatacaactccagtttctcaagctttagagagattcactgtagtgtcgtacaacatattgggagatggaaattcatcatatcac

SEQ ID NO: 127749 - DNA, 754 bp, Arabidopsis thaliana
atgatactccagcgtctctacgactcactatatggaaagctggtcacgcctgcaggtaccggtccggaattcccgggtcgacccacgcgtgcgcctatttttctttttgtcattttttgttccagccgtctgttgatatcaagacggttctttcgggtctaatggaaaggctttcgaactatgctgcatccagtgtggaagcattgcctaatttcctgcaagtagaagccttttcaaagttaaattatgccattgggaaggttgtagaagcacaggcggacttgccggccgcagcatctgtaacattgtatttgtttcttctaaaattcactctccatgtctattccgatcgtctggactatgtggaccaagttttggtataacgctttctgaggatggatcatgtgttactcaactatctgccacaggaaagctttgtgatgacaaggcagcaaaacagatcgtcgcatttcttagcgctccattggaaaagtataataatgtagtaactatcttgaagcttaccaactatcctctagtaatggaataccttgaccgtgagacaaacaaagcaatggcaatcattctagttcagagcgtttttaaaaataatactcacattgctactgctgatgaggtgtccgtttccttcctcgatttagtttcttcttttagcattctctattgatgtggagtttccttttattgtttgttacaggtcgatgcattgtttgaactggcaaagggtctcatg

SEQ ID NO: 127750 - DNA, 734 bp, Arabidopsis thaliana
  unsure (1)..(734): unsure at all n locations
atgcnnnnnnnnnnnnnnnnnnnnnnnnnnnnnnnnnnnnnnnnnnnnnnnnnnnnnnnnnnnnnnnnnnnnnnnnnnnnccacgcgtccgcccaaatgtccgataggatactgtgcaagttctttgtccatggctcgtgcttgaaaggcgaaaattgcgaattttcccatgactctaaggatccgcccaataatgtttgcacattctatcagaaacgaatatgtttgtacggaagtagatgtagatacgatcatgtcagagctgcttccaatcttcctcttagctcagattctgagtctttagatcgctctatatccaccaccccctctaggcatttgcaacaacaaggcgataataatgacggtgacaaatcctctaacgtttactgtatccaccctagagagtacccgatctgctcttttgctgcagctggtgattgccctcgaggtaaccagtgtccacatatgcatggtgacctctgcaatacttgtggcaagaagtgtttgcatccttttagacccgaggaacgagaagagcatacgaaagaatgtgagaagaagcagaagcacattgaggctttgaaacaaagtcaagatattgagtgtagtgtgtgtttggatcgtttcttgtcaaaggctactcccaggggaaaggaagttggggctgttgactgagtgtgatcatcccgtttggatacaatgaattcgaattgggggtacagtgctcctgtttc

SEQ ID NO: 127751 - DNA, 692 bp, Arabidopsis thaliana
  unsure (1)..(692): unsure at all n locations
gccnnnnnnnnnnnnnnnnnnnnnnnnnnnnnnnnnnnnnnnnnnnnnnnnnnnnnnnnnnnnnnnnnnnccacgcgtccgcccacgcgtccgatttattgaatgttctttgaagaagaagaaggcgacgacacaaaaaccttgcatttgcatccatggcgtcgatgccgagcaaacttcttccagtcctagtctgctacgtttttcttttcccctttgcatcatcatctgattattctggggtatctcttccatcttcgtcgcctaaagtctcggtgggcctgtactacgagtctctctgtccctactgctcttccttcattgttaaccacctcgcgaagctcttcgaagacgatctcatatcaatcgtcgatctccatctctctccgtggggcaataccaagctccgttccgataacgtcactgccgtttgccagcatggggcatttgaatgcttcttggataccgtagaagcttgtgcaattgatgcttggcctaaagtaagcgatcatttcccgttcatatactgtgtcgagaagttggtgactgaacataagtatgacaagtgggagacgtgttatgagaagctcaatctcaactcgaaacctgttgcagattgtctcagcagtggacatgggaatgagcttgctttgcactatgctgcagaaacgaatgcgcttcagccttctcac

SEQ ID NO: 127752 - DNA, 901 bp, Arabidopsis thaliana
  unsure (1)..(901): unsure at all n locations
nnnnnnnnnnnnnnnnnnnnnnnnnnnnnnnnnnnnnnnnnnnnnnnnnnnnnnnnnnnnnnnnnnnnnnnnnnnnnnnnnnnccacgcgtccgatctttgccgagtggaaaatttccggtgaagccgtcccgagtgactcgggctcttgcccggtatctttcagcttcaatagtggagataaccggtttatgtcgagcaaatccagcttccataagtggtgttgactggtttttatcttttttccagtcaatcggattattatcgattgctttacttcttttccatgttttctttcaataatttctaaaaatctgagttggtaattagttttaagtgctagctatttaaaattaatgtctctggcttttggttttagaaacctcgatttgcaagaaatcgttcaaacgattacatctgggtttgaaagattgaaggataatccgatgcttattaggattctcttaagccgtctatttctttgggagctccatccatatctattctggtggtaaacaaagattattcgtacgttttattcggcgatgttttcctccaccggatttggtgctcgtcgacggtggaggctgatgtccgtacacttccgatgactcatttacatgtgctgtagttataatctcatgtcaacacgtgtctttggatagagtcaaatgttgaagatcttttggctgttgatattaatctggtggatctgttgttggacctttcttttatttcagcataatcgttgtaggcttttacgccttatacccctttggtggttaatgaaatttacttcgattaaaaaaaaaaaaaaaacacaaaaaaagnnnnnnnnnnnnnnnnnnnnnnnnnnnnnnnnnnnnnnnnnnnnnnnnnnnnnnnnnnnnnnnnnnnnnnnn

SEQ ID NO: 127753 - DNA, 522 bp, Arabidopsis thaliana
  unsure (1)..(522): unsure at all n locations
atgatatnnnnnnnnnnnnnnnnnnnnnnnnnnnnnnnnnnnnnnnnnnnnnnnnnnnnnnnnnnnnnnnnnnnnnnnnnnnccacgcgtccggcgagcttgtccgatttgtaagcacgagacggaaccatgttgtgcggaggctcacgtgtcttgcagcatttgtccgaccacaatcatcataattcgattggtttaggattagggttttgtggtgctaagattgtgcagctctcttcattctttctcaggccttctcaggctatggcgaagagtcatcatttcagccgtaaattgcgtcagcggatgatttcttcatttgggtctcattgcagaacatccggagaagtcccaattcttcacaattgtttcagccaacgagaagatgatcctgagcttccagttgaagggttatctccagtgtcaggaggcattgttgctctagggaagtttgatgccttacatatcggccatcgagagcttacaattcaagcttcaagaattggagctccatgtattatc

SEQ ID NO: 127754 - DNA, 363 bp, Arabidopsis thaliana
ttaatatgagaagaaaggttctaggtcttgtttgctttcccctcctgctaatcgaccaagcgaataatctccagctaaccaccgatgaagcgaacaatcaacgaagtcgtcggatctacctccgtcaatactctcgattcctccattgctaagaagcctgtcttcctcaccaaaaaacagcgggaagagttagccctaaaacgccgccaggatcaaatctccgagcaacgtgtccgtcgtgagcaacttggtcgccccgagcccgagacggaagatgtctccaatggagataccaatcgggataaggatcgagatagagatcgggaccgagaccgagaacgtgaccgagattaggagagagat

SEQ ID NO: 127755 - DNA, 532 bp, Arabidopsis thaliana
atcattcctgtgatgcgatataatattccgattgtgattagaaatattttcaatctctctgcaccgggaacaataatctgtcaacctcctgaagatgattatgaccttaaactgacaactcctgtcaaagggtttgcaactattgacaatttggccctcataaatgttgaaggtactggaatggctggtgtacccggtactgcaagtgacatttttggctgtgtaaaagatgttggagctaatgtgattatgatatcacaggctagcagtgagcattctgtgtgctttgctgtgcctgagaaggaagtaaacgcagtctctgaggcattgcggtcgagatttagtgaagctttacaagcgggacgtctttctcagattgaggtgataccaaactgtagcatcttagctgcagtcggccagaaaatggctagtacacctggagttagttgtacacttttcagtgctttggcgaacgctaatattaatgtccgagctatatctcaaggttgttctgagtacaatgttactgtcg

SEQ ID NO: 127756 - DNA, 721 bp, Arabidopsis thaliana
  unsure (1)..(721): unsure at all n locations
tgatactccagctctcnnnnnnnnnnnnnnnnnnnnnnnnnnnnnnnnnnnnnnnnnnnnnnnnnnnnnnnnnnnnnnnccacgcgtgcgggttactgtgctcctgaatacgcaatgagcgggaaattaactgttaaatcggatatctactgcttcggtgtagtgttgcttgagctgattactgggagaaaagctattgatttaggtcaaaagcaaggcgagcagaatcttgttacttggtcacgtccatacctcaaggatcagaagaagtttggacatttagtggatccgtctctacgaggaaaatacccaagacggtgtttaaactatgcgattgcgattattgcaatgtgtcttaatgaagaagctcattatcgaccgttcataggtgacatagttgtggcactagagtacttagccgcacagagcagatctcatgaagctcgaaacgtctcatcaccgtcaccagagatttcaagaacgccgcgacgagacttgtaaaaactcaaaaacagcttttaagaatttcagtttggtgttgtgtaaaaatggttttttttgtttctttctcagaaaacaatatatgtttggtaaatgtttcgttattagtctcttttacttgatgtatatggcaattatggaaaaaacacaaaaaaagnnnnnnnnnnnnnnnnnnnnnnnnnnnnnnnnnnnnnnnnnnnnnnnnnnnnnnnnnnnnnnn

SEQ ID NO: 127757 - DNA, 715 bp, Arabidopsis thaliana
  unsure (1)..(715): unsure at all n locations
gcaattgaatatgctaggaaatccctacctgaacccaaaaagatcataaaagaatgggagccgaacaaaacttggcttccaaaagaaaaaaatcggcggggtctcaaaggaaccagagaaagtaaaaagctggttagataagaatgtggctgagcaagaaaagacttctctgtggagcaaaccggtgttcacgtcccctgaagtgtacgctaaagtatttactctacaagacaaggtcacaaaggtgaataagatcccaaagccaaagccaaagatagagaaagtaaccaagacggagaacacaacaaaggaggaggaacaatcaaaatcctctgatgaagctgccaaagaagaagaaagtcccgacgagctttgattaaggatatataataaatagagttttcgttaatttttgtgtttttaagagggaaaataggattaaaagtaggcagctgagatgagcaaaaggattttattcctttctcctcaacttcttcacatcaccattagaaacggaatcttctgtgtttttgtttttcattatatcaagttttggtctctctatttctataactgaatcttcaatatatttagtagaagtttataaccccaagaaatatttcaaaaaaggncagccgctctagaggatccaagcttacgtacgcgtgcatgcgacgtcaaagtcttnctataggtcacctagatcaatcgnnnn

SEQ ID NO: 127758 - DNA, 944 bp, Arabidopsis thaliana
  unsure (1)..(944): unsure at all n locations
atgatatnnnnnnnnnnnnnnnnnnnnnnnnnnnnnnnnnnnnnnnnnccacgcgtccgcacacgcgtccgcggacgggagaacaatggcttcgacggctacgaacactgatttcttcaagactttgctttctcctttctcaaatgggaatgcggcgcaacgaagtagtagacagaacattgtttggttaaatcggaagcaatctggaaataataacagatctcttcgtgttaatggattattcggaggcggaaaaaaggacaataaagaggatggacaatcaaaggcaggaattctaggtaacatgcagaatttgtatgagacagtgaagaaagctcaaatggttgttcaagtagaggctgttagagtgcagaaggagcttgctgttgctgaatttgatggttattgtcaaggcgagcttgtcaaggttacattatcaggtaaccagcaaccaattcgcactgatatcactgatgcagcaatggagttaggttctgaaaaactttcactgctggtcacagaagcatacaaagacgcacattcaaagagtgtactggctatgaaagaaagaatgagtgatcttgcgcagagcttagggatgccaccaggccttgatggattaaagtaacaaaacttaatcttttttgtgatttctttcaacttataggtatgagaagtccagttctttttgttgtatatcgatcaggcagagagaaatagagctctgttctactgaatcagagagaggatatttgaacctttgtcttcttttgattatcaacaattactcaaatgctctcccaaatacgttttgtagtttccaaattgtggaaatgaatcgagcttttaacagaaaaaaaaaaacaaaaaagnnnnnnnnnnnnnnnnnnnnnnnnnnnnnnnnnnnnnnnnnnnnnnnnnnnnnnnnnnnnnnnnnnnnnnnn

SEQ ID NO: 127759 - DNA, 642 bp, Arabidopsis thaliana
  unsure (1)..(642): unsure at all n locations
cnnnnnnnnnnnnnnnnnnnnnnnnnnnnnnnnnnnnnnnnnnnnnnnnnnnnnnnnnnnnnnnnnnnntgacccacgcgtgcggagcttccaaacatcaaagccgaggcaaagctccctgctcttcttgttgtcaacattcagttaccaacctatcctgctgcaatgttccttggggacagtgatggagaaggcatgagcattgtactttattttaaattacgagacaatcacgaaaaagaaacctctcagcaatatcaggagagcatcaagaaacttgtcaatgatgagatggagaaggtaaaagggtttgctaaagacagcaacgttgctttccgtgaaaggcttaagatagtagctggacttgttaaccccgaagatctagctctaagctcgactgaaaagaagcttgtacaggcttacaatgaaaaacctgtcctctctcgtcctcaacacaacttctttaagggtccaaactacttcgagattgatctggatgtacatcgattcagctacatatctcgaaaaggacttgaagcattcagagatcgnctaaaaaacggaactcttgatctcggnttaaccatccagggtcaaaaaccgnaagagctgccggnacaagtcctatgctgtcttaggctt

SEQ ID NO: 127760 - DNA, 724 bp, Arabidopsis thaliana
aatttcttcacaaattcagcggcgatgaagttcaatccgcgtgtgagctcttctcgccggaagaacaggaaggctcacttcacagctccttcaagcgtgaggcgcgtcctcatgagctcgccgttatccaaggatctccgtaacaaacacaacgtcagatccatgccgattcgtaaagacgacgaagtgcaagttgttcgtgggacgttcaagggaagagaagggaaggtgatgcaggtgtatcgccgcaagtgggtgattcacatcgagagaatcacaagggagaaagtcaacggatccacggtcaacgtcggagtcaatgcttcgaatgtgatgatcactaagctccgtctcgataaggataggaagtcgcttttggagcgtaaggctaatggacgcgccgccgccgataaggagaagggaaccaagttttcagccgaagatgtcatggagaacgtagattgatcttaacgtatggttttttcttcttcttttctagttttctattttgatttcattgatgatgatatgattcagaattcgaagttgaattttgtggttttcttatcaatgtacctcatttatgcttatatttctagctattgaaattggactgagatttaaatccttaaaaaaaaaaaaaagggcggccgttctagaggatcacagcttacgtacgcgtgcatgcgacgtcataagtcttttattagggcacctaaattca

SEQ ID NO: 127761 - DNA, 751 bp, Arabidopsis thaliana
  unsure (1)..(751): unsure at all n locations
atgannnnnnnnnnnnnnnnnnnnnnnnnnnnnnnnnnnnnnnnnnnnnnnnnnnnnnnnnnnnnnnnnnnnnnnnnnnnnccacgcgtccggttgagctggtcattcttcctcgttcatcactagatgagactccacctgaacaacaaaaccaaccaccacctcctccacctcctccacaaaatagcgaatctggagaagaagaaaatgaagaagaacaagaagaagaagaagaggatgaaagcaatgaagaaaatgaaaatgagcagcaacaggaccaaatacctgaagagtttatatttgacgctgagggcggtctggtggatgagaaactcctcttctttgctcaacaagcccagaaacgtcgggggaaagctggcagggcgaagaatgtcatattctcagaagatagaggacgctacataaagccaatgcttccaaagggtccagtaaaaagattagctgtggatgcaacccttagagcagctgcaccataccagaaattgcgcagagagaagggtatctcaggaactaggaaagtctttgttgagaagacagatatgagggccaaaagaatggcaagganagctggagccctgggtatcttttgtggttgatgcaagtggcagtatggcattgaatcgtatgcaaaacgcccaaggtgctgcactcaaacttctggcagagagcatactagcagggatcaggtntcgattattccttccgaggggatgctgcggaagtgctcttg

SEQ ID NO: 127762 - DNA, 574 bp, Arabidopsis thaliana
ctatttctctctaaaaaaatgtcaaagaacgtttcgagaaactgcttaagatcaatggaagacatcaagaaagtattccaacgattcgacaaaaacaacgatgggaaaatctctatcgatgagcttaaagacgtgataggagctctctctccaaacgcttcacaagaagaaaccaaagcaatgatgaaagagtttgatcttgacggtaatggtttcattgatttggatgagtttgttgctttgtttcaaatcagtgatcaaagtagcaacaatagtgcgattagagatttgaaagaagctttcgatttgtatgatttggatcgtaacggaaggatctcggctaatgagttacactcggttatgaagaatcttggtgagaagtgttcgattcaagattgtcaaaggatgattagtaaagttgattctgatggtgatggttgcgttgattttgaagagtttaagaagatgatgatgataaatggtagtgcttgatagaatcgatttagaatttggaaaagtgatatccttttttttgtttgtaaatattttgttttatgatttcgttaatctaatc

SEQ ID NO: 127763 - DNA, 879 bp, Arabidopsis thaliana
cagctccctacgactcactatagggaaagctggcacgcctgcaggtaccggtccggaattcccgggtcgacccacgcgtgcggctcgagcaagaggctttcatcagtaattcgtcgtcggagctccagaacgagttggtatccgacgccggcgatggtattgaagcaatcgctaatcgtctgagcaaatggattgtagcagctctgtttggatccgttctgcttctacgacatgatggtgcagctttgtgggctgtgattggatcggtttcaaattccgtgctctcagtagctttgaaacgtatacttaaccaagagagacctgttgctactctccgttctgatcctgggatgccttcttctcatgcccaatccatttctttcatctctgtgttttctgtcttctccgttatggagtggcttggaaccaatgtactctctctgttccttagcggcttcatcctcgcattgggttcttatttcacgtggttaagggtttctcagaagcttcacacgacaagtcaagtggtcgtaggtgcaatcgtgggttctgtttactccaccttatggtatgtaacttggaactctcttgttcttgaagcctttacctcaacattctcagtacaaatagctgtctttctggttgctgctgcgtctgctttaggttttgcagtttatgtgctacttaactggtttaaagatgacagatgacagatgacagaatgataattttcagtacttaggatgtataaggaatgcatttgattctccttataattcatattgattgagatattttaaagaaaaaaaaaaaaaagggcggccgctctagaggatccaagcttacgtacgcgtgcatacgacgtcatagctgttttat

SEQ ID NO: 127764 - DNA, 537 bp, Arabidopsis thaliana
  unsure (1)..(537): unsure at all n locations
cctgcaggtaccggtccggaattcccgggttgacccacgcgtgcgagacaagacagaatcttttatttaattcattttttatttgaaagtacataattaaaaaaaataattaattaatcgtgatgagggcgttgaattcgcggctagttctgatcgacatcaacagctcctggcaagcttcgcgccggttaatctcagccaccgcaaccgctttttcatctgattcctcttcctcattccgtcggacacgtggtgcgcgtcagagaatcgcttcatcgaaatccccggcgtcgtcaccgtctcctgttcggagaccatctgatggattcagtttcgatgttcggtcaccgtcatctgattcatcgatctcatcacggaagtcaccgacgacggctccgcctacggtggagctcgacgctttcctagagattcttcctccggcgacgaggaaggagcttggtaagcacgagggcgattgaggaatttatcgaagtagtnatgggtttagggngaaancacttnnaanttccctccgtg

SEQ ID NO: 127765 - DNA, 569 bp, Arabidopsis thaliana
atgatactccagcgtctctacgactcactatatggaaagctggcacgcctgcaggtaccggtccggaattcccgggtcgacccacgcgtgcgccccaaatcacatcttcaagaaccctaataaattcccagagattcctctcatttaatcacttcagattcgaaaaaagttctctctttttcccaaaaaaaactttctcatacaatggactctactaccacacctccttctctccgttcgaatactagatccgctttgcgtctagctcgaaacaacaaaactctcgtaaaatctcacattccatctctcgatttggttttattgtctccgaagaacaacaacggtactccttacccatcacctgtttctctcagttcaccatcttctcctgttactcttcgtgagattctccttttatctccttcccctcttcgtaaatcgagaacccgtttaagcaatcggttcgatatggaagctgcggaggctgctgtgacggcacgacggagtaagacgaagggagggcaaaatggtcttttggcctcgccgtcgccgaggaatttccggaggtc

SEQ ID NO: 127766 - DNA, 557 bp, Arabidopsis thaliana
  unsure (1)..(557): unsure at all n locations
cagctctcctacgactcactattnggaaagctggcacgcctgcaggtaccggtccggaattcccgggtctacccacgccgggcgaaggacactgcccgataccagtattaccaaggcttactatgcctggtcatcgcattgatccaccttgtggaagggttagtttgatctctggaccacaacatcttgttgctgatttggaaacttgctccctacatctgaaacatttagctgctgctgcaaaagatgcagttgccgaaggtggttctgttcctggttgtagggctagattatggcgcagaataagggagttcaatgcttgtatcccgtatacaggtgtgcccgctaatagtgaagtccctgaggtgactttgatggcattaattacaatgctaccatcaactccaaatctccctgtagacgcccctcctttgccacctccttcacccaaagcagcagcaactgtcattggctttgttacatgtttgcgtangttattgtcatccaggagtgcagcatcccatataatgtcattccctgctgctgttaacaggata

SEQ ID NO: 127767 - DNA, 544 bp, Arabidopsis thaliana
atgatctccaggtccctacgactcactattgggaaagctggcacgcctgcaggtaccggtccggaattcccgggtcgacccacgcgtccgaattgatctgatccgagtctttcaagcggggagagaaagagagagattcgttagtacattgatctaatggcgtcgaattcggaagcgggaggatcggcggattacgaaacattgatgtcgacatcggacgttgagctattgaagagggcgtggcgtaacgagaaggcggcgccggagattcttcagtacgaaggagctcttgtcgatagagccaaagaacagatcgaattagtggaagaaacaattgaagattatgtggaaaatggcatagatcctctggtggtgtctctatatcagatggatttggacagagcccagtttctactcagatcatatctcagagttaggcttctcaagatagagaagtttatgttccacaacctcaactcagaagaagctgaaaggcgactttctgagcaagagaaagtgtttgctaccaggtgtgctgatgatt

SEQ ID NO: 127768 - DNA, 628 bp, Arabidopsis thaliana
  unsure (1)..(628): unsure at all n locations
nnnnnnnnnnnnnnnnnnnnnnnnnnnnnnnnnnnnnnnnnnnnnnnnnnnnnnnnnnnnnnnnnnnnnnnnnnnnnnnnnnnccacgcgtccgcccacgcgtccgggacaatcctcaagttgatctagagaaagtgaaacgtggcttgagaaaagtacataatcccgtagttgagaactctatccaacctcaactggttccacagattgcagttgaaaagccaaatggtagtttagaagaatctgtgaatgcctttgatgaagagaaagaagatgaagtggctgagacagtggtgcaacaacctgaagagttgatacaaactcatacaccattggggaccaatgaatctcttgattccacattggtcaaccaaatcgaagagagtgaagaaaatgtaatggccgaggaaaaggaggatgtaaaagaagagaggactcccaaacaaaaccataaggagaattcagctgggaaggagaatcagaaatccgggaaaaaggcttcttcggttactgctactcaaaccgccgagtttcaagagagtggtaatggtaatcagactagtagcccgggaataccgagctatatgcaggcgactaaatccgctaaagcaaagctgaggctacaagg

SEQ ID NO: 127769 - DNA, 703 bp, Arabidopsis thaliana
  unsure (1)..(703): unsure at all n locations
cnnnnnnnnnnnnnnnnnnnnnnnnnnnnnnnnnnnnnnnnnnnnnnnnnnnnnnnnnnnnnnnnnnnnnnnccacgcgtgcgcggacgcgtggggtcagaagctaatggacccaggaagcctaacagctttccacatcctttaatccaagaaattgattcagaacttccagttgtgcagcctgcgcttcaactgacacacagaatatttggttcttgccctccaatgcaaagttttgacccagcaaagttgctcacggactctgggaagctgcagacacttgatatattattgaagcggcttcgagctggaaatcacagggtgctcctgtttgcacaaatgacaaagatgctgaacattctcgaggattatatgaactatagaaagtacaagtacctcaggcttgatggatcctccaccatcatggatcgccgagatatggttagggattttcagcataggagcgatatttttgtattcttgctgagcaccagagctggaggacttggtatcaacttgacggctgcagacactgtcaatttctatgaaaagtgattggaatcccaccttggatttacaagctatggacagggctcatcgtcttggacagacaaaagntgtttacttgtcttatcgtcgtcatctgtaaggagacggtggaagagaaaattttgcacagggcaagtcaggaaaatacagttca

SEQ ID NO: 127770 - DNA, 540 bp, Arabidopsis thaliana
cagctctcctacgactcactatatggaaagctggcacgcctgcaggtaccggtccggaattcccgggtcgacccacgcgtgcgcaaatctctgtttccctctctttatctcctttgttgcgtactgattctctaagccgtgacggtgtgccagtgtctgtccttgtcttattatcactgccgcagttcctattcgtgcccgccaactgttcgtcaaattgcctgaaccaattcttccgacaatcctaaaagtttggattttggtgattctaaaaactagggttttattcaaattactcaagaatggctactactgcgaatggaaactctaagaaaagagatggtggtctatcgtcgcttgcccctcgcaaaatcaacgtgcagaaattctcagaggctcgagcaccagagctcgaatctcttcactccattgtgtctgagcgtttgaacaaggactttcgatcaaagaggaataagaggagaaggaccaattcttacaataatcaacctgcgaagaagcgtaatataaagaggcaaaaat

SEQ ID NO: 127771 - DNA, 570 bp, Arabidopsis thaliana
atgatactccagcgtctctacgactcactattgggaaagctggcacgcctgcaggtaccggtccggaattcccgggtcgacccacgcgtgcgggagaagatcaccgtcgtttattctcgacgagcgacgaagctcgaattcacctccaatggcggatacaacacgaggtccttttcaaaaccctgattccatctccgcttattaccaaactcgcgcggcgcatcacggtgtcattacaagcgactggctagcccaagctcaagccgccgttggcggcgtctcaggcgatgcccagcatgacttatccgtaactgatctcgggaacgagaagtcgtttaatgtaattgaagagttcaataactggagaaaacaaccggatctggctgaagccgtcgcggctatacgagctttggctgctgttattcgtgcgagcgaagcgagcaccatgatggagcttgaaattgagctcataaaggcttctgatacactcaagtcgtgggacaaaacgtcgatctctttgacagctggatgcgatttgtttatcagatacgttacgagaacgtctgcttt

SEQ ID NO: 127772 - DNA, 555 bp, Arabidopsis thaliana
cagctctctacgactcactatatggaaagctggcacgcctgcaggtaccggtccggaattcccgggtcgacccacgcgtgcgcggacgcgtgggttcacatttttatacaagatcacattttcactgaatcttcctctgcgtctctcaggaggaagaagatcattcagttgaagcacacatttacagggttttgttgagaggcaatggaacggggagaagagtttcaagaagaagatgtgtggtcagttttgagagaaagtgaaactcaaggtcctgaaatgaaaatgtccaaaagtaacaatctcttcgcagcctcttcctcatcttctgcgaggtacattcctaaaggcaacgaggtctctggaggggcaaaacaggcatctgctccaatgaatatttcctgactgggccaaggtttatgggtattccaagaagaacacatgcagccccttggctttcatgggccattgacgatgatgatgaaggcctcatggttcctgcactgaagtaggagcgggaagactggcgagaacgcagatgcgatggttgcctat

SEQ ID NO: 127773 - DNA, 681 bp, Arabidopsis thaliana
  unsure (1)..(681): unsure at all n locations
cnnnnnnnnnnnnnnnnnnnnnnnnnnnnnnnnnnnnnnnnnnnnnnnnnnnnnnnnnnnnnnnnnnnntacccacgcgtgcgctgatgattactagtgacaagacaatcgatgctcgtggcgctaacgtgcacatcgcatatggtgctggtatcacgatgcagtacgtgcacaatatcatcatccatgggcttcacgtccaccacatcgtgaaaagcagtggtggtttgataagagattcgattaaccactttgggcatagaggagaggctgatggagatggtatctctatctttggggcaacaaacatttggcttgaccacatttctatgtctaaatgccaagatggacttatcgacgctataatgggttccaccgcaatcaccatctctaactctcatttcacccaccacaacgatgtgatgttgcttggtgcacaaaacaacaacatggatgacaagaagatgcaagtcacagtggcttacaaccatttcggaaaaggacttgtgcagaggatgcctagggtccgatggggtttcgtccacgttgtcaacaatgactacactcattgggagctttacgcgatcggtggtagccaaggtcctaccattctcagccatggaaaccgtttcatcgctcctcctcacaaacaacactacagagaggtgacaaagagggatt

SEQ ID NO: 127774 - DNA, 513 bp, Arabidopsis thaliana
  unsure (1)..(513): unsure at all n locations
atgatctcgccggctannnnnnnnnnnnnnnnnnnnnnnnnnnnnnnnnnnnnnnnnnnnnnnnnnnnnnnnnnnnnnnnnnnccacgcgtccgggcgaaaaagaacccgtcgccgtcgaatcagccggcttgcccaacggcctagtaagtcatggtaactccaagacacggcgcgtatacgaaacagctcgatctctgcataccggtgctgtgaaagatcttctctctctcggggtctgtgagagatgtattttccgattggtatccgtcgaggcttttgattccgatatttcatcagtctcgacttcaactctgcgcagctggctcaaatccggtgatgatgaaactagtgcatcggaatctagctgttccacaatctgcattgtttgtttaggtatattgcagttcgttttttccgatgtcaaaaaagagctggtgaaatcggattctagtagtgattacgttgcaaggataacggacttggtgaagcaggatcgtcatgagttcgatag

SEQ ID NO: 127775 - DNA, 649 bp, Arabidopsis thaliana
  unsure (1)..(649): unsure at all n locations
nnnnnnnnnnnnnnnnnnnnnnnnnnnnnnnnnnnnnnnnnnnnnnnnnnnnnnnnnnnnnnnnnnnnnnnnnnnnnnnnnnnccacgcgtccgatcgagcatcgtcgtctccaacagccaagagaagcagaagcttgaagaatctctgtaatctaaaaaatgggaaaggtccacggttcattggctcgtgccggtaaggtgagaggtcagacacctaaagtggctaagcaggacaagaagaagaagcctcgtggtcgtgctcataagcgtctgcaacacaaccgccgtttcgtcaccgccgttgttggttttggcaagaagagaggaccaaactcatcagagaagtagatagaagaaggttttacccttttcagattttatgggatgtttttgatattgtgtcattagttggtccaaactcatcgatatcaaagtggtttaaccttggttatctacaaatcagtggatgttgtgtcaattttcttgtcaatttgatttttgtttctcctcagattagacttaagttcttgaattattgaacctctcttttgcagttatgtattcgtgtgtaccctttaaaaaaaaaaaaaaaaagggcgcccgctctagaggatccaagcttacgtacgcgtgcatgcgaggtcatag

SEQ ID NO: 127776 - DNA, 503 bp, Arabidopsis thaliana
  unsure (1)..(503): unsure at all n locations
ccnnnnnnnnnnnnnnnnnnnnnnnnnnnnnnnnnnnnnnnnnnnnnnnnnnnnnnnnnnnnnnnnnnnnnnnccacgcgtccgggaaaaagcttgaagcgtcgtgactcgtgaagcttcttcatctttagtccaccgaacataaatggctcagcaagtactcggctgcacgagccgccccatccgcgtttctcttcaccggtgttctgttattaccaccagtgacactatcagaaggaagaatctccgattcgttagaaacccgagattgtcgttttctcttcaatcttcaactagaaattatcgtctgccttcgattaattgctcgacggtgaatggagcagtagcggaaactgcggaatattacgaaggagaaggagataacgtttcacttgctgagaaaatccggcaatgtattgatttcctccggacgattttaccaggtggaagctggtggagtttctccgatgaagttgatggtaggttcattgctaagcctgtga

SEQ ID NO: 127777 - DNA, 531 bp, Arabidopsis thaliana
cagctctctacgactcacttagggaaagctgctacgcctgcaggtaccggtccggaattcccgggtcgacccacgcggccgcccacgcgttccgggagtagaataccttattaccggtttaatcaaaccggttcagtttccaaatggataatctactctgcgaagaatcttggcccgcgagtcctttaaccccggagcctttaccaaacttccgtcaccgttctcacgacaatgacgtcgtgaagatgtatccagagatagacgcagcgacgatggaggaagccattgctatggacttagagaaagaattatgttttaacaatcatggagacaagtttgttgagtttttcgtctcaaagaagttaaccgattataggttccatgcgtttcaatggctaatccagactcggagtcggctaaatctttcatatgaaacggtattttccgccgctaattgttttgatcggttcgtctacatgacttgctgtgacgaatggacgaattggatggtggaactagttgcggtaactt

SEQ ID NO: 127778 - DNA, 504 bp, Arabidopsis thaliana
  unsure (1)..(504): unsure at all n locations
nnnnnnnnnnnnnnnnnnnnnnnnnnnnnnnnnnnnnnnnnnnnnnnnnnnnnnnnnnnnnnnnnnnnnnnnnnnnnnnnnnnccacgcgtccggtttttagccgaggtctcgtcaaaagcatgctgcggaaaaacccagaagttcggccatctgcctcagatttacttagacatccacatcttcagccttatgttctggatgtcaagcttaggctcaataatcttagacgcaaaacattaccgcctgagttgccgagttccaagaggattatgaagaaagctcatttttctgaaccagctgtcacttgtccagcctttggagaacgacaacataggtctctctggaatgacagagctctgaatccagaagctgaagaagacactgcatcttctattaaatgtattagtcgcagaatttcagatttatcgattgagagcagcagtaaaggaacattgatatgtaagcaagtttcttcaagtgcatgtaaggtctcaaagtatcc

SEQ ID NO: 127779 - DNA, 539 bp, Arabidopsis thaliana
  unsure (1)..(539): unsure at all n locations
agctctcctacgactcactatanggaaagctggcacgcctgcaggtaccggtccggaattcccgggtctacccacgcgtgcgatacaattcgtcgatatgtgtgatcccactagagacgatggctccagccgaagcagagtggtgagtactatgcaaaagagggcgtattttcagagacaatggccgttggtcgatgtcgtaagagcgtcagtcgttgtgattgtgcactttttgtgtctcttggcgccgtttaacttcaaatgggaagctttacggttcggtttggtgctcttcgcgttgactacactcagcatcacattctcattccataggaacttgtctcaccgtagcttcaagataccaaaatggctcgaatatccttgggcttattctgctgttttcgctcttcagggtgatccaatggattgggtgagcatacataggttccatcaccagttcacagattcggaccgcgacccacatagccctaaagaaggattattgttcagccatatcttgtggatatttgacacccaat

SEQ ID NO: 127780 - DNA, 570 bp, Arabidopsis thaliana
tgatactccagctctctacgactcactattgggaaagctggtcacgcctgcaggtaccggtccggaattcccgggtcgacccacgcgtgcgcccacgcgtccgcaagagttgaatattgaggttcctactgagattcagtgtatcggaatacctgcggttatggaacgtaagagcgttgtattgggttcgcataccggttctggcaagactcttgcttacttgttgcctattgttcagctgatgagagaagatgaagcaaaccttggtaaaaaaacaaagcctagacgtcccaggactgttgttctttgtcctacaagagaactatctgagcaggtttaccgtgtggcgaagtccataagtcatcacgcgaggtttagatctatattggttagtgggtggttctcggataagaccccaggaggattctttgaacaatgcaatagatatgggttggttggaacccctggtaggattcttcagcatatccaagaaggaaacatggtggatggagatatccgatatttgggattggatgaggcagatactatgtttgatcggggctttggtcc

SEQ ID NO: 127781 - DNA, 809 bp, Arabidopsis thaliana
  unsure (1)..(809): unsure at all n locations
tgataccgccnnnnnnnnnnnnnnnnnnnnnnnnnnnnnnnnnnnnnnnnnnnnnnnnnnnnnnnnnnnnnnnnnnnnnnccacgcgtccggaaagagagaagaagaagcacctctcatggcgaaccagcttcttcaccatcttccgattccttttcctctccaccgtcacttctacctcctaaacgccgccgttttatagcttctcctcccgaaaatgctaaacccacattcctcaaatctctcaccgacgcttttttagattcttgtagaggaagagaatatttttaaggaggttgttttcgatggagcattacgaggttcttgagcaaattgggaaaggttcttttgggtcagctcttcttgtgaggcataaacatgagaagaaactttatgttttgaagaaaattcggttagctaggcagactggtagaacaagaaggtctgctcatcaagagatggaattgatctcaaagataaggaatccatttattggtggaatataaagattctttgggttgagaaagggtgctatgtgtgcattgtcataggctattgcaaaggcggggacatggccgaagcaataaagaaagccaacggcgtagagttctctgaagagaaactctgcaagtggctggtacaactcttaatggctcttgaatacttgcacgccagtcacattctccatcgcgatgtcaaggtgtacaacatattcttgacaaaggatcaagatatacgcctaggtgatttcggacttgcgaagatcttgacatctgatgaccctgcttcttaagtgggtggaacgcgagc

SEQ ID NO: 127782 - DNA, 534 bp, Arabidopsis thaliana
  unsure (1)..(534): unsure at all n locations
cnnnnnnnnnnnnnnnnnnnnnnnnnnnnnnnnnnnnnnnnnnnnnnnnnnnnnnnnnnnnnnnnnnnnnnnccacgcgtccggaagaaactccccaagccgctgttctgctatcggattagacttcctacagaaaaggagctcgagatgaagatctcaaaggaagtgaagaaaacccggttctatgagtcgactttattaaaagcttacaagtcatatctgcagaagttgattatatttgaaaagcagtcagtatataaccaaattgccaatcggtgcctttgtacattgctggaagcagttcctcacttcaactaccgtgataacctgttaattgctgttgtcagaaatatcagctccccagatgaagtcgtaaggagactctgttgctctactatcaggtatcttttctcaaatgaagggaaacatggtggtgagctgaccgtgcaagctgtacgcctgattgctgatcatgtcaaagctcacaactgccaacttcatcctaatgctatcgaggtgttcatgtccattcgc

SEQ ID NO: 127783 - DNA, 736 bp, Arabidopsis thaliana
  unsure (1)..(736): unsure at all n locations
nnnnnnnnnnnnnnnnnnnnnnnnnnnnnnnnnnnnnnnnnnnnnnnnnnnnnnnnnnnnnnnnnccacgcgtccgcccacgcgtccgctgttcttctccatcttcgattttacctattattgatacgagaagtgggaatttgcgatgcacatttcagtctcaggtttcttgtgggattcagagagatgataatggacgccgtgtttggcggaggagaacattgacgaagaaggacgatatgttgcgttacaaaatgcaaagagttccatttgtggaagaacaagtaaggaagataagagaagttgggaaggtaatgacaatggacatagagcagcttcttttgagggaagacaatcggtttgaatttgtcaatagcgtagcagctgaagcaacagagtacgtggacaagaacagagacgaatatggaggttccaaaaaaagccatctttcatgttctaagcaaccgtgtgaacgatctcggctttgatcgccctgaggcttatgtagaagctgatccttacaaacccggtcctggctatttgttggagtactacacttgatatattataacaaaaagtgtcaatgtactttacagcttttgttcttgtattaccaaaaccaaatcaatgccattcacagcttntgttgttttaaaaaaaaaaaaaaagggcggccgctctagaggatccaagcttacgtacgcgtgcatgcgacgtcatagtaattctatagtgt

SEQ ID NO: 127784 - DNA, 453 bp, Arabidopsis thaliana
gtttatcagtgcaacagatacaatcaaaaggatgaagagtaatattttcgggatggaaggcaatatggaccagcttcttcagaagataatgtcagtacaatcaaagagtgatggggtcaacacttctcttttcgaaaagagagaacatatagagaaactgcaccggactcgtaatcttcttcgtaaagttcagttcatctatgatttacctgcaagactgcaaaaatgtatcaagtcagaagcctatggcgatgctgtcaggttctatactggagcaatgccaattctcaaggtatatggcgatacatcattccaagactgcaggcgagcttccgaagaagctatagaaattatcataaagaacttgcagacgaagctattttcagattcagaatccatacaggcgagagctgaagctgcagtgcttcttaagcagttagatgtccctgttga

SEQ ID NO: 127785 - DNA, 624 bp, Arabidopsis thaliana
  unsure (1)..(624): unsure at all n locations
ggtgggggggggtaggatttcgcggaggaactnagtacgactcactttatagggaaagccggtacgcctgcaggtaccggtccggaattcccgggtcgacccacgcgtccgaatttctcgtagaagaagatcaaatcgctctgaatatgacatcaattgaggcaacagaaacgcttaacgctcctccaaagcttcagatctggaacaacgctgccttcgacgatggagattctcaaatcacttccgccatcgaagcttcttcttggtctcacctcaacgaatcattcgattccgattgtagcaaggagaatcagtttccgatttcggtttcctcttcgctccaatcctcagtctcgatcaccgaagctccgtcagcaaaatccaagaccgtgaagaccaaatccgccgcagatcggagtaaaaagcggagatatcgatgcagagatcgaagaagtagagaaggagatcggacgattatcgacgaaattggagtcgctccgattagagaaggcggagcaaaccgcaagaagcattgctatacgtggaagaatcgttccggcgaagttcatggaatcatctcagagacaagtgaaattcgacgattcgtgtttacaggatcgaaat

SEQ ID NO: 127786 - DNA, 359 bp, Arabidopsis thaliana
gcctgcaactgcaacagttgagattttgagcgtgtcaaggattctgattgataacgatattcaagttcagcaatctcattgcagtagaaaatggaatcgaatcatcctcacttcaagctaattttgggatcttcttcgattgctcgacgtaagatactaacagatatgggataccaattcactctcatgagtgctgatattgatgagaaaagcatccgcaaggagaaacctgaagagttggttttggctttagctgaggcaaaggctgatgctattgtgtcaaaactacaaattagtgaatgtgaagatgaggaacaaccgagagtcttgattgcatcggatacagctgaagcaatcat

SEQ ID NO: 127787 - DNA, 894 bp, Arabidopsis thaliana
  unsure (1)..(894): unsure at all n locations
agatatgccagcactatacgactcacttagggaaagctggtacgcctgcaggtaccggtccggaattcccgggtcgacccacgcgtccgcccacgcgtccggctgaagtctctgacattgcaattgcagtacgtgaaggcgcagatgctatcatgctttctggtgaaaccgcacatggaaagtttccgctgaaagctgttaacgtaatgcatactgtggcgttgagaaccgaggcaagtctacctgtcagaacctcggcatcccgtaccactgcttacaagggtcacatgggccaaatgtttgcttttcatgcttctataatggcaaatacactgagctcaccgctaattgtatttacgagaaccggatccatggcagtgcttctaagccactaccgcccatctgcaacaattttcgccttcacaaaccagagaagaataatgcaaaggcttgctctttatcaaggtgtcatgcctatatatatggagttctcggatgatgcagaagatacatatgcccggtctctcaaactcttacaggacgagaatatgctcaaggaaggacaacatgtaactcttgtccaaagtggctcgcaacccatttggcgtgaagaatcaacacatctcatacaagtccgtaagataaagataggtggatgatgtttttacttcttgagctacacaacatcttgcttttactcagctttctttctcttacacagttcgatccatatttttttgaatcactcacagtgaatcaaacaaccatataaaattttaagttattgaagctttttttctggttnnnnnnnnnnnnnnnnnnnnnnnnnnnnnnnnnnnnnnnnnnnnnnnnnnnnnnnnnnnnnnnnnnnnnnnnnnnnnnnnnnnnnnnnnn

SEQ ID NO: 127788 - DNA, 491 bp, Arabidopsis thaliana
atacgactcatatagggaaagccggtacgcctgcaggtaccggtccggaattcccgggtcgacccaggggtgcggtgtaagctgccgccattaacgaagcatgcggcgaaaaaagaagatgaatagcgttggattgagcaaacgtttcttctccgatcgccgctctcttcacgggatcaacaatgctctcttgaaaacagtgttcaccggtcggaaaccgattctcggattctccggccgatcgattcacgagctacgcaaaactgggaatttcgtaatccctcgtgttttctccgtgtcgcgaaatctaacgacgaaggcttcgtcttcttcttcgaaacaacctgcgtttctacgatggtatttgagaaagctcgaatcacatccttttatgactaagagtatcactactttctgcctctatatggctgcagatctcacttctgcagaggatcccaatgtgagccaaccgggctttttgacttgagtag

SEQ ID NO: 127789 - DNA, 564 bp, Arabidopsis thaliana
ataccactcaccttagggaaagctcgtacgcctgcaggtaccggtccggaattcccgggtcgacccacgcgtccggtcggtgatcggagatggagttccgggagaagcttttgaagttcaagttgcaaatcgtgtttgcctttgttttatctctcctcaccgtagctctcgtcgcttattctcccggtttcctcaccgttctatcttacttctggccactttttctctccacggctctctttctcgctgccgttttcttcttcgcacgcacctccgatctcccggtttcgtctaccatcatcccaggcgaaggcgcaggcttaaaagtggcggcggaagggattcttgactatgtcgtcggcggacaacacgaagacattctctttgatagcttcaccaaacttgactaagtatgagacctctctgttcttaattccttaagtatttccgttaattagttgttccttttttaatactagagaacatacaattacaaaatgtaatatcttcccgaggaataaaatcttgcttaagttaaagcaaataaaaaaaaaagaaaagggc

SEQ ID NO: 127790 - DNA, 571 bp, Arabidopsis thaliana
  unsure (1)..(571): unsure at all n locations
nnnnnnnnnnnnnnnnnnnnnnnnnnnnnnnnnnnnnnnnnnnnnnnnnnnnnnnnnnnnnnnnnnnnnnnnnnnnnnnnnnccacgcgtccgtatggctcaaaggttgcatgagcgtctccaagagtgcaacggggatgagattctaaaagcagaggctggtgccaaagttcagaagttcactgaatgggctctcaaatgtataggtttccactcccgatgccagggggcaaaggatagagttagccaaaattcggctgctgaaattgaactacaactttctgctttcaagatgttcttagatctagcaggaaaccatctctcaggaagagacttcactgaggcctttgatgcagcttgtttcccgctcactctgttctccaactcgtttgatcctggctgggcatctgggatgtcagctactgttatacagggactgctcggtatgcttgttgaaggtggcgcagataatgtgaaccaatgtttccttgaagcttcacgttttggtagtacagaacttgtccgcgtcttattgcagattgcccaaaggaacagcttagatgttgatgtg

SEQ ID NO: 127791 - DNA, 670 bp, Arabidopsis thaliana
  unsure (1)..(670): unsure at all n locations
nnnnnnnnnnnnnnnnnnnnnnnnnnnnnnnnnnnnnnnnnnnnnnnnnnnnnnnnnnnnnngacccacgcgtccgcccacgcgtccgccaccagaggtttttcccctgcttcgagcgccgtcttggagaagctttttctcgataggctttgcagtgacagggacacagggtttggattgaagcgaaaaaccctagcgtttacgcgtcttctcaagcgaaaaaatccttaatttccacagagaagaatggctatggagatcacacagttccttctggctgcccagtcagccgatgcaagagtccgtactgaagcagaggctagtctcagacagttccaagaacaaaacttgccgctgttcttgttatccttgtcttttgagcttgaaaacaatgataaacctgctgaatcccgtcgactagccggtattctgctaaagaattctctggacgccaaagattctgccacaaaagatcatctggtgaaacaatggtttgcaattgatgttgctcttaaatcccagatcaaggatcgcttactaagaactcttggttcatctgccctagaggcaaggcatacttcagctcaggttattgctaaggtagcctccattgaaattcctcagaagcagtggcctgaacttgttggatcgctgcttaacaatatgactc

SEQ ID NO: 127792 - DNA, 1275 bp, Arabidopsis thaliana
  unsure (1)..(1275): unsure at all n locations
ctcgaatcaatcactctctcttctttagcgtttttattttgtcttcctcgttttcttctacctttttatattttctctcttttcagttttctctagaaaaaaacactagtaatcagtttgcgtttgataaatatttgatgtggcaaaactcttgtggatcttgatgttcaaacattcatgtctccggtgattagtgaaatccttagatctggtttaactatagactcgtctcttagacgcaggacccatcttgttcaatctttctccgtcgtctttctctactggttctatgttttctcataaatcagctctcctttagccctttattattatatattctataaccataataatatatcaaaactatatactataatctttttacataataaactttgggtcctgcgtcttaatcatagtacttaattttctctgtgtgttttaatatgaataataaaactgaaatgggatcttccacaagtggaaattgctcgtcggtttcaaccactggtttagctaactccggttcagaatctgatctccggcaacgtgatctaatcgacgagcggaagagaaagaggaaacagtcgaacagagaatctgcgaggaggtcgaggatgaggaagcagaagcatttggatgatctcactgctcaggtgactcatctacgtaaagaaaacgctcagatcgtcgccggaatcgccgtcacgacgcagcactacgtcactatcgaggcggagaacgacattctcagagctcaggttcttgaacttaaccaccgtctccaatctcttaacgagatcgttgatttcgtcgaatcttcttcttcaggattcggtatggagaccggtcagggattattcgacggtggattattcgacggcgtgatgaatcctatgaatctagggttttataatcaaccaatcatggcttctgcttctactgctggtgatgttttcaactgttagaaaacttcacatcattatcatcgtgagtgagactaatcatcgcagcaggggtaaaactgtaatttttcttataaattatgtgatgatgctttgtttctttattttataagatggttaattagtgtttaaaactgattgtaatgatagacagtgtaagaaatgtgtgatatcatggagatggtgatgtgagtttggtacaaatattttaagatcttttctttctaaaaaaaaaaaaaaagnnnnnnnnnnnnnnnnnnnnnnnnnnnnnnnnnnnnnnnnnnnnnnnnnnnnnnnnnnnnnnnnnnnn

SEQ ID NO: 127793 - DNA, 533 bp, Arabidopsis thaliana
  unsure (1)..(533): unsure at all n locations
nnnnnnnnnnnnnnnnnnnnnnnnnnnnnnnnnnnnnnnnnnnnnnnnnnnnnnnnnnnnnnnnnnnnnnnnnnnnnnnnnnnccacgcgtccgcgaatcaatcactctctcttctttagcgtttttattttgtcttcctcgttttcttctacctttttatattttctctcttttcagttttctctagaaaaaaacactagtaatcagtttgcgtttgataaatatttgatgtggcaaaactcttgtggatcttgatgttcaaacattcatgtctccggtgattagtgaaatccttagatctggtttaactatagactcgtcttaatcatagtacttaattttctctgtgtgttttaatatgaataataaaactgaaatgggatcttccacaagtggaaattgctcgtcggtttcaaccactggtttagctaactccggttcagaatctgatctccggcaacgtgatctaatcgacgagcggaagagaaagaggaaacagtcgaacagagaatctgcgaggaggtcgaggatg

SEQ ID NO: 127794 - DNA, 914 bp, Arabidopsis thaliana
  unsure (1)..(914): unsure at all n locations
gncttgtgccgatgtaatcgccattgccgccagagatgtggtctccctgtccggtggtccttattggagcgtactgaaagggcgaaaagacgggacaatttcacgagccaacgagactagaaatctcccaccaccaacgttcaatgtttctcaactgatacaaagctttgcagcaagaggcttgtcggtgaaagacatggttacgctctcaggtggccacaccatagggttctctcactgttcttctttcgagtcccgtcttcaaaacttcagcaaattccatgacatagatccttcgatgaactatgcgttcgcgcaaaccttgaaaaagaaatgcccgagaacatctaaccgaggcaagaacgcagggacagtcttggactctacttcctcggttttcgacaatgtttactacaagcaaattttgtccgggaaaggagtgtttgggtctgatcaggcacttctaggcgattcccggactaagtggatcgttgagacgtttgctcaagaccaaaaagctttcttcagagagtttgcagcttccatggtaaaacttggaaactttggagtcaaagagactggacaagttagagttaaccctcgcttcgtcaactaaaagccatatccctaacaagcaaaccaaatgagaggtttctttttcttcaaaatttgatttccatttatacttgatactataataatgtagaccgcccaatatatggatcggttttaaaacctcctaattctccatgagttgcagagtatgctttaaaagtaaatttgttctgcttcattgaactgatctataaattcatcagcattttcaaaaaaaaaaaaaaaaaaagcgcggccgctatagaggatccaagcttacgtacgcgtgcatgggacgtcatagtattctatagtgcgcc

SEQ ID NO: 127795 - DNA, 675 bp, Arabidopsis thaliana
  unsure (1)..(675): unsure at all n locations
tgctggagctccaccgcggtggcggccgctctagaactagtggatcccccgggctgcattatatttttggccgccaggcagcaagagctgcagactatagcattggaagattcaggtttctaaaaagactgattcttgttcatgggaggtattcatataaccggacagcatttttgtcccagtattccttctacaaatcgttgttgatatgcttcatccagattttcttctcgtttatttcaggcgtttctggaaccagtcttttcaattcagttagcctgatggcttataacgttttctacaccagtgttcctgttcttgttagtgtaattgataaagatcttagtgaagcatcagtgatgcaacaccctcaaattttgttctactgccaagcgggaaggcttctgaatccaagcacatttgcgggttggtttggccgatccctttttccacgccattattgtatttgtaataaccatacacgcctatgcttacgagaaaagtgaaatggaggagcttggaatggtagctctgtctggatgtatatggcttcaagcttttgttgtggctcaagaaaccaatttcctttacggtgttgcaaccaccttttccattttgggggaaatctaagtcgggttctttgccaataaactttttttttaggggatncccgaa

SEQ ID NO: 127796 - DNA, 447 bp, Arabidopsis thaliana
gctcaaggttcgtgtttgcatcttatgaagactgcgtattcagacggatttgaagagtctgctatatgttgtgtattaaaagaaactcttaaagctcttgattatcttcatagacaaggccatatccatcgggatgttaaggctggaaacatacttcttgatgacaatggtgagattaagcttggcgattttggtgtctctgcttgcttgtttgataacggtgataggcaacgtgctagaaacacatttgttggtactccttgctggatggcaccggaagttttgcagccgggaaatggatacaattccaacgctgatatctggtcatttggtataacagcacttgaattggcccatggtcatgcacctttctcaaaatatcctcgcatgaatgtgctcctaatgactattcataacgcacctcctggccttgattatgaccgtgat

SEQ ID NO: 127797 - DNA, 858 bp, Arabidopsis thaliana
  unsure (1)..(858): unsure at all n locations
aatacgactcactttagggaaagcacgtacgcctgcaggtaccggtccggaattcccgggtcgacccacgcgtccggttgatggtaggttcattgctaagcctgtgactgtttggcgtgcgttaagtcggatgtgggaacttgtggctgaggatcgttgggttatcttcgctgcgttttccactcttatagtagccgcgctttcagagataactattcctcattttttaacagcttcgatcttctcggcacaaagtggtgatatcgctgtgtttcatcgaaatgtcaagctcttggttacgttatgtgttacttcaggcatttgcagtggcatacgaggatgcttctttgggattgctaacatgatacttgtgaaacgaatgagggaaacactatactccactcttctcttccaggatatatcatttttcgactctcaaactgttggcgacttaacaagcagacttggctcagactgtcagcaagtctcgagggtcatcggaaatgatctgaacatgatatttcgcaatgttcttcagggtacaggggcattgatttatttgctaattttgtcttggccccttgggctgtgcacattggtgatatgctgtattttggctgcggttatgttcgtttatgggatgtaccaacagaagacagcgaagctaattcaggagatcacagcttctgcaaatgaagtcgctcaagagacatactctgtgatgagaaccgttcgtgtatatgggacagagaagcangatgttaaaggtccatcactggcttagagattggcgatataagtttgaacagagtgctgatatggtatttgaactggagcttcacactcttaccatgcact

SEQ ID NO: 127798 - DNA, 1119 bp, Arabidopsis thaliana
  unsure (1)..(1119): unsure at all n locations
agccactattaaagaaggaaagaaatctgtttgtattaaaggagaagcagaccantcatggggcgaacattttgagagcttgtagccacgcgtccggaaggattgggatcacaaagagaagcaaagcaatcagatacttgaaagtctctttagtgacttaagtgtcagaagttttctctctcttaactctctcaaatcttttagagagaaaaaactttgaatcttgttcatatcttttgctaatccgattaacatcggatctctttagatttcgttttatgttttagctttctgactatttttcagatctatctcaaacttcttgtcggtttttcttctatactttgtttcgatttgtagtttttttgtaaagccttttgcctgttcttcaaatcaacacttctatgttgttgaagtgttaaatcattgtggtttgatgggtctttgttagctgtgtacttgattcttcgtccaattgttggtaaatcctcgcttgcccatatgggattaaattaagcgattgttcactttggtcgtttgatttcaagtggttgtagttgattgaattggagtatgtagatttggagtccctgtcgtgtttgatagtttctctgaagactgcttcgatttttagcggttaaagaagaaatcccatgagccaagtaaatccagtccattacttccaatgttcattgcaaaaggcgattggtaaaaagaaaggcttaatttggtagaagctgtttgaagattattaagaactggaaggtaaaaaaatatgccggtgactggaagtaattcccccccgccaatggagttaatgaagaaacaacttttttccagacctgccacgtgcccgtgtttatcttttgttaagacatgtgtctatgagctgtattgatataagccttaatctgtgtctttggtttatattaaaaatttaaatgggtcttgtactttatgtgtaatgccctttgggctctttaatgaaatgaagtttggcgcnnnnnnnnnnnnnnnnnnnnnnnnnnnnnnnnnnnnnnnnnnnnnnnnnnnnnnnnnnnnnnnnnnnnnnnnnnnnnnnnnnnnnnnnnnnnnnnnnnnnnnnnnnnnnnnnnnnnn

SEQ ID NO: 127799 - DNA, 557 bp, Arabidopsis thaliana
tgatcttcagctctctacgactcactattgggaaagctggtcacgcctgcaggtaccggtccggaattcccgggctgtgatatggatggtacactgcttaacagtaaaagtcagatttcggaggcaaatgcaaaagctttaaaagaagcccttctgaggggacttaaagtagtcatagctacggggaagtcccgcccaggtgcgatcagaatcttgaagacggctgatctaactggatccgatggcattatctcagagtcctctccaggcgttttcgttcagggattacttgtctatggtagacaagggaaagaagtgtatcgaggaaacttagaccgagatgtctgcagagagacctgtctttattctttggagcatcgaattcctctcattgcattcagccaggatcgctgcttgacattgtttgaccaccctcttgtcgactctcttcacacaatctacaatgagccaaaggccgaaattatatcatcggttgatcaactgatagctgaagctgacattcagacagtgatatttatggacacaaccgagggagt

SEQ ID NO: 127800 - DNA, 705 bp, Arabidopsis thaliana
tccgtaggctgggattcagcatgggggggatttgtgcgcttgggagtccctgattattaaataaaccaaggattttaccatgactgcaattttagagagacgcgaaagcgaaagcctatggggtcgcttctgtaactggataactagcactgaaaaccgtctttacattggatggtttggtgttttgatgatccctaccttattgaccgcaacttctgtttttattatcgcattcattgctgctcctccagtagatattgatggtattcgtgaacctgtttctggatctcttctttacggaaacaatattatttccggtgccattattcctacttctgcagctattggattgcatttttacccaatctgggaagctgcatccgttgatgaatggctatacaacggcggtccttatgaactaattgttctacactttttacttggtgtagcttgttatatgggtcgtgagtgggatacttagtttccgtctgggtatgcgtccttggattgctgttgcatattcagctcctgttgcagctgcgactgctgttttcctgatctatccaattggtcagggaagtttttctgatggtatgcctctaggaatctctggtgctttcaccgtcatgattgtattccaggctgagcacaacaatcttatgcacccatttcacatgttaggtgtagctggtgtattcggcggcc

SEQ ID NO: 127801 - DNA, 565 bp, Arabidopsis thaliana
  unsure (1)..(565): unsure at all n locations
atgatacttcagctctcnnnnnnnnnnnnnnnnnnnnnnnnnnnnnnnnnnnnnnnnnnnnnnnnnnnnnnnnnnnnnnnccacgcgtgcgcccacgcgtccgattcgatttttcgcctgaacctgcggatttttcgattcttcaaattcatttatctccacaggagatgactgtgtctctgttggagatgggatgaagaaccttcttgtcgaaagagttacatgcggtccgggacatggaatcagtattggaagtcttggaaggtacagccacgaggaaaacgttagtggcatcaagatcatcaactgcactctccaagagactgacaatggtctaaggatcaagacatggccttctgctgcttgtaccacaaccgcctccgatatccatttcgagaacatcctcctcaagaacgtcagcaaccccatcctcatcgaccaagagtactgcccatggaaccaatgcaacaagcagaaaccatcaacgatcaagttggccaacattagcttcaagaagatcagaggaacatcaggaaacanagacgcagtgaagcttttgtgtagc

SEQ ID NO: 127802 - DNA, 591 bp, Arabidopsis thaliana
  unsure (1)..(591): unsure at all n locations
aagcacgtacgcctgcaggtaccggtccggaattcccgggtcgacccacgcgtccgaactcccggcggtactggaggtgttaaaaccatcggtaattatgctgcagtcttgaaggctcagtcgattgcgaaagctaaagggtattctgatgttttataccttgattgccttcacataagatatcttgaggaggcttcatcgtgctatattctcattgtgaaggataatgtgatatctaactccggaaattaaaggaaccatcttgcctggaattacccggaagagtatcatcgaagtagctcgtagccaaggtttcaaggtaggaggaccgaactgtgacagtcgatgaatagcgagaagcagacgatgttttctgcacaggacccggcgttgttttatctgcgtgtggaagcataacttacaaaagccaaaggttttcttatggagaaatgggcttggaacagtctcaaaacacctctacaccttcttgacgagcctgcaaatgggtctgaccaaagataacatgagcttgacttgttaatgnagttaaaccagccccaacctttcatattatactatggtgtgtccgag

SEQ ID NO: 127803 - DNA, 804 bp, Arabidopsis thaliana
cggggcgtagtatcgccggctactatacgactcatatagggaaagctggtacgcctgcaggtaccggtccggaattcccgggtcgacccacgcgtccgggtacagatagagtcagcacagcctgtcttctcgtgattctctcccagatatacaggcctagcttggttttcctgtcattgctggctttagatatcgctagtcactggctgcaaatgtacagtaccttcctatcagggaagaccagccatagggatgtgaaagatagcacgagctggctctttagactctattatggaaaccggatgttcatgggttattgctgtgtttcctgcgaggttctttatataatccttcttctcatagcaacgaaccaaaccgaaaacttgatgaacgtggtagtgaaatcattgatgcagatttcaccgctctctttactcttggctttgagcatatttggttggtccatcaagcagctcatctatgtgattcacatgaaaacggctgcagatgtttgtgtcctgtatgacatagagccccagcataagaagccttgacgttatgtgcccgtgaatcgtgtttaactcttttgtttcatgttgtgtacgacactgtacatacggatccatcttgtttagtatgtagataaactcttgtctttaaatccattcactattttcagaaaaaaaaaaaaacccaagggcggccgctctagaggatccaagcttacgtacgcgtgcatgcgacgtcataaaactctataggcgtcccccttatttgcctctctgctatccgcgcatgcctggt

SEQ ID NO: 127804 - DNA, 521 bp, Arabidopsis thaliana
  unsure (1)..(521): unsure at all n locations
cannnnnnnnnnnnnnnnnnnnnnnnnnnnnnnnnnnnnnnnnnnnnnnnnnnnnnnnnnnnnnnnnnnccacgcgtccgatgataatcctcaagccaggattatctttagaagtcaaccatgcctaccttccgagactccggatgggattaaagaactacgggaaaaggacttggtcagtgtccgtggtgacggaaaaggcgagagaaaacctcatgagagaatttatgactacgatgtttacaacgatttgggagatccacgtaaaacagaacgagttaggccagttctaggtgttccagagacgccttacccaagacgctgcaggaccggccggcctctcgtttcaaaagatccaccgtgtgagagcagaggaaaggagaaggaagaattttatgttccaagagatgaagttttcgaggaaatcaagagagataccttcagagcagggagatttaacgctctcttccacaatcttgtaccatctattgcagcagcattgtcaaacttagacattccct

SEQ ID NO: 127805 - DNA, 520 bp, Arabidopsis thaliana
  unsure (1)..(520): unsure at all n locations
nnnnnnnnnnnnnnnnnnnnnnnnnnnnnnnnnnnnnnnnnnnnnnnnnnnnnnnnnnnnnnnnnnnnnccacgcgtccggcatgctgcaacaggatttttcagtgttataaaaaggcgaagtgaagctaatttagatgcttctgatcatcttgccagcagcacaaagaagttaccagactctaattccgatctgtatagtattccttattcagagatatatcgacctttcctcaagaaagcttctgaattcttgcagaaagctggggacttggtcagttcgccaagtttgaagaagctactgcacagcaaagctgaagccttcctttcaaatgagtattatgagtcagacatcgcatggatggacttggattcaaagttagatattaccattggtccatatgagacgtacgaggatgaaatctttgggtataaggctacatttgaaaccttcatcggtattcgagatgataaagccacagctgatctgaaactctntggtgacaatctaaagctattgg

SEQ ID NO: 127806 - DNA, 891 bp, Arabidopsis thaliana
  unsure (1)..(891): unsure at all n locations
atgatctnnnnnnnnnnnnnnnnnnnnnnnnnnnnnnnnnnnnnnnnnnnnnnnnnnnnnnnnnnnnnnnnnnnnnnnnnnnccacgcgtccggcacaactcagggtgtatgcatatgtgaaaatggatttactggaatcgactgttccactgctatttgcgatgaacaatgcagcctacatggaggagtgtgtgataatggggtttgcgagttccgttgctctgattatgcaggctacacatgtcagaacagctctaaactagttacaagtttattggtgtgcaaagatgtattggagaaagacatgtcagggcaacattgtgctccaagagagcctagcattcttcagcagcttgaggaggttgtggtaatgcccaactacaataggctgtttccgggcggggctcggaagttatttaacattntcggtaacagttattgtgatgaagcagctaaaagactagcctgttggatatcgatccagaagtgtgatatcgatggagacgacagactacgagtatgccattcagcatgtcagtcctaccatatggcgtgtggggcttctttagactgctcagatcaaacccttttcagcacggcagaaaagggtgatgctgaatgtacggngtctggcgaaatcagatcggcatggtttagcagtttgtggagtagattagtagcangttaactaggaacaattcatctgggcgaaagatagatttgtgtgtccaaggtagatagtgaggcagagtattatttccaaatctgtaattttctagggttatgaggagacgtagttaggggtcttgcttacccactgtagataatagagatcttgtctgccttgagtaaatgcatatgtttgaaatatatataggaaatggatttag

SEQ ID NO: 127807 - DNA, 598 bp, Arabidopsis thaliana
  unsure (1)..(598): unsure at all n locations
gatggagacgacagactacgagtatgccattcagcatgtcagtcctacaatatggcgtgtggggcttctttagactgctcagatcaaacccttttcagcacggcagaagaaggtgatgctgaatgtacggggtctggcgaaatcagatcgccatggtttagcagtttgtggagtagattagtagcaagttaactaggaacaattcttctgggcgaaagaaagatttgtgtgtccaaggtagatagtgaggcagagtattattttcccatctgtgattcctctcacggtttataagaagaaacagttagttaggggtcttgccttagcccccctgttagatgaattagagtatctttgtctgtctttcgagtgaaaatgcaatatgtatttgaatataatattataggaaaaatgggatttttgggccgaaggccttccaagacgaataaaaaagccaggctttaccgctctagaggatccaagcttacgtacgcnnnnnnnnnnnnnnnnnnnnnnnnnnnnnnnnnnnnnnnnnnnnnnnnnnnnnnnnnnnnnnnnnnnnnnnnnnnnnnnnnnnnnnnnnnnnnnnnnnnnnnnn

SEQ ID NO: 127808 - DNA, 555 bp, Arabidopsis thaliana
  unsure (1)..(555): unsure at all n locations
cagacgccaccgcggcccgcggccgccggggggggggtagaatcgncggnacctatacgactcatatagggaaagctggtacgcctgcaggtaccggtccggaattcccgggtcgacccacgcgtccgcccacgcgtccgcacaaactgcttatcactacaactttccacaaaacgacgtcgtcgaagaatgcttcaactttttcatggatgaagaagacctttcctcttcttcttctcaccacaaccatcacaaccacaacaatcctaatacttactactctcctttcactactcccacccaataccatcccgccacatcatcaaccccttcctccaccgccgcagccgcagctttagcctcgccttactcctcctccggccaccataatgacccttccgcgttctccatacctcaaactcctccgtccttcgacttctcagccaatgccaagtgggcagactcggtccttcttgaagcggcacgtgccttctccgacaaagacactgcacgtgcgcaacagatcccatggacgcttaacgagctcttttctcc

SEQ ID NO: 127809 - DNA, 509 bp, Arabidopsis thaliana
  unsure (1)..(509): unsure at all n locations
nnnnnnnnnnnnnnnnnnnnnnnnnnnnnnnnnnnnnnnnnnnnnnnnnnnnnnnnnnnnnnnnnnnnnnnnnnnnnnnnnnnccacgcgtccgaaaaaaaatggatactctctttagactagtcagtctccaacaacaacaacaatccgatagtatcattacaaatcaatcttcgttaagcagaacttccaccaccactactggctctccacaaactgcttatcactacaactttccacaaaacgacgtcgtcgaagaatgcttcaactttttcatggatgaagaagacctttcctcttcttcttctcaccacaaccatcacaaccacaacaatcctaatacttactactctcctttcactactcccacccaataccatcccgccacatcatcaaccccttcctccaccgccgcagccgcagctttagcctcgccttactcctcctccggccaccataatgacccttccgcgttctccatacctcaaactcctccgtccttcgacttc

SEQ ID NO: 127810 - DNA, 909 bp, Arabidopsis thaliana
  unsure (1)..(909): unsure at all n locations
nnnnnnnnnnnnnnnnnnnnnnnnnnnnnnnnnnnnnnnnnnnnnnnnnnnnnnnnnnnnnnnnnnnnnnnccacgcgtccgcccacgcgtccgcgaagcaacctccatggattagttgcttgtggtggtgaggatggtgctgtggaattttttgatatgagaatgaaatcatctgctgctagaattaacgcggtcacacatggtggtgatgctgctgcggaggttactgctatagagtttgatgacagtgaaggtcttcaagtagctgtcgggagtagcgcgggaaaggtattcatatacgacttgcgtacttcaactcccataagagtgaaggatcacatgtacgagagcccaattttgaatattaagtggcaacggactcttaatactcaacaacctaagttgattactaccgacaaacacattgttagaatatgggatccaaacccgggagaaggtatgaccagcattgaaccgactcaaggaggaataaacgacatttgtgtgttccgtggaagcggacttatgcttcttgctttagactctagcctaatcccatcttacttcatacctgaactcggtcctgcccccaaatggtgttctcctcttgaaaatctaacggaagagttggaggaaagtgcacagacaactatttatgataattacaaatttttggcaatggaagatctggagaagttgcagctaactcatttgattggacagatcttttgaaagcatctatgcatggataattttattaattaccatttgtacaaaaaggctttagcagtgattgaaccttttgcatttgatgnttancttagancgnaggnagcaagannagttagaagncancgtcnagaggannccaaaaagnngcnggtncaangggtnccgggccttgacaa

SEQ ID NO: 127811 - DNA, 881 bp, Arabidopsis thaliana
  unsure (1)..(881): unsure at all n locations
aatacgactcctatagggaaagccggtacgcctgcaggtaccggtccggaattcccgggtcgacccacgcgtccgcggacgcgtgggcggacgcgtggggtgaaacatggggaaggaagttatggtgagcgattacggtgacgacgacggagaagacgccggcggcggcgatgaatataggattccggaatgggaaattggtttacccaacggagatgatttgactccgttatctcaatatctagtcccgtcgattctcgcgttagctttcagcatgatcccagaacgaagccgtacaattcacgacgtcaatcgcgcgtcgcatatcacgctctcttcgttgagaagcagtaccaatgcttcgtctgtgatggaggaggtcgtggatcgagttgaatcgagtgttccaggatcagatccgaagaaacagatgatatcggatggtggtgaagcagcggccggtggaggattccacggcggaggaaggagactccgggcctgaagacgcgtctgggaagacatcgaaacgaccgcgtttagtgtggacaccgcagctacacaagagatttgtggacgttgtggctcatctagggattaaaaacgcagtgccgaagacgattatgcagctgatgaacgtggaaggacttactcgtgagaacgttgcgtctatttgcagaatataggctttaccttaacggattcaagattgccacggaagaaatccttattcggggcggatcagtttcttttacggcggtccttcacaagtttaagacggcgagaagtacggaaagttggggttcggttccgttcgcnatggtgctatccagtttggataaatggatgccagttttcacagttgaacctggatgatcaccatt

SEQ ID NO: 127812 - DNA, 812 bp, Arabidopsis thaliana
  unsure (1)..(812): unsure at all n locations
gccgtaacctccgccagtgaaaccctaaactcctctttccgttatttcactgttcatcaatcgctctgcgtcactcttcctagcaagctcctttaattttcctctcaatccaatcgtgattttgcatacccatcaggtttcagaaaaactgaaataatggtgtataagcgcaagtcaatggagaagaaaaaggaaggcatgggttctactattgatcaaaacctgagctttaagaatattatgaaagatgttgcactctttggttcttcgcatatgacatggaaggataagaaagcactggaggataagaaagtgactgcacttggtggaaaggcacaaaagatgcataggctaccgctgagtgtagctcgagtgcagatgaagaaacagaaagatagagaagagaagatgttagaacagaatgtgattcttggcagatttggtggaggggggaagtagcagtnngtaacccgnagagagaaagcgtacgccagaagagagagtattgaagtcacctggagggattttcaaaggcggtgttcttgatgttaagcatttgctacgttctggtccttcaagtaggagtgacaggaatttcaagacgaataaacccatagggtccagaagaacttgggaggaggaggtgacgaaggaggatnaagtgtacgggataaaaaaggggggccangtgaaacccggggngcacaagggaggggcttgagaaaacccccctttttgtnttgtgnactaggttgaacccnncagtttccttttccttnntgggttaccgttggcggtcggtgccccgtggg

SEQ ID NO: 127813 - DNA, 979 bp, Arabidopsis thaliana
  unsure (1)..(979): unsure at all n locations
nnnnnnnnnnnnnnnnnnnnnnnnnnnnnnnnnnnnnnnnnnnnnnnnnnnnnnnnnnnnnnnnnnnnnnnnnnnnnccacgcgtccgcttatattcacgattgtgttcccgtgaaacggaatgctttatcgtcgttgggaggatactcggatggagatggaatatcgatattcgagtctcgagatatttggattgatcattgtacgttagagaaatgttacgatgggcttattgatgcggtgaatggatccacggatataacgatttcgaatagttacatgttgaatcataatgaagtcatgcttttgggccatagtgatgagtattccggtgatcgggatatgcgagttacgatcgcgtttaactattttggtgaaggacttgtccaaagaatgccaaggtgtaggcatggatattttcacatagtgaataacatttatagagactggaagatgtatgctattggtggaagtgctaatccaacgatctttagccaaggaaatgttttcatagcttccaataatcagttcaccaaggaggttacaaagcgagagagtgcagatggagacgaagaatggaaggaatggaactggaaatcagaaggagacgaaatgggtaacgggactttctttacaccgcagggaaagaggattctccgagctacccgaaattttcgagtatgggagctcgaccagcttcacttctcaagaccacacatcccatcagtaggggtcttaagtgcgaaattgacccagcttggtaaaaacacacacataagctggtgaccaatctaagggttgggcctctttttctttttggcttttctactggtgggggtattggttcgtaaataggattgaccgaatgggtgatgtccattccccccactcaaaaaaaaaaaaaaaaaaaagnnnnnnnnnnnnnnnnnnnnnnnnnnnnnnnnnnnnnnnnnnnnnnnnnnnnnnnnnnnnnnnngtc

SEQ ID NO: 127814 - DNA, 568 bp, Arabidopsis thaliana
  unsure (1)..(568): unsure at all n locations
atgattcctcagcgtctctacgactcactatatggaaagctggcacgcctgcaggtaccggtccggaattcccgggtcgacccacgcgtccgcaagaagaacaaaagggtgcaagagcagaagcatctcctggtctacggtcgctaagtttggatgacttcattcagtctaaagctaaggtgagcccatctgtggcgtacgatgcgactacgatgaatgagctgagaaaatggaacgagcaatatggtgaaggaggcagcaggacaaagtctccttttggcttctgatgaatttttttttgttttggtagatcaaagtgttttcatctgtcttttactttgtgatcatagtgtaactctcagtgctatagcctttttagtatcattttatttgatgtaaactatatataatggaacacgaaacactgtacgaccacatacaaaattcttcactataacataatgatttcttgtattaaaaaaaaaaaacaaaaaaagnnnnnnnnnnnnnnnnnnnnnnnnnnnnnnnnnnnnnnnnnnnnnnnnnnnnnnnnnnnnnnnnntccccn

SEQ ID NO: 127815 - DNA, 547 bp, Arabidopsis thaliana
  unsure (1)..(547): unsure at all n locations
nnnnaggtctcnnnnnnnnnnnnnnnnnnnnnnnnnnnnnnnnnnnnnnnnnnnnnnnnnnnnnnnnnnnnnnnccacgcgtccgatctcagcggccgagcttggagatgctctcaagaaccttggctcggtcacacacgaggacattaagcgtatgatggcagagattgataccgatggcgatggatacatctcgtaccaagaattcattgatttcgcaagtgccaatcgtggtcttatgaaagacgttgccaagattttctaaagtaaaatgaacagatctaatctatatttatatgaaagggtttgagaattaatcgtgttcaatttgttttgtaatgacaatcatttgatgaagtatgtttttttttctttatgtctttattttcatgtaatggaagatcttggattattcttgaagtggattgtaacgatgtattgaagaattctccattctttagagaaaaaagaatgatgggatgggnaaggccggggggatacattgtcttcagagaatctttgcttccgtaaatctggggacagcaag

SEQ ID NO: 127816 - DNA, 533 bp, Arabidopsis thaliana
  unsure (1)..(533): unsure at all n locations
agtccacacattccacgccgcgcctagtatcgccgnnnnnnnnnnnnnnnnnnnnnnnnnnnnnnnnnnnnnnnnnnnnnnnnnnnnnnnnnnnnnnnnnnnnnccacgcgtccgcaaagttgccgctagggtcaccggaaaacttcagagttgtgtcttctattgaattctccgggaagtattagtgatggggctttctcttggggaacaacatttcattaaaggtgggattgctcaagatcttcgaactgatggtcggaaaagattgacttaccgtcctatctacgtcgaaaccggtgttattccgcaggctaatggttcagcgagagttagaattggtggaaccgatgtgattgctagtgtaaaggctgaaattgggaggccaagttcacttcaacccgataaaggaaaggttgcagttttcattgattgcagtccaacagctgaaccgacatttgggcgggagaggaggtaaggcaattgtctatctgagctcgctttggctctctcagagatgccctcatgcgcggca

SEQ ID NO: 127817 - DNA, 467 bp, Arabidopsis thaliana
atacgactcatttatagggaaagccggtacgcctgcaggtaccggtccggaattcccgggtcgacccacgcgtccgtagaagagaagagagagcaaaaaacaaagagagagatgggtgagacaaaggcagatttcagggacatgtcaagaattcctaaagttcgagaggggttctacgcgacgaacaatcagtttcagaaagcgggtccaaagggtttcgttcaagtgaaggttctggagaacgacaatctctacgtgcgtgtcgacttgcctggtgttccagacgacgccgttcgctacagagttgacgccgtgagacaaaaggttgtctttttctccggtgaaactctgaacaacggcaaggaaggtgtgcgtcagtactctggaaccgctgggcttggctgtgactgctgcgagatcacaggcgtggatgccaaaatgaaagatggagttttgaggatgattct

SEQ ID NO: 127818 - DNA, 909 bp, Arabidopsis thaliana
ctcactatagggaaagctggtacgcctgcaggtaccggtccggaattcccgggtcgacccacgcgtccgcccacgcgtccgaaaaaccattgaaacaattatgaattccattaagtttcccatacttgatcgaacaacaaaaaattccgttatttcaactacgttaaatgatctttcaaattggtcaagactttccagcctatggccgcttctttatggtaccagttgttgtttcattgaatttgcctcattaataggctcccgatttgactttgatcgttatgggttagtaccaagatcgagtcctagacaggcggaccttattttaacagcaggtacagtaacaatgaaaatggctccttctttagtgcgattatatgaacaaatgcctgaaccgaagtatgttattgctatgggagcctgtacaattacaggggggatgttcagtaccgattcttatagtactgttcgaggagttgataagctaattcctgtagatgtctatttgccgggttgccacctaaaccagaggcttgtatagacgctataacaaagcttcgtaaaaaatagctagagaaatctataaggatcgaattagacctcaacagggtaactcggtgttttactaccaatcacaaggtttttgttgtacgcagtccgcatattggaaattatgatcaagaactactctatccaccatcatctacttcagagatctctactgaaacattttttaaatacaaaagtccagtatcgtcccacgaattagtgaattagggaggcttttagagaatcagaaaaaaatcttcataaattagaattaacggtaaatgtgaaatacttaattttatataaaaaaggtgtgggggaaataaaaaagatgcagggcactttgtccgtttggctagc

SEQ ID NO: 127819 - DNA, 852 bp, Arabidopsis thaliana
aatacgactcctttagggaaagccggtacgcctgcaggtaccggtccggaattcccgggtcgacccacgcgtccgcccacgcgtccgcccacgcgtccgcggacgcgtgggaaagtttataactttctgagattttgagagaagcatcatcatcaaccaattgggtttaaatcagaagagaagcaatgatctccggcgacacattatcagctaaaaaacctaaatcagttccacaagaagaagaccaagacccaccaagccaatcaatcgcacttctcgacaatcacacagattcctccggttctgattcttccactagaagcatctcaagctgcttcatcttcacatctctacttctcgtcacctgcatcgctctatccgccgcttcagctttcgccttcctcttcttctcttctcaaaaacctgtcctttccttaaaccaaatctcagagtcaccagctttcgacagatccgtagctcgtccgctcaagaaactcgacaagcctgttgttcttttgatttcatcagatgggtttcgtttcgggtaccagttcaagaccaaactaccgagcatccacagattaatagccaacggaaccgaagctgagactggtctaatccctgtttttccgacactaactttccctaaccattactctatcgtcacaggtctatacccagcttatcatggaatcatcaataacccactgtgttgatccagatacagggaacgttttcacaatggctagtcatgaaccagagtggtggttaggtgagcctttgtgggagacaggtgtgaaccaggacttaaggctgctactacttctggcctgctctgaggacacaaagctc

SEQ ID NO: 127820 - DNA, 779 bp, Arabidopsis thaliana
  unsure (1)..(779): unsure at all n locations
cgccccctagtatcgccnnnnnnnnnnnnnnnnnnnnnnnnnnnnnnnnnnnnnnnnnnnnnnnnnnnnnnnnnnnnnnnnnnnnnccaggcgtccgccaaaccataaaatcacatcttctttacaacaatgcagtactacgaaaaccgtgagaaagactactacgaggtggctcaaggccaacgcaatggttatggccagagccagagccacaaccacgagggatatggccagagccagagccgtgggggatatggccagatccataaccgtgagggttataaccaaaaccgtgagggatatagccaaagccagagtcgcccagtatatgggcttagcccgactttgaaccaccgtagccacggtgggtttcttgatgggctcttcaagggtcaaaatggccaaaagggtcagagtgggctaggcacgtttttagggcaacacaagagccaagaggctaaaaagagtcaaggccatgggaagctttttggggcaacatgccccgaagaaaactcatgagacaaacagtggttttaatggccttgggattttcattaacaatggtgggaaggaacattggnggaaaggtgngcacaagggggaggacaagggtgggaattgaaggggtattaaattgnaannagaagggtaggnaaagnattaattttattttttgntcttaggaagtaccntcntngggngattaataagtctgggtttttantaaataaaccatgggggggggttngggntcctttncccnnntcaanaanttttnc

SEQ ID NO: 127821 - DNA, 646 bp, Arabidopsis thaliana
  unsure (1)..(646): unsure at all n locations
tgccaatcctaccctgaggtttnttcccaacccgtgaggntnttanccaagcccagatcgcccgtatatggcttagcccgactttgaccctccctacccaccgtggggttcctgatgggctcttcaagggtcaaaatggcccaaagggtcagagtgggctaggcacgtttctaggcgaaccccaagagccaagaggctaaaaagagtcaaggacatgggaagctcttggggcaacatgaccagaagaaaactcatgagacaaacagtggtcttaatggccttggaatgttcattaacaatggtgagaagaaacataggaggaaaagtgagcacaagaagaagaacaaggatgggcatggcagtggtaatgagagtggaagcagcagcggtagcgacagcgactgaatatcatatgcttgctctgaagaaagtaacgcttctaagagtgactaaattaagtacttggatgtaatacttaaaataaaatcacttaggtggttgtctttgtgtgtcctatataacctcgctactacatgaatctacttttatagttttgttgcaaaaaaaaaaaaaaaaaaaaggcgggccgctctagaggatccaagcttacgtacgcgtgcatgcgacgtcatagtcatcntatagt

SEQ ID NO: 127822 - DNA, 772 bp, Arabidopsis thaliana
ttttccacgcgtccggcaaatcttccttagccattgaacatctgaacaagtatcttgaagtattcatggctgatcatgatgcctggagagaacttgcagaaatttatgtttccttgcaaatgtacaagcaagcagctttctgctacgaggagctcatactaactcagcctactcttccattgtaccacttagcatatgccgatgttctctacacaataggtggactagaaaacctcatcgcagcaagaaagtactatgcagcaactatagacttgacaggtggtaaaagcacaagagcacttctcggaatatgcttgtgtggatcagcaatcgcacagatctcaaaaggcaggaacaaagaggacaaggacatggctgcaccagagcttcagtctttggctgcaactgcattggagcgagagtacaagcaaaaagctcccgctaagctcaacctcctcacttctgccttgagaaacttgaaaatcgcttagttcaaagcactagagcccaaacaattttttggtattttggtattgtttaaacttttttacagtcagacttttgttcattccttttcttttacccttataatttttttcttattcacttggctatattgttgaatcactgatacggtttactaaggtgtgtttaatcaaataataaattaaactaattcaaaaaaaaaaaaaaaggccggccgctctagaggatccaagcttacgtacgcgtgcatgcgacgtcaagctcatactatagtgctgcctcaatt

SEQ ID NO: 127823 - DNA, 498 bp, Arabidopsis thaliana
gactcatatagggaaagccggtacgcctgcaggtaccggtccggaattcccgtttcgacccacgcgagcgcagaaaagagaacagaggaagaagacgaagcgacgaaccgtataacggagaaatctacgaatacgtatcagaatacgtctacgctcgtatatttctactcattcctctcaccgtaacgttagagaaggtgattcccctccgaaataaaatataaaaacccttcgatttttggaagcaaacatttctctccgtcgcgaacctaatcgacgactattgttgatcaagaagaaggttttaaagttgaaagatcatggatatcccagagaagatggagatggatcaactgaatcaagggtcgagctcatctcttaccaataagcgaaaaagaggtcgtcctcgcagagacgaaagccagactcagcaaccagtgaacccacctggtgatgagaatctgataggtcgagttggttttggtgtggttgaaggtt

SEQ ID NO: 127824 - DNA, 534 bp, Arabidopsis thaliana
  unsure (1)..(534): unsure at all n locations
ccccgngggcgggggggggaggatcgccggaactatacgactcatatagggaaagccggtacgcctgcaggtaccggtccggaattcccgtgtcgacccacgcgtccgcccacgcgtccgcggacgcgtgggaaaaagtatcattatcatcttcatcgaattagatggcaccggtgaagaggagggtgttcaagacaaataatgaaatggcagtggagctggccaaatacacggctgatctttcctcctaattttgcaaagaaagaggagttttcaccgttgttctctccggcggcgacctcatagcctggctctggaaattgttagaagctccttatattgattcagttgagtggtctaagtggcccatcttttgggtcgacgagagggtttgtgcttgggatcatgcggatagcatctataaactcgcttacgatggttttctctccaaggttccagttccaggtgaaaacatctacgctatcgataacggactcggggcagaaggcaacgccgagctagcagctgacaggt

SEQ ID NO: 127825 - DNA, 911 bp, Arabidopsis thaliana
  unsure (1)..(911): unsure at all n locations
atgatattgccagcannnnnnnnnnnnnnnnnnnnnnnnnnnnnnnnnnnnnnnnnnnnnnnnnnnnnnnnnnnnnnnnnnnnnccacgcgtccgcccacgcgtccgataaaccaatcagattgcaggttcaatatcgtatgcatccagctttgtccgagtttccatccaacagcttctatgaaggaactctacagaatggagtcacaattattgaaaggcaaacaacagggattgatttcccgtggcctgttcctaaccggcccatgtttttctatgttcagctgggacaagaggagatcagtgctagtggaacatcatatcttaatagaactgaggctgctaatgtggagaaacttgtgactgctttcttaaagagtggagttgtccccagtcagattggagttataactccatatgagggacagagggcatacattgttaattacatggcaagaaatggttctctccgacagcaactgtacaaggaaattgaggttgccagtgttgattcttttcaaggaagggaaaaagattacatcatattgtcctgtgtgagaagtaatgagcatcanggcattggattccttaatgatccacggaggcttaatgttgcacttacgcgaagctcgtatggaattgttattcttggaaacncanaagttcttagtaaacagnctctgtggaatggattgttgacacattacaaggaacatgagtgcttggtcgaggacctcttataatctaaagagagcatggtcagtttcagaaccagaaagattacatgatcgagactatttatggtggggagctgcatgattgaaaatgatatttgttcggtacctatgctacagagaagcagcaggaggctggtggtctatcttctctgccaccaatgtgctgactgactca

SEQ ID NO: 127826 - DNA, 495 bp, Arabidopsis thaliana
cggtttgggagagagaagagaagaagaagacaccctttaagcaaaacagaggattttcattctctgttctgtttgaattattactaatctatcatcttgttgttctcttcgtcgacaatgtcgggaaacaaagaagaagaggatcctcgtatccatggaatcaaaactaagatccgtgtcgttccagattttcccaagaaaggaataatgtttcaagacataacaacagtgttgttggatccgaaagccttcaaagacacaattgatctgtttgtggagaggtacagagacaagaacatctcagtggttgcaggaatattatctctcattgcaattcataatgttaattaattttctatacatagtgttatttcgatgggattactattcaaaagattcgacttatttcaaggaactcgattttttaattggtttgatgattttccggggaaataagggggtaggtcatgtttttagtgacgtttagtttttttt

SEQ ID NO: 127827 - DNA, 942 bp, Arabidopsis thaliana
  unsure (1)..(942): unsure at all n locations
gcgtccgatagtatgggagagagaagagaagaagaagacaccctttaagcaaaacagaggattttcattctctgttctgtttgaattattactaatctatcatcttgttgttctcttcgtcgacaatgtcgggaaacaaagaagaagaggatcctcgtatccatggaatcaaaactaagatccgtgtcgttccagattttcccaagaaaggaataatgtttcaagacataacaacagtgttgttggatccgaaagccttcaaagacacaattgatctgtttgtggagaggtacagagacaagaacatctcagtggttgcaggaatagaggctcgtggtttcctattcggtccaccgatcgcgctagccattggagcaaaatttgttcctctgcgcaaacccaagaaactacctggtgaaacaatatttgaggaatacgagttggaatatggaaatgaccgcctagagatgcacataggagccgtcgaggctggcgatcgagctttggtcgttgatgatcttatcgcgactggtggtactctctgcgctgccattaacttgctcgagagggttggagcagaagttgtggaatgtgcatgtgtgatcgagttacccgaattaaagggaaggcagagacttaaggggaagccactatgtatgcttgtggagtacccgatgatgattttagctttacttatttggataaaattattcggttaattaatttatgctccgaaaattcggattatgcagacttcttattattggattctacaatattttgatttaaattctagcggattagctggaacaaataatccaaagttctctgctgtnnnnnnnnnnnnnnnnnnnnnnnnnnnnnnnnnnnnnnnnnnnnnnnnnnnnnnnnnnnnnnnnnnnnnnnnnnnnnnnnnnnnnnnnnnnnnnnnnnnnnnnnnnn

SEQ ID NO: 127828 - DNA, 1004 bp, Arabidopsis thaliana
  unsure (1)..(1004): unsure at all n locations
nnnnnnnnnnnnnnnnnnnnnnnnnnnnnnnnnnnnnnnnnnnnnnnnnnnnnnnnnnnnnnnnnccacgcgtccggagcaatcaaatctataagaaaagaatcgtcgccggtgaagagaaaaaaccatagaagcgatggatccgcagctaactgaagtttcacagcagttcgagagattcaaggcggcgtttgcgaggaaggattacaatacctgtagcgatctgttgtctcagcttaaggttcttcttaccaaattcacaagtcttcctccattgttcgagaattcacctaatgcagccaaggaattgactattgcaagggacatttatgagcatgctgttgttctaagcgtcaaaaccgaggatcaagatgcttttgagagagatttcttccagctgaaaccttactatgtggatgccaggaaccgtattcctcagtctccacaggagaatcttatcctgggtcttaaccttctgaggctgctggtacaaaatagaattgctgaattccacaccgagcttgaattactttcatcagctacactagaggatccttgcatcaagcatgcagtagagcttgagcaatccttcatggagggtgcctataaccgtgtgttgagtgctagacagaccgcgcctgatgcaacttacgtctatttcatggatctcttggcaaagaccataagagatgaaatagctggatgcagcgagaaagcttatgattatgtctctatcagcgatgcccggcagatgttgttgttctcttctgatcaagaactcttaacctatgtcacagatgagcatcctgagtgggaagtgaagggaagggtttgttgtcttccagaaagccaaagaaactgcaccgtgcaaagacgattccgccttttgcaactcatcaacccgnctctaagattcgccagaangcttggnggatcgtgtaagtnggctttctactgntgntctcnctctgnatgtccnggatncttggcanaacttnttnngt

SEQ ID NO: 127829 - DNA, 494 bp, Arabidopsis thaliana
tggaacttacgtctactttcactggatctcttggcaaagaccataagagatgaaatagctggatgcagcgagaaagcttatgattatgtctctatcagcgatgcccggcagatgttgttgttctcttctgatcaagaactcttaacctatgtcacagatgagcatcctgagtgggaagtgaaggaagggtttgttgtcttccagaaagccaaagaaactgcaccgtgcaaagagattccgtctctgcaactcatcaaccagactctaagctacgccagagagctggagcgtatcgtgtaagattcgacttttctcactgcttgtctcttctcttctgttatgttcctggaaatctctggggcagaaaactttgttatcatgtaatgaccgatattgagcggctcagtattttccccgggtcaatgagactttggtgtgatatcaatctggtttccaaaccctttacggtaaatcctattgtaaggggccccggt

SEQ ID NO: 127830 - DNA, 789 bp, Arabidopsis thaliana
  unsure (1)..(789): unsure at all n locations
atgatactgccnnnnnnnnnnnnnnnnnnnnnnnnnnnnnnnnnnnacgcctgcaggtaccggnccggttttccgggtcgttccacccgtccgggaaataaatctcggtattggtaatgaatttgaagctgatgaatttgtacttttgaatgcatcaagctaagcgccttcttgttttactgtttcaatctatcaattgttctatatagaagtgtttttagttctttgatgctgaaagtgatgtacttttctgttactgtcaatctctttgcaggtaaaggttttgccacaggaagaattagcctaggagaaatagaagtggtgaaaatcaccaagttccatcgagtttggagctctgattcatcacacgacaaatcaaaacgtgctacattttacagagccgatgacattccagaaggattccattgccttggtcactattgccagccaaccgatcagcccttgagaggttatgtacttgcagctcggactagcaaagccgtcaatgctgatgatttcccgcccttgaaaaagcctgtgagttattctttagtttggagtgcagattcagagaaaaatggtggtggttatttctggctacctaatcctccggttggttacagagcaatgggagttattgtaacccatgaaccaggtgaacctgaaacagaggaggtcagatgtgtaagagaggatcttacagagagttgtgaaacctctgagatgatacttgaggtgggttcttcgaagaagtcgaacggctctagttctccttttagtgtatggagc

SEQ ID NO: 127831 - DNA, 509 bp, Arabidopsis thaliana
atcgactcacttagggaaagccggtacgcctgcaggtaccggtccggaattcccgggtcgacccacgcgtccgcccacgcgtccgctcttctccggcgacgattcgtgaaacaatcagttaattgcataacattccttcaaatcctcgccgagcgatccttctccaccgtgaagattcctccaggtcgtcgcaaaaccaccgaattcgacaaacttatcaacgaagctggcagctccggcgatttcgagaccgtacgccgtctcctaaacaaccgtatagttctcggatctttcaacacgagcgacacattcaaattcctcaccaacaccgcttcatactcctcctatttagaagatctccgccgcgttttgcctcagatcgacggcggtttctcgcggaaaaacgcttacgacattttaatctctcgtctctgtaagctcggacgcatcgacgacgctttaatcgttatcggagacatgtctaacgggagattaggcttaacgccgtc

SEQ ID NO: 127832 - DNA, 557 bp, Arabidopsis thaliana
tttaaaaagatggaaaagtaaatttccctcccaatgatgatgaagagtcatgggaaattgccaaactattgttttattgcacctctcaagaagggctttttatattcagacatgaaaactgaggacatgccagtagatgagcctgatgatactcggaaccaagtgtatgaggaaaaaaaatcccggctagaaaagattataacgcgtcctagtaagtccttatcaaagggatcagattctttcaaaggacccaaagaatctatacttttgcttggttggcgtggagatgttgtgaatatgatcaaggagtttgatagttatcttggtccaggcagttcattggaaatattacccccctcccgttagaggacagaagaggagtggaccagagtatagctacaggaaaaatcaagaacatccaagtttcacatagcgttgggaatcatatggattatgatacattaaaggaaagtataatgcacatgcaaaaaaaaaaaaaaaaagggcgcccgctctagaggatccaagcttacgtacgcgtgcatgcggcgtcatag

SEQ ID NO: 127833 - DNA, 729 bp, Arabidopsis thaliana
gaccggaatttccgggtcgacccacgcgtcccgaaaacaacaatgcaactctcactggttcaagtgctcttctgtgtccaacttcagatcccaatcaaacccatcttggttacttcttcaaaagtccatctttcccgggtccaagttaaccctccatcgaatttttcgttatccgaagaaaatctcaaatggctctactcgtgcttcactgcttgagacccctatcttatgggctggtcggatttgtgtcttctacgctctcgcgaaagctggctttgctggatccaagtctaaccctatcgtttctggtttggaaactggtggtgctgatgttgaatatgatgatcattttagagatgcaaccaatctcacaagggttgtcaaatccggcggggagactgcgcaacgggcaaagcgtatgttgcaacaatgtgagagctctgtttgatgagttaccgacgccacatttggtggtggagatcacaccttttccagccggaccgcttacggagaatgattaccttaaggctgagaagctggagaggattcttaggtctggccccaacatttgaaccctctggcatatagagaaagtgttttactatgtgtcaaaatctagaacctgtacatacttctacgatgtctttatgatgcagaacgttcaaatgtttagactctatgaaactgttagtttttttgaagttaaattatcaaaatcgttgcgaggct

SEQ ID NO: 127834 - DNA, 1000 bp, Arabidopsis thaliana
  unsure (1)..(1000): unsure at all n locations
ggcccagatcaaaaacaacaatgcaactctcactggttcaagtctcttcagtgtccaacttcagatcccaatcaacgattcctactctctccaactcaaacccatcttgtttacttcttcaaaagtccatctttcctgggtccaagttaaccctccatcgaatttttcgttatccgaagaaaatctcaaatggctctactcgtgcttcactgcttgagacccctatcttatgggctggtcggatttgtgtcttctacgctctcgtgaaagctggctttgctggatccaagtctaaccctatcgtttctggtttggatactggtggtgttgatgttgaatatgatgatggtgctgatcttggtttctcaaagtggcttcagaacattaagggcaacaaacccagttaagggatgcagctgataagaggaagctagtgagcaaatgggacccaacggcaaaggggaacacgtaaggaaggaactacaggatacccttcgaaagccggagggaaacccgtttgcttaaaaccattgcgtctcttctctcagatgatgatcattttagagatgcaacatctcacaagggttgtcaaatacggagggagagtgcgcacggtcaaagcgtatgttgcaacaatgtgagagctctgtttgatgagttaccgacgccacatttggtggtggagatcacaccttttccagccggaccgctcacagagaatgattaccttaaggctgagaagctggagaggattcttaggtctggcgccaacatttgaaccctcttggcagtgttttactatgtgtcataatctagaacctgtacatactctacgatgtcttatgatgcagaatgttcaaatgtttagactctatgaaactgttagttttttgtgaagttaaattatctnnnnnnnnnnnnnnnnnnnnnnnnnnnnnnnnnnnnnnnnnnnnnnnnnnnnnnnnnnnnnnnnnnnnnnnnnnnnnnnnnnnnnnnnnnn

SEQ ID NO: 127835 - DNA, 630 bp, Arabidopsis thaliana
cgactcactttagggaaagctcgtacgcctgcaggtaccggtccggaattcccgggtcgacccacgcgtccgctcatttcttctagtccttttctctttctttcttcctttttccgctaattacagagcttttctttgagtgaagaaagaatggagttgaaagaacaaggtatgagtatgaggttgtctctggttctcggtaacgctttagtgctaaactgcgccgctttggctttaacggctactatgctctcttctttgctagagctcttctctcaggttactgtcttgaagggtgatgttatagagaatggatatgaggtggttgatgcagtggaaggcaatggaaacaatgatgatagtggtgatgatggagggagaagacgaagaaggcagtgcagatgatgcagaaggaaacgagaccaagaaaggaccggtaagtgatcctgatttgaacggtgaagctggagataatgatgatgaacctgaaggggatgatggtaacgatgacgaggatgatgataaccatgagaacgatgatgaagatgaggaggaggatgaagacgagaatgatgatggtggggaagaagacgacgatgaggatgcggaggtagaggaggaggaaagaga

SEQ ID NO: 127836 - DNA, 1454 bp, Arabidopsis thaliana
  unsure (1)..(1454): unsure at all n locations
actcactatagggaaagctggtacgcctgcaggtaccggtccggaattcccgggtcgacccacgcgtccggaaagtttgaaacttgaagaatgccacaggatcaaccagtttggtcttatgggttttctcatgaactgtggctcaaagttgaaagctttctctttggcaactgtctgggcatcagtgacttcacctcagaatcctctctgccatcacccagttgcagctctttacgttctctgtcaatccgatgctgccctgggtttggggatgcaagtctcgctttcttgggaaagttctgtcatcagcttcaggatgttgaactctgtggactaaacggagtgacagatgcaggtgtgcgcgagttgctacagagcaacaatgttggtctagtgaaggtgaacctgagcgaatgtatcaatgtttcagacaacacagtctctgcaatttctgtttgccacggacgcacattggagtctcttaaccttgacggctgcaagatcatcacaaacgcaagccttgtcgcagtagccaagaactgctactcagtcaatgaccttgacatctcaaatactttggtctcagatcacggaatcaaggccttggcatcttctcctaaccatctgaatcttcaggttctttccattggcggctgctcctcaattacagacaaaagcaaggcatgcatacaaaaactcggccgcacgcttttgggatatacatccaacgttgtggcagaatcagcagcagcactgtggatactcttctcgaaatctatggaagtgcgatatactctactaaattcccactttttctacaaaaccttagtatcatcatcatcagtccaagtctttttcctaggttttggtcgctaaaacccatagattccacctagaacttagtttctttctcaggacactgcagttgttttttaaaatttttggcaggttccttctaaacaaaggagcctgtttctacaactgttagtgtttttgtgaagcctgtcactgagttctggtaatctagtttagggtttagtcttgaccgtctttttggagttgttgtctctctatgttcagtaaagttcttgtagaagtcatttgttctttggtttaggttcgtgatagtgccttttatcttcttccactgtagagcttttggcaatggcggtgtaacttcttaatccgccattacaactcttcggagttgtttttttgtgtgttatgtatctgccaaaagctctgttttttcccacttttttgtttaaggcactatcttgtacttatgaatcattgtaactttgtactctctattataaagctttcactgaacataattactaccctttgtaatagaacttgatccttacataattggatcactttgttgtgtgatnnnnnnnnncagcnnnnnnnnnnnnnnnnnnnnnnnnnnnnnnnnnnnnnnnnnnnnn

SEQ ID NO: 127837 - DNA, 603 bp, Arabidopsis thaliana
  unsure (1)..(603): unsure at all n locations
tacggctgcgagaagacgacagaagggtacggctgcgacgacagaaggatacggctgcgagaagacgacagaaggggggattaaacatccaacgttgtggcagaatcagcagcagcactgtggatactcttctcgaaaatctatggaggtgcgatatactctactaaattcccactttttctacaaaaccttagtatcatcatcatcagtccaagtctttttcctaggttttggtcgctaaaacccatagattccacctagaacttagtttctttctcaggacactgcagttgttttttaaaatttttggcaggttccttctaaacaaaggagcctgtttctacaactgttagtgtttttgtgaagcctgtcactgagttctggtaatctagtttagggtttagtcttgaccgtctttttggagttgttgtctctctatgttaagtaaagttcttgtagaagtcctttgttctttggtttaggttcgtgatagtgcctttnatcttcttcctctgttttttcccacttttttgtttaaggcactatcttgtacttatgaatcattgtaactttgtactctctattataaagctttcactgaac

SEQ ID NO: 127838 - DNA, 528 bp, Arabidopsis thaliana
  unsure (1)..(528): unsure at all n locations
gcttcatggacttcaaggtgtgaatgagaaaggcttctgggttatgggaaatgcaaaagggttgaagaaactnaagtccctctcagtaatgtcgtgcagaggtatgaccgatgttgggctcgaagctgttggaaatggttgccctgatctgaagcatgtctctctgaacaaatgcttgcttgtttctggtaaaggacttgtcgctttggccaaatctgcattgtcacttgaaagtttgaaacttgaagaatgccacaggatcaaccagtttggtcttatgggtttcctcatgaactgtggctcaaagttgaaagctttctctttggcaaactgtctggggcatcagtgaccttcaacctcagaatccctctcttgccatcacccagttgcaagctcttttacggtcttctggtcaatccgattgctgccctgggttttggggggatgcaagtctcccgctttccttggggaaaggtccttgtcaccagcttcaggatgttgaactctgtggactaaacggagtgacag

SEQ ID NO: 127839 - DNA, 513 bp, Arabidopsis thaliana
  unsure (1)..(513): unsure at all n locations
nnnnnnnnnnnnnnnnnnnnnnnnnnnnnnnnnnnnnnnnnnnnnnnnnnnnnnnnnnnnnnnnnnnnnnnnnnnccacgcgtccgaaaagccctagcttcttcttttttcgacgatcaaaagtttcgatttttcagcagcaagatggtgaacaacgttgtctctatcgaaaagatgaaagcactctggcactccgaggttcatgatgaacaaaaatgggcggtgaacatgaaacttctgcgagcacttggtatgtttgcaggaggagtcgtcctcatgcgtagctatggggatctcatgggagtttgagaagaagaatggaggatcatgggagtttgagaagaatggaggagcctctctttagttttcactctctcaaactcttgtattttcttctctagaattggtgtgaactcgtttctgatttgtgtcttgggatgctataaaagagttaattttccattcaccgagggaaggggaaaaggatggtataaaaaaaaaaagggcggccgt

SEQ ID NO: 127840 - DNA, 532 bp, Arabidopsis thaliana
  unsure (1)..(532): unsure at all n locations
nnnnnnnnnnnnnnnnnnnnnnnnnnnnnnnnnnnnnnnnnnnnnnnnnnnnnnnnnnnnnnnnnnnnnnnnnnnnnnnnnnnccacgcgtccgaaaatttctctctcttttgcttacttcactcacagtttcgccgccgggataaatccgttcaatcggcgtttgccacctgccattgttacaagcaatgcattatatcgttaatggcgtagcgcattgagaagagagagagagagcagggaaacaatgatttcccaggtggagagagatctgtcgattcaaaatcggcttccgggaagcgatcacactactccttctccgccaacatctcctcatctctgccggagccggtcgaaatcctcctctgtctccgggcaacagcaaagtcggaacgtcgctcaccgtctctcatggatcattttatctgttcttctccggcgtcagggaattctccttttcgctcctatcatctacatctcctgtatgctttttcacctacacgcggcgtcgtttgatgcctcttccattatc

SEQ ID NO: 127841 - DNA, 525 bp, Arabidopsis thaliana
  unsure (1)..(525): unsure at all n locations
nnnnnnnnnnnnnnnnnnnnnnnnnnnnnnnnnnnnnnnnnnnnnnnnnnnnnnnnnnnnnnnnnncgaccacgcgtccgcaggaccttatccacagtccacacacagcgagactctatttactcgccggcggaagaacaaaatggcgggaagagcgattttctctgtatcttgttcatctactccttccttgtgtatcccttattcaactgcttcgttttcatcgatgaatcgactggcgctccccgccgtccggatttctccccgaaccaacagatttcccaggattcactgctctatgtctgctaacgacatcaaagcgggaaccaatatcgaagtcgatggtgctccttggcgtgttcttgagtttcttcatgttaaaccaggaaaaggtgcggcatttgtgagaactaagatcaggaactatgtgaatggtagcacagtcgagagaacatttcgtgctggaatttctgttgaggaagctaatatatataaagaaaccaaacaattcacatacaaagatgg

SEQ ID NO: 127842 - DNA, 545 bp, Arabidopsis thaliana
  unsure (1)..(545): unsure at all n locations
ataggcgattgngtaccgagcccccctcgaggtcgacggtatcgataagcttgatatcgaattcgcggccgccgaaccacgccatgtctctagtccccggcggaatcgctgttccccttttttgttaagactaggaaagctcagagtcagaggcatgtccagagtttgatcgtcgtatccttgggcttatcaatatcagctgactctcagagtttgctctcatgctttgcccaccacaagggcttagtggcggatgccttgatcgtcctctcggagttgtccctgaacagaatccaaaggctagaagctcttttcagaagatttgaaacctgcttcttgctcataccaacatcatttgaggagcatgacaatcttcttttccttggcatatgacaactgctcatctgatcctgccccaccctcatcctcgctacacgaagcccattcacttcctgattccgatggttcccggagattatccttttcacacgtttttgcccgttccacaaaccctttttgcaaacatttaaagggaccctgtgaaa

SEQ ID NO: 127843 - DNA, 494 bp, Arabidopsis thaliana
agggaaagctggtacgcctgcaggtaccggtgccggaattcccgggtcgacccacgcgtgcgattttctgcaacttctccaaatctcatactttccagaaaatcattttcccaagaaaaataaaactttcccctttgttcttctccccccaacagcaatcacggcgtaccaatcggagctaggaggagattcctctcccttgaggaaatctgggagaggaaagatcgaaatcaaacggatcgagaacacaacgaatcaagtcactttttgcaaacgtagaaatggtttgctcaagaaagcttacgagctctctgttctttgtgatgctgaagtcgcactcatcgtcttctctagccgtggtcgtctctatgagtactctaacaacagtgtaaaagggactattgagaggtacaagaaggcaatatcggacaattctaacacccgatcggtggccgaattaatgcacagttttatcaaccagaagtcaccaaatt

SEQ ID NO: 127844 - DNA, 550 bp, Arabidopsis thaliana
ccacaaacctctatcggcccccccggcccccccccgtagtatcgccggctcatatacgactcatatagggaaagctggtacgcctgcaggtaccggtccggaattcccgggtcgacccacgcgtccggcttactttgaaggcagttttgatgcttgcagatcaactgattagcagagttgaatatatgcattcaagggggtttcttcaccgtgacatcaaacctgacaatttcttgatgggacttggtcgcaaagcaaaccaggtgtatatcattgattttgggcttgcaaagaagtatagggatctccaaacacataggcatatcccctatagagaaaacaagaaccttacgggcacagctcggtatgctagtgtcaacactcacctaggagttgagcaaagtaggagggatgatctggagtctcttggttacgtactcatgtatttcctgagaggaagcttaccgtggcagggactaaaagctggcacaaagacgccgaagtttgactgaattagcgagaagaaagtttaactcctatacaggccttg

SEQ ID NO: 127845 - DNA, 621 bp, Arabidopsis thaliana
  unsure (1)..(621): unsure at all n locations
nnnnnnnnnnnnnnnnnnnnnnnnnnnnnnnnnnnnnnnnnnnnnnnnnnnnnnnnnnnnnnnnnccacgcgtccgaatctcaaaaactggacccctcttaattagatctctaatttgttttctttcttctccaaaatttgacaaagaaaagaattgatcttttgagagggttccagttttttttctctttcgtcttctccattcttgtttgtagaaaaaaacccattttttatttggatttttcatttgattttcccgggaaagttgtaatttttatttttttgagggagattgaaaaagttcgataaaaatgtggggagccgccgcagaaccagcagattcttattacctgattcgtcctgagtgcactgatgtccccaataccaaattcaagatcaaacctggtaaaactctaagtgtaagaaaatggcaagctgcatttacaacagaaggattccttgatattggcaagactctaagtcgaatccaacgaggggggatccatccatcaattagaggagaagtctgggaattcttacttggttgttatgatccaaaaagcacatttgaagaaagagagcaaatccgacaacgtagaagattgcagtatgcttcttgga

SEQ ID NO: 127846 - DNA, 681 bp, Arabidopsis thaliana
  unsure (1)..(681): unsure at all n locations
aatacgactcatttagggaaagcacgtacgcctgcaggtaccggtccggaattcccgggtcgacccacgcgtccgtgcaacttttatcatcggctatagagttccattggaagactatctctttgaagcatctgatggcagacgttacttgaactttacctttgggtgcccgctcgtcgaaactattgttaacaagttgactatcaaagtcgtgcttcctgaaggatcaaaggacccttctgctgttttgccctttacagtcaatcaagagttgcaggtcaaatactcataccttgacattgtgggaagaaccgtggttgtgttgcaaaaagataacgtagttcccactcacaacgtacccttccaggtgtactatacattcaaaccaatatacatgctagcggaaccattcatgcttgtatcggctttcttcttagtatttgtggcttcgcttgcgtatgtacacatcgatctcaatatcgtcaggaagtagaagtcttatcaacagtccttcgctttcacttatagactcgtaaaagaaaatacttttgatcatcccttgaagaactaaactttgtaggtgttgctgcttttagtagagttatatctttgacactactttgctctccaatcgggggccgctctagaggatccaagcttacgtacgcgtgcgtgcgncgt

SEQ ID NO: 127847 - DNA, 509 bp, Arabidopsis thaliana
aatacgactcacttagggaaagctcgtacgcctgcaggtaccggtccggaattcccgggtcgacccacgcgtccggactcatcttctttctctttcggaacaaaaatgacgtctcctctctcagatctcctaaaccttgatctatcagacaccaagaaaatcatcgctgaatacatatggatcgggggctctggaatggatattagaagcaaagccaggacattaccaggaccagtaagtaatccaacaaagcttccaaaatggaactacgatggatctagcaccgatcaagctgccggagatgatagtgaagtcattctttatcctcaggcaatatttaaggacccattcaggaaggggaacaacattctggtgatgtgtgatgcttacagaccggccggagatccaattccgaccaacaataggcacaaggccgttaaaatcttcgatcatcccaatgtgaatgctgaagagccttgggtttgggatagagcaagaatacacattac

SEQ ID NO: 127848 - DNA, 1168 bp, Arabidopsis thaliana
  unsure (1)..(1168): unsure at all n locations
nnnnnnnnnnnnnnnnnnnnnnnnnnnnnnnnnnnnnnnnnnnnnnnnnnnnnnnnnnnnnnnnnnccacgcgtccgcccacgcgtccgcccacgcgtccgcccacgcgtccgacctattgctcaataggataaagccagcccctgattctgaagacgtgtcttctctgccgctgaacgaaaaaagtgtgttagttgtcagtgccaaaaattgctcagaaatagcgctgaaactggtgtccatgtccattgaatttgatgatgaacaaggggaaacttcatgtttgattcagcagggtggtgggtgtggagactccccaagctctgcaaatcttgcgccaggggaagagttcaaaaaggttttcacagtcataccaacgacgagaactccaaagcttggtttgggatcaatacatttaaaatggaggagagagggaggtaacataacagaggcatatgtttcaacaaagcacaaacttcctgaagtaaatgtggaggcatcaccactggtaatgagtttggactctcctccatatgccattcttggagaacccttcacttacgctgttagaatctgcaaccagacacagttgctgcaagaagcaaagtttggtctggctgatgcacagagttttgtcctgtctgggtctcacagcaatacggtttcagtccttcccaagtcagaacacgtcttaagttataagctagtgcctctgacttgcggtgaacagcaactcccaaagataactttgacatcagcgcgatatgctgctgagtttcagccatctgcggttgcttcaagtgtctttgtgtttccctcagccccacaagccgagaaagccatctctaccagcaagtagtgtaacttcgcatgacttgggttttcagatgtctatgcagtttcagccatatgtggttaagacagacatattgaatcagtttggtaaattttgatcctgaagtgtcgcctatgttgtattttcatttttccttctgttgttgataataatggatattttttggagaacccaaactagacacataggattaggacacaatctgttttgagatgtgttttgtggcaactgtttttctttcaatgaggccggccgctctagaggatccaagcttacgtacgcgtgcatgcgacgtcatagtcattctatagt

SEQ ID NO: 127849 - DNA, 434 bp, Arabidopsis thaliana
  unsure (1)..(434): unsure at all n locations
agagagggaggtaacataacagaggcatatgtttcaacaaagcacaaacttcctgaagtaaatgtggaggcatcaccactggtaatgagtttggactctcctccatatgccattcttggagaacccttcacttacgctgttagaatctgcaaccagacacagttgctgcaagaagcaaagtttggtctggctgatgcacagagttttgtcctgtctgggtctcacagcaatacgggtttcagtccttcccaagtccagaacacggtcttaagttttaagctagggcccctntaaactttcgggtgaccagcaactcccaaaggtaaccttttacaaattttggggggatttgntcctggggttttaaacccttttgggggtttnttaaaaggnnnttttgggnttcccncnagncccaaaaggcgggaaagccc

SEQ ID NO: 127850 - DNA, 1525 bp, Arabidopsis thaliana
  unsure (1)..(1525): unsure at all n locations
tggccgttcgcagtaccgcaccggaattcccgggtcgacccacgcgtccgccttcctgagtactagccagctccctccatagcttttcaattacaaaaatctccttttctcaaagctctggttccccaaatcctctcgtcttttgtttgccctcacaacaacaacaacaacgcagagatggccatgtctgctattggcttcgaaggttacgagaagcggcttgaagttactttctttgagcctggtctctttcttgacactcaaggaaaagggctacgtgctttagctaagtctcagatcgatgagattcttcagccagctgagtgcactatcgtctcatctctctcgaacggtcagcttgactcttatgttcctctctgagtccagtctctttaatcttcccgtacaagatcgtcatcaagacttgcggtactactaagctcctcctctctattgagcctctcttgaggttagccggtgagctttctcttgacgttaaggctgtgaggtacactcgtggaagtttcctctgtcctggaggacaaccattccctcaccgcaacttctctgaagaagtctctgttcttgatggtcactttgctaagcttggtttaagcagtgttgcctacttgatgggcaatgacgatgaaaccaagaaatggcatgtttactctgcttcttctgccaacagcaacaacaagaacaatgtctacacgcttgagatgtgtatgactggtctagacaaagacaaggcatctgtcttctacaagaacgagtcaagctctgctggttctatgactgataactctggcatcagaaagatactgcctcaatcccaaatctgtgactttgagtttgagccctgtggctactcaatgaacagcatcgaaggcgacgcaatctctaccatccatgtaactccagaggatggtttcagctacgctagctttgaagcagtgggatatgatttcacaaccatggacttgagccatcttgtctcaaaggtactaacttgcttcaaaccaaaacaattctctgtagctgtccactcgaccgtggcacagaagagctacgactctggtctctctgtggacctagacgattacggatgcaaagagtcaacaatggagtctctaggagaagagagaggaacagtgatgtatcagaggtttgagaagctaggaaggtattgtggttctccgagatctaccttgaaatgtgagtggagcagcaacagtagctgcaacagcgaggacgagaaggaatagggaatctaaaagctcaagtttttaattttcgttttcttgaataatgtcttatggatatttttcttcttcttcttatttcccttaaaccagtgtttgtgtctggtctatgtgaattcggatgatccaaatgttgaatataatggatcaagtatctattattatgatcaaaaaaaaaaaaaaagggcggccgctctagaggatccaagcttacgtacgcgtgcatgcgacgtcatagctctactgagtgttcnaacnnn

SEQ ID NO: 127851 - DNA, 1012 bp, Arabidopsis thaliana
  unsure (1)..(1012): unsure at all n locations
atacgactcctttagggaaagccggtacgcctgcaggtaccggtccggaattcccgggtcgacccacgcgtccgcacatacacaagccgtgaaggtgcagagaaggctgcgcaagagctctccaacaggctagtcatcaacggtcagaggctaaaactcacatggggaagacccaaacctgatcaagatggtgcaaaccaacagggcggtgtggctcatagtgggttactacctcgagccgttatatctcagcagcacaatcaacccccaccaatgcagcagtactatatgcacccaccaccagctaaccaagacaaaccttattacccatcaatggacccacagagaatgggtgcagtcatttcaacccaagaggctggtggttcaagcactgagaacaacggagcttcatcttcttcttacatgatgcctccacaccagtcatacccaccaccaccatatggatatatgccatcgccttaccagcagcagtatcctcctaaccatcatcatcaacctagtcctatgcagcactatgccccgcctccagcagcttacccgtacccacagcaacctggtcctggatcaagacctgcaccgtctccaaccgcggtctctgctatatcacccgactctgcacctgctgggtctggagcaccttcgggatcctctcaacaagctcctgatgtttctacagctactggttcgtctcagtagagaagatatatcgcttaaaaaatgtactgcaagtttcccgctattcaggacgaaggttttttgtattctgaatgaatcattttcttctgctttttaaagaacttcggaatgtattgtttcttcaaaacggttgttaacgaaatctatcagttatagaggcaattggttccnnnnnnnnnnnnnnnnnnnnnnnnnnnnnnnnnnnnnnnnnnnnnnnnnnnnnnnnnnnnnnnnnnnnnnnnnnnnnnnnnnnnnnnnnnnnnnnnnnnnnnnnnnnnnnnnnnnnnnnnnnnnn

SEQ ID NO: 127852 - DNA, 469 bp, Arabidopsis thaliana
  unsure (1)..(469): unsure at all n locations
tatggtgttaatgatccanttgatatgaagttgcttggcaaagctggtgagatgggcactttggaatcgccagacgatgaaggcatcaaaaccctttacgtcggtggacttaactcgagaattctcgagcaggacatacgagaccaattctacgctcatggagaaattgaatctatcagaatcttggccgataaagcctgtgcatttgtcacatacacaagccgtgaaggtgcagagaaggctgcgcaagagctctccaacaggctagtcatcaacggttcagaggcttaaaactcacatggggaaggcccaaacctgttcaagattggtgcaaacccacccaagggcggtgttggctcatagtgggttactacctcgagccgttatatctcagcagcacaatcaacccccaccaatgcagcagtactatatgcacccaccaccagctaaccaagacaaaccttattac

SEQ ID NO: 127853 - DNA, 491 bp, Arabidopsis thaliana
  unsure (1)..(491): unsure at all n locations
atgatatgccnnnnnnnnnnnnnnnnnnnnnnnnnnnnnnnnnnnnnnnnnnnnnnnnnnnnnnnnnnnnnnnnnnnnnnccacgcgtccgcggacgcgtgggcggacgcgtgggcggtggtggacatccgttagatggaaaaatgggcggcggaggtggcggtcccaacggtaataaaggaggtggcggagtccagatgaacggaggtcccaacggtgggaaaaagggtggtggtggaggcggcggcggaggaggaggacccatgagtggaggcctcccgccaggtttccggccaatgggaggcggtggtggtggagggggaggacctcagagcatgagtatgccaatgggcggtgcaatgggtggtccaatgggaagtctaccacaaatggggtggtggtcccggtcccatgagtaataatatgcaggcgggttcaaggattacccccaatgggtccaggaggtggtggtggcggtggcccatccgcag

SEQ ID NO: 127854 - DNA, 858 bp, Arabidopsis thaliana
tatacgactcattatgggaaagccggtacgcctgcaggtaccggtccggaattcccgggtcgacccacgcgtccgcttcaatcgtcaatcgttgaatccgattcgatttgcctctcttccggcgtagcttcgacggtggcaatggcggctccgggatcggttcagaaaggagatgaagagtggcgtgcgattctttcacctgaacagtttcggattcttcgtcaaaagggcactgaatatccaggaacaggggaatatgtcaacttcgacaaggaaggagtttacggttgtgtaggatgcaatgctcctctttataaatccaccacaaagttcaacgctggttgtggctggccagctttctttgaaggaatccccggtgccattacccgaacgacagacccagatgggagaagaatagagatcaactgtgcaacatgtggtggacatcttggtcatgttttcaaaggagaaggtttcgctactccaaccgatgaacgccattgcgtgaacagcgtttcgcttaagttcacacccgcagcgtcttccttgtaaatcttggccgaacaagattatttgttctttctctggattttttcactcaagtgagtgggagaaaaacagaacaagaatcttgtatgagtgtgtgtgtctatactgtgtactgtattttttctttcatgactatttaaattcatcacctcgagcattttgacaacaactgtagtctgtagtatgtatgatttgtaccttgaataaaacacactcttgtcttgtaaaaaaaaaaaaaaagggcggccgctctagaggatccaagcttacgtacgcgtgcatgcggcgtcatagctcaactatagtgtc

SEQ ID NO: 127855 - DNA, 731 bp, Arabidopsis thaliana
acttaagctgaacctccaccgcggtggcggccgctctagaactagtggatcccccgggctgctttaattcgcggccgccaaaattgtagccaatcttccgtccgtcttggctccgccgttcggtttccgttaatattttacaaaatcatttcattttcttttttaacttccaaaaaatcgaattttgttgaatcttctaagctcaagctaataccgatttcgaaatggaggaaggtcgtgacgacgagtattgtagtttttctaattccggcgatcgcgacggtggattgagcggttgttttttcttggatcatgttggccaagttttgctttctcgaaatcatgatggtttgtcctggaaatgtttggattcttcagattgtgagggaacaacttgtttgggaattataatttgcgagaattccgaaactgagatcaaattctctgatatttatgctgtggagtttgttagctatggcttggtgcatagtccaaagttaggacttagacatgccaaagaatgtttccgggaacgcttgttaaatactcaagagatgtatcggttcactgtccacggatttcaaagttcaccaaaagagccttgtctttggaaccttgctgcattcacttttggacatatggatttgcagacgtgcccaaagttggatggatcaattggaattacttctttgatccaggaggtagaaagaccaagaaatctttttgggttt

SEQ ID NO: 127856 - DNA, 505 bp, Arabidopsis thaliana
atacgactcatatagggaaagccggtacgcctgcaggtaccggtccggaattcccgggtcgacccacgcgtccgcggacgcgtgggcggacgcgtggggtcgtctaaggacaagaaactatcgaagccaacaagtggtcgtactggtggtatccgtacactttccgatctgaaccgaagatcagaacctgattccgatagtgactccgatggacctcaagaatacttcaccggtggcgaaaaaagtggtatgcttgttcaagatcctacaaaagaaccaaaacacgatgatgttgatgagatatttaatcaagcaagacagctaggagctgtggaaggacctcttgagcatccttcgagttctagaagctttacaggaacaggaagattgctttctggagaaagtgtgccaacggctcttcaacagcctgagcctgtgattcacaatattattttctggtctaatggattcactgtagatgatggacctttgaggaagttggatg

SEQ ID NO: 127857 - DNA, 514 bp, Arabidopsis thaliana
  unsure (1)..(514): unsure at all n locations
nnnnnnnnnnnnnnnnnnnnnnnnnnnnnnnnnnnnnnnnnnnnnnnnnnnnnnnnnnnnnnnnnccacgcgtccgatctgagcactgtcaatgtcatcaccaccgaagtagagttgactccactcaacagaaactgaaactggaaagtttgagacttttaagatgtcagaaacagaatttaaagtgttgcttgagacattcacatttcctgctgattctgctcccttcaagagttgtcatgcctctaccatagttgaggttgttaaagatcatttcttggctgcgtatttcggaggcaccagggaaggagcacctgatgtcaaaatctggttgcagcatttcaaggatggtcaatgggattcaccggttattgttgatgaagagccaggagttccaatgtataaccctgtcttgttcaaacttccatctcatgagctcttattgttctacanaatcggccaggaggttcaaaaatggagtggttgcatgaaacgatcatatgataaaggtata

SEQ ID NO: 127858 - DNA, 463 bp, Arabidopsis thaliana
acggacgcgtgggccggttgttaccaccacacaacgccatggaagctgctcttgctgcatgcgctcttccatcgctccgaattctcaatacgaaacctcgtttcagatgttccttctccaatccaagcctacccatttctcctaattcccttatcacccgcaaatcaagtcgattcacaaccgcagtatcatcaccaccatcatcatcagccgctacgtcaacgaattctccaccggaacctgaagccctattcgaacccgggtcggataagttcgattggtacgctaattggtacccagtggatgccaatttgcgatcttgacaagaaggttcctcatgggaagaaagttatggggattgatttggttgtttggggggataggaacgagaagcaattggaagtgatggatgacacgtgtcctcatcggcttgctcctttggctgatggaaggattgatcaat

SEQ ID NO: 127859 - DNA, 432 bp, Arabidopsis thaliana
tcttggacgcgtccgcccacgcgtccgaagaaattgcaaaaagaagaagaagatatgagttctcgaattttatcctccgattcggacgacgttgatgaagaaaacccgaaaactcacgagaatggtccaattggaggaaagactcaaaatttagggcaaagcaagggaggtgatagtgataatgttgtaaagactaatacttgtttcgtgtgtgatgggaaagacaattgggttttggtatgttacggagaggaatgtactatagctattcatcagagttgtgcatctgatgaacctgatttcgatgaatttggaaatttctattgtccttattgttggtataagcgtgtagttgtcaagtgtttggagttagggaagaagcttatgctgactgacaagtctaggaagggatgtatagagagtttaggagga

SEQ ID NO: 127860 - DNA, 899 bp, Arabidopsis thaliana
aatcgactcctttagggaaagccggtacgcctgcaggtaccggtccggaattcccgggtcgacccacgcgtccgcttctcctatctctcattttcgtgggttttgtttttgttatcttcttcgttcaggatattattacatttgggactcaagaagaaatcgaatctatcgtgtgtgtagattgcttctctctatctcttctctcgctacacaacaatggctgcttacacgtgtacttcccgtccgccgatttctatccggtcagagatgagaatcgcttcctcgccgacgggttccttctctactcgacagatgttctctgtgttgccggaatcgagcggattgaggactcgcgtttctctatcttcactctcgaagaattctagggtttcccgattacgacgaggcgttatctgtgaagctcaggacactgctacaggaattccagtggtcaacgattcaacatgggactctctagttctcaaggctgatgagcctgtgtttgtcgacttttgggcaccatggtgtggacccctgcaaaattgattgatcccattgtcaacgaactcgcgcaaaagtacgccggccagttcaagttctacaaacttaacactgatgagtctcctgcaacccctggccagtatggtgttagaagcatcccaactatcatgatctttgtcaatggtgagaagaaggatacaatcatcggtgctgtctctaaagacactttagcaaccagcatcaacaaattcttgtaatgaactactagtcactgttctcttttctctgtatctctcgactctctaccttttacctatctactcatcactgttcatctagacttgtatgataatatgatgtctcaggttttcagaatttgaagtctacgaaaacatttt

SEQ ID NO: 127861 - DNA, 368 bp, Arabidopsis thaliana
gtcctctctccagtcactgtttccgaagccctaacgttttcaaggtcgccgattaaatcaccaaaggaggcgtttttatactattcccggctcaacacatggcggaggaagatgttatcgctatccccgtgcagccatctgaccacaagcgcaagcttgagaatctcgaatcggagatcctcgagcagcaacacgcctgctcgattgataatgacgtttctgtagatgatgacaaaaacgcatctgattattgtcagccgaagcgaccgaagcttgacgatgaagctgctgatggtttagggattgggggaacggtagaaaacagtggtgatgttgaattcatggaggagggaactgagaaacccatt

SEQ ID NO: 127862 - DNA, 487 bp, Arabidopsis thaliana
gggaaagctggtacgcctgcaggtaccggtccggaattcccgggtcgacccacgcgtccgagatcttttaaatcaacctgataaccgagtctgcgctgattgtggcgcttctgatcctaaatgggcatcagcaaatatcggagtattcatttgcttaaaatgttgcggtgtgcacaggagcctcggcactcatatttcaaaggttttgtctgtgacactagatgaatggtcagatgaggaagtcgattccatgattgaaattggaggaaatgcgtctgctaattcaatttatgaagcttttttacctgacacgtgctctaagcctggacctgatgttaatcatgaccaggcgtatgagattcattagggcagaatatgaactgcaagagtttctgaaaccaagcttgcggattacatccgggaaaggctcaacaaagagttcagcttttcttacatcaagtctttctagaaagatcatggatagttt

SEQ ID NO: 127863 - DNA, 519 bp, Arabidopsis thaliana
  unsure (1)..(519): unsure at all n locations
nnnnnnnnnnnnnnnnnnnnnnnnnnnnnnnnnnnnnnnnnnnnnnnnnnnnnnnnnnnnnnnnttttggttcgcttaaacggcgtgcttcgcgacgaaccgccacagataaggttcttctttttttttccaatatctctggattttttttcccctcgttgaagaaaatctagtggtgattaagccataggggaaacaaaacccagagagacgagtttgctagatttttttttttttttggaggctgcatgagtttggagaagaaggcgagtagtacaaattacaactccagaaaggagaagaggagaatcaatttatagaatggttgtttcaatggctttggtcagacattctccgtctttcgattttctgtttcattttccggtcgacagaagccgttttctatcgccggttgctttttctagcgttcgctatcatcgcttccattcttgtagatggttaagtctccgctcttcaccttcatgttctcgcaggttaaacagttttagttcgaggtgt

SEQ ID NO: 127864 - DNA, 710 bp, Arabidopsis thaliana
  unsure (1)..(710): unsure at all n locations
tgatttgccggcactatacgactcattatgggaaagctggtacgcctgcaggtaccggtccggaattcccgggtcgacccacgcgtccgcggacgcgtccgcccacgcgtccgtacaaaaacctgacaatcgaaacacagtttttctgataataatatagacatttaccattatgcccttctaactgaaaacggcaattacgttccttgttatttgttttcttccttctccttctgtttcttttttgtggctttaatttttttcatattaattcggaaagagaaagactcttcactcccataacagtcgccggtaacagaatcactccgatgatcgagactggtaaataccttctcggcgccgccggtgctagcggtttcggctctaaatccaccgccgaggaagttaccgagaactgcgaccttcgttccatcacagcggttatcaccggtgcgacgtcggggatcggagcggagacggcgagagttctggcgaaacgaggagcgaggttgatttttccggcgaggaatgtgaaagcagcggaggaagcaaaagagagaatcgtttctnagtttccggagacagagatcgtcgttatgaagcttgatcttagttctatcgnctccgtacgaaactttgtcgccgattttcgagtctctttgatcttccnctttaaccnttnttcataaacaaacgnaggcangttnnga

SEQ ID NO: 127865 - DNA, 717 bp, Arabidopsis thaliana
  unsure (1)..(717): unsure at all n locations
actcactttagggaaagcacgtacgcctgcaggtaccggtccggaatcccgggtcgcccacgcgttcggtgtggaacaagttccagaacctatggaaatcgatgtagatggaagatctatttctggaaaagaagatcttgaaagtatacgggaagatggagaacttccctctttggtcacggcggctgcttcgttaaccagttccaatcataccccatcgaaagtatctaatcaagcacggtcaaggcagttggccttgatgacaaagaatctagattctccgattagcatacgaaagtccccaagtttcaagatatacgaagatgatttggatcctgttctggacgatgatagtgaaatagatgagccaaaccggaagaactgaggcgcatgtggaagagtatgccctgagaaagctgataattcatgggtggattatggttcgagagagcttgcgctngtgttctccaggaaaacagatggccgaaagttgtagaagttagaagcaatgggacanattagcatggagtatgctcttcgacctcctttgtnttctctgtctctccacgcatcttcttcatcaggaaatgaaantgcgacaaatgaaagtgaccattacaatgaacttcgagcaatggaagcagaagtgaaccttcatatgttgaagaatatctctttagatcaagaagactatctnctatctcataaatcagatgc

SEQ ID NO: 127866 - DNA, 555 bp, Arabidopsis thaliana
  unsure (1)..(555): unsure at all n locations
nnnnnnnnnnnnnnnnnnnnnnnnnnnnnnnnnnnnnnnnnnnnnnnnnnnnnnnnnnnnnnnnnccacgcgtccgcgaagattgtttcttcttactccaatcctctttctcacttctcgcagttgggattttcttctggaaagaatcaagtcctgtaacttatatgcatctggctgatcaaataaagtaatggtggacgatacatcaccttttctggaggttttttgtgaagtttctggtaaagactaccgattcacaacagggacaaaggcggagtttgctgtctctgtgatcaacaggaaacttggttcgttgaaacctcgagtgatttacatcgaagcagcaaaggaaggtgaagagcctattagttttggtgataatgctagtcttctgaattatggacttggttggaagttgaagacagttgttgatgctgatctacctggaacggagaaaaacaatcgacaacagcggttttcttctgtattttcgacgggttttgcaaatgattcaacaccagacatcggagagcaaagtctgaaatacattgggag

SEQ ID NO: 127867 - DNA, 503 bp, Arabidopsis thaliana
  unsure (1)..(503): unsure at all n locations
nnnnnnnnnnnnnnnnnnnnnnnnnnnnnnnnnnnnnnnnnnnnnnnnnnnnnnnnnnnnnnnnnnnnnnnnnnnccacgcgtccgcgtttgtttcttcttcagccatatcggaaaaaacgatatccgacgagccattcggtgtttgttccgagaagctccgatcgatctgtgttagggtttttctttttccgccttatgaatctctctatcgcggtttcattagattcagtttaactcgagtgatgaaaccaatctccgtgctagagctctttgatcccgtggctggtaggatattacggcgtttgtagctctgtcgtcgtggatagagttagaacgacgaaatcagccttggtttcctaactgtatctgaatttttgcaacaatgtctgagctaaaagagcgcctgcttcctccaagacctgcttcagctatgaaccttagagatgcttctgccactccgccttctgcttctggaagaccaccccttcttgggagttgaag

SEQ ID NO: 127868 - DNA, 532 bp, Arabidopsis thaliana
  unsure (1)..(532): unsure at all n locations
nnnnnnnnnnnnnnnnnnnnnnnnnnnnnnnnnnnnnnnnnnnnnnnnnnnnnnnnnnnnnnnnnnccacgcgtccgcttgttttacatttccttattaagaaatatctctagatgtgttttctttaaacagaaactctctttcccttcaagtcaaaatcatgtacatcaaagataaatcttagaagcttgtttcaatggaattccatgtcagacttatgaatattccacttgaagttcaatttttgttgttgtttttcaaagtgtctagattctcaacactatgactcatcttcttacttttaagatttaacctctgttttatgatctccttgtagcactatcaaagtttctaaagaagttttggtttcttgttttttaaggatcatctgaagcttaaggagaaagtttctcgttgttgcttgatatattaatcttttggggtatttaaaagatgggacatttctcatcgatgttcaatggattagcttgatcattttctataaagaaagtgaagaacaacaatggaaact

SEQ ID NO: 127869 - DNA, 490 bp, Arabidopsis thaliana
  unsure (1)..(490): unsure at all n locations
cnnnnnnnnnnnnnnnnnnnnnnnnnnnnnnnnnnnnnnnnnnnnnnnnnnnnnnnnnnnnnnnnnnnnnnnccacgcgtgcgtgtttctctcgtcgctccattagctacttctccggtggatactttagccagcttttctcgagcgtttatccttacgtgccatttcaaaggatcatctgaagcttaaggagaaagtttctcgttgttgcttgatatatgaatcttgtggggtattgagaagatgggacatttctcatcgatgttcaatggattagctcgatcattttctattaagagagtgaagaacaacaaatggaaactgcgacgcaacacgaagctggctgatgagaatgggcaagcgagggctaataaaatcagaaattgatttctggaaatccctctgggttatgttaaagggacaagggatctaataattttagccctctctttttctccaaaccgcggcgaaaaaagggcgttaatcagga

SEQ ID NO: 127870 - DNA, 546 bp, Arabidopsis thaliana
  unsure (1)..(546): unsure at all n locations
tagctttgattccggtcgcgcctgcacgcccggtgtatcgccgnnnnnnnnnnnnnnnnnnnnnnnnnnnnnnnnnnnnnnnnnnnnnnnnnnnnnnnnnnnnnnnnnnnnccaggggtccgcggacgcgtgggcggacgcgtgggatgggagtgtcctcaatgtgatttctataattacgggaggaatgtagcttgcttaagatgtgactgcaagcgacccagggactcttcactcaattcagccaactctgattattcaagtgaccctgagcttgagagaagactggtcgaaaacgaaaagaaagcacagaggtggcttagtaaagtagcacagggtggctctgatgcgaacagtgttgatacagatgaagatttcccagagattatgcctttgaggaaaggagtgaatagatatgttgctagcacgaggaagccacctcttgagagaaggttggcttatactgagaacagagttgctacagatggtaactcgccaaggggccagtgattttgctttgggaagataaacgaatggggagcttga

SEQ ID NO: 127871 - DNA, 501 bp, Arabidopsis thaliana
  unsure (1)..(501): unsure at all n locations
nnnnnnnnnnnnnnnnnnnnnnnnnnnnnnnnnnnnnnnnnnnnnnnnnnnnnnnnnnnnnnnnnccacgcgtgcgcccacgcgtccgcccacgcgtccgcccacgcgtccgcccacgcgtccggtcaccgtctctgagtaacaatggtctttcctccgtcgtcacgcctcccaaaactctccgtggtctcaataagcctaagtgtattcaatgcggcaatgtagctcgctccaggtgcccttttcaatcttgtaagggttgttgttcaagagcagagaatccctgcccgattcacgttcttaaagtagcttcaacgtctggtgagaagacgcaggcgccaagtactccatcttcagagcagaaagcaaccgagggcactcccgggagtaccactagagtttcgtcaatcccggcaactttctagcaactttgtcaggttaataaccgtgagtggcttcttcccggcagagaaaacctttgacgataaaggatgctccagc

SEQ ID NO: 127872 - DNA, 409 bp, Arabidopsis thaliana
ggtgtatataattgttcatttccttgaaaacggttacagaattagggttttgtttcttctctctcgccgattgatcttgaaatgtcttccccaattataattagggcaccgaagaagcaaccgccggagccgccatgtctgatttcgttactccccgaagaaatcgtcgtcgatatcgtagcccgtgtccctagatgctattaccctactctctcccaagtttcaaggcgtttccgatcactcgtcgcttctccggagatttacaagagacgatccttcttcgggatgcacagaaacaatgtctctacatcgcaatctccaaagatcaaacctctgatatccattggtttactctgtgccggaaacctaacggacaacaattctccggcaccaccgcctctgatcatcg

SEQ ID NO: 127873 - DNA, 586 bp, Arabidopsis thaliana
  unsure (1)..(586): unsure at all n locations
aacagagattcactttgcgaaaaagtcgcacgcacacatataaaagacaggactagaggaacagaggaagaagaagagtcactgtgatcaccaccaccgtacgatcaaattcaaactatgtcaacggctctgattaactctattacctacttcctctccgaacatccatacatcgtcggattccgttggagtaacagccaatcatggggctccacgtggtctttcctcttcacatcaatctccctctatatcgccgtctcatcctccctccacatcctcctctccgccgtacgccgaagtaaccgttccgttcctttaggtcacatccccgaaatccacagccttctcatgtcgatcctctccgncaccattttcgccggaatcctcctctccgctgccgcagagatccgtgacanacggtggttatggcggcggagaaaaccggcaattcttttcaaatgggttctttgtttcccttttcgggactcgtcctctggtggggtttcttttggtaaancgggttttacctcanggggttttttccaaatttccgnangtttttggccgntttagnagccggggntgc

SEQ ID NO: 127874 - DNA, 513 bp, Arabidopsis thaliana
  unsure (1)..(513): unsure at all n locations
tcctcaagcacaaggcttttactatagaggttatgaaaaccccacaggcgaatgggacgagtattcctcgtatgtcaatgttgaaggattggacatcacatctcctgttggcttcaatgagaatgcttctntggtctaccaaacgggatatggatacaaccctcaaatgccatatggggcatattcccctgcagcaagtcccttgccttctgagggacagttgtattctccacaacagtttccgttttcaggggcatcaccgtattaccagcaggtagttcctccttagcatgcaatatattaccttctccaactcagcccgagctcaccagccttgtcggtgttgaccaacaaggtgataacatcggacccacgccattcctaccatcctcatcccattgggccgttttatgggaaccagccaaaccttggttttcctgaatggcagcatcgttttgacggggggaatttggtcggattggtccaggcctttaattttacaaggattttttt

SEQ ID NO: 127875 - DNA, 595 bp, Arabidopsis thaliana
  unsure (1)..(595): unsure at all n locations
ccggcannnnnnnnnnnnnnnnnnnnnnnnnnnnnnnnnnnnnnnnnnnnnnnnnnnnnnnnnnnnnnnnnnnccacgcgtccgcccacgcgtccgaccagttcgtcacaagcttcgagcccagctcggaaaacaaaattggaacttgctgcataaagtttagtttttttattgaatttggaaggatgattgggaatccagtaattcaagttccatcatcactaatgccatcatcctccatgattgcttgtcctcgagtttcacccaatggggttccttatcttccaccaaaacctagaactaggcatttagtggtcagagctgcatccaattccgatgctgctcatggtcaaccatcgtctgatggggggaagaatcctctcaccgttgttttggatgtgcccaggaatatatggagacagactttaaaacctttgagtgattttgggtttggtaagagaagtatttgggaaggtgggtgtttggtttngttaattgnctctggngctacccnttcttgncntaggttgggtttggttncgnggtttnaaatnnggccggngtttgggaaancaaacctnttttnngctngcaa

SEQ ID NO: 127876 - DNA, 905 bp, Arabidopsis thaliana
  unsure (1)..(905): unsure at all n locations
agggaaagctcgtacgcctgcaggtaccggtccggaattcccgggtcgacccacngtcgtccggagagcactggaaatagtcgtgtatctagcagttgaaaaaccgagcttagctgcgatcattcgtgatagatgccaatgatgtgtttcacacgaagggctccactaaacacggttcaggatcacaatgcaactagtggagagcttgaagatcacatcatagacaagttttttgaccaagacattagtgctacggtcatacttcaaagcggtgttcatagtatgcctcagaaaggagggccatcgtctttgatacagcgatggagaacaggtggatcttgcgattgtggaggttgggacatgggctgtaatctcagaattcttacaaatcagcacaacctctcctacaagaagtcggcaacatcaaactcaccaccctcttcaacagattcgaactcttctttctgggagaacaagcggaggagcatccgttcttgagctttaaaccgatcaaagaagggatatattcagttgcatataattcatccctttcacatctacaagcgttctttatatgcatggcacttgcagagagtaggaaaatgtcagagaacatccttgagcagaaaagctcttgtgatgatcataaagttaggggaaaaaccgtgttactcccggaccaagattcataccctaatggaacaccgtcgggtatcaaccgcgggtctcgcctgttgggcgggtctgaagtttgtattttacttcaaaccccaaattttacttgcaggatgtgatcatttattagtgtaagcctaagataaaaaaaaaaaaaaagggcggccgnnnnnnnnnnnnnnnnnnnnnnnnnnnnnnnnnnnnnnnnnnnnnnnnnnnnnnnnnnnnnn

SEQ ID NO: 127877 - DNA, 843 bp, Arabidopsis thaliana
  unsure (1)..(843): unsure at all n locations
atcgactcacttagggaaagctcgtacgcctgcaggtaccggtccggaattcccgggtcgacccactgcgtccgcccacgcagtccgaaaaaacaaaggaaatcgccatggaagacgttaaccagttgttcgatgctgctttcgagttcgcacactactcccggcgctcaaaacgaaacttccgttaaggaattcctcgatcgcttccctcttcctgttatcttcaatgctttgcaaaccgatccggatataccaggatttgaaaacacgttggtgacttgcttggagaggttgtttaagactaagtatggcgcttcacttattcctcagtatatgcctgttctgcaagttggtctcaaggcagattctgcagttgtgaaatctctggcttgcaaaactgttctgtgtctcttggaggattgcgatacaaacgacgtttcttctgttcagctagttgttaacaatggcatataccctcttctacttgactatatcattaacagcgatgatgaagttgcaaatgctgcaagtgagacaattaagagcctagctcgctttccagatgcaatgtccagtaatttcccttctgaaccaacgatcctacacatcttcgtaaccttgctgcaaggtgttcatcactggcacgagtccgggttttggcgtnatagtgaagctnttctcatntctcgacttgtagcttcagaagatagatatcggggcttctgattactggaggcgaaatgagggacaaagacctctgtgatctaatgtctggactctcttgagtaaggaagggacacagtcaaggtcggcacaacatactattagctgtgtgtctatata

SEQ ID NO: 127878 - DNA, 502 bp, Arabidopsis thaliana
atacgactcatatagggaaagctggtacgcctgcaggtaccggtccggaattcccgggtcgacccacgcgtccggcgaaacaagtgaagagaattgagatcaatgatcaacacagtcaaagagctgtcactactgcactatggtgcaacttcctcgtgttttcactcaagtttggggtttggtggacaagttctagccatgtcataatggctgaagtagttcactccgtagctgattttgctaaccaggcacttcttgcttatgggctcagtagctcaaggcgtgccccagatgctcttcatccctatggctactcaaaagagagatttgtatggtctttgatatctgctgttggcatcttttgccttgggtctggtgctaccatagttaatggagtacagaacttgtggacttcttcgccacctccgaatatggaattagctgctgtgggtaatgggtggttcttttctaattgaaggcccttccttactcgttgcaattc

SEQ ID NO: 127879 - DNA, 507 bp, Arabidopsis thaliana
  unsure (1)..(507): unsure at all n locations
nnnnnnnnnnnnnnnnnnnnnnnnnnnnnnnnnnnnnnnnnnnnnnnnnnnnnnnnnnnnnnnnnccacgcgtccgatttatgataaagattacatttttaggctaaaggaagtttcttttttcatgaatgtctgaatgagaagttttttttataatgaaaatctcagtttagggtttaggggaaggaaaaaaaggtctttgagaatcggttttactagattgaagacgagagttttgaatgattggtgaatttgttgatcatcaatggagaagaagagatcaccaagaagtagtaagagtcctggacctgcaattttccctaaaagccctcttgtctacgagagttataagtctggttgtggttggaaattgataaagttcttcgattccggtcatgtcaaatctggtaataagagacttgggtcacagaagacgaaattccgcagagattctgcctggaattgtttatactaaaagtcagcttgatttgcttaagaggcttcatg

SEQ ID NO: 127880 - DNA, 503 bp, Arabidopsis thaliana
atacgactcatatagggaaagctggtacgcctgcaggtaccggtccggaattcccgggtcgacccaggcgtccggactttttggggtttttagactttgcttgtctagttttgtcttgtgtgtggtgatgtcttatagtaattcaaacccggaaaattattcagctgcaacgagctcgccggagcttaaactatatcaagcatttatcttttctgttccaatttgtttcacatttattattctcttcttgttttacttgatctacctccgtcgtagtagctctgatttgtcttctcttggaatgcgaactactttcatccccgggaactctctctccacgattgaattaggattgagcaaagagctgagagagatgcttcccattgctgtctttaaagagagcttcaccgtaatggattcacaatgttcagggtgccttggggactatcaaccaaatgacaagctttgacagatcccggtatgtaaacacacttttcacatgg

SEQ ID NO: 127881 - DNA, 477 bp, Arabidopsis thaliana
gcttcacctgaaacctctcctctgccacatctctctttctctctcacacatacattatttcaattattgttttttttataactccaatcttgaatcttgacgatctctggtttcttcattcaaagggggagactttttggggtttttagactttgcttgtctagttttgtcttgtgtgtggtgatgtcttatagtaattcaaacccggaaaattattcagctgcaacgagctcgccggagcttaaactttatcaagcatttatcttttctgttccaatttgtttcacatttattattctcttcttgttttacttgatctacctccgtcgtagtagctctgatttggcttctcttggaatgcgaactactttcatccccgggaactctctctccacgattgaattaggattgagcaaagagctgagagagatgcttcccattgttgtctttaaagagagcttcaccataatggattca

SEQ ID NO: 127882 - DNA, 915 bp, Arabidopsis thaliana
  unsure (1)..(915): unsure at all n locations
gactcatatagggaaagctggtacgcctgcaggtaccggtccggaattcccgggtcgacccacgcgtccgctctgttgaaattaggattctattcgggcgaagaggatatggagttctcgagcttttcaagtgggactgcaagtgctgttaagacttggcaagcatcgcttggggtccgtgaggatggggtaatgacagcagagcttcttcagaggttgttcatggatgaagacgtagagacagataaggatgaagcaagtacaatgaagaaagaggaagctggtaatggggcgggatttacttcagtgacacaggtccctgagaagaagcaatcaatcgtgaaagatcaaagtgacagagaagttgacgttactcaaaatcgggtttttcttcttggagaaaacagatgggaagatccctccaggctcattggcaggaacaaaccggtagacagaagtgaatcaaccaaccccaaaacgaggtgcatcacttgtcgaggggagggtcgattgatgtgcctagagtgcgatggaaccggtgagccaaacattgagccgcagttcatggagtgggttggtgaagatacgaagtgtccgtactgtgaaggtcttggctatacagtttgcgatgtctgcgacggcaaaaaaaacttataataatgattcatatttaatttaatgaaaaaacaaattagtttgttttccaaatcgcataatatggttgtttaagagagatatatatataaatttagtgaacaagtacgtagttagtttgtttttcaaatcacacgaatggaaatcgtctttgttggataaaaaaaaaaaaaaaaaaaaaaaaaacnaagcnnnnnnnnnnnnnnnnnnnnnnnnnnnnnnnnnnnnnnnnnnnnnnnnnnnnnnnnnnnnnnnnncgcc

SEQ ID NO: 127883 - DNA, 524 bp, Arabidopsis thaliana
  unsure (1)..(524): unsure at all n locations
agatcttgccnnnnnnnnnnnnnnnnnnnnnnnnnnnnnnnnnnnnnnnnnnnnnnnnnnnnnnnnnnnnnnnnnnnnnnnccacgcgtccggcactgtcactaggtggcttgttctccgatacaagccagatgctagattttacaactatcagatggctgcagagaaaatcacgctcaaaagctaaacccagttctacctcaagtttcacaccttgtgaacatcttgaagtaaaagcagatggaaaattaagggataatttggattctcagaccggaaaaaaggaagaaaagatcatccagtactcgagaaagaaaaagttgaatccaaagccttcagcagaacaagttcaggagctagctaccctagctaaatcaaaagattttgataagacatgtaaaaattttagcagtaggtcacatctggatagtgcaattcgttctgagatgaacagtgagattggagactctggaagggtcattggggtatcattttgcataaatccttgtagctcatctttcact

SEQ ID NO: 127884 - DNA, 517 bp, Arabidopsis thaliana
actatacgactcatttagggaaagccggtacgcctgcaggtaccggtccggaattcccgggtcgacccacgcgtccgcccacgcgtccgatttaggaaacgagagaaatgagtttcttcgctgttgcttgctccgcgccaagatcttctatgcttctcaccggcttgaattcgagcttctctgatatgcatcgcagcccactatttgttttcccggtgactatatcatcccggagcgtgaaacgcttcgccgctgtttcgtctgattccgtactagaccctgaatccaaaaatcaaactcggtcccgtcgcaaaaataaggaagcagttacgccaattgctgaaaccgagaacaatgaaaagtttccgacaaaggtcccgcgtaaatcgaaccgtgggcggcggagtgaagcagacgctgtggaagattacgtgagaagctccctcgagcgtactttctccaccataaaggagcagaatccggaggtttttgagaacaaggagaaggcgaatttcat

SEQ ID NO: 127885 - DNA, 447 bp, Arabidopsis thaliana
ctctggtttgaattggtttggctctctgctcgaacgattctctctgataacccgattgtcaactccacagcccacagacagagacagagttcgttgccttgcctccgtgttgttttgttcataccgcgtgaaaagctttcatcatcaattcatcatcataaagaggtgtcgtgtgagcacacgcaatctcccaatctctcttctctctctctctctccaatctccatatctttgtcctctataatccggagaagtagctctaccatcgaaatctcccaacttgcttccttgaagctttttgctttttgttttcgtctttgcgcgtgtcccattctcttctccaaagttccctataatagtgaaagctcatcaagttatttagctctcagtttctgaaagatggaggtcaagttatggaatgataagcgtgagagagatatgtatgag

SEQ ID NO: 127886 - DNA, 898 bp, Arabidopsis thaliana
  unsure (1)..(898): unsure at all n locations
atacgactcctatagggaaagctggtacgcctgcaggtaccggtccggaattcccgggtcgacccacgcgtccggagctcgttgcacactgtggtggctggaggagctccgttgagtagagaggtgacggagaagttcgttgagaattatcccaaggttaagatcctacaagggtatggtttgactgagtcaacggctatagctgcttctatgtttaataaagaggagactaagaggtatggagcttctggcttactggctccgaatgtggaaggtaagattgtggatccggatacgggtcgggttttgggtgtgaatcaaacgggtgagctgtggattcgaagtcctactgtgatgaaaggttatttcaagaataaagaagctactgcttctaccattgattcagaaggatggttgaaaactggagatttgtgttactttgacggtgatgggtttgtctttgttgttgatagattaaaggagctcatcanatgcaatgggtatcaggttgctccagctgaactagaggcattgttgcttgctcatccagagattgctgatgcagcagtaatacccatccctgacatgaaagctgggcaatatccaatggcatatatcgtaagaaaagttggaagtaacttatccgagagcganatcatgggatttgtcgcaaaacaggtatcaccgtacatgaagattcgcaaagtcacatttttggcttcaatccccaaaatcctttcggcagattttaaaagagaacttacaagctacaacttcaaactctacaggagctctgcacatcctatctcgactcacaaaagattttgtgttaaaaggctctcacacataactgtaaaaactgagactgagcttgtctgatctggctggttgaccaaga

SEQ ID NO: 127887 - DNA, 788 bp, Arabidopsis thaliana
  unsure (1)..(788): unsure at all n locations
atacgactcaccttagggagagcacgtacgcctgcaggtaccggtccggaattcccgggtcgacccacgcgtccggtgacgggaagagtgacgaccaaggtagacattttcagccttggggtcatacttatggagctaatcactggtcgtaaagccctagacgagacgcaacccgaagacagcgtccatctagtcacatggttccgtcgggtagcagcctgcaaagacgaaaatgccttcaaaaacgcaatagacccaaacatcagcctcgacgacgataccgtagccagtattgaaaaagtctgggagcttgctggtcattgctgtgcccgtgagccttaccaaagacctgacatggctcacatcgttaacgtcctttcttcactcaccgtccaatggaaaccaactgagaccgaccctgatgacgtctatgggatagactacgatatgccgcttccgcaggtgcttaagaaatggcaagctctcgagggacttagccagaccgcggatgactcgggatcttcgtcttcggcttatggaagcaaagacaatacgcagacaagtattccaactcgcccatctggatttgctgactcgttcacttctgtggatggacgttgaaaaaatcaagattgcgtaaaacgttntagtagaagaagaagatgaagcattgggtgataaatctctctctcgctctccctttnttttgcttttctctgaagcatatttacttatgactnncgttttatctactgggcagctttggntagnggatttatctatctact

SEQ ID NO: 127888 - DNA, 668 bp, Arabidopsis thaliana
  unsure (1)..(668): unsure at all n locations
gggaaagcacgtcngcctgcaggtaccggtccggaatcccgggtcgcccacgcgtncgggcggcaccggatttcacacgctctctgccgtcggattattcaacggagagaagcacaagcacccccttggagtaaccctacccccggcacgccgattctccgcttctgtcaccgtttttagctcgaggcttgtggactacgagcagccattcgttaagagcttctggaactacctcgaggcggctaaggatttcatcagaccggaagacaacggcccatctcgctggttctctcccctcgaaagaagcaaggatccatgtgacggtgccccgctccttctcttcctacctggtatcgacggaaatgggactcgggctaataaggcagcaccagaaacttggacagatgtttgatatctggtgcttgacatacagcgagaatcgctctttttcacagatctagtcgccatgggtgaaacaactgtcaaatatgaaaatcaacgatcacctgggaaacccatatantcttgttggagaatctctcggcgcctgcattgcactcgctgttgcagcctgtaaccctgatattgatcttgtcttgattctttctaacncaagctacatcatttgggcattccttcgctgcaacattcttgctcccctgggtaaa

SEQ ID NO: 127889 - DNA, 275 bp, Arabidopsis thaliana
  unsure (1)..(275): unsure at all n locations
agccgattaaattttagaggagnactttgagtaattttcttctatgccattctctagagaaggtgggtgtgtctacggggtgtgccaaaggaggactaatgattccaaatcataagtctgctaattcttataacctctcccttgagttgtctcttgttgactctgtttgggattgtaatgttcggaccatgaggtattcctatatacctgagtgggtgtagtctttgaaatcctcttagacaacgagtttagtgcattttactttagttggaatc

SEQ ID NO: 127890 - DNA, 503 bp, Arabidopsis thaliana
  unsure (1)..(503): unsure at all n locations
tcgactcatttagggaaagctcgtacgcctgcaggtaccggtccggaattcccgggtcgacccacgcgtccgcagaaactttccttgattcgcaagcttttcttccttttatattcttcattttgatgcgaatatagagagagtccataaaagaaacagtaatggacgaatatattgatttccgaccattgaagtacacagagcacaagacttcaatgactaaatacaccaaaaagtcatcggaaaaactttccggtggtaagtcattgaaaaaggttagtatttgttatactgatcctgacgcaacagattcatcaagtgacgaagacgaagaagatttcttgtttcctcgccggagagtcaaaagattcgttaacgagatcactgttgagcctagctgtaacaacgtcgtcaccggagtttcgatgaaagatagaaagagactctcttcttgctccgatgaaactcaatctncggcgtcgagtcgtcaacgtcctaataac

SEQ ID NO: 127891 - DNA, 507 bp, Arabidopsis thaliana
tatacgactcatttagggaaagccggtacgcctgcaggtaccggtccggaattcccgggtcgacccacgcgtccgcggacgcgtgggattttttcgaaagaaattgatgagaagaatgattccaacatcgttttcaagtaagtttcaaggagtactaagtatgaatgcgttgagatgttatgtatcagagtttatctcaaccttcttcttcgtcctcgcagccgttggttctgtcatgtcttcaaggaaattgatggctggtgatgtgtctggtccgtttggtgttttaataccggcgattgctaatgcgttggcgttatcatcgtcagtttacatctcttggaacgtctctggtggtcatgtgaatccagcggttacgtttgcgatggctgttgctggtcggattagcgttccaaccgctatgttttattggacttctcagatgattgcctctgttatggcttgccttgttcttagagtaaccgttatggaacagcacgtaccgat

SEQ ID NO: 127892 - DNA, 558 bp, Arabidopsis thaliana
atcgactcacttagggaaagctggtacgcctgcaggtaccggtccggaattcccgggtcgacccacgcgtccgcccacgcgtccgcccacgcgtccgcccacgcgtccgcccacgcgtccgcccacgcgtccgcccacgcgtccgcagttctctgcacctttttctttcccctgttttttgatcctcaatcaccaaaccctagcttgttcttctgttgattatttcgaaaagggggtttgtttgttttctgggaatcagcaaaaatcacgaaatggttggtttaatatttcaatcgggataaaatcgatcgaaaatgagtcagccttctgtgattcttgctacggctagctatgatcacaccatccgattctgggaagccgaaactggtcgctgttaccgtaccattcagtatcctgattcgcatgtaaataggcttgagataaccccagataagcattatctagctgcagcttgcattcctcatattcgactctctgatgtcaattccaatagtcctcaacctgtgatgacttacgattcacacaccaacaatgtta

SEQ ID NO: 127893 - DNA, 610 bp, Arabidopsis thaliana
ctatagggaacgctggtacgcctgcaggtaccggtccggaattcccgggtcgacccacgcgtccgcccacgcgtccgctgtgtttgaagatgcaactcctgtgatgttaagagactttttctgggatgatgagtttagaccaacttgggatacaatgctttctaattccactactgttgaagagtgtcccagtactggaaccatgattgttagatggatacgcaagttcccgttcttctgcagtgatagagagtatgtaatcggtcgcaggatatggaattgtggaaactcttattactgtgttacaaagggagtatcggttccttctataccgcctaacaacaaacaaaaacgcgtggatttgttctactcaagctggtgcattcgaccagtggaatcaagaagagacgatggggtaacaagtgcctgcgaagtacttctattccaccacgaagacatgggaatacctagagaaatcgcaaagcttggagtgaaacgaggaatgtggggagcagtgaaaaaatggaacccggtttacgtgcttaccaaacgcatagactcttaagatggaggacccaagctttcttcggtctgttttcttggcttaaat

SEQ ID NO: 127894 - DNA, 689 bp, Arabidopsis thaliana
cgagcgccacgacgcacgcttgcagggatcagcaagaagtgagagtcagacttcttcttcatagaatcttgagacgaagaagacatgggaatacctagagagatcgcaaagcttggagtgaaacgaggaatgtggggagcagtgaagaagatggaacccggtttacgtgcttaccaaacgcatagactctcagatggaggaaccaagctttctcggtctgctttcatggctcaaatcaacaccaagatcacacaagaccatctcatctccctcagcaacggtgcatcgcctgtcactgaaactcccgttacattaaaccaaggaaaccgagctgcgaatctgaagaaactgttgattatcggtggagctgttgcggttgtctgcagtttaagcggaggtgcttttgttcctcctgcgtttcttttaggttttgggaaaaggtttgttaatggtggaagaaaacgtcagctcgaaggaacaacaagaagtgagagtcagactacttcttcatagaatcttgagaccaagaatatagatcaacatataaatttagattcgttttaagtagattaagaataatccattccaaaattagtttatagaattggaataagctgtatgattattaatctttatacaaaggaaggaacattttttttacaagtaatgaataaaatctctttatcatg

SEQ ID NO: 127895 - DNA, 680 bp, Arabidopsis thaliana
ggctttgcttgagagtataatattagggctaatcacaggatggttagcttttgttattgggttggttattggatgggcatggaaaccaagatgggtttcttcttctaataatcgacaagtcaaattacaatgttctgctccaagatcttttgatttgtctttaccatcttcttctcctagttctgttgttacttctcctttgaagggttttggatcagctccttgcttaaaggctcttgtttgtgatacatggactatggctttaagacaacagagacaaacagtttctcctgattcttcttcttcttcatatgattcttctgaacaacatttggatttggtttcaagagtgaagaaaacaaaggagagattgcctaatactgtaacagagttagatttgagacatcttgtgcaattggttgagaggaaagatggtggtcaagcttggattcagatgatggatcgttttactcctggtatgagataccaagcttggttgagagaacctaagaatggtcctactgagtatagaagtagaactgtgtttgaagatgcaactcctgtgatgttaagagactttctctgggatgatgagtttagaccaatttgtgatacaacgctttctaattccactactgttgaagagcgtcccactactggaaccatgattgttagatgga

SEQ ID NO: 127896 - DNA, 1204 bp, Arabidopsis thaliana
  unsure (1)..(1204): unsure at all n locations
aatacgactcactttagggaaagctcgtacgcctgcaggtaccggtccggaattcccgggtcgacccacgcgtccgcggacgcgtgggaaaagattgctgtatttctagattatgatggtactctttctccaatagttgatgatcctgatcgtgccatcatgtctgatgcaatgcgttctgcggttaaagatgtcgcgagttacttcccaaccgcaatatttagcggtagaagccgtgacaaggtttatcagttggtaggactaacagaactttattacgcgggtagtcatggaatggacataatgacttcttctgatggtccgaattgtttcaaatccactgaccaacagggtaaggaagtgaatctgtttcagcccgcgagagaattcataccggttatcgacgaggtttttagaacccttgttgagaaaatgaaagatatcaaaggtgcaaaagtagagaaccacaagttctgtgcatctgtacattaccgtaacgttgacgaaaaggattggcctattattgctcagcgtgttcatgaccacttgaaacaataccctcgtttgcgtctaactcatgggaggaagaggttcgtcctgtgatagactggaacaaaggaagagcggtcgagtttctattagaatctctcggattaagcaataaagacgatttgcttgctatctacattggtgatgacacaaccgatgaagatgcgttcaaggtactgagagatgggaaccgaggtttcggcatcctagtatcgtctataccgaaagaaagcaatgcgttttactcccttagagatccatccgaggtgaagaagtttttaaaaactttggttaaatgggcaaagttggagaagaaatctactggtttttgaataaaatagtggaattttatgattaaatgcttatttacccctttttttggttccttaatcttttttcatctctacccagttttagtcccagcttaatttatgattttccctttatctggtgggagttaagttattaaagttacatgtaaaaggaatgttaacgtattgcatagttttgccaaaaaactttttccttgggnnnnnnnnnnnnnnnnnnnnnnnnnnnnnnnnnnnnnnnnnnnnnnnnnnnnnnnnnnnnnnnnnnnnnnnnnnnnnnnnnnnnnnnnnnnnnnnnnnnnnnnnnnnnnnnnnnnnnnnnnnnn

SEQ ID NO: 127897 - DNA, 582 bp, Arabidopsis thaliana
atacgactcacttagggaaagctcgtacgcctgcaggtaccggtccggaattcccgggtcgacccacgcgtccgatctctccaatatcgccgattatatataaatgactcttcgattctgtttcttcttcgtcgtcatcgccggcttagggttttctctataagcaaatcttatcttctccttttcctccgttttttctggtcagcttttgcttttagattacccttgttgcctgcgatcgatctgaaaaaagaggaactttatcttgctgacggctgttataaaaagacgtggcatttcttctctgattgtgtttatttttatgacggagaagatgaacacacttgtaatctatcagactctaactgttactgttggtgttttctaatgctgtcggcaagacactatctttaggactgctagggagtttagaggttacacagttgactttctctatcaaggttataggttcagtattgttaatatatagaaatggaagccaagatcgtcaaggtgttggatagtagtaggtgtgaagatggattcggaaaaaagaggaagcgcgcagcaagctatgctgca

SEQ ID NO: 127898 - DNA, 501 bp, Arabidopsis thaliana
tatacgactcatatagggaaagacggtacgcctgcaggtaccggtccggaattcccggttcgacccacgcgtccgaaagttgagactttgttgttggaacatcatgatcctgcaaaggctcttttgaagtatatgtcagatactgatgttgagtgtttagtgattggctcttgctcttctaatttcctcacaaggaaaaaaggacaagaaatgccattatacggtgctaggagaagctccagagacatgtgagatatatgttgtttgtaaagatagaatcttaaccaaatcgacgaatcagtttaccgcagattcatcatctagtttccgtataccagaaggagctgaagcttatacagaatctttcagtcgcacacgctctgataagacagggttgtctgcttcatctataacatcttcaggcaggatgagaattggaaggcctggctctttaccgcatagtcatccgacctgtcgagtgtattctgatgcacagtcttc

SEQ ID NO: 127899 - DNA, 520 bp, Arabidopsis thaliana
atacgactcactttagggaaagctcgtacgcctgcaggtaccggtccggaattcccgggtcgacccacgcgtccgcccacgcgtccggtcatatcagttgatggaatgatttggacaggaagttcaaatggtatacttatgcgatgggacggaaatggtaattgcttgcaagagttcgcatacgagtcctctggtattctctgcatgttcactttttgttctcgactgtgggttggttattccaacggcactgttcaagtatgggaccttgagggaaagctgcttggtggattggtagctcatagtggacctgtaataaaaatggctatcggggctggttatttatttacccttgcaaatcatggaggtattcgtggatggaatgttacttctcctgggccccttgacaatgtactgcggggccgagttggctgggaaagaatttttatattcaaggatagagaatctgaaaatattagctggtacgtggaatgttggagaggggagagcatcacccgac

SEQ ID NO: 127900 - DNA, 849 bp, Arabidopsis thaliana
  unsure (1)..(849): unsure at all n locations
atacgactcactttagggaaagctacgtacgcctgcaggtaccggtccggaattcccgggtcgacccacgcgtccgggtggttcttagtccgattctcgtaccggcggtaatcacatcgagtttcttggcaacggggttcctagcttctggtagcctcggagcattggggatcgccctcctcatatggctctacaagaaagaagagtattccagagctactttgcatgcacgaggaggtaggcctgatgggcctaacaagctggcagaaagtggcaagcaatcaggaggagataatccgttgaaggaagaccagccgccagaaagagatatgctgcccgagaaaagacaagccctccaaggaagacaatctgctgaaaggagattaagccggtcgaggaggataaattggccggctggaggaagaaaacccgccacaaaaagataaacccggcggatggacacaaaccggcacataaggataaacccggcggagggagataaaccggggggagagagacaacccgccacaaaagatataccggcggaaggagataagcatgtggaagagatatgcctttaggagagagtgaccatttgtcatccctgagaaccaagggtattgggggggagcanaacccaattgccccaagtgtgcgggccaggtctggactaaaagggccaccatnttcatcgccatgatggtatgctacaaagcacgactttttttaaggataccaaaagcccccgttaggagctttgatataaattttaattcgtgaccaaataccaaaccatttatattgaccttggactgggtggttttttnnnnnnnnnnnnnnnnnnnnnnn

SEQ ID NO: 127901 - DNA, 537 bp, Arabidopsis thaliana
aatacgactcactttagggaaagctcggtacgcctgcaggtaccggtccggaattcccgggtcgacccacgcgtccgttcttcttctacatctcttcccatctgtctctcatagatccatccatggcttccttcgtggaatctggttggcagtaccttgtgacacattttagcgactttcaactggcatgtattgggagttttctcctccatgaaagcgtgtttttcttatctggactccctttcatttttcttgaaaggcaaggctttctcagcaagtacaaaattcaggtttattctcttcttattatttatcttttacaagtgtcttctatgtatgcaatcatagctttgtgtgatggtttgaatatgatagtctagaggttgatccccaagaattcagtctcacgtgaaaagtgttttcttatgacaggctgatgtccatttcagcgattactaataattgtgaatatgacccttttctatgcttctcttaccctttatgggcaacacatacttttcttttgtccctatgcag

SEQ ID NO: 127902 - DNA, 536 bp, Arabidopsis thaliana
  unsure (1)..(536): unsure at all n locations
atacgactcatatagggaaagctggtacgcctgcaggtaccggtccggaattcccgggtcgacccacgcgtccctttttgttttgcattttctcttcgacgcttgataagcatttcgtttccaaaaaaaaaaaaaaatggtttctgtctccgaacttgttctctacgtacatgagaatgtctacgaaacatgcattggagtcaacatcgctaacaatgatcaagtatttgagtatgctcaaactgcatttgtcgaaaacggtgacaacgatgatgacgttatctatgattacgctccacaagcatgaatgaattttatctctattaggctaaagcgtagtgaaccaaccatgattttgtacttcgtatattaattatttaacggccctagggcttcctttatgttttgtctacttaacactttcactataaatcgtcgagccatttattctctcaaaaaaaaaaaaaaagggcggccgttctagaggatccaggctnnnnnnnnnnnnnnnnnnnnnnnnnnnnnnnnnnnnnngt

SEQ ID NO: 127903 - DNA, 690 bp, Arabidopsis thaliana
  unsure (1)..(690): unsure at all n locations
nnnnnnnnnnnnnnnnnnnnnnnnnnnnnnnnnnnnnnnnnnnnnnnnnnnnnncggaattcccccacgcgtccggggagattcgttctcgtactgtggattgttgttgttgggattatctgggaagagaaaaagaaaatggggaagcagccggtgaaattgaaggcggtggtttacgcactttctccgtttcagcagaagatcatgaccggtctctggaaggatctgccggagaagatccaccacaaggtctctgagaattggatcagcgccactcttctcgttacccctgtcgttggaacctactggtatgctcagtatttcaaggaacaggagaagcttgagcacagattctgaagcatgaagtcactccttttctacaagaacctgacagtttgaagtaatttcttttgtttcaagcctataaatttcacaaaaactcttgtgggaatcttctgagtcagtttttctgaaactcttttgctaaataaatgtttgggtttcatgacaatgactcttgttgttcatcttttcttgatatatggtatgaaaattggattgaaaaaaaaaaaaaaaaaaaaaaaaaaaaaaaaaaaaaaaaaaaaaaaaaaaaaaaaaaaaaaaagggggcggccgttctagaggatccaagcttacgtacgcgtgcatgcgacgtcatagcttttttat

SEQ ID NO: 127904 - DNA, 730 bp, Arabidopsis thaliana
  unsure (1)..(730): unsure at all n locations
nnnnnnnnnnnnnnnnnnnnnnnnnnnnnnnnnnnnnnnnnnnnnnnnnnnnnnnnnnnnnnnnnccacgcgtccgggagatatatctctgcttccgacttctgaaaagattagcagcaaggagccagcttttcctacaagtctatgagatattgtctccctttattcaggcctcgatcagtgaacactatggaggaagcttgagtataccatgaaaggtcttcactgaggttggactgaagtctggctggatgctataaaagaatgtatacttgcaggacaatgtggattctgaagggcatcatggtgaacgcacacggacaatacacgaagcagcttaagcaaaccaaactcgggaagatttttgggcaatagaaggctagctgctgcaaatccgcgtgtgaaatggagtctcgaaagcacttattgttgcatttgcacaatgagatatggaagtgattcaaatctcaaagtgcagagccattaggagccactgcttttctctgttcatagaaatgtaactgagcttgatgatcatttcttcccatgacacgagctaatatatcacctagttccttgttcatgaattgtctttattttgaaaaacgataatttattctctggatgaatgaacaattgtagaaggataaaaaaaaaaaaaaaaagggcggccgctctagaggatccaagcttacgtacgcgtgcatgcgacgtcaagactcttctatag

SEQ ID NO: 127905 - DNA, 597 bp, Arabidopsis thaliana
  unsure (1)..(597): unsure at all n locations
cannnnnnnnnnnnnnnnnnnnnnnnnnnnnnnnnnnnnnnnnnnnnnnnnnnnnnnnnnnnnnnnnnnccacgcgtccgttgcttctcctctcgagtttgggattcgagtttaaggaattagggtttctaatctctctctctttctctcgagatttttcttcacttagttcttgattctgattaaaagttgatcttatagttccggtaacttcgttttctgggtttaattttcgattcaatcttcatctccttgatccacagccatgactgagtattgggtaagtcaagggaacaaatggtgtgaattctgtaagatatggatacagaacaatccaacaagtattagaaaccatgaccttggtaagcgtcaccgagaatgtgttgataagaagctcactgatatgcgtgagaggagtgcagccaaagacaaagagctcaagaaaaacgaaaaactgcttcaacagatcgaagctaaagcaactcgtagctatcagaaagatattgcaactgctcagcaagtagctaaagcaaacggtgcaccanaggatggtacatccgngantcatcacgaaagagcgaaacggttgcttctttt

SEQ ID NO: 127906 - DNA, 517 bp, Arabidopsis thaliana
  unsure (1)..(517): unsure at all n locations
ccgnnnnnnnnnnnnnnnnnnnnnnnnnnnnnnnnnnnnnnnnnnnnnnnnnnnnnnnnnnnnnnnnnnnnnnnccacgcgtccgccacactgttctaaagcctctggttttagggtttaagccgacggaggagacggaaaaatcgccatctctggagtccaggttagaattgattcctcaaatttcaattcttcgcattacatgacccaataattccgtctacatcttcgatgatccgtggaagaaccgcgaaagtaattcccagaaatgtcatttttacgcttagtaggagttccatttctgagtctccattgatttctccgagtcgaataaaccctaaattagccggtagtttctcgttcaacatccgattattgagctatttcactgttagaaatggcttttgtcccgattgttctgtaccgagagaccctaattttgttggattgactacacaatgtcggagtattgtcaggaggttttgtagtgaaaagattggaagtagtgaatctagtg

SEQ ID NO: 127907 - DNA, 429 bp, Arabidopsis thaliana
gttcgattctcgacggagaatactcgacggagaaaatccagatcgggaatcaacttagagaagaagaaaattaaaaaagagaacttctaaagatgaatttggggttcttagttggagttttcggcgttcttattctttctcatgccgcttattcaacaatccaatatagaggattgttgaagattatggaggaagagttttctcgaccaccgattaatgttattctggagttgatcattggactagctctgtgtatgtgggttgctttgactttccctggtaaatttctctcgatccatccggattctgatgaaaacagggcggtgtttttaccacataattcggatttcatgatattcaatcaccgtggcagactgttctcaccgcagatcgacatgaagttttgaatttttatcacactgcttagtc

SEQ ID NO: 127908 - DNA, 483 bp, Arabidopsis thaliana
ccagttcttcaacttcagctcaagaggtttgaatacgattttatgagggacacaatggtgaagattaatgatcggtatgagtttcctctccaactggatctcgacagagaagatggaagatatttatcccctgatgcagacaagagtgtccgcaatctctacaccctccacagtgtcttggttcacagtggaggagtgcatggagggcattattatgcttttattaggccaacactttcagatcagtggtataaatttgccgatgaacgggtcacgaaagaagatgtcaaaagagcactggaagagcaatatggtggtgaagaagagttaccgcagaataatcctggtttcaataatccacctttcaaattcacaaaatactcgaatgcatacatgcttgtttatattcgggaaagtgacaaggataagataatctgcaacgttgatgagaaagacattgcggaacatttgcgggtgaggctg

SEQ ID NO: 127909 - DNA, 525 bp, Arabidopsis thaliana
  unsure (1)..(525): unsure at all n locations
nnnnnnnnnnnnnnnnnnnnnnnnnnnnnnnnnnnnnnnnnnnnnnnnnnnnnnnnnnnnnnnnnnnnnnnnnnnnnnnnnnnccacgcgtccgcccacgcgtccgctcgaaacttacaatagaatgattagagtcttgtgtgaatcaggttcaacgagttcatcatactccattgttgcagagatggagaggaaatggataaagccaacagctgctagctttggtttaatgattgatggtttttacaaggaggagaagtttgatgaagtgaggaaagtgatgagaatgatggatgaatttggtgttcatgttggtgtagccacatacaacattatgattcaatgtttgtgtaaaaggaagaaatctgcagaagcaaaggcgttgattgatggggttatgtcttgtaggatgagaccaaactctgtgacgtattcgcttttgattcatgggttttgcagtgaggagaatttggatgaagctatgaatttgtttgaggttatggtgtgtaatggatacaagcctga

SEQ ID NO: 127910 - DNA, 710 bp, Arabidopsis thaliana
  unsure (1)..(710): unsure at all n locations
nnnnnnnnnnnnnnnnnnnnnnnnnnnnnnnnnnnnnnnnnnnnnnnnnnnnnnnnnnnnnnnnnnnnnnnnnnnnnnnnnnnccacgcgtccgcggacgcgtgggcgcttctccgcttccttcataaatatctcactcatcgtctctagattgttctttcacacgcaattttcatttctctcttaaccgtaaacgaatctctcttctcaaagttttattttctctctgcgatggctcaagaagatgttactgctgttgctactaacggtgctggtccggtggagacgcatcttgtcttcactgagttcaagcagatgttgctcgttgaagctcaaaaggtcggtgacgctgttactttctacaaatctgcttttggtgcgatcgagtctggtcattctctttaccctaagcgtaagcttgaccaagagcttcctcatgttctctcttctgagcttaatctcgctggctcttccttcgttgtttgcgacgtttcctctctccctggtttttctactgcgaaatcggaaggttcgggagtaacttttcttctcggaactaagggatgcttgaagcccgccgttgcgaaaactgttttaacgccggagcttttgaaagtgggaggttaccggagccaagaagttcaacctggggttcaaaggaaaaagttacgggtcccttttggggccaacttggttctccgggaaaaana

SEQ ID NO: 127911 - DNA, 535 bp, Arabidopsis thaliana
tatcgactcatatagggaaagccggtacgcctgcaggtaccggtccggaattcccgggtcgacccacgcgtccgcggacgcgtgggcaaataaaaaagaaaaaacaaagagaaatattttttcaatgacaagaaagaaagtgaaacttgcttacatttccaacgattcttcaagaaaagcgactttcaaaaaaagaaagaagggtttgatgaagaaggtacacgaactctcgactctttgtggcatcactgcatgtgcgatcatctacagcccgtatgataccaaccctgaagtgtggccatcaaattccggtgtgcaaagggtggtttcagaatttaggacactcccagagatggatcaacacaaaaagatggtagatcaagagggttttctcaaacaaagaatcgcgaaagcgacagaaactttgaggagacaaagaaaggatagtagggagctagagatgactgaagtcatgttccaatgtttgattggaaacatggagatgtttcattcgaatattgtggatcttaatgat

SEQ ID NO: 127912 - DNA, 541 bp, Arabidopsis thaliana
  unsure (1)..(541): unsure at all n locations
nnnnnnnnnnnnnnnnnnnnnnnnnnnnnnnnnnnnnnnnnnnnnnnnnnnnnnnnnnnnnnnnnnnnnnnnnnnccacgcgtccgcgaaatcgcctcctcttcttctcctcctcgacctggaaatcaatctttcgccgccgagttcttctctctgcggcggagaatcaattagcaatctccagaattaggtgagggaaaagaggatggctttgatcggaaaatccgagagattctctgctgattttgtgatgggtggtgctgcagccattgttgccaaatctgcagctgctccaatcgaaagggtgaagcttttactgcagaatcaaggggagatgataaagactggacatctcataagaccttacactggtttgggtaattgctttaccagaatctatagagaagaaggtgttttgtccttttggagaggaaaccaagccaatgtcatacgatatttcccttcacaggcctccaactttgcatttaaaggttacttcaagaaccttcttggatgttcgaaagagaaagatggttacttg

SEQ ID NO: 127913 - DNA, 516 bp, Arabidopsis thaliana
aatacgactcactttagggaaagctcgtacgcctgcaggtaccggtccggaattcccgggtcgacccacgcgtccgcccacgcgtccgtgaactttgcacttagctcccaaagtccaacacccgattaaaaactcccataaagagctaaacacgaaacctaatttctccctacacacatctcaaatctctccaattttgttcaaagctcgaattctgttcaaagctcggatttttaattgcttcaatgggtgagaaagattcagaaacagctccgatttgggggaaaactcgagagagagagaggagcaacaacaacaatatacagccaatggatttagagtcgtcctcttctgtatctgggcaacaacgatcgttgactcagagtcgaagttcttatgaagaacgaggtagaggagttaaagagtttcggagttggtttccttggctcattccttgtttcgttgatgctaacgttgccgtcttcgtgatcaccatgtatgtcaacaattgtccta

SEQ ID NO: 127914 - DNA, 518 bp, Arabidopsis thaliana
atacgactcactttagggaaagctcgtacgcctgcaggtaccggtccggaattcccgggtcgacccacgcgtccgcggacgcgtgggctgttatgcagttggctcagactacaatgcgtagtgagctcggtaaaattactcttgacaagacttttgaggaacgggacactctcaatgagaagattgtggaagccatcaatgttgctgcaaaagattggggtcttcagtgccttcgttatgagatcagggatatcatgcctcctaatggagtgagagttgctatggaaatgcaagctgaagctgaacgtaaaaagagagcccagattcttgagtctgaaggagaacgtcaagcccatatcaatagagctgatggtaagaaaagttctgtaatcttggaatcagaagctgccatgatggaccaagtcaatcgtgcacaagggtgaggctgaagcattattagctagagcacaggcaacaggccaagggactggccatggtatctcaatccctcaaggaag

SEQ ID NO: 127915 - DNA, 876 bp, Arabidopsis thaliana
  unsure (1)..(876): unsure at all n locations
atacgactcctttagggaaagccggtacgcctgcaggtaccggtccggaattcccgggtcgacccacgcgtccgtttcgtttgaaacttgttatagatctgtgcgttttcgaatgtttttgttttacgagataaaggctccatttttatcgagtcaacagcaggcgccacttttaatggtgacctgactgccgcttggagcctagatcaaatgccatatgaagacccatgaaacttatttctctatagtttcatgattcaatactcttggcgacataatattatttggattctttggttttgattggtttttcttgtggtgataaggatgcgataatgatggttctagagtagatgttgggttcttgagatggcattaagtcagacacgggtgcttgttgggttattaagaacagcagagcaaccttttgcatggtgcctacattgattattagcttcttatcacgataggaggcagtcttgatctgatgtcttctcatgtcttcctctaattaaaagcagctacagttttgtcttttaaacatacacatgtttatntgaacttgagtttgaatgacacttctttagccatggatgattttagtccctgaaaaaggcggcttcttgtcttgttatgcctggaatatgggaaacattgactactcatttgtacatctgaacaaactgtacaatgagcttatacatattagattcttggggctgatctttgtttggtcgttgtctggaggaaagtgcaaaagaggggtcaggttcgcaatttcaggtttcgaaccaagaccccttttgcggacaaatatcccgggtaaaaaggttgtcacgagtgaaaaaagttgggggtaaaacaacgggggttgtt

SEQ ID NO: 127916 - DNA, 609 bp, Arabidopsis thaliana
caatttgaaaaaccaagtccaacaatggcggtctctccgcatatttcgcctactctttcccgctacaaattcttctctacttccgttgttgaaaaccccacgcgcccgccgtatcgtatctatagtcggcggagagttaccaaatcacatctccaggcgcacaacagtaccactagctatggccggacggaactctcctcctcgaagaagctatggattaggcaacgaagcttcagcgaaatggaggttgagcaagcacaattagaagatgatgaagaacaagtggagatcgatatcgtcgacgaagccagtcttctctccctgagcatgaaaccggacagaaacatggcgttgctcgacgattatgagatggaggagcttggacacacgcctaatactcatcatcggagcggatatgtggcggtggtggggatgcccaacgtcgggaaaagcacgctttcgaatcaaatgattggtcagaaaatatcgattgttacagataaacctcaaacgacgaggcatcggattcttggtatttgatctagccctgaatatcagatgatactttatgatacgcctggtgtaattgagaagaagatgcacaggtta

SEQ ID NO: 127917 - DNA, 519 bp, Arabidopsis thaliana
  unsure (1)..(519): unsure at all n locations
nnnnnnnnnnnnnnnnnnnnnnnnnnnnnnnnnnnnnnnnnnnnnnnnnnnnnnnnnnnnnnnnccacgcgtccggtaagagacagagctcaagcaacagtctcactcgagataaaataaagtcgtgattttgattggacccatgattctcattcgtataaattatcatctttcggcttaatcggaaaatggacgttctcgccttatcctcttccgcttccgccgccgcaccctccgcttctctcgccggaaaattcctgtcgtttccttctagggttagagtgagaagaaaccgagagaatttgttagctaaacagaagaagtttttagtttctgcttcgaaaagagaagagcctaagctcaacgaatgggatcaaatggagctcaactttggccgtttactcggcgaagacccgaaattgactttggctaagatagtagctagaaaagtggatccagaagcttcttttattgacattgagaaatctttctacaagaacaaaggtaaaattcctgaag

SEQ ID NO: 127918 - DNA, 556 bp, Arabidopsis thaliana
tcgactcactataggggaagctggtacgcctgcagtaccgggccgggattcccgggtcgacccacgcgtgcggcacgagtctcgttcagctggtgactccatcatcgaagttgaggaggtgtcaaagaactctaggacagagctgaaatccatagcagattgcatgatcgctgcgggttgtgcgaaagagtgtgcgactacttataaatccattcgaaaatcgatagttgatgaatcgatttaccgtctcggagtagagaatataagctcatccaaggcgaaaaagatgccatgtgaggttgttgagttgaagatgaataggtggatagaggcggttaaggtctcgatgaagactctcttcaatggcgaaaagactctatgcgatgaaatcttcgaatcctctgtttctcttagagagttttgtttccgagacatctccaagggaggagctcttctttctgtttggattcccggaaactatcaccttaagagacaagaaaaatccacatccggagaagattttcccgttgctagatatgtattgcacgatcacaga

SEQ ID NO: 127919 - DNA, 429 bp, Arabidopsis thaliana
cggatgtgcaattggaataggtggcccccttccattaatttgtcttctattctttcccgctacaactcattccccatcagcagttctatatgttggtgtagtggattcaaatatagtactcgtaaaccagggtctaactttgtcagtcaaaatttggttgacaactcaactacattctggcggaaattttacattttctagcgctcaggatccattctttggagttggttcggatgttctttctccccgtaacattggaagtcccctagcagacaacgttgaacttggatcacagtgctttgctgcaatgcaaatgccactggaaaactttctggtttcatgtgggaactgggagaacagttttcatgtcatatccttgactgatggtcgggtagtccaaagcatccgacatcataaagatgttgtaag

SEQ ID NO: 127920 - DNA, 746 bp, Arabidopsis thaliana
atacgactcacttagggaaagctcgtacgcctgcaggtaccggtccggaattcccgggtcgacccacgcgtccgggggcaggtccttctggtgaaggaggagaagaagacgacgggtttagagaccttgtgaggcatactatgtttgaaaagggacagagcaagcgtatttggggggaactttacaaagtcatagactcctctgatgtaattgtccaggttattgatgctagggatccacaaggtactaggtgtcatcatttagagaaaactttgaaagagcatcacaagcataaacacatgattctattattgaacaagtgtgatctggttccggcttgggccactaaaggatggttgagagtattatcaaaggaatatccaactctagcattccatgcaagtgttaacaagtctttcggaaaggggtcacttctctcagttttgaggcagtttgctcgtctaaagagtgacaagcaagccatatctgtgggatttgttgggtatccgaatggtgggaaatcatcagttatcaacacgctgcgtactaaaaatgtttgcaaggctgctccaattccaggagagactaaggtctggcaatacatcacactcactaagaggattttcttgattgattgtcctggagttggttaccagagccgtgataccgagacagatattgtcctcaagggagtggtaagaggtacaaacctggaagatgcatctgagcacattggtgaagtactg

SEQ ID NO: 127921 - DNA, 505 bp, Arabidopsis thaliana
tatacgactcatatagggaaagctggtacgcctgcaggtaccggtccggaattcccgggtcgacccacgcgtccgggtctcttggattctgaatttgggatcttggggtttcgggttttgaaccatctctttagactttagttacacttttttcattcttttttaagacaaaagagatacgatgaagtctggtctcatcataaccattgctctgttactatacacaagcagctttgttcttgtttctgtagcgaaagagtgtaccaacactcctacgcagctctcatcccatactttccgcagcgagcttctgcaatcaaagaacgaaactttgaagacagagttgttctctcattaccatttaactccagctgatgactctgcttggtctagtttattgccaaggaagatgttgaaagaagaggcagatgaatttgcttggactatgttgtataggaagttcaaggactctaattcctctgggaacttttttaaagatgtctct

SEQ ID NO: 127922 - DNA, 681 bp, Arabidopsis thaliana
atacgactcatatagggaaagctggtacgcctgcaggtaccggtccggaattcccgggtcgacccacgcgtccggttcaatgcagaggaaaaacagaagagcatagacatagagactatatgtcaactcctagagatcgtcatgggatctacatttcgagcccaagttgactactttgttgagtatttaaagatccaaaacgactacaaagtgataaacatggaccaatggatgggactttaccggttctgtaacgagataagtttcccggacatgggggactataatccagagcttgcatggccattgattcttgacaattttgttgagtggattcaagaaaaacaagcctgaaatcatttctgagtcccctcaagtcgaagcttcaaatctctgcaggatgatcagtgggctctctcatcaaacagattcagcacatttttacttcagttttcatctttcaaacattaaaaaaagacacattttatgattcttgttacatgtgattaacttcaatagagggaacacataatgtttgatttattacatcaagttctgttagtagtaaccaatgatttcgaattagcttgtaaacacgttgttaccaaatttataaaaaaaaaaaaaaaagggcggccgctctagaggatccaagcttacgtacgcgtgcatgctacgtca

SEQ ID NO: 127923 - DNA, 605 bp, Arabidopsis thaliana
  unsure (1)..(605): unsure at all n locations
agcttatctggaaagagagtcatgaatctgagtgtgaaccgatgcatcaccggtggtttcgtcggtggattctctagctgcagactcaatcatgagaaaacgtgggttcgtgctggcaagcactgctgagcttgagagggagagaagtttagtgtctgatgctgtttctttagagaggttagagagcagaagcattaaacttgcgatgcttgctagtggtttaggagtggcgaacttggtaactcttagctcagcaaaagccgcagacttgaagatgattgtnttggatcaagccacttccatttacatcttggctgaaggaagccttggagattcggtcgggaacttcttgtattcagctaaccaacaggctaacgaagctgttcaagatcaactatcagcactcagtgtaacaagtttggcagtaatatttggggcaggcctgtgacaagcctgcctccatgtcactnagtgntttcccgtgncctttggtaaattnggcattgggctggaaaacagnggcaggttttgggntcagtcntccnctggttgacncctnccncttggnnannctttccgaaccttgcattggaggtnccannntc

SEQ ID NO: 127924 - DNA, 509 bp, Arabidopsis thaliana
  unsure (1)..(509): unsure at all n locations
nnnnnnnnnnnnnnnnnnnnnnnnnnnnnnnnnnnnnnnnnnnnnnnnnnnnnnnnnnnnnnnnnnccacgcgtccggtactttgaaatgtcaagaatgtagaagagcgtttcaagctgtgacgataccaaaacctccggtggataagaaagacgacgaagacgtttacttttgctcatgggctttgtttccattggggttttccggtgaatttcaagctccaagttggtcacctatttcacctctctttgcctgtcctctgcaaaagttggatggtgaaccaaagaagagaaaggaaccgggtcctcctaggatttactatgacgatgatgacatttatgttgcgatttcggatggagatgacgctggtgatgatggtgattggcaagatgtggtacaagtgaataagaagacgaatgttgggaaagggaaagaaacatatgtgagaagtaacaggaaacatggagttgaagaagtccaaaatgtagaaagtatcagtagggctagca

SEQ ID NO: 127925 - DNA, 1593 bp, Arabidopsis thaliana
  unsure (1)..(1593): unsure at all n locations
ctcatcttcagtgtttactttttctctttctcttttttttttctctttattatttcgctttaatgagttttatctgatagaatctgctccacccaaaaacagcataagaagaaattcattgtcagagaaaagtgcaaaaaaaaaaaacgatcttcttcatcattctactaaatgggttcttgtctcagttctcgtgtccttaataagagcagtagtggtctcgatgatcttcatctctcgagctgtaaatcttcatcatcagctacagctcataagacagaaggagaaatccttagctcaacgaccgtcaaaagctttagctttaatgaacttaaactcgctactagaaacttcagatcggactctgttgttggagaaggtggctttggttgtgtctttagaggttggcttgatgagactactcttactcctaccaaatctagctctggtcttgttattgctgttaaacgacttaaccctgatggttttcaaggtcaccgagaatggctgacagagattaactatttggggcagttaagtcacccgaatttggncaaattgattggttattgcttggaagatgaacaacggcttcttgtgtatgagttcctcccctccggtagtcttgagaatcatctgtttgcaaatggaaataaggattttaagccgctatcttggattctacggattaaggttgcacttgatgcagctaaaggtcttgcatttcttcatagtgatcccgtcaaagtcatttacagagacatcaaggcgtcaaacatcttactggactcggacttcaacgcaaagctttcagactttggtttagcgagagacggtccaatgggagaacaaagttatgttagtacaagggtcatgggtacttttgggtacgcagctcctgagtatgtctcaacaggccacttaaatgctagaagcgacgtatacagtttcggggttgttctgctagaactactatgtggaaggcaagcactagaccataaccgcccggccaaggagcaaaaccttgtggattgggctcgaccatccctcacaagcaggcgaaaggttctactaattgtggaccctcggcttaactcccagtaccaacccgaaggagcagtgagactggcaagcattgctgtgcaatgcctatccattcgaaccccaatcccgtccggccatggacccagtggttcgagccttggtacagctgcaagacagcgtgggttaacccgccaattgttgacccgcttaaggttaaggataccaagaaacttgtgggattgaaaacagaagacaagtaccagagaaacggtttaaacaaaaaaaccgttggattgtagtaggtagagggaaatataaggttacttggttaggtactcttcatgtcttcttcttgtgtattgtaatattgtgcgaagtgattttgacattttgtaacactgcttatagttttgctcctgaaatattcgatttggagatacttgttttctctcaaaaaaaaaaaaaaaaaaaaaagnnnnnnnnnnnnnnnnnnnnnnnnnnnnnnnnnnnnnnnnnnnnnnnnnnnnnnnnnnnnnnnnnncgcctaat

SEQ ID NO: 127926 - DNA, 1028 bp, Arabidopsis thaliana
  unsure (1)..(1028): unsure at all n locations
nnnnnnnnnnnnnnnnnnnnnnnnnnnnnnnnnnnnnnnnnnnnnnnnnnnnnnnnnnnnnnnnnnnnnnnnnnnnnnnnngaaccacgccgtagatctatttccgcatctgcttaaacacctacatcgtcgtagatcgcaaaccatggccgtcgctgtagctaagcttctgatctccgccatggcggttttcatgcttgtttctgcttcgttcgcgacctcggaagtgccgttcatggtggttcacaagaaagccactctcaacaggctcaaatctggcgccgaacgcgtctccgtttcctacgacatctataaccaaggatcctcgtcggcgtatgatgtgactctgacagataatagctgggataaaaagacttttgaagttgttaatggaaacacttcaaaatcatgggaaagacttgatgcaggaggtattctgtctcattctatcgaattggaggccaaggttaaaggagtcttctacggtgctcctgctgtcgttactttccgcatccccactaagccagctcttcaggaagcatactcaactccactactacctctagatatcctcgcagacaaacctccaacgaaacctttggacgtggccaagaggttgctggcgaaatatggatcactcgtctccgtgatctccatggtggtttgtttcatatacttggtggcaacacctaagtccaacgtatcaaaggcaagcagcaagaagaagcgttaagttagtgaaatgaaaggtgagaaaggttggtacggtgctgttttctgtttaacagttaaacacagtttcaaaacttgtaagaattagagaacacactttaattttggtgttgcagaggacatacttcaagttcaaagagttattttggttttacttaatctctttgtgagagcatagtcatggagttctcttttaaaaagataaacaaaaaaaaaaaaaaaaaagnnnnnnnnnnnnnnnnnnnnnnnnnnnnnnnnnnnnnnnnnnnnnnnnnnnnnnnnnnnnnnnnnnnaac

SEQ ID NO: 127927 - DNA, 414 bp, Arabidopsis thaliana
ttttgcgtttctgcttttcattttctctcaagaagcgtaaatggcgaacaatggacctaactgggacggatgactcaaatggagcctctcacattccgatggagcttcctcttctagccgtataagtgaggaagatcgacaatggtttgtggaagctatgcaagcacatacaatcgattcaatctctcgtatgaaagtaatatctcaaatcatgaagatgcctgaacaagtcttggaggctcaaggagttacacctgatgatcttgaaggaatgttggctgagctgcaggaacacgtcgagtcgatagatttggccaatgatcttcaactccattggaggtttggttcctctccttagctatctcaagaactctaatgcgaaaattcgagcaaagtctgccgatgttttgacta

SEQ ID NO: 127928 - DNA, 1219 bp, Arabidopsis thaliana
  unsure (1)..(1219): unsure at all n locations
tacgactcctatagggaaagctggtacgcctgcaggtaccggtccggaattcccgggtcgacccacgcgtccgggatgacaatgattcacagggtagtagttcattgccttgttcacctactatccagggttctatagacgatgcccatggtcgtgcttttgaccgtcagctgtcaaaactgagttcctttaacttcagatcctgcaataacaataggagatcttcgcagatgtctgttccgccagaagaattgaggtgtccgatatctttgcagcttatgtatgaccctgtcattatcgcgtctgggcaaacatatgagagaatctgtattgagaaatggtttagtgatggacacaacacatgtcccaaaactcaccagcagctctctcatctttgcttgactcctaactactgtgtcaaggctctaatttctagctggtgtgaacagaacggcgttcaggtccctgatggaccccctgagtctctagaccttaactattggaggttggcgttgtctgtgtccgagtccaccgatacgagatcagcanaacgtgttggttcttgtaagttgaaggatgtgaaggtggctcctttggaagaaagtggaaccattaaagaggaagcctgtgaatcagaataccaggaagatcaagttactcttgtcgaaagatgtacggaattgttgaccactttaactgacgtggataccttaagaaagaaatgcagagttgttgagcagataagagtattgctaaaagatgatgaggaggccaggattctcatgggggaataatgggtgtgttgaagcgttgcttcagtttctgggatcagctctgaatgaaaataacgcttcagcccaaaaagttggagccatggctctctttaacttggctgtggacaacaacaggaacaaagagttgatgctagcatcaggaattattcctttgctggaggaaatgctctgtaatccacattcccatggttcagtgacggcaatttatctgaacctctcgtgtcttgaagaagcaaagcccgtaataggttcgagtctggcagttcctttcatggtaaatcttctttggaccgagactgaagtccagtgcaaagtcgatgcccttcactccctttttcacctgtccacctaccctcccaatatccnctgccttttatctgctgaccttgtcaacgcccttcaatcactcactatcagtgatgagc

SEQ ID NO: 127929 - DNA, 556 bp, Arabidopsis thaliana
  unsure (1)..(556): unsure at all n locations
acaagactctcagtgtcgctgtcatcgcttgttttctgggatcgtttgtnatactacttactgctgcaattccgtcgttgcaccccgttgcttgcggaaacaaaatctcgtgcgaaccgcccggccggggacagatactgtttctgctcatgggtttaggctttcttgtggtaggcgctggtggtatcagaccgtgtaatttagcgtttggtgctgatcagttcaaccccaaatccgaatcaggaaagaaagggatcaacagtttcttcaactggtatttcttcactttcacgttcgcgcagatcatctcgctcacagcagttgtgtatatccagtcaaatgtgagttggacaatcggtttgatcattccggtggctcttatgttcttggcgtgtgtgattttctttgctggcgatagattgtatgtaaaagtgaaagcctcggggtagtccattggctcggtattcctcgtgttatagcagccgcgatcaagcaaaccggggtttgaagcccggttaagcaggccttgggtcaatctttacaaccataatcccgt

SEQ ID NO: 127930 - DNA, 760 bp, Arabidopsis thaliana
  unsure (1)..(760): unsure at all n locations
gcaaccggaccttcccggttctacccacccgtccggaacttaaagatattcgtctgattgttctctctcaaattggctcatcctctccattcaattcatcccaagtaccaaagcaagctacttcgatcttcctcttactactctcgtttctaattattgttgttatcttaaatgggttcatctgagaagagatcaaaggatatcatgagtgacataccaactttcagtgcagagaatttgcagaacaatttgaaagtcattcaaaacagccggacgtttctgtctatcatagctggtgtcttagcaggaataattggattcaatggcttgattggttttgtattttactttgtggtgatgttgatcacatctgttgggctcatggctaaggcaggattctcagctgacttgtactttgattcgtggaatcgggttctttttgacggttttcttggtggccttatgtcgtttgtgctgttctggacatttgcgtatgacttggtgcacatattctgagggaacttctgctccaaatgaggatggtgaaacggcacacaagattgagttcgggttttgcagcctcttcatctaaactgaattagattggcaatgtttctcttgttccctttttgaacaacagtttatgagttcgtattaccttttttttgttatttgagaccacatcaaactgtgaaaacattttagattgaaaagtttcaagctacattaaaaaaaaaacacatcngggggcggccggctt

SEQ ID NO: 127931 - DNA, 435 bp, Arabidopsis thaliana
ttgtcattctgttttactttcaatgaaaacttacttttggttatacttatgtatgattcatttattcatttaattcaaaaacgtcacaatcccttttttttattacacatgaaatgagctcaacgtacaaggacaaccatccgtaccaccaccaccctcaccatcaccatcaccatccaaagagagaacccaatgaaaacaactccggaatcttatacactccctcaccttcaccgtcaccgccaactttaaaagtcaacaaagactctcacgttattaaaaaaccaccgtctccgtcttctttctcctccgcggctaagcctcgtcacccggtgatcatttacacacacactccaagaatcatacacactaatcctaaagatttcatggctcttgttcaaaaactcaccggaatgacccactcccgacgaagat

SEQ ID NO: 127932 - DNA, 1140 bp, Arabidopsis thaliana
tatacgactcatatagggaaagccggtacgcctgcaggtaccggtccggaattcccgggtcgacccacgcgtccgcggacgcgtgggcggacgcgtggggccggatttttcaattttcaaattctcgattcgattgaagatggaaggaggtggaggaagtagcggcggaggagctggaggagtggttccggaatcagcgattgaagcggtgaatcatacacttgcgtacctcaaggaactgaagccacagcttgagcagatgctgactttagctgagccagaggttctcgctgcaatgcaaccattacagcgagctaagactatgcacttgctagctgaagccaccactactctttacgaactgaggttgagatgtactggtgttgatcctgatgatcatcgtgtaaaatctgaaattgagcggataaacgtgtacagagagaagtttcagaagtgtgttgatcaaagtaaaggacctttgcgcccgaccactgttttaaccgtccaggcagcaacccgtttcatcgaacattctctacctgatcttacatcgacccaaaagcaaagcattagagacctcagtaaaggagagaaatcgaggatcaggtattctgaaacatctgcgagaaagaggaaataccaatcaaatgagaaacagtctgttcagtcagctgcgaaggactttcttgaaaaggcagctcgtgagattatcggtcacaatgaaaatggtttgaagggccctttagtagcggcagctgatggttcagatgatgtcgaagttggtacagcctgatttattaccaatatatcatgctgctgctacattttctggaacgtagttgtggcattcgtcatcgtcgacattgcagagaagttggttttgtcaagttttaaaatttttggacctagttagtgttgtggtgtatgctgtttgtacattgcattgtgttagttactgttttcggaaagctcttgaagttggtgcattttgtattcggaaataacattaatatttaaaaggcaaaagaattccccaaaaaaaaaaaaaaaaaaaaaaaaaaaaagggcggccgctctagaggatccaagcttacgtacgcgtgcatgcggcgtcatagctctactatagttcagctcaat

SEQ ID NO: 127933 - DNA, 505 bp, Arabidopsis thaliana
aatccgactcatatagggaaagctggtacgcctgcaggtaccggtccggaattcccgggtcgacccacgcgtccgcttgaaaccacccaaggggaaaaggttagagctttgctgaatgaaaagactgcaacatcacagattcagaacctattaagtgaaaagacagaacttgcgacagagttggaaaactgtaagaaggaagaagagaaaatcaagaatagctatggagagtttaactttggatttgcaagaagtatctgttgaagcaaaggaagcaaaggagaagctcttaacatgtcaagcggagctcgaactttgtggagtccagattgaaagtttgaagttggctgagaaagatacaaatgaaaagcatgggaaaatgcttgaagatgcaagaaacgagattgatggcctgaaaagtagtttggaaaacactgagaatgagttttttaattctaagactgagtgggaacagcgagaacttcatttgatgctatgtgtgaag

SEQ ID NO: 127934 - DNA, 426 bp, Arabidopsis thaliana
accactttctttggacacggatggctcaagccttggctcaaccaccactggtggtcaccaccgtcgtcccagacccgccgccgccgccaccaccaccgcacccaaagccgtatgctctacgatacatggcggatcttcttggccggattggtataatggatacagacaaagatggtaacatcagcccacagagtccgaggagtcctaggagcccaagaaacaacattctcatggggaagtacgagcttgggaagcttctcggccacggaacctttgcacaggtttatttagctcaaaacatcaaatctggagataaagtcgccattaaagtcatcgacaaggagaagattatgaagagtggtttggttgctcacatcaaacgggaaatctctatcctccgccgtgtccgtcacccttacatcgttc

SEQ ID NO: 127935 - DNA, 791 bp, Arabidopsis thaliana
  unsure (1)..(791): unsure at all n locations
ggtcgacccacgcaaccgattcaaactggccggcacatgatttgcatcagggcattggaatggattgggattcgatcaacgatttgagggttgacatgggtagaatacagcaaaggatggataacctgcagaggatgctagaggcttgcatggaaatgcaactcgagttacaacggtccataagacaagaggtctctgctgcgatgcaccgctctactgaccaaccaggtccatccaaggacactgcgagttacgagtcaaaatgggaatatgtaaggaaagggatctgctgcgtatgctgcgagagcaatattgactctttattgtatagatgtggacatatgaacacctgcgagaagtgtgcaaagaagctagtggaagcgggaggaaaatgtcccatgtgtcaagcccctgtgattgaggtagttcgtgcttactctattctttgaaactcttgtgctctcctacggctccaagctctgcttatttgattctgggttttacagatatcaaatgtctttgattgtgatgtttttagcatagatatttactctgattcactcggctcttaattttatccgtggtgtaagaaagacaaacacacccttcttaactatttttatacacatgaaacatcaaaagattcaatagaaattggtggcagtgaaaaaaggaggnnnnnnnnnnnnnnnnnnnnnnnnnnnnnnnnnnnnnnnnnnnnnnnnnnnnnnnnnnnnnnnnnnnnnnnnnnnnnnnnnnnnnnnnnnnnnnnnnnnnnnnnnnnnnnnnnn

SEQ ID NO: 127936 - DNA, 424 bp, Arabidopsis thaliana
cccacgcgaccgctgggttttagcttagggaagcttctagatctctccgatgatcccttgtggacaactggatggatttatgttagggtgcagaaccaacttgcatttgtatataacggtcaggttgtcgttgacacttcattgtctctaaaaagtcgtgattatagtcacatcattagcgttaaaccgcttgctatagctgcaacggagaaggctcaatttacagttaaaggcatgaatctccgtcagcgtggcacaaggttactttgttctgttgaaggaaaatacttgattcaggaaacaacacacgattcgacgaccagggaggatgacgatttcaaggacaacagtgagattgttgagtgtgtaaacttctcttgtgatatgcctatattgagtggtcgatgattcatggagattgaag

SEQ ID NO: 127937 - DNA, 484 bp, Arabidopsis thaliana
agccgttcaagaagcgatgttcttggatctggtactggaacttatggacatggaagtataatgcgaggaggtggtatatctccggccaaacctaccaacaccggaggaggatccaactcgccggtaaatgtcggtagctctagtataagtagtagtactgttgctacgggagagactcctatatggaaaaaagcgattttaggttcggattcagaggaagtgaagagagtacggaatgaaatgtataggaaaggtttgtttaatgaggctttgaagttgtatgatagagcaatagctttatctccgactaacgctgcttaccggagtaatcgagctgccgcattgattggtttgtctcgaattggtgaagctgttaaggaatgtgaagatgctgttagatcggatcctaactatggaagagctcatcaccgtttggccttattgcttattagattaggtcaggttaatagtgcaaggaagcatc

SEQ ID NO: 127938 - DNA, 369 bp, Arabidopsis thaliana
aaccgagctaaccatggcatttctagtagagaaacaactcttcaaagccctcttctcattcttcttattagttttactcttctccgataccgtcttatctttccgaaaaacaatcgaccagaaaaaaccctgcaaacacttctcgttctatttccatgacatcctctacgatggcgacaatgtagcaaacgcaacctccgccgccatcgtgagccctccaggactaggaaacttcaagttcggtaagtttgtgatctttgatgggcccataacaatgggcaagaactatctctcaaaacccgtggctcgcgcacaaggcttctatttctatgacatgaagatggacttcaattcgtggttttcctacac

SEQ ID NO: 127939 - DNA, 420 bp, Arabidopsis thaliana
tctgactcctctgctgctgcttctcatcctggtttctctgagaaccatccagacgtacagaaccccaaacaaatagataaggatcatgttcttgagaaactgaaggatctcgtctttagtcatgatgagcatggagacaacagtctaactgaaactgttgaacaagccaacattcccacctgcaagaacttggaagacagagatacacttgaagaggaaacatgttcagaggggaaaatagatggcagttgtcttgtatcctctcctcttccacatacaataagccagttgatgcatgaggtgaaggaactcagggcatgcgggctggaaaattcaaccaagatatgttacttggaagagaagctggacaaagcacacaaggaaatttatcaattgacagagcgttgcaacatgctggag

SEQ ID NO: 127940 - DNA, 522 bp, Arabidopsis thaliana
  unsure (1)..(522): unsure at all n locations
nnnnnnnnnnnnnnnnnnnnnnnnnnnnnnnnnnnnnnnnnnnnnnnnnnnnnnnnnnnnnnnnnnnnnnnnnnnnnnnnnnnnccacgcgtccgatggaaccgccggccaccgcatctaatcgctcttccagacggctactctttgaccgccgttacggctgggtgtaaattctctatctttatcagttaaattcattttccaatttaatggagacaaaatgattctgtgttggcttaacagggtcgacgaatggaaggacccatcggaggaagctctcgccggcggcagaggaatgttttgtgtagttcccttgacgaaaactctgtttcagacagcttcacaatcaatgaactcagctgtcaaatttctggatatgaagtttcagaaattggcaaatcctatgcacaatccaagtggagatttagggtcaaaatcaaatgtgttggattaacaagtacatgtgtttagtgttggattatacgtctagatctcatctatgtactttgttcaaagtttttg

SEQ ID NO: 127941 - DNA, 420 bp, Arabidopsis thaliana
ctgtgtttcatttcaaatcatcatcaaaccggcaaagcgaagcaatatctccattcgtcaacactttatgcttacggtatccattagtacattttttcaaggtggacgtagaggagagcttggcattggcgaaagcagagagcatcaagaaaattccaacgtttaagatttataagaagggagagaaagtgaaggaaatggtatgtcctagtcatcagttactagaggactctgttacgcatttcctcttaaaacaaatctctcttctcattctttcaaatctttagtcttcacgaacgtaaattgattcaaagagccattttgttaattgaaattttcattcttttgttttgctttccgggattatcaaattgaaacccgctccgattgtattaatcccaggaaaatgcatgtttctcc

SEQ ID NO: 127942 - DNA, 472 bp, Arabidopsis thaliana
tcacgaaaatacatcccaattctaaaaaaattgttttttcaatttttctcctttgatttcttaaaagaagatccacaacaacaagaatgaatacattcaagatatcatatttcattatggtgctcataatggtcttagccattgctataacatttagcgagccgctaacggttgaagcaaaacatcaacacaaatatggttgggggatagccgcttctgcaaggaacaaaggtaggaaacatttaggtgcaacattgacatgtgacaaaagctccaaggtatgtcgtctcaaaggcagtccaggtcgtaattgttgtcgtaagaagtgtgtcgatttgaggaccaacaaattgaactgcggaagatgtggaaaaagctgccaatactcggagatttgacgcaccggatattgtgtaaacccgatgtaatgaaaggagacatatggaggttgccgaacgcgtggaaccccccg

SEQ ID NO: 127943 - DNA, 859 bp, Arabidopsis thaliana
  unsure (1)..(859): unsure at all n locations
cgccnnnnnnnnnnnnnnnnnnnnnnnnnnnnnnnnnnnnnnnnnnnnnnnnnnnnnnnnnnnnnnnnnnnnnnccacgcgtgcgcccacgcgtccgtacggctgggagaacagaacggggagagaaaaagagagatggctgaagcagcgagaagacaaggtggtgggagaccattaccgccacctccgagaggcgttaaccaacaacctcctcgccctaaacctgaacctgtcgatcgtgaaaagacatgtccccttcttcttcgtgttttcaccaagagtggtggtcatcatactagtgaagattatgctgtgagaggcaaagaaccaaaggatgaagttcaaatctacacttggaaagatgccagtcttcgcgagctaacagatttggttaaagaagtttctgtagcagctaggagaaggaatgctagattgtcttttgcgtttgtttatcctaacaataaaggtggctataatgtgagagaggttggggagacgatggcttatccaaaccgaaaacaaccagatgacagtaaaacgctttccgaacttccgtttgagattggagattatctggatgtggcaatttactaggaggtttctgtttcttgttaagtgggatttgggtgcgtgcccaatggaagaagtacacattcatatggttgtatcatcttaaacttcgtttagacatgtttgtattttttggatctagtctatgtactaatgtctaatggtttagcatgttatcctgctttttttgtttaacgtgttttcttttctaaagaaccaaaaaaaagatggaagaactcaagccattttatatacaaaaaggtataaatttagactatcaaaaaaaaaa

SEQ ID NO: 127944 - DNA, 709 bp, Arabidopsis thaliana
acggacgcgtgggcaactccaatgttacggcgagatggtctacagcttcgtcggtcaggatctgcttggggaatgcagccgccgtgatcttcccattgaacggctcaaatcagtggtgacgtggaacatctccacactccgtccggtggtctttggcatgtctccgtacaactccgttctcggcgagactcaccacgtatcgaacggtcacatcaacgtcatcgccgaacaagtagtgcatcatcctccggtttccgctctccacgcgtctcgcggacgcgtgggaaatatcgacgtgacatggtgtcaatatttcactcctaaatttcgtggtactcacgtggacgttgaggtaaagggtaaaagggtaatgaagcttctgaatcatatagagacttatgagatggaccaaccgagactaataatgagattcttaccggcgccgggagcttactgggccggaaaagtgaaaataaagtgtccggagactgatctcgaagctgagttacatttgatctccgattcattcattgaaagattcagaggcaacaacaacagatcaataaaaggaaagatctttgaatcttcctctggtaatcagctctacaacatttttggccattgggacagaacggtaatggcgaaaaatataaagactggtgagctcgaggtcatttacaatgccaaggagaatatcacaggactcaaa

SEQ ID NO: 127945 - DNA, 373 bp, Arabidopsis thaliana
caaatctctctctatttctatcgcttcttctcttctcaatctttcacttctaaacagggttatgttctttgtgggggattggaacctagcagcttcttcgtttgtgtccttggagttatttaatccatcatctgttgttttagcggtgattagcagggatatagagttcctgatttgagatctcgattagcagcagctcaagacatctccttagctcatgtttaaggatgatggcgctccaatttattgatcccctttgggtcgatctgagtttatctcacttgattcgggttcccagatctagcctcttaaggacagagatcggttttctctgttgttgatgttcgattcgtcctgcggagttgcaatctta

SEQ ID NO: 127946 - DNA, 508 bp, Arabidopsis thaliana
  unsure (1)..(508): unsure at all n locations
catggaagctcttattgcttccacttccttcttcgtccccatctccaactcttcctcctcacacattatcaataacagattcttcccttcattttattctcccaacttaaatttcgggacttttcggaaaacttccttgtcatcatcacacctcgtcttctcatcttctgcaatttccgcaccgccttcttctactgttcttactcgaaacagctattggatggtgttattggataaacctccgcattgggtttcttccaaatcagccatggtagattattaatgtttcgagattcttgcgaaagtactgggaaacggaaaagatgcgcaagtgagtatatatgatgcttcctttgatacccatttcggggtttgttgtcataatcgacggagatgcttcacggcagctcgctagtttacctggggagggtctattaggcngaccagggttcaggtcagagagnngattttgnattggngcaaaaggggtnatgttntctgggaggaa

SEQ ID NO: 127947 - DNA, 522 bp, Arabidopsis thaliana
  unsure (1)..(522): unsure at all n locations
nnnnnnnnnnnnnnnnnnnnnnnnnnnnnnnnnnnnnnnnnnnnnnnnnnnnnnnnnnnnnnnnnnnnnnnnnnnnnnnnnnnccacgcgtccggaagatttttcggtggttgtgttggcttctgatctaggaattgacgctagacccttcttgacgagaagcgatgacgttgatgaacaagaaaactggcatgattgtccccaatacttaggagatgaagatttctctgatctcgatcttctccagttctttactctccagggcttggataggtccggtaaccggattttccgcatcgtcggaaagtatttccctgctcgtgtagtgagtgcggagcggctgaagaagtatatatcccagaagataagcaaccaatgtcctgagggacctttgtgcttggtttacatgcatagcacagtccagaaggacgacaattcaccgggaattaccatcttacggtggatttacgaggaccttccttcagatatcaaagacaggcttcaacttgtttatttcatcca

SEQ ID NO: 127948 - DNA, 446 bp, Arabidopsis thaliana
gagaacgtcatcggagacttgagagcggcggcgagcttcaccggcgctggttaacggcggccctctcaatctccagtattctcggttcaataaaagcttcaaaaaaagaagaaaaaatcgaaaattcacgaaaatatatattaatttcaattttccatatttgaattcttccagatcttatggttccttgttcttcgttctcgtggcggtttttgaattgttgatgcgacgatctcatgcccgttctagggtgaagaatagtagtagtagtaaatccgatatggatccgattaagttccagatccgttctgggaaccgagcaccgtcttcttcatcgacctatacgctaacaaaaccgaattcgaaacacgcgaaatcgaatctcttgttaacaggtggttctatatctgtagtgctgggggttctctttctttgctattcaattt

SEQ ID NO: 127949 - DNA, 353 bp, Arabidopsis thaliana
aatggctggagtcacgcttctctctcttgtgcaacggtgcgcctgatttgttctcgagtgttgtctccttcacaggagcgaataatggcgattttgggctcaactctagtttaggcggtgcgttcttcgtctctagcttcgttgttgggacgatttgtgtgttgattggatctagagatgtcgctatcgacagaaatagctttatccgcgacgtggtttttcttcttgtcgctctttgctgtctcggtttgatcatcttcataggcaaagtaaccatttgggtcgctctctgttatctctccatttatctcctctatgtagggtttttatcggttttacatttctttgaccgt

SEQ ID NO: 127950 - DNA, 650 bp, Arabidopsis thaliana
atgatacgcgagacctatacgacttacttagggaaagctggtacgcctgcaggtaccggtccggaattctcgggtcgacccacgcgtccgcctcagtcaaattttattacaaagagggagaccagaatattcctccttttgtcttcaagattttaaagccatggccggtggagctcttaccgatgaaggaggcctaaagagagctcatctctatgaacatcggatcacttcttacttcatcttcgcttgcatcgtcggatccatgggaggctctcttttcggctatgatcttggagtctctggtggtgttacatcaatggacgatttcttgaaagagttcttcccagggatctacacaaaggaaaaaacagcaaatgcatctaaacgaaacagattactgcaaatacgacaatcaaatcctcacactcttcacttcttctctctacttcgccggtttaatctcaactttcggagcttcttacgtcaccagaatctaacggaggagaggaagcatcctcgttggctctgtcagcttcttcctcggaggagtgattaacgctgcagccaaaaacatcctcatgttaatccttgggtcgaatcttcctcggcataagcattggattcggaaaccaggcggttccgctatacct

SEQ ID NO: 127951 - DNA, 734 bp, Arabidopsis thaliana
  unsure (1)..(734): unsure at all n locations
cgggggggtccaacccttccgggttgccttccttaaccgtcatttatcggctaagctcttccatgacaagtggagtttgcttcctttgcggaagttccttcgncttcacagccaccagggcaagaacctgatgttgagcgagaagattcaaaacctcaacactctgcaacacactttgaggaaagcagaagagtatctagcagagcttaagcccgaaacactgtatgaagagtttgaggccaagtttgaggagattggtcttgagaggggatggggagacaatgcagagcgtgtccttgacatgatccgtcttcttttggaccttcttgaggcgcctgatccttgcactcttgagacttttcttggaagagtaccaatggtgttcaacgttgtgatcctctctccacatggttactttgctcaggacaatgttcttggttaccctgacactggtggacaggttgtttacattcttgatcaagttcgtgctctggagatagagatgcttcaacgtattaagcagcaaggactcaacattaaaccaaggattctcattctaactcgacttctacctgatgcggtaggaactacaatgcggtgaacgnctcgagagagtttatnattctanagtactgtgatattctttcgtgtgnccttcagaancanagaaaggggtattgttngcaaatgggtctcaaaggtccnaagtttngccaaatcnnggngnnttcacc

SEQ ID NO: 127952 - DNA, 385 bp, Arabidopsis thaliana
ttccacgcgtccgcggacgcgtgggcgggcgcgtgggcgcacgattgatatgcaattgcaactttcatctgcagcaaaccaatcgtccggaggggcttccgagcctagtcagccaacgagaggtctacatgttaatccaaaatatctccgcaggcgggagccctcagccgccgtaaataatttgagaggaattaattcgagtgcaagagtttatggccaaaattcactcggtgggtataatgatttcgaagatcagttagagagcccatcttcactgtctagttaacccccaccgagatggttttaccaggaggtctaatgatggatctaatccttctaatcaagcttttaactatggaatgggtcgagctactagcagagatga

SEQ ID NO: 127953 - DNA, 554 bp, Arabidopsis thaliana
  unsure (1)..(554): unsure at all n locations
nnnnnnnnnnnnnnnnnnnnnnnnnnnnnnnnnnnnnnnnnnnnnnnnnnnnnnnnnnnnnnnnnnnnnnnnnnnnnnnnnnnccacgcgtccgcacaaagcaaaaaaatctctgtaaaagcagaacgataatggagtcacaattatggaattggatcttacctcttttgatctcttctctcctcatctccttcgtcgctttctatggattcttcgtcaaaccgaagcggaacggtctccgtcacgatcggaaaactgtttctaccgtcacctccgacgtcggatctgttaatattaccggagatactgtcgctgatgtcattgttgttggagctggtgttgctggttctgctcttgcttatactcttggaaaggataaacgccgagttcatgtgattgaaagagatttatcggagcctgatcgtattgttggggagttgttacagcctgggggttacctcaagttactggagttgggaattgaagattgtgtggaagaaatagatgctcagcgtgtgtatggttatgcactttttaaaaatgggaaacgcatt

SEQ ID NO: 127954 - DNA, 804 bp, Arabidopsis thaliana
  unsure (1)..(804): unsure at all n locations
cacactcctgtagaggcgattgagccagtaatacctcatcatgagcttggtggcaaaacaccttctgctgattactctgttgataggcaaatggatgctgttggagaaagaaatttggacgtgtcatccgtagaagaaatctcaagaagcaaggactcaaatgttacgcctgatgatgatgtgtctgggatgcgaagcccatcagcttttttcaaacaccccactcatcttgtaactccttcagagatattgatgggcgtttcttccgctgaagcctccatgtttaaacctactgaagacacgagagatagggatgcaaatattcaggacgtgaataatgatccaagagacaccgaagtagaggtgaaagaaataagtgaagcaaggtcaacacagaatggtgaaatcaatgatcatgacgaaactgagaattgcacttcagaaaatagagaaaaagtcttctgctcacaggtttcaaatctcagcactgagatggcaagagactgttatcctagtactgagggaactttcattccaggggaatctaaggcatatggacaacctataaaggctggagatgaaagtggtgttgactccgaagaggtgggccctgcaaaagcttcctttaaagggnaagaagcagaaaggccaaaaaattccccangggtccccggtttgaccatccaaantacccccaatggttgcaacctggnggnncccttccaattggccaagnccggggttaagcncccccnngcanggtttccncccccagtngntnngatcgaaaaccggtaacccggg

SEQ ID NO: 127955 - DNA, 564 bp, Arabidopsis thaliana
  unsure (1)..(564): unsure at all n locations
gcgctctcaatctcaaaaatatccatggcggcgattacagaatttctaccaaaagagtacggctatgtcgttctcgtcctcgtcttctactgtttcctcaacctctggatgggtgctcaagtcggcagagctcgcaaaaggtacaacgtcccgtatccaactctatatgcaatagaatcagaaaacaaagatgctaagctcttcaactgtgttcagagaggacatcaaaactctttagagatgatgccaatgtatttcatactgatgatcctcggtgggatgaagcacccttgtatctgtactggccttggtttgctttacaacgttagccgattctcctactttaaaggttatgctactggagatcccatgaagcgtcttacgatcgggaaatacggtttcttggggttgctaggtctgatgatatgtaccatctcgtttggtgtcactctgatccttgcttgancnactcgtttctgggggtaatnaatncttggtttnctccgaggaatataganccnatgcttgtaagntgtccccaaaaanttgggnanacttttggng

SEQ ID NO: 127956 - DNA, 490 bp, Arabidopsis thaliana
atccgaagacgcgtgggttttcgtaatccgatctccgtcgtcgtcgtcgaatcagataaaaatggcgaagcgtttgatcccgactctcaaccgtgtattggtggagaagattctcccaccgtcaaagaccgtctccggcattctcctaccggagaaatcatctcagttgaattccgggagagttatagcagttggtcctggagctagagacagagcagggaatctaattccggtttcggttaaggaaggagacaatgttcttttgcctgaatttggcggtactcaagttaagcttggagagaaagagttcctattgtatagggatgaagatatcatggctacacttcacgagtgatgtgttaaagagatagaatttatgattcctctttgttttgttgtctgcaattgtctgacatttggatcaattgttatgattgttcttcactgttggcaacaagttcttataattcaataatctcttttgtttggg

SEQ ID NO: 127957 - DNA, 565 bp, Arabidopsis thaliana
  unsure (1)..(565): unsure at all n locations
ccggcgcgagcccacgcgtccggtcgctagtctctctcgtcctctctctctgttttcgtagccttctgcagcacgatctctgcttggggccttcttctctccctcagatcatctatggcactagcaggaagctagtccttcccctggtgctgaggttgttggtcgtgcctttgtggagcaatactatcatattcttcaccaatctcccggtttagttcatcggttttatcaagattcgagctttttaacccgacctgatgttaccggtgctgtgactactgtcacaactatgcaagcgatcaacgacaagattctgtcgttgaaatatgaagactacacggctgagatagaaactgctgatgctcaggagtctcatgagagaggtgttattgtgctggttacaggacgcttaaccgggaacgataatgttaggaagaagtttagtcaatcttttttcttggctccacaagacaaaggatactttgtcttaaacgacgtgtttcgattccttgaggagaaagaggtgactgcacaagcccgctctgtcnccatcaatggaaccact

SEQ ID NO: 127958 - DNA, 417 bp, Arabidopsis thaliana
tcgcaggaacgccacacggtgctaatattatatctcagatccatgggtatactagcctgctagctcttaataaagagatcaacaaaaagtctgagaggaaacatgatcttgtcatcgcttcctatgtgttaggggagataccatctctgaaagacaggattactgtggttcgccagctctgggaccttacagatgatctcttgggtttggttgaaccaggaacgccacacggtgctaatattatatctcagatgcggtcccatatactgtggatggagaagaggaaactgcgtaaactggaaaagaaaatgaagaaagatggaaaggaggtgctcgatctcaaatctggtgcgcatattgttgctccatgccctcatgatggaaagtgtccgctggaaaacactggaaagtactgtc

SEQ ID NO: 127959 - DNA, 514 bp, Arabidopsis thaliana
attcgagcaaggtgttatagggactcctcagctaacggattcgattgaaataccggaatccgtggaggttcttggtcagaaaatcgatctcaatcccattaaaggtttacttacatcagtccaagacactgcttcttcagtggctagaaccctttctaacccaaccacccttgaagttttctctccctagtgccaacccccagtcgtggctgctcacaacttttctcgccaaggaccctcggatctcgagaggcgatggtggaagcgtctatgtgctcatcatagaaggaagctctctcttaaccccttcccccatcataactctcatcacatccatagtaacatatatacaagtatagacccatctgtctatgtttactagtgttgtaactgttatatagcttctttacctgttggagagttataaacttataatggatgttaaaaaaaaaaaaaaaaagggcggccgctctagaggatccaagcttacgtacgcgtgcatgcgtcgtcatag

SEQ ID NO: 127960 - DNA, 912 bp, Arabidopsis thaliana
gacttctaacttctacttctacttagatctcctcaaatttcttatcggaaaaaagtttgagaaaaatctcgatgaagaagaagatgattccgacgacgatcttactctcagctctcattttctctctatcaccgatctgtgaagctgtgtggcttactgtacctcacaccggatcaaagtgcgtctccgaagaaatccaaagcaacgtcatcgttttagctgattaccttgttatctccgaggaacattctatcttccctactgtctccgttaaggttacagcaccttatggcaccgtgttacaccacagggaaaatacaacaaacggtcagtttgcattcacaacccaagaatcaggaacttacttggcgtgttttgaggccgatgctaaaagtcatggtaacaaagattttagcatcaacatcgactggaaaactggaatcgcagctaaagattgggactccattgctagaaaagaaaagatcgagggtgtagagctggagtttaagaaacttgaaggtgcagttgaagcaatccatgaaaatctgatttacctcagaaacagagaagcagagatgaggattgtgagtgaaaaaacaaactcgagagtcgcatggtacagtataatgtcgctggggatttgcattgtggtctctggtttacagattttgtacttgaagcaatactttgaaaagaagaagcttatttagatcatggatagtttcttgttgaagattactagaaccaacagtttgctctgctttctttctcttgatcttctctttggaactgttagtgtaaaattttgttcactcatttaacttgtaatttgtctcctattattacaaaaaaaaaaaaaaagggcggccgctctagaggatccaagcttacgtacgcgtgcatgcgacgtca

SEQ ID NO: 127961 - DNA, 511 bp, Arabidopsis thaliana
  unsure (1)..(511): unsure at all n locations
nnnnnnnnnnnnnnnnnnnnnnnnnnnnnnnnnnnnnnnnnnnnnnnnnnnnnnnnnnnnnnnnnnnnnnnnnnnnnnnnnnnccacgcgtccgcggacgcgtggggcggaggtgtacaaaggggttttaccggacggagagactgtggcgatcaagaagctgacgagacatgcaaaggaagtagaagaacgagtcagtgatttcttatcggagcttgggataatcgcacatgttaaccatccaaacgcgggtaggctttcgtggtttcagttgtgatcccggtttgcattttgggcttgagtactcttctcatggcagtcttgcttctctactctttggatcagaggagtgtttggattggaagaaacggtataaagtggctatgggtatagctgatggtttgagttatcttcataacgattgccctcgacggattattcaccgagacatcaaagcttccaacattttgctctctcaagactacgaagctcagatttcggattttggact

SEQ ID NO: 127962 - DNA, 542 bp, Arabidopsis thaliana
  unsure (1)..(542): unsure at all n locations
gggntgaaggaagaagtaagttcctttatatgtttgacccttagatatgtatacaattgatgggtttggggagtaaagtcctaaactttggattctgtggggatttttttttggcggaatggatgattgcagaggacatcccaggtcctctaaaactggagacttttaaaggaacaaaggacacgaacgattcctgcagcaaatcaggacaaacccaccatctcctcaatgcttctctgagaaccggacagctacattgaaaccccttgaggaccaaaacctacggtatgtaatcaacactttccttttccataatttttaagaagagagagggccgtgaagaggagaagaagccatcgagaagccttgaccaagcaattctggctcggggaaaaagtccccggctataaaccctaccttccattcccatctcctccatcgtctccacaaacaccgtcaaacatcttatcggcggtatgtacaacgttaacggcgccgccgagaacgctatcgtgaaaaacagctgcaacatttttttttcc

SEQ ID NO: 127963 - DNA, 565 bp, Arabidopsis thaliana
cccacgcaaccgaccacgcgtccgagagaacatcccagttcctctaaaactggagactataaagaacataggacacgaacgattcctgcagcaaatcaggacaaacccaccatctcctcaatgcttctctgagaaccggacagctacattgaaacccttgaggaccaaacctacggaagtgttgaagagaaaggaagatgaagctgaagaagaaaagaacagaaagagtggagaaagcaaagaagcaacaaggggattggacgttctctggttcttaaagccttgcactttagccaactagaaaaccttcaccaaattctttctatattgattcattcttttgttaatttcattttattcaactgtaactaacgagatgattatcttgctcagatatataattctgggcaaatttgattcaatctcttacttttacacatacaacgatttgtttaaaataaagataagattagaattcagacccaaacccaaaggggaaccgctctagaggatccaagcttacgtacgcgtgcgatgcgacgtcaaagctcttctatagtgtcac

SEQ ID NO: 127964 - DNA, 632 bp, Arabidopsis thaliana
  unsure (1)..(632): unsure at all n locations
nnnnnnnnnnnnnnnnnnnnnnnnnnnnnnnnnnnnnnnnnnnnnnnnnnnnnnnnnnnnnnnnnnnnnnnnnnnnnnnnnnccacgcgtccgccttattcaacttaaatactacacggccaaaaacatttaacaaacgccactcagatcctgagtctttggatcaatggctatttcaaatgttatttctgtcttattattattgcttgtactaatcaatttaagcaatcaaaatatcaaaggaattgatgcatttcatcagatttacgaagaattgcaatctgaatcagtcgagtcagtgaatcatcttcacagacctagttttcactttcaacctccaaagcattggattaacgatccaaatggtccagtatactacaaaggtctctaccatctcttctaccaatataacaccaaaggtgcggtttggggtaatattatatgggcccattcggtttctaaagacttggttaactgggaggctcttgaaccggctcttagtccttcanaatggttcgacatcggaggtacatggtccggttcaataacaatcgtaccgggaaaaggaccgattatcctctataccggtgttaaccagaacgaaactcagttgcaaaactatgcaatcccag

SEQ ID NO: 127965 - DNA, 1064 bp, Arabidopsis thaliana
  unsure (1)..(1064): unsure at all n locations
nnnnnnnnnnnnnnnnnnnnnnnnnnnnnnnnnnnnnnnnnnnnnnnnnnnnnnnnnnnnnnnnnnnnnnnccacgcgtgcgagagaaatgaaattcacagattctccggtgatcgatctgacggtgaacggcacaaaactctcaatccaacaagacaatggctctatgcacgtcggaacttccgtctggccttgctcactaatcctatccaaattcgctgaacgctggtcaacactagactcatcatcatcaacaacatctccaaatccatacgccgaactcttcgatttccgtcgccgtcgaggaatcgagctaggaacaggatgcggagtcgccggtatggctttttacttactaggtctaacggagatcgtactcacagacatagcaccagtcatgcctgcgctaaaacacaatctgaaacggaacaaaacggcgttaggtaaatctctaaaaacctcgattgtttattggaacaatcgagatcagatctcggcgttgaaaccgccgtttgatttggttattgcggcggatgttgtgtatattgaggaatctgtagggcaattagtgacggcgatggagttgcttgtggcggatgatggtgcggtgttgttaggttatcagattaggtcgccggaagctgataagttgttttgggagttatgcgacatcgtttttaagattgagaaagttcctcatgagcatctgcattctgattatgcttatgaagaaactgatgcttatatctttaggaagaaggtgaagaagaatgaagctgaatcagtgtcatgaagctagttttggttctgtaatgttgttgttacattgatatgcaatttgtttcttgttatagaattcgaattatctcaactatttatattttcttagatattggctactaaaagatgacaaaggctgaaatcaaatttttgtaacgatttttttaagaagtatacaagttttgttgtgtgttaaaaaaaaacaaaaaaagnnnnnnnnnnnnnnnnnnnnnnnnnnnnnnnnnnnnnnnnnnnnnnnnnnnnnnnnnnnnnnnnnnnnnnnn

SEQ ID NO: 127966 - DNA, 581 bp, Arabidopsis thaliana
  unsure (1)..(581): unsure at all n locations
nnnnnnnnnnnnnnnnnnnnnnnnnnnnnnnnnnnnnnnnnnnnnnnnnnnnnnnnnnnnnnnnnnnnnnnnnnnnnnnnnnnccacgcgtccggctgagtacagagagaactaagttcagatccatggaacctgcaacttcttcaccattgccacgagacacgtcggagcaggatcccgcgctggcgcagagtgaagatcagtctcaaggaagacttagggtttctgcttatgaccttatggtagtagacagtgatttagagggattagatcaaagaaaggaagagatgcgtaacatttttgatgatattcaggataaagcttcattaattcttcagttctcacttaagtgggaagaaatcgacgacaggtttggttttctaaagcaacgagccatggagaaggaggtctctgtccggaatcagattctggagctggagaagaaggaagagcgactgaggcttgttgaagaaagagagaggaagattgaggcatccttcagtacattgcaggagaaaggaaatgaatctgatctgatactgttaatggaagcgaatgtgatgagattggttcttcaaatg

SEQ ID NO: 127967 - DNA, 1128 bp, Arabidopsis thaliana
  unsure (1)..(1128): unsure at all n locations
gattaannnnnnnnnnnatagaagactttgacgtcgcatgcacgcgtacgtaagcttggatcctctagagcggccgcccttttttttttttttttgtatatgtatgaagcagctttttgtgaatgaatcttcgaaataggttaaagaaacaaaaatggagaccaaagaattcgactcttacagtgagcgcaaagctttcgacgagacgaaaacaggtgtgaaaggtctcattgatgctcacatcactgagattcctcgaattttctgtctccctcaaggttccttatccgacaagaaaccttttgtttctaccactgattttgcgatccctatcatcgacttcgaaggcctccacgtctcccgtgaagatatcgttgggaagatcaaagacgctgcatcgaattggggattcttccaggtgatcaatcatggtgttcctttaaacgttcttcaagagaatcaagatggagttcgtaggtttcatgaggaagctcctgaggttaagaaaacctacttcactcgtgacgccactaaaagatttgtctacaaaagtaatttcgatctctatagttcttcttcaagtgttaactggagagactctttcgcttgttacatggctcctgatcctccaaaccctgaggatctccctgtggcttgcaggtaagtaacttacggtttttcattgagaaatcttatgaaccgttgagcgatcttatgaaatattggctcagggttgctatgttcgaatactcaaagcatatgatgagattaggtgatttgctctttgagcttctctcagaagctcttggtttgagatctgataagcttaaaagcatggattgcatgaagggtttgcttttgctctgccattattatcctccatgtccacaacctgatctaaccatcggcacaaataatcattcagacaactccttcctcaccattcttctccaggaccaaatcggtggtcttcaaatctttcatcaagactgttgggtcgatgtctctcctattccaggggctctagtcatcaacatcggacgcgtgggtcgacccgggaattccggaccggtacctgcaggcggaccagctttcccaatagtgagtcgtagagacctgaagaatcat

SEQ ID NO: 127968 - DNA, 608 bp, Arabidopsis thaliana
  unsure (1)..(608): unsure at all n locations
gacaactccttcctcaccattcttctccaggaccaaatcggtggtcttcaaatctttcatcaagactgttgggtcgatgtctctcctattccaggggctctagtcatcaacatgggagatttcttgcagctaataacgaatgacaaagtcataagtntggagcacagggtgctagcgaacagggcagctacaccccgggtttccgtagctagctttttcagcacaagtatgcgtccgaattcaactgtttatggaccaatcaaagagcttctctctgaagaaaacccttcaaaatacagagtcatcgacttgaaagaatacacagagggatacttcaagaaaggcctcgatggaacatcgtatctgtcgcattacaagatatgaaagaaaaaaacaattgaaagagtaaatcatctcaagtttattgtaagatattggttcgtttcatgcatctattgggttcaggtactagtccaattgtcagatcttggcaaataagtaaaccatttcctttgtaccaaaaacaaaaacaacaaagaaaggtgtgtgtgtgtgtgtgtgtataattttagtgaatgccttaaattgggaataaaggttcaaacttg

SEQ ID NO: 127969 - DNA, 628 bp, Arabidopsis thaliana
  unsure (1)..(628): unsure at all n locations
cgnnnnnnnnnnnnnnnnnnnnnnnnnnnnnnnnnnnnnnnnnnnnnnnnnnnnnnnnnnnnnnnnnnnnnnnccacgcgtccgataggtagtctcttcaatgtcacaaataatcgaatcacacaatattaaacactaaattattcacagttttcttggagaaaagattcaagtacaagtacaagcagagaaagtgagagagagagaaatgatgggtagcttgaaaataatatctccaccacctccggcgacaagattccggcaacgagtaacggcgaacggagatgggtttccgacatttcttccgaaggagatacaaaacataaaagatccattcgcaagagctttagctcaaaggattgtacgaattcctgttcctcttcagatgggaaactttagaggcagtgtaatgagtagctgtatcaaaccacttgttcaattacacgacaaaagtcccgttgttcttctccattgtttcgacagttcttgtcttgaatggagacgtacttatcctctgcttgaacaagcttgtcttgagacttgggctattgatgttcttggttggggattctcagatcttgagaaacttccaccatgtgatgcagcatctaagcgacatcatttattc

SEQ ID NO: 127970 - DNA, 522 bp, Arabidopsis thaliana
  unsure (1)..(522): unsure at all n locations
aatgannnnnnnnnnnnnnnnnnnnnnnnnnnnnnnnnnnnnnnnnnnnnnnnnnnnnnnnnnnnnnnnnnnnnnnnnnnnnccacgcctccgggcgacaacaaattcgatatatccgatgagttagctgtgtcttttgcggctgcaaagactaagaagtcaggacacagtagtggtgctgttcatgctgctgcggttcaaatccagaaaaaataccgtggttggaagaagagaaaggagttccttctgatccgacaaagaatcggcaagattcaggctcatgtgagaggacatcaagtccgaaaacaataccgagccattatttggtccgtaggattgcttgagaaaatcatcttgcgatggaggcgtaaaggtagtggcttacgcggtttcaaacgtgatacaatcagcaagccaacagaacctgtatggcctgccccacaagaagatgattatgattttctcaagggaaggaagggaaacaaacagagggaagggcttcaaaaggctctaaccccgagt

SEQ ID NO: 127971 - DNA, 606 bp, Arabidopsis thaliana
  unsure (1)..(606): unsure at all n locations
tacgcgcgagannnnnnnnnnnnnnnnnnnnnnnnnnnnnnnnnnnnnnnnnnnnnnnnnnnnnnnnnnnnnnnnnnnnnccacgcgtccgggaaagagtcaatgtgagtttgatgaggaaagtgatcattgtgttagctatgatgagattctagtgaattctgatgaagttattgagcttgatgaagaagaaggcggtggtgaccacgggagggttgctgatcttgttgagtgtgagaatcttggacctcctgagatgccacaagagattgtgattcaagattctgctttagttgaagaggcgggatcgaaactcgatgaacatgcttcaaaaaagccatctaattctatggaaacaccctcctcctctgtaaacgtgaaacctattattcctaatgatgtgcgtgtgactaaagcttctacaaagggacatgatgtaacgccaaaagctgcttcaaggaggacaaagggttcttctttaagttctaattctaaaaccaatgtagatgccaagagccaaaaggaactaagaccgaagaaaaccattgagtctcaacctaaatcatcgaacaaaaccgagactcgacctcctattgctacgaacag

SEQ ID NO: 127972 - DNA, 885 bp, Arabidopsis thaliana
  unsure (1)..(885): unsure at all n locations
atgatcctnnnnnnnnnnnnnnnnnnnnnnnnnnnnnnnnnnnnnnnnnnnnnnnnnnnnnnnnnnnnnnnnnnnnnnnnnnnnccacgcgtccgcccacgacgtccggcggcggagaaaattgaaatggagctcagcttgagcacttcctccgcttctcctgcggttttgaggagacaagcttctcctctgcttcacaagcagcaagtgctcggcgtcagctttgcttccgcgctcaaacctggaggaggagctcttcgatttccttcccgccgtccgcttcctcgtcccatcacttgctccgcctctccatcaactgccgaaccagcctccgtagaggtgaagaagaagcagttggataggagggataacgtgaggaatatcgcaatcgttgcacatgttgatcatggcaaaactactttggttgattctatgcttaggcaagctaaggttttccgagataaccaagtcatgcaagagaggatcatggactcaaatgaccttgagcgtgaaagaggaatcactattcttagcaaaaatacctccatcatttacaaaaacactaaagtaagtattatagatactcctgggcattctgactttgggggtgaagtggagcgtgtcttgaacatggttgatggagtgcttcttgtggtggactctgttgagggaccaatgccccagacaaggtttgttttaaagaaggctcttgagtttggacatgcagtggtcgtggccgtacacaagattgacaggccttctgctcgtcctgaatttgttgtcaattccacttttgaactattgattgaactaaatgcaacagatgaacagtgtgatttccaagcgatatatgctagtgggatcaaaggaaaagcggggctttct

SEQ ID NO: 127973 - DNA, 796 bp, Arabidopsis thaliana
actatagggttagctgttacgcctccaggtcccggtccggaattcccgggtcgacccacgcgtccgaatgaatgcttggagttctgtaggagatatgaaaagatgcgaagagatctatacagatatgttggaaggaggaatagatcctgatattcatgcatttagtatccttgccaaagggtatgctcgagctggggagcccgaaaaagcggagcaaatcttgaatcagatgagaaaatttggtgttcgcccaaatgtagtgatctacacacagatcataagcggttggtgcagtgctggtgaaatgaagaaagcgatgcaggtatataagaaaatgtgtggaatcgttggtttatcgcctaacttgactacttacgagactcttatatggggatttggggaagcgaagcagccatggaaagcagaagagcttctgaaagacatggaagggaagaatgttgttcccacaaggaaaactatgcaactcatagctgatggatggaaatctattgggggctctaaatagtaatgatgccaatacaatggggctttttccttttttaaaatttcctctaaaacttaaatattccccaaattaatatttgccctttggtcgaggaaaagacccattgggttctttaaaaaagggaaatgccctttggaaaaaaccccaaagacttattttttttcaaaaggttctttaaaattttggggtttttgaaagggccaaaaaccttcttttttttgggggggggggttttgttttccaaaagagaccccccactttttggggggg

SEQ ID NO: 127974 - DNA, 1048 bp, Arabidopsis thaliana
  unsure (1)..(1048): unsure at all n locations
acgcgnnnnnnnnnnnnnnnnnnnnnnnnnnnnnnnnnnnnnnnnnnnnnnnnnnnnnnnnnnnnnnnnnnnnnnccacgcgtccgtggagttctgtaggagatatgaaaagatgcgaagagatctatacagatatgttggaaggaggaatagatcctgatattcatgcatttagtatccttgccaaagggtatgctcgagctggggagcccgaaaaagcggagcaaatcttgaatcagatgagaaaatttggtgttcgcccaaatgtagtgatctacacacagatcataagcggttggtgcagtgctggtgaaatgaagaaagcgatgcaggtatataagaaaatgtgtggaatcgttggtttatcgcctaacttgactacttacgagactcttatatggggatttggggaagcgaagcagccatggaaagcagaagagcttctgaaagacatggaagggaagaatgttgttcccacaaggaaaactatgcaactcatagctgatggatggaaatctattggtgtctctaatagtaatgatgccaatacattgggctcttccttctcaacttcctctaaactcaatatcccaaataatatcgcctcgtcgagaagtccattgttcttaaaaggaatgcctgaaaaaccaaagctatgtatcaagtctcagtttggtttgaggcagactcttttggtggtgttgtgcagagaccagattggggaagccgggagattttgtaagttcatgtagaatttgttttgctgtagagatggagctaaattaaagggtaagaaaagctgatcaaagattggtgtcgatcgatttttaagatttatttttctgtacagatatactttttcagttaaatgaaaaatatggtgtttaacaagcaagacaatgagatggataatgttagattgtatttttttgtttcttaatcgaaaagttggtgctaaaaaaaaaaaaaaaagnnnnnnnnnnnnnnnnnnnnnnnnnnnnnnnnnnnnnnnnnnnnnnnnnnnnnnnnnnnnnnnnnncagctcaat

SEQ ID NO: 127975 - DNA, 557 bp, Arabidopsis thaliana
  unsure (1)..(557): unsure at all n locations
cnnnnnnnnnnnnnnnnnnnnnnnnnnnnnnnnnnnnnnnnnnnnnnnnnnnnnnnnnnnnnnnnnnnnnnnccacgcgtgcggtccctgagaaggttgttgttcacaaggatggtccaagaggagtccatttcaggcgtgctggtccacgtcaaaaggtttactttgagtctgacgaagtgcatgcttgtatagttacatgtggaggtctctgtcccggtctcaataccgtgattagagaagttgtgagcagcttatcatacatgtatggagtaaagagaattcttggaatcgatggtggatacagaggattttacgccaagaatacgatccccttaaactctaaagtcgtgaatgatatccataaacgcggaggaacaatcattgggacctcaagaggtggacatgataccaacaagatagttgatagcattcaagatcgaggaatcaatcaggtttacattattggaggagatggaacccagcgaggtgcttcagtaatatttgaggaaattagaagacgtcgactaaaagttgctgtggttggaattccaaaa

SEQ ID NO: 127976 - DNA, 417 bp, Arabidopsis thaliana
attttcacattcactgttacttcttcatagaacttctcactctctctcacacacaactgtactctctctggagatttgaagaaaaccctaattcccaattttcttttgtcgttttccttctccgacgattgagagttttcctagatctaaagaaaaaagtttcaatcttcactatgcaatactgagaagaaattccacaaggaaaaaaaatgtcaagctccgacccgaaacccggacctaaaccgggtccatggccaccaactccagaatccgccgcaatgccaccgtcttcctgggctaaaaaaaccggatttcgtcccaaattctccggtgaaactaccgccactgattcttcttccggtcagctctcattaccggttagagctaaacaacaagaaacccaaccggatcttgaag

SEQ ID NO: 127977 - DNA, 642 bp, Arabidopsis thaliana
  unsure (1)..(642): unsure at all n locations
gttgtgtagaagccaatgaaacaattttaagcatgtaaaaaagtccggttgttgcaagccaccaacagattgcggtttttcatatgtgaatgagaccggatgggacacgagaggagggatgataggaccgaaccaggactgtatggtgtggagcaacgaccagagcatgctctgttatcagtgtagttcttgtaaagctggtgttcttgggagtttgaagaagagttggagaaaagtatcggtgatcaacattgtggtacttatcattctagttatcttttacgttatcgcttatgcagcttataggaatgtcaagaggatcgataacgatgaaccggctggtgaagctaggatgacaaaatcacatcctagtcatttccatctttgatcaaaatttggaacagttcaaaaaaatgtatcgaggctttgatttatgtttaaaggttttagtacttttgtgtatgtttttggtatgtaacacatttttttgtgtgtatattatttatgttggaatcggaacctagttcattttatattcttctagaaatcagcattacaacaaaaaaaaaaaaaaaagnnnnnnnnnnnnnnnnnnnnnnnnnnnnnnnnnnnnnnnnnnnnnnnnnnnnnnnnnnnnnnnnn

SEQ ID NO: 127978 - DNA, 891 bp, Arabidopsis thaliana
gcatttctaagtctttttgcacaagaaacaaagctcaggaaaacctcaaaaccctaagctatgagaacaagcaaccatctcataggtttagtcaacttcctcactttcctcctctcaataccaatcctcggcggtggaatatggttaagcagccgagctaactccaccgactgtttaagattccttcaatggcctctcatcgtcatcggaatctcaatcatggtcgtatctttagctggattcgctggagcttgttaccgtaacaagttccttatgtggctatacctagtagtcatgcttctcatcatcgctgctcttatcggtttcatcatcttcgcttacgcggttacagataaaggatccggtcgaaccgtacttaaccggggttatcttgactattatcttgaagattactctggttggttgaaagatcgagtttctgatgatagctattggggtaaaattagttcttgtcttagagattctggtgcttggggaaagattggaagaaattttaatggtgtacctgaaactgctgatatgttcttccttagaagacttagccctgttgagtccggttgttgcaagccaccaacagattgcggtttttcatatgtgaatgagaccggatgggacacgagaggagggatgataggaccgaaccaggactgtatggtgtggagcaacgaccagagcatgctctgttatcagtgtagttcttgtaaagctggtgttcttgggagtttgaagaagagttggagaaaagtatcggtgatcaacattgtggtacttatcattctagttatcttttacgttatcgcttatgcagcttataggaatgtcaagaggatcgataacgatgaaccggctggtgaagctaggatgacaaaa

SEQ ID NO: 127979 - DNA, 975 bp, Arabidopsis thaliana
  unsure (1)..(975): unsure at all n locations
gnnnnnnnnnnnnnnnnnnnnnnnnnnnnnnnnnnnnnnnnnnnnnnnnnnnnnnnnnnnnnnnnnnnnnnnnccacgcgtccgcccacgcgtccggggaagatgaggttcttgttaggagaatcaatgggaggagcagtgcttttgttgttacacagaaagaagcctcagttttgggatggggctgtcttggttgctccaatgtgtaagattgctgaagaaatgaaaccaagccctttggtaatttcgatattggccaaacttagtggagtgataccttcgtggaaaatcatccctggccaagatatcattgagactgcttttaagcagccagaaatcaggaaacaggttagggaaaatccctactgctacaagggacgtccacgtttgaagactgcttatgagcttttgagggttagcaccgatctcgagaagaggcttaatgaggtttcattaccgttcatagttttgcacggtgaagacgataaagtcacagataaagcggtgagtcgacaactgtatgaagttgcatctagttcggacaagactttcaagttgtaccctgggatgtggcatggtttactctatggagagacaccagagaatatcgagactgtttttgctgacatcattggctggttggataagaaagttgctgatgaaagtggaggctttgaatccgagcttaaacgtaaaaatgatggtattcctttgaaagggtagttatccctttaacataaacaaataaaggatagttaaaatctgtttgtctgtttgtttttctctcttttcctgaattctgtttatgttaattagttgttaccatgtttgtcactctctgacttagtgtaatcctatttnnnnnnnnnnnnnnnnnnnnnnnnnnnnnnnnnnnnnnnnnnnnnnnnnnnnnnnnnnnnnnnnnnnnnnnnnnnnnnnnnnnnnnnnnnnnnnnnnnnnnnnnnnnnnnnnnnn

SEQ ID NO: 127980 - DNA, 536 bp, Arabidopsis thaliana
gatcttatcaaaaactcgctctccatccaacaaaacccgaagaaagagagattcagactcaaatctctcagtaggaatggcaagtgaaacagagaacatcaagtttgaagagtgtttcatcaagaacactcgaggaatgaaactgttcacgtgcaaatgggtgccagcaaagcaagagccaaaggctttagtctttatttgccatggatatgcaatggaatgtagcatcaccatgaacagtactgcgaggaggctggtgaaagcaggatttgcggtatatggaattgattacgaagggcatggaaaatctgatgggcttagtgcttatgtcccaaactttgaccatctcgttgatgatgtctctactcactacacaagcatttgcgagaaagaagagaataaagggaagatgaggttcttgttaggagaatcaatgggaggagcagtgcttttgttgttacacagaaagaagccttagttttgggatggggctgtcttggttgctccaatgtgtaagattgcttgagaaatgaaac

SEQ ID NO: 127981 - DNA, 618 bp, Arabidopsis thaliana
ctatacgacttacttagggaacgctggtacgcctgcaggtaccggtccggaattcccgggtcgacccacgcgtccgttgtccagggtttgttgttgatttcctatgcccatggtcaagagatagtgcgtttaagagaaggcatcgaggatttacgctgattagaatgaactgtgttggtggattttgatagggatcagttccgggttttgagttttggcctttggttttgtagatttcgatgatgcaaggattggatttgctatatactttgtttagtgtgtggtctgttgtgcggatagcttttggatgaataagctttgtgtgcttctttttttagtttgatttggaaagtcacagacttgacaaggatggagaaagaaggtgtgtgtgataccattaatttaagtgatcagatgtaccctgatgagcctttctgttccgagatgaaaactgaaaccattgctttatctcagaaatttggaggaggcgaggggagtaaagtgggtttttcgagagaggcacctttaataggaaaggattcagctggaactaattcgggagaatgctgtggttgtagtgctaagaaactaaattttaaaggggatgatgatctcgtt

SEQ ID NO: 127982 - DNA, 486 bp, Arabidopsis thaliana
ggaaatgttggaggaaagacttgtgcagtataaaaacagggacgacatgcttcttcgtgaagtggtgagagatcttcaacactgggatcatttttttagtactacagtttctcctttgtgtgatcatatgaaagttccttttatctgttcaacttggtttgtttcttaattatctccccagtatgtagattaggacctactaccggtatttagcattctagactaggacttggtcttagctaacgtgaaagaatgtcatgttgtcaggacatttcagatcgctatagatgttacattacatttcattatgcctgaagatgctgtgtagttctgacatttatagaaatttgacagtctagcacagaagcccagatgagacaattgctagatgaaagatctaccttcactcagaaagaggcgagtctagaaaagaaagttcaacaacttcaacacgatgaagaatccttggtggctgaggagaagtca

SEQ ID NO: 127983 - DNA, 451 bp, Arabidopsis thaliana
agagatacaaaaccaaaactttcaagcaaagcaattcaatttcaatcaaaaaccaaatcgaagatctttgaaagtttcctttttttccgaaatctgagcttgggtattgttggataagcttctcggagattgagattgaggattttgataggtgaggagattgaaagatttggatttttgggcggcaaaaatggtgatgcagacggaagctagggttggtgtgagctcaggacatggcgtagcttcgtcttctcatcgtttaacgcaggaccagagatcacatatcgaatcggcgtcgcagctcttagccggaggactcgctggtgcttttagcaagacttgtactgctcctctatctcgtctcaccattctcttccaggtgcaaggtatgcacacaaatgctgcagctttaacaaagccaagcatattacacgaggcttcacggatattg

SEQ ID NO: 127984 - DNA, 1062 bp, Arabidopsis thaliana
  unsure (1)..(1062): unsure at all n locations
atgatacgccagctctatacgactcacttagggaacagctggtacgcctgcaggtaccggtccggaattcccgggtcgacccacgcgtccggggttatctcaggaatggagaagatcagagtcaaagatacaccagaaggagttgtgtttgggaatttagactctgttttctcaaagatgcttcatcaaatgggtcttgctttgcctcgtgccactgctgttttcatcaattcttttgaagatttggatcctacattgacgaataacctcagatcgagatttaaacgatatctgaacatcggtcctctcgggttattatcttctacattgcaacaactagtgcaagatcctcacggttgtttggcttggatggagaagagatcttctggttctgtggcgtacattagctttggtacggtcatgacaccgcctcctggagagcttgcggcgatagcagaagggttggaatcgagtaaagtgccgtttgtttggtcgcttaaggagaagagctgggttcagtttaccaaaaggggttttggatagggcaagagagcaagggatagtggttccatgggcaccgcaagtggaactgctgaaacacgaagcaaccgggtgtgtttgggaccctttggggatggccctcggtgttggagagtgtttcgggtggtgtccccatgatttccaggccatcttttgggggatcagagattgaacggaagaccggtggaggttgtgtgggagattggaatgccgattatcaatggagtcttcacgaaagatgggtttgagaagtgtttggataaagctttagttccccccgatggtaagaagatgaaatgtaatgctaagaaacttaaagacctagcttccgaagctgtctcttctaaaggaaggtcctctgagaatttcagaggattgttggatgcagttgtacccattatttgaatgtgaaatgattttggacaaataaaaaaaaaaaaaaagnnnnnnnnnnnnnnnnnnnnnnnnnnnnnnnnnnnnnnnnnnnnnnnnnnnnnnnnnnnnnnnnnnnnnnnnnnnnnn

SEQ ID NO: 127985 - DNA, 601 bp, Arabidopsis thaliana
  unsure (1)..(601): unsure at all n locations
nnnnnnnnnnnnnnnnnnnnnnnnnnnnnnnnnnnnnnnnnnnnnnnnnnnnnnnnnnnnnnnnnnnnnnnnnnnnnnccacgcgtccgtgggtttttaaatttagctggagcttgtgcatatggctctatggctaccggtttcttcgccggacacattgctgcggctctgccttccatctacaaagacggctccggctgcggagcttgcttccaggtcagatgcaagaacccgacgctttgcagcagcaaaggaaccacggtgattgtcacagacttgaacaagaccaaccaaaccgatcttgtccttagcagcagagcctttagggccatggctaagcctgttgttggcgccgacagagatcttctcaaacaaggcattgtcgatattgaatacaggagagttccttgcgattacggtaacaagaagatgaacgtgagagttgaagaatcaagcaaaaatccaaactacttggcgataaagctcttgtaccaaggaggccaaactgaagtggtagccatttacattgctcaggttggttcgtcacattggagttacatgaccagaagccacggagccgtgtgggttactgacaaagtac

SEQ ID NO: 127986 - DNA, 399 bp, Arabidopsis thaliana
cccacacacctcattaacattataattgtttttttagttattcttcaatttcaagaaaatgctgcgaaggctttctcttcctcctctcagtcgtactcctcttctcctcatctgcagccgcctgcgaccgatgtcttcacagttctaaggcagcttatttctcctctgcatctgctctctcctctggagcttgtgcatatggctctatggctaccggtttcttcgccggacacattgctgcggctctgccttccatctacaaagacggctccggctgcggagcttgcttccaggtcagatgcaagaacccgacgctttgcagcagcaaaggaaccaccgtgattgtcacagactttgaacaagacctaccataaccgatcttggtcttagcactcttac

SEQ ID NO: 127987 - DNA, 561 bp, Arabidopsis thaliana
  unsure (1)..(561): unsure at all n locations
atgattcttcagctctcnnnnnnnnnnnnnnnnnnnnnnnnnnnnnnnnnnnnnnnnnnnnnnnnnnnnnnnnnnnnnnnccacgcgtccgattatctctatggattgcattccgccggaaatcccggagatcatctcacaagctgttacccttcagtcaaataccacgcgtggcgaaagatatcagggttgatgatagagttgggtttcaaaatcataatgaaaatttatctatcacaaatgctgataaatctagtgacagaaactctgggaagatgatgtcttacttgggaagaacgaagtctagtgataatgatagtataagtcaatgtagctctgtgcatcatcatgagagagcttgtagttctcactctggtgaagatggaagctttggagctgcttggagacaaaattccctatcacagggcgggctagtaacagcatctcctttggttggtttgccagaaatatctcatcttggttggggacactggtttactcttagggatcttcagctagccaccaaccgttttgctgctgaaaatgtaatcggtgagggtg

SEQ ID NO: 127988 - DNA, 599 bp, Arabidopsis thaliana
ggatacgccgagctctcattctgactctctatagggaaagctggtacgcctgcaggtaccggtccggaatttccgggtcgagccacgcgtccgcccacgcgtccgaactttttgtcgaaaataattgaattccgattttgtttttgtatggcttttgatgtttcagatggtggacagaacttggtttagaaaaagatgtggagaaggcaagaagccagccgttaaaatggcatacgtggtccatgaaaattcttcaagatccgaccttaaccgaacaaaggcttgatcttaccaaaccaatatcgcttgtttatgctatagatgacattttcgatgtctatggggagctagaagagctaaccatcttcacacgagttgttgagagatgggatcataaggggcttaagacgctacccaaatacatgacggtttgttttgaagctctagatatgatcacaacggagattagcatgaagatctccaaatctcatggttggaacccgacatacgctcttcgacaatcgtgggcaagtttgtgtaaagcattcttggtagaagcaaagcggtttaattcgggttacttacccaccactgaagag

SEQ ID NO: 127989 - DNA, 622 bp, Arabidopsis thaliana
atgctacgcgagctctaatacgacttatatagggaacgctggtacgcctgcaggtaccggtccggaatttccgggtcgacccacgcctccgcttggtaatttcatccattacatggcgacttttgtttctggattcatcgtgggtttccctgcggtgtggcaactagctttagtgactctcgcggtggttccgttgattgctgtgatcggaggaattcacaccactactctctctaaactatctaataagagtcaagagtctctttcacaagctggtaatatcgtcgaacagacagtggtacaaatcagggtagtgatggctttcgttggagaatcaagagcttcacaagcttattcatcagctttgaagattgctcagaagcttggttacaaaacaggtttagctaaaggaatgggacttggtgctacatacttcgttgtcttttgttgttacgctctcttgctttggtacggtggttatctagttcgccaccatttgaccaacggtggtctcgctattgccacaatgttcgccgttatgattggtggattggcattgggacaatcagcaccgagcatggctgcatttgccaaagcaaaggttgctgctgcaaagatcttt

SEQ ID NO: 127990 - DNA, 541 bp, Arabidopsis thaliana
  unsure (1)..(541): unsure at all n locations
atgatttgccggcannnnnnnnnnnnnnnnnnnnnnnnnnnnnnnnnnnnnnnnnnnnnnnnnnnnnnnnnnnnnnnnnnnnccacgcgtccgaatttttaactccatatacatgattataaacgttcatatgttatttgatatgaattaaataaactaatttttgtttatgatttactatttttatttttaatagatttttgtatattgtgtatctaaaatatcatatttataatattgtatgttggaaatgcttaaaccacctaaaattgcatatgttttgattagacgttatatgttttaagtattgtgtcagtgcttgcttcgtgcctaacgctttcttaaacacaaacaagtcaatattttatactacacaaactcattaatagatattagtgctaaacttaataaagcatatataactattcaagtccacaaaatcttttaccaaaataaacttttaaaatataaacttttttacatgtctagcacgtatccgaacatttccaaaaagatactccatcttttgaaataagttgtc

SEQ ID NO: 127991 - DNA, 438 bp, Arabidopsis thaliana
agatcttcttcctctctctctttctctcaccatatatctaaattgctcatcgattctcaattcagcttcatgctttcggatttgattcgtcgataaccccaatttctttacaaagttgaagtttttatgtcatttctggttcgaaattcgttgcaattggaatgagataaagtctctgaatttgctatcgctttgttttattcgttttctgttttttttgagatgccatcgatgcttgttctcgtcggcacaatgccgtccttggcttctctggttagtctaggtggtgcttgtgcaagcgtttctggaacgagttcttcggatgcatcgtatgctttagttaagagggtttctttgtcaaggagaagtgttaaggggactaagaaatggctgtgtagatattctgtttcgtcttcaactactactactactgctgac

SEQ ID NO: 127992 - DNA, 619 bp, Arabidopsis thaliana
  unsure (1)..(619): unsure at all n locations
attgaagtctcaattttttctcttctttatttctccgtatgaacttctccgattttatggtttttatatccttgaaagctagctagcaccatggttcctccggctaaaaaattcatcaacaaccccaacgatgttgtaaccgagttcatcgaaggtctcgtcgaaacttatcctggacttcagtatttggatggtcttcccgagatcaaagttgtactaagagctgatgtctcagctgcaaattatgacaaggttgccgttatatcaggaggaggaagtgggcatgaaccagcacaagctgggtatgttggagaaggaatgctcacagctgctatttgtggagatgtttttgcttccgccaactgttgattccaacctagctaggattcgtgctggtaactggtccaaaagggatgcctcttgggttgtcacgaactatactnggtgaccgcntgaaacttttggccctggcaantgagcaancaaaaaactgaggggtccggaatagnnnctggaattgntgnaaatgattggggccaaccccgccggggngggacttgggcccaaaggtntcgggaaagtcttgccaaagggtctgacacaactccnngnatttttc

SEQ ID NO: 127993 - DNA, 690 bp, Arabidopsis thaliana
  unsure (1)..(690): unsure at all n locations
ccacgcgtccgcacacgcgtccgaccacgcgtccgaaaaaatctgacttttttgtttaaactcttttataaaaaagaataaaaaagtttcgttgaatccctcaaaactttttggttccttacaatcgtcatttgtaactttcccagatcctctcccttttattgcatctctgttcttttagctcagggtttgtctgtcgtgcaaaaagcaaaccctaaatcaaatctgggtttcgtctatctgattcgtcagatctaaagtctcaaggcccaccatcgtcttctttttttgaactctctgctctgctttgctctgcctttggttttctttttttccatttcgagctgcttggttggctttgaggtttcacttcaaagagtttgcatctgctaatgtagacaagttttcgtggagatatgagatttccaacaaatagtcccctactggttcaggatatcattgtcctgaaaacaaacatccaaagttttagaaggtgatgtgagtnctccatatgttacggcgtcttggatggttaattggactgagccaaagaagtaggcaaacaaagtcgattgatgctgagccttacggtgccagggtaaggccagtcctaatnaccgncactgtcaggggattctatccaatatccntagggttcataacntgtcttttncagcaaggntggatcaa

SEQ ID NO: 127994 - DNA, 631 bp, Arabidopsis thaliana
  unsure (1)..(631): unsure at all n locations
atgatacgcgnnnnnnnnnnnnnnnnnnnnnnnnnnnnnnnnnnnnnnnnnnnnnnnnnnnnnnnnnnnnnnnnnnnnnnccacgcgtccgccaaaatgggtctatggggaaactactctataccaaaagacaacccttttcgtgaagacaaagagcttgaacctgaaatatgggctgttggattgagaaacccttggagatgcagctttgattcttctaggccttcttacttcatgtgtgctgatgttggacaggacacatatgaagaggtggatctcataagcaaaggaggaaactatggttggcgtgtttacgaaggcccggatcttttccatcctgagtcatcccctggaggaaacacatctgttaaatcactaaacccgatatttcctgtgatgggttacaaccactcagaagttgactcaagcggaaaatcagcttcaatcactggaggttacttttatagatctgaaactgatccttgcatagctggaaggtacgtatatgctgatctatatggaaatggcgtgtgggcggngattgaaacgcctgctaatagcgggagctttgtgaccaaaagaacaaccttcagctgtgccagtgactcacccatgaaatgtagtgattccc

SEQ ID NO: 127995 - DNA, 778 bp, Arabidopsis thaliana
cacacgcgtccgcccacgtgtccgctctaatacttttaaggttttagattctaatcaatggcttcttcttctcttttggtcaccatcttcctctgcatctctgtcttcttcttttcgtccgtgaatgcaaatgaggttaccgtcggtggaaaatccggtgactggaagatccctccttcctcttctttctcctttaacgaatgggctcaaaaggctcgcttcaaagtcggcgactttatcgtattcaagtacgaagccggtaaagactcggttttgcaagtgacacgagaagcatacgagaaatgcaacaccactagccctaaagccagctacaccgacgggaacacaaaggtgaagcttgaccaagctggtccggtctacttcgtcagtggaacagagggtcattgtcaaaagggtcagaagctacgcctagtcgtcatcactcctcgtaactctgctttctctccaggtccttcgccatctgagttcgacggtccagccgtagctcctactagtggtgccgctaagctcgccggcggatttagtgtcgtatttgggcttgttcttggattatgggccttcttcttttaaaagacaattagtcttaattctatttattaattttggaatataaagtagaaatcttttgttatttactacattaaatttattttaatctaaattgttcttcctctttttcaattctggataaattagttggatctatcaacaatcaacaaagaaaacaaaagtgaatgagaattttgaatttagtacc

SEQ ID NO: 127996 - DNA, 532 bp, Arabidopsis thaliana
  unsure (1)..(532): unsure at all n locations
cnnnnnnnnnnnnnnnnnnnnnnnnnnnnnnnnnnnnnnnnnnnnnnnnnnnnnnnnnnnnnnncccaagcgccacgcgtccgcattaataaaaaagaagagaaaaataaaaaagtttgtgtaaattttttttgcacactccacagcctaaacccaacccaaaatcacaaaaaccaaaaaaatatataataatgggtggctgtgcgagtagacccaaggaatcagacatgcaaaacgaagaaggctctgttcctaacaagcctgtctctgaaaacgtagtagccaaggagaacaacacagaaagcggtgagaaacagaaccagacagtggctgagaccactgaaacaacttctgtcgaagctaaggagacatttccggtcgagccgaccaaggaaacaactcctgctgttcaaccagaggttgcagccgtcgaagagtcttcttctgctgatgctggtgaggctgcagtagttgcacctgagaaagtggagaacgctgcaacagaaaacgctgaagcaaaggtggaggcggt

SEQ ID NO: 127997 - DNA, 750 bp, Arabidopsis thaliana
  unsure (1)..(750): unsure at all n locations
taccccttcaaggaccgggtccgaaattccggggtcgaccccacgggtcgaagtgaaggccgttccaagaccggacgatgtcccggatattcgaccagaacaactggcggaagccgacggattcatgtttggctttccttctaggtttggagtgatggcatcacaggtcatgactttctttgacaatacaaatgatctctggactacacaggctctcgctgggaaacctgcaggaatcttctggagtacgggtttccacggtggaggccaagaactaactgcgttgacggcagtgacaaaactggctcatcacgggatgatatttgtaccggtaggatacacattcggtaaaagtatgtacgagatgggagaggtgaaaggtggttcgccttatggctcagggacttatgcagctgatggatcacgcgagccaacagagctggagattcagcaggcaaattaccatggcaagtactttgcaggaatagccaagaaactcaagaaacggtctcctgtctaaattctaaaccatatcaactctgtgtttcctatactaaacaatctgtaaatgtaaaggtgaacactgaaaataagatcgacatatacagagcaaaacaccggtgtgtaagctaatggtcaataaatcacattttccattaaaaaaaaaaaaaaaaaagnnnnnnnnnnnnnnnnnnnnnnnnnnnnnnnnnnnnnnnnnnnnnnnnnnnnnnnnnnnnnnnnnnnnnngga

SEQ ID NO: 127998 - DNA, 935 bp, Arabidopsis thaliana
  unsure (1)..(935): unsure at all n locations
acgcgtccgaaaggacaaagagtttttgttgtcagtaacttcaagctctaagctatggctgtcaccaagatttatattgtgtgagtctttaaagtttaaactaatcagtgccaagttaaacaactggcgatcaatttcccgatcaagagtaatctgcgattttgtactactgactcacacaggacgagattgaatcctcgtaccagtttggttttgacgaaaaattgggttcttggacttttctgttaggtactattcccggccccgccacgtcgagacaatggcacgagaggtacttcggggagtaaactctgttccagacgtggaagcaacactttggcaagtgccagagacattaccggagaaaatattggagaaagtgaaggccgttccaagaccggacgatgtgccggatattcgaccagaacaactggcggaagccgacagattcatgtttggctttccttctaagtttggagtgatggcatcacaggtcatgactttctttgacaatacanatgatctctggactacacaggctctcgctgggaaacctgcaaggaatcttctggagtacgggtttccacggtggaggccaagaactaactgcgttgacggcagtgacaaaactggctcatcacgggatgatatttgtaccggtaggatacacattcggtaaaagtatgtacgagatgggagaggtgaaaggtggttcgcaatatggctcagggacttatgcagctgatggatcacgcgagccaacagagctggagattcagcaggcaaattaccatggcaagtactttgcaggaatagccaagaaactcaagaaacggtctcctgtctaaattctaaaccatatcaactctgtgtttcttaactaaacgcggccgcgaattcgatacaagctttgtatacctcagcagctagggggg

SEQ ID NO: 127999 - DNA, 523 bp, Arabidopsis thaliana
  unsure (1)..(523): unsure at all n locations
cagacgcgtgggctcttacacgcagagttcgcgagatcagaatcaatggtggcatgaaaaacgacgcttgagctcaaattcgtcgaccatggaacctgcaactcttactcgttcttcctctcttactagattcccttatcgtcgtggtttatccactctccgactcgctcgagtcaactcgttctcaattcttccacctaaaactcttctccgtcaaaaaccgcttcgtatctctgcttcccttaatcttccaccacggtcgattcgtctacgtgctgtcgaagatcaccatcacgatcatcatcacgatgacgagcaagatcatcacaaccaccatcatcatcaccatcaacacggatgctgttctgtggaattgaaagcggagagtaagcctcagaagatgttgttcggattcgctaaagctatcggatgggttagattggccaattacctcagagagcatcttcatctttgctgntccgccgctgcaatgttcctcgctgccgccgtctgtccttanctt

SEQ ID NO: 128000 - DNA, 467 bp, Arabidopsis thaliana
  unsure (1)..(467): unsure at all n locations
cgcgtgggcgacgacggcgatggcgatggctatggagatttctcttcctttcgttggatcatccatggccttaagcgcgggaaaatcaaggaacagcgtttctaggattagtcgtgttggattctcttcggtctcggctgtacatgtacccagaaggatgtttatgcagctgtctggatttggttcggtcttgacgcttctggattttcctagtttagcggcgccggttcctcagatgaaggaacctgaagtgatcagaatgcaggacattgaaactcccgagtggcgtgaggtatcaagagataattgaaggtgaaggacgggaagctcatgaaggggacctggtcgaactaaactatgtgtttccggcgtgcaaatgggttttttcggtcaaaggtttcttnnattnaaccacgggnggntccaatttaagnnggtnaaaccncccctgaaaaacttntttttcg

SEQ ID NO: 128001 - DNA, 786 bp, Arabidopsis thaliana
  unsure (1)..(786): unsure at all n locations
tgatacgccggactctatacgacttacttagggaaagctggtacgcctgcaggtaccggtccggaattcccgggtcgagccacgcgtccggcgacagctcaaacgttgatatttttctccggcttttctagggtttaaattttctttccgatcagagattaatggcgactctagactccgacgttaccatgattcctgccggagaagcctccagcagcgtagccgcgtcgtcttccaacaagaaagctaagcgattcgaaattaagaagtggagcgccgttgctctctgggcttgggatatcgttgttgacaactgtgcgatctgcagaaaccacatcatggatctttgtatcgagtgtcaggctaatcaggccagtgccacaagtgaagagtgcactgtagcttggggggtttgcaatcacgccttccactttccactgcatcagcagatggctaaagactcgtcaagtttgtccattggataacagtgagtgggagtttcagaaatatggtcactaaatcaacaaatggttccagcaagcatgtgtctaatcgtgaagacatcaggttcatttggttaccaccgcatatgataactaaagattgttcaagtttttgccctttttttggtactgtattttacaatttgtggaaacagagatttactgttcagtgttcactaaacctattatggttgtgctttgggtgacgtctttgatttcaaaattaaaaagtaaaaatcctgcaaagagttttttactcgtaaaaaaaaaannnnnnnnnnnn

SEQ ID NO: 128002 - DNA, 936 bp, Arabidopsis thaliana
  unsure (1)..(936): unsure at all n locations
cagctactatacgactcacgctagggagaagctacgcacgcctgcaggtaccggtccggaattcccgggtcgacccacgcgttcccttaactctatctctaggtgacttaagagtaaaaaatggtagaggcagaggttgaagtagatgtggaaatcaaatctacggctgataagtttttcatgttctctagaagatcacaacatgcctccaaagccactcgctatgtacagggatgtgatctgctcgaaggcgagtggggcgaagttggaagcatactcttgtggaaattaactgttgatggagagccaaaagtgtcaaaggatatgattgaggcgattgatatgaagatgaatatgatccagtggagggtgttagagggacctctgaaggaagagtacaatattttctcgaaaacgatgaaagtaagccctaagcaaggagggtctggaagtgtggtgaagtggaacttgaagtatgagagaattgatgagaaggtggctcacctagagaggctccttcagttcttcgtcgaatgtgttaacgagattgaccaatacctattgtctgagggttagggacttttctccctggcttatgtgtgggagagttattgtatgcgtacgtgtaaggactcttcttgtgttttatatgtctttctcaataatgtgatctcttgcgatttagaagagaggtatgcaagtgtgctatacatgatgtataatacatcatgccttaagttggaagttgtataacattttaagttgcttatgagtttctcatatatgtatggtgtgtttgttggttgaaaaaccatattataatgcaacgataccatgtttttttacaaaaaaaaaaaaaaaaggcgaccgctctagaggatccaagcttacgtacgcgtgcgtgcgacgtcatagtcttctatagtntgtacctaa

SEQ ID NO: 128003 - DNA, 629 bp, Arabidopsis thaliana
  unsure (1)..(629): unsure at all n locations
nnnnnnnnnnnnnnnnnnnnnnnnnnnnnnnnnnnnnnnnnnnnnnnnnnnnnnnnnnnnnnnnnnnnnnnnnnnnnnnnnnnccacgcgtccggtcatggccaattgcgatgcaaaacagagacatagtagccattgctaaaacaggctcgggaaaaactttgggttacttgattcctggtttcatgcatctccaacggatccacaatgattcacgaatgggcccaacgatcttggtcttgtcccctactagggagttggccacacaaatccaagttgaagctctgaaatttggcaagtcatctaaaatttcgtgtgcgtgtttgtatggtggagcacccaagggtcctcagctgaaggaaatagaaagaggtgtagatattgttgttgcaactcccgggcgactgaatgatatccttgaaatgaagagaatcagtctgcatcaagtatcttaccttgtgctggacgaggcagatagaatgctggacatggggttcgaacctcagatcagaaaaattgtgaatgaggttcccactaagcgtcaaaccctcatgtacactgcaacatggccaaaggaggtgaggaaaatcgcagctgatcttcttgttaaccctgcccaggtcaatatt

SEQ ID NO: 128004 - DNA, 550 bp, Arabidopsis thaliana
gactcactatatggaaagctggcacgcctgcaggtaccggtccggaattcccgggtcgacccacgcgtccgctcttcttgttttctcattcttcttctaaaaaatcttgacaactttttgtttttgttttctttctctgaattttttaaagagagagagctatgtagctatgaaacagtgagagatatagatatagagagacagagaaagatgatgatcagtgaagttaggctaaacccactttctatttatgtataattaggtcaatcacatcaccaatctcctcctccaattctcctcctctccttccaaattctagggttttgcttgtatctcaccccctttctcaattccctagggaaactgtgaatttcatcaaattccattattttttggtcacacccttaaagagatctgagagttctaaagatgatgacagatttatctctcacgagagatgaagatgaagaagaagcaaagcccttagcagaagaagaaggagcgcgtgaagtagcagacagagagcacatgttcgacaaagttgtgactc

SEQ ID NO: 128005 - DNA, 203 bp, Arabidopsis thaliana
  unsure (1)..(203): unsure at all n locations
gggttaaacacgtcctgggtctgtgttcagtgttcttggtaaaccatttgcaggacatgaggttcctatatcatgtcctgagaatggaatctggaggtacagtttttgtctctcttaatgtaagaattctgtttaaatacggttcccctctcnnnnnnnnnnnnnnnnnnnnnnnnnnnnnnnnnnnnnnnnnnnnnnnnnnn

SEQ ID NO: 128006 - DNA, 902 bp, Arabidopsis thaliana
gtattaaagagttgggggataaccgcgccaggggtgttttttccccaagtccacaggatcggtttggtaaaaaaccgaccgggcccaagtggaaatttaaatttttaggggtggccacctaaaaaaaggaagcctattgacgttcggcatggcacggcgtaacgtaaagcttgggatccctctaaaacggcccgccccttttttttttttttttttttggtgacaaaaaaatctttttcttgatttaaaaattaaatatagcaatttcgagggaaatgtgtaggtaaactggtgattatggctcaatccccttcacaaggggggaataaacaacacaatcaccacatttttgcttcacaattcaactgaaaaaaaagaagaagcacaacagagcctgagaggccatagggttggataaggaataggagccgagacttagaaacatatttctctcgtccttcaacagtttttactaataagtctcaagatacagttcggccatagcttaacgatgcaaggtagagattctttccccatttttccttgacgtgtgtgctggggaattgagaggtacgtaacgtctcttgtgtctcatcaacaagtctacgacgtgggatgcttaggatgagagcagcttgatcggttgtggctgctgttgatgtgattctgaatccaccatcccaacgcctgtggatgccttcacttggatacagaaaatcaagttccacaacctgttcactgtagccagaattgcgggacataacaacaccccatcgatttccagctgttgccattgaggttacatggaagccttctctccatttcttgttcggacgcgtgggtcgacccgggaagtccggtgcgcggttaccttgcaaggccgtacccaaactttttcccct

SEQ ID NO: 128007 - DNA, 1033 bp, Arabidopsis thaliana
  unsure (1)..(1033): unsure at all n locations
cgccnnnnnnnnnnnnnnnnnnnnnnnnnnnnnnnnnnnnnnnnnnnnnnnnnnnnnnnnnnnnnnnnnnnnnnccacgcgtccgcggacgcgtgggcttggcttgtgaattcattaattcctgcgaaatggaacctcgaatcaatgaccttcaggtggaatctcgggttcatgagttgctcgattttccggttcatacaaaccagatatcctctgcaatctacgagtgtcccaacgaccacatcgaacaccctaagaagaaaccgtacaattgtccacactcaggagccaagtgtgatgtcacaggagatattcaaaggctactactgcatctaaggaatgatcacaatgttgaaatgagtgatgggcgtagtttcagtcacagatatgttcatcatgatcctaaacatcttcatcatgctacttggatgttaacacttctcgattgttgtggtcgaaaattctgcttgtacttcgaagcgtttcacctgaggaaaacaccaatgtacatggccttcatgcagtttatgggagatgaagaagaggcaatgagcttcagctatagtttgcaggtcggagggaatggcagaaagctgacatggcaaggcgtgccgaggagcattcgtgacagtcacaagacggttcgtgatagtcaagatggcttaatcatcactcgcaaattggctttgttcttctctaccgacaacaacaccaccgacaaggagctgaagttgaaggtttcaggtcgtgtatggagagaacagcctgtttcgatatgaattcgataattaggttacagaattggacaactatagaatatttggtgacaaaaatatcttttcttgatttaaaaattaaatatagcaatttcgagggaaatgtgtaggtaaactggtgattatggctcaatcccctccacaaggggggaataaacaacacaatcaccacaaaaaaaaaaaaaaaaaagnnnnnnnnnnnnnnnnnnnnnnnnnnnnnnnnnnnnnnnnnnnnnnnnnnnnnnnnnnnnnnnnnn

SEQ ID NO: 128008 - DNA, 660 bp, Arabidopsis thaliana
  unsure (1)..(660): unsure at all n locations
cgccnnnnnnnnnnnnnnnnnnnnnnnnnnnnnnnnnnnnnnnnnnnnnnnnnnnnnnnnnnnnnnnnnnnnnnccacgcgtccgcacagtcgctagatatgtctctctcgcttccatcttcttccgccgccgctgctgcggcgtcaacatcgggatcatcatcttctccggcggctgcttcgtcttcctcaacaaccacgtcatggttctccgggatcgttcgtggtcgtggtgataaatccggcaccgcgaagctatctaaaagctcttccatggctggaggaggaagcggaagcggagattacggtggaccaatcaaagggaagaatcaatttcgcggtgttttgttcaaatacggtcctaaatcaattcaggttgcttttaagaccggagagtataaacaacaagtgatatttatcggtggattaactgatggacttttagctactgattacttggaacctcttgcgattgctttggataaagagaaatggtcactcgttcaactactgatgcctccttcatatcctggatttggcacttccagcttgaaacaagatgcccaagaaatcgaccagctaataaccccccaccacaaaggaatctgaggggtgnccccctnggaaaancnggtgcaggaattggataattggganagc

SEQ ID NO: 128009 - DNA, 537 bp, Arabidopsis thaliana
caaatcacataataattaaagacttcttcttcttcttcttctctacaaattatctcactctcttcgtttttttttccttctcaacaatggcgacttcttctactttctcgtcactactaccttcaccaccagctcttctttccgaccaccgttctcctccaccatccatcagatactccttttctcccttaactactccaaaatcgtctcgtttgggtttcactgtaccggagaagagaaacctcgctgctaattcgtctctcgttgaagtatccattggcggagaaagtgacccaccaccatcatcatctggatcaggaggagacgacaagcaaattgcattactcaaactcaaattacttagtgtagtttcggggattaaacagaggacttgttggcgagtgttgatgatttagaaagagctgaagtggctgctaaagaacttgaaactgctgggggaccggttgatttaaccgatgatcttgataagcttcaagggaaatggaggctgttgtatagtagtgcgttctcttctcg

SEQ ID NO: 128010 - DNA, 766 bp, Arabidopsis thaliana
tccggaatcccggggtcgacccacgcgtcggacttccgatactttcaatctctctaaactctcaatttcagtaatcgataaccgtagcaatggaatccaccggaaaagtgaagaaagctttcggaggaagaaaaccacctggtgccccaaaaaccaaatcggtttcgaaatcgatgaaagccggtcttcaattcccagtgggaagaatcactcgtttcctgaagaaaggacgatacgctcagagacttggtggtggtgctccggtttacatggccgccgttcttgaatacctcgccgcagaagttctggagcttgctggtaacgctgcgagagataacaagaaatcaaggataattccgaggcatcttcttctcgcgataaggaacgatgaagaattggggaaacttctgagtggtgtcacaatcgctcacggtggtgttttgcctaacatcaactctgttctattgcctaagaagtctgccactaaaccagctgaagaaaaggctaccaaatcaccagtcaagtctccaaagaaagcttaatctgctagagttttcgttgctagtttgtgtttgagctctggtgaatgtagaaatttgaagcttttggatcttagtttctatgtatttggtgatttagaatgttgttcaaaatccttttcctaatcataagactttatgatctatctattatacgcttcgaaaaaacaaaaaaaaaaaaaaagggcggccgctctagaggatccaagcttacgtacgcgtgcatg

SEQ ID NO: 128011 - DNA, 442 bp, Arabidopsis thaliana
  unsure (1)..(442): unsure at all n locations
acttccgatactttcaatctctctaaactctcaatttcagtaatcgataaccgtagcaatggaatccaccggaaaagtgaagaaacgatttcggaggaagaaaaccacctggtgccccaaaaaccaaatcggtttcgaaatcgatgacagccggtcttcaattcccggtgggacggaatcactcgtttcctgaagaaaggacgatacgctcagagacttggtggtggtgctccggtttacatggccgccgttcttgaatacctcgccgcagaagttctggagcttgcctggtaacgctgcgagagattacaaaggaatcaagggataatttccgaggcatctttcttcttcgccggtaagggaccgtttgaggaattggggggaactcctctggtgggtttcataaatcggttcncggggggttttttnncnaaaaaanaac

SEQ ID NO: 128012 - DNA, 468 bp, Arabidopsis thaliana
  unsure (1)..(468): unsure at all n locations
tgcagtaccggtccggattccccggntcgaccccncgcgtccngaggntaattccgaggcatcttcttctcgcgataaggaacgatgaagaattggggaaacttctgagtggtgtcacaatcgctcacggtggtgttttgcctaacatcaactctgttctattgcctaagaagtctgccactaaaccagctgaagaaaaggctaccaaatcaccagtcaagtctccaaagaaagcttaatctgctagagttttcgttgctagtttgtgtttgagctctggtgaatgtagaaatttgaagcttttggatcttagtttctatgtatttggtgatttagaatgttgttcaaaatccttttcctaatcataagaatttatgatctatctattatacgcttcgtctaatcttttggtccactcgtcgtaatgtcattagtgaatatttaataaacaactttgtcatcgacatt

SEQ ID NO: 128013 - DNA, 904 bp, Arabidopsis thaliana
aggctacgcgagctctatacgacttacttagggaaagctggtacgcctgcaggtaccggtccggaattcccgggtcgagccacgcgtccgattactagttcctttctgatctcttcttcatgcggtttatgtttcatcgagtttgaatatttctttgattctctgtttgatgattgctagttcttttagaagagcaatgagttattctggagccggactcggaaagcctggctcaggtaaaaggagaataagggatcttttaactcaatctgataaccgagtctgcgctgattgtggcgctccagatcctaagtgggcgtcagctaatattggagtgtttatatgcttaaaatgttgtggtgtccacagaagccttggcagtcatatctcaaaggtcttatccgtgacattggatgaatggtcagatgaagaagtcgattcgatgattgaattgggggaatggccttgaaattaatttacaagggtttttcctgaaggtacttaagcctgacctggtgctttttgacaccggttggggtattaggcaaattgaccccagagttttgaaccaggttgggtcacttggggggggttaataaaacccagctttttttttgggtttttaaaagatgggtggttcgcctatttttatccaccaccgaattgaggctggtgatttttggttggaaggactttataggggcctttgcctccgatttgggcgggaccctgtggggctcaggacagaggtcattttggtggagacactacctttggaggggacacgtttgtcctaattgggaggaaggaggtgtcttacttgttggtgaagggagagggtgttccccttacctggggtttgcccatggggattgatgaggggatcccactttaaacccccggg

SEQ ID NO: 128014 - DNA, 343 bp, Arabidopsis thaliana
gtcttttcagacaattatttgttcatcttgaatttgtgtcccaagaacatatctctctctctctctctcctcaccttggattctctgtttgatgattgctagttctttagaagagcaatgagttattctggagccggactcggcaaccgcctggctcaggtaaaaggagaataagggatcttttaactcaatctgataaccgactctgcgctgattgtggcgctccagatcctaagtgggcgtcagctaaatattggcggtgtctatatgcttaaaaatgttgtgggtgtccacagaaggccgtggcaggcaatatctctaaggtctacgtgacatgatgatg

SEQ ID NO: 128015 - DNA, 732 bp, Arabidopsis thaliana
  unsure (1)..(732): unsure at all n locations
gnnnnnnnnnnnnnnnnnnnnnnnnnnnnnnnnnnnnnnnnnnnnnnnnnnnnnnnnnnnnnnnnccacgcgtccgcggacgcgtgggcaaaatattatccaatttgtctccatccttccgttttttttttccattaccgtacgccgaagaatctgccccaagaagtttaaaggtattgatggaacaaccgaggaacaacaagacctctcaagaacaagctcgtgaatcgctcatcgaaatctcctacacttcacccgaggaagacgaggttataacctactcagatgtgaagcctgtcacctatatctcaaacggaagtgccaaaggaaacaaagatgatgcggagaagctcagagatgagctgatttcgatatcctacgacgagtcaccgtcgccttcaccggatgtggatgtagctgtttcgccgaccctgccgaacggtgtatgtcgtggataggaaagttaatgtaccgcttgaagaagtcttccctttcatatgcaaaagacttttggtttggtctaaaagttgaccattgttatatgttaacgtttcttccttaactatatgattgaaaatcaatgaagtttcttttattgtgtgcttgtttgacctgtcttatataaagttaaaagctaaaaaaaaaaaccaaaagggcgaccgctctagaggatccaagcttacgtacgcgtgcaggcgacgtcataactcttctatagtgtgtacctaaaaa

SEQ ID NO: 128016 - DNA, 609 bp, Arabidopsis thaliana
  unsure (1)..(609): unsure at all n locations
tgcnnnnnnnnnnnnnnnnnnnnnnnnnnnnnnnnnnnnnnnnnnnnnnnnnnnnnnnnnnnnnnnnnnnnnnnnnnnnccacgcgtccgcggacgcgtccgcccacgcgtccgcacaaatctgcaaatcttcttcttcttctgtcttcatgaatttcaagtctaacaattcctagccgtttacaatttgacggcacaattcttcattccttgtcgtgcccggaagtaaaaagatgatctttttggtttctgatgagataaaacagagatcttgttaacacttataagcagacccaactcgggaagctatggccgctattcgttttgcggcggcgattctgatttgctgtttattaccggcggcggttttgtcttacggtttcccggcggcgttgaaacttgaaagagttattccagcgaatcacgaaatggaacttagtcagctcaaggctcgtgatgaagctagacacggcagattgttacagtctttaggtggagtcatagattttcccgtggacggaacttttgatcctttcgttgttggactgtactacacgaaactacgattaggaactcctccaagagatttttatgtacaggttgatacag

SEQ ID NO: 128017 - DNA, 527 bp, Arabidopsis thaliana
  unsure (1)..(527): unsure at all n locations
gccggcannnnnnnnnnnnnnnnnnnnnnnnnnnnnnnnnnnnnnnnnnnnnnnnnnnnnnnnnnnnnnnnnnccacgcgttcgctgattataaaatcagattctagactaattaagaagaacaggcaaaacgaatttgctattggcccgttggaaaaaaataatcggatatggatgctctcaaggttcagattctacctgataaccaatcatcaccttcgtccacgcacatgctcactaagcccaagtcgaaaaaagcgacaaaatcgattgccatgctaatcgtcgcttccttggctatcacgttagggttattatttgttttcagttcaaattcagttatgttctctgcaagttttcttcggagaagttcacttcactacagcgtcattatcgatgccgggagttcggggacccgaattcatgtgttcgggtactggtttgagtctggaaaacccgttttcgatttcggagaagaacattacgctagtctgaaggtgagtcctggtttgtcttcgtatgctgat

SEQ ID NO: 128018 - DNA, 590 bp, Arabidopsis thaliana
  unsure (1)..(590): unsure at all n locations
ccggcannnnnnnnnnnnnnnnnnnnnnnnnnnnnnnnnnnnnnnnnnnnnnnnnnnnnnnnnnnnnnnnnnccacgcgtccgctcacattcaaaacactattcgcgaatctaatctctaacaacaataaacctcgcttgaagaagagtgtgatcgagccgatcaacggctctgattcatcagattctggtcgtcttcatcatgaacctgtgattacttcctcacgaagcaacgagaaccctaaatctgatcttgaagaagaagatgaaaaacagagcatgaactctgttttagatgttcaatgggctcaggggaaagcaggggaggatcgtgtacacgtggttgtatctgaagacaacggatgggtctttgtcggaatctatgacggattcagtggtccagatgcgccggattatctcctcaacaatctttacaccgccgtgcaaaaggagctcaatggggttactttggaaacgacgaaaagcttagatctttaggagaaaacggcatgaccaaaaccggaaaatgttctgatgaggaagatcccgagtcaggaaaagagaattgtcccgtgataaacaatgatgatg

SEQ ID NO: 128019 - DNA, 385 bp, Arabidopsis thaliana
cacacgcgtccgcccacgcgtccggaaagtcgaagcttcacgatcgtataataatggcgacggcttcagttgcttttaagtctagggaagaccataggaagcaaattgaattagaggaagctcgtaaagccgggcttgctccagctgaggttgatgaggatggaaaggaaattaatcctcatattccgcagtatatgtcatctgctccatggtatcttaattctgaaaaaccgagtttgaagcatcaaaggaaatggaagagtgatcccaattacactaagtcgtggtatgatagaggtgcaaagatctttcaagctgaaaaataccgcaagggagcgtgtcaaaactgtggtgcaatgacgcatactgctaaagcttgtatgga

SEQ ID NO: 128020 - DNA, 627 bp, Arabidopsis thaliana
  unsure (1)..(627): unsure at all n locations
actctcagctactttttccccaattttgagctcaacatcgaaccctagctcaacgaaccaatcatgtcttccaagcaaggaggaaaggcgaaacctttgaagcagcctaaagctgataagaaggaatacgacgagactgacttagctaacattcagaagaagaaagatgaggaaaaggcccttaaagagcttagagccaaggcatcgcagaagggatcctttggaggttctggacttaagaagagtggcaagaaatgatccgttttatccatgaagtgtgttttaaaatgcaaatttatcaagtgaaaaaaacagataatcctgtgttgatgtaactttttatcataattcgagaagagtaacttcgcttctccaaaaaaaaaaaaaaaanaaaaaaaaaaaaanaaaaaaataaaaaaaataaaacataaaaaaaacaaaaaaaaaaaaaaaaaaaataatctataaaaaaacggggggggccgttttaagggatccaagtttacttccgcgtgcttgcaacgttatagttcttttatggggtcccctaaattaaattcactgcccgccgtttaacaccgtggggacgggaaaacccctggggttccccatcttaatcgctttgaa

SEQ ID NO: 128021 - DNA, 808 bp, Arabidopsis thaliana
ggaaaagccaaagttggggaggaaaatggcctggggggtgtttttgtggaatgggacacttgtgggcgggaacctttgaccatgagggtttttgtgactcctgcaaatttggattcagctgtggaaaatagaaacttgcattcagacggattgttcaaaagtggcttgccagaagaacttcagtcaaattctttgctcagcgggacggggaagctggacgatggagctagcagcaggaggttgagcttgaagtccgtagcgtgagcgaggtctccgcaattgaaatgagaacaggaagtcaagaaaaaggaaaataaaaaataaataacaagaatcagagcaaccctagtgtgtttgctttggacgaccgacagcttcagaactcgaaactattggtaagttcacctaaatatgaaaactaaaagcttaaaaaggaaaaaaaaaaagttctaaaagagaaaagaaaaaagaaagattaacaaacattcaaatgatttacttgttggattcttggtgggattgtgagtatccaaactctgggaagaatgaggcatgaataacgagtttgggacacaaaagacatgcattgttcgatattatggtccaggtgaaatgtggagctgtgctagttcaatgcttttgctgagagagattccaaatttaaaagaaaggaaccagtgagatccccatagaaccaggccagtggtatggttttggttgcctaatcaaggtaattcaagcctggttttggtatataaaatgcttggggcccgggatttgagatcaagcttatcgataccgtcgactg

SEQ ID NO: 128022 - DNA, 637 bp, Arabidopsis thaliana
atgatacgccggctctaatacgacttacttagggaaagctggtacgcctgcaggtaccggtccggaattctccgggtcgacccacgcgtccgccaattctttcataacaaaacactgctcttccttctctccgccgccgcatcgttaaatctctccgtcatctgtaaccggttaaagtatttccctcaggtcgacctgaaaacgatgggcaaacgaggaccgaagaagcttacaaacactcaaggaggaggaggacctaatctcaaatctgtactgagacatgagcacttgaagaatctcgctctctggtcttccaccggagatactcctatcccgtctcttgcttcattactcggtcgacgtctcgctgccgacactgaatccaccggaatcactactgatcccgatctcgtctcttgtcaaaggtgtgagaccattcttaagcctggattcaattgcaatgttagaatagagaaggtttctgctaatgtgaagaagaaacgtaataggtgcaagaagtctaacaacatctgtttccctcagaacaatgtagtttaccattgcaatttctgttctcaccggaaccttaagagaggtactgctaaaggtcagatgaaagagctttacccgttcaagc

SEQ ID NO: 128023 - DNA, 1009 bp, Arabidopsis thaliana
  unsure (1)..(1009): unsure at all n locations
ctaatacgactctcttagggaaacctggtacgcctgcaggtaccggtccggaatttccgggtcgacccacgcgtccgcggacgcgtgggcggcgattagcaaaggcggtggttcgatagagagaggaagagattgaagcgattttcactcagttttcatcagatcgtctcggtgattctagggttcattggtctcgttttgttcggtgactgcttgagtttcacgtttttggtttcgatttcttatgggagattcctcggtttcgacaagttcatgggctgtcattgaatctgctaataggtttcagtggtaggaaacttttgggtctgtttctagttgtgaattgaatagactacaagaagtaagcagaactgaatgtgcattccttttgtttttattgacaattgtgagttaacatgttcaggtgtcgagcgttatgggtgagtcctctggatcaagcagttcattggctgctataaattcgtctcaccattgggtttcagctcctaaagaagcatggctggagggaaggcccctggtcttggaatcgctgaaccaggggtttattggggcccttttccagcagaagcccaaaaccataacaanncgggggagtgggaagctaaaccacccagcttaaaaagaaaaatgggctcaccccccagcctaaggatgaagaagtctcaaagcagagtaagaaactttcgaagaaaatgcggaagatgatggagcccgaaaaacatttccaggaaaaagaatttgaacgagccttctttagggagttctggccccgataatgtaaaactaggttttattcttttacttcttattgacctgaatgttccaaaagcttctgtatttactgcaaatttagaataactctgttttattgccttaaaaaaaaaaaaaaaaaaaaaaaaaaaaaaaaaaaaaaaaaaaaaaagggcggccgctactagaggatccaagcttacgtacgcgtgcatgcgacgtcatagctatctatagt

SEQ ID NO: 128024 - DNA, 935 bp, Arabidopsis thaliana
  unsure (1)..(935): unsure at all n locations
ctaatacgacttacttagggaaagctggtacgcctgcaggtaccggtccggaatttccgggtcgacccacgcgtccgcccacgcgtccggcagtattcaaacaaataaaatatactgctttagctttggacacctcctcttactaatctctataactatatttaaaaagtagaaaataatggcacgtctatttgtcgtagttgcccttttggctttggccgtgggcaccgtattcgccgccgatgcaccttcagctgcacccaccgcctcaccaaccaaatccccaaccaaggctcctgccgctgcacccaaatcctccgccgccgcaccgaaagcatcatcccctgttgctgaggaacccacccctgaagacgactactctgcagccagccccagtgactccgccgaggcacccaccgtctcctccccacccgctcctacccccgaagccgatggtccctcctccgacggaccctcatctgatggacccgccgccgccgagtcacccaaaagtggcgccacgactaatgtgaagctctccatcgccggcactgtcgccgccgccggattcttcatcttctctctctaagttttgttttttaattaaacttgagacggaatcataagattcccattatgagatgaggccgtatctctttaactaactaactatactatatacagtgatttatattaatcaagagattgaatggagttattattattacgtaccgttgttgtactatgttttttttgattacgtaatttttgatgattgtgaacttattaatgtttatttagaaattaaatgaaaaacaaatttttccaaaaaaaaaaaaaaaaaaaaaaaaaaaaagnnnnnnnnnnnnnnnnnnnnnnnnnnnnnnnnnnnnnnnnnnnnnnnnnnnnnnnnnnnnnnnnnncgtctctcaatt

SEQ ID NO: 128025 - DNA, 707 bp, Arabidopsis thaliana
  unsure (1)..(707): unsure at all n locations
agaagaatgatatgttaaagaagggtgttgatgaaggaagatggtccgagaagtttgtttccagaatcgagtttaaaggggacatggttgtggcgactccagatatcttccaagtacctctgacatctgatgtggaattcattattttagcttctgatggattatgggactacatgaagagctcagatgtggttagttatgttagggatcagctccggaaacatgggaatgtgcagcttgcttgtgaatctcttgcgcaagtagctttggaccggcgatctcaggacaacattagcatcattattgctgatctaggaagaacagagtggaagaatctccccgcgcagcgacaaaacgtactggttgaactggttcaggctgcaacgactatcggtttagttactgttggcatatggaggtcttcacatctatcttaagtgaattgaacattctatctctttcgtcaggggatataaaacctggaactatgtctaaccctctagtcttcccatagaaatggagatatgaagatccctcccaaacagaaccagctttatattattaaaaatccccctttccccnnnnnnnnnnnnnnnnnnnnnnnnnnnnnnnnnnnnnnnnnnnnnnnnnnnnnnnnnnnnnnnnnnnnnnnnnnnnnnnnnnnnnnnnnnnnnnnnnnnnnnnnnnnnnnnnnnnnnnnnnnnnnn

SEQ ID NO: 128026 - DNA, 350 bp, Arabidopsis thaliana
ttaataaatttcttttttttggacgttttgttgatgctagccgcgactactaagcacgcctgagggaggaaccaattattgcgttcagtggagaggaaggcaatggtcggcacttggacttgcatgatatgtataaccagtacatcaactctaaatttggggaaagggttgaatattctgcttaccttgatgttttttctcaaccagagaaaataccgcgtaaactgaagttatcgaggcaatacatgaagtatatggaagctttatttgagtacctggtctactttcttcagcgaaccgagcctttgcatgatcttgaccggatactttctaaggcttgttctgatttt

SEQ ID NO: 128027 - DNA, 555 bp, Arabidopsis thaliana
  unsure (1)..(555): unsure at all n locations
tnattttggncccccgaccttnccataatnncctgnccggcattattggaacntttcngancagngaaatntgtggngtttggcctctgccctcccgtggtgattcancttatgtttcgacccattgccgctctcgtggcggcttggcttccgggaacagaaggtcaaggagtggctgatgctctgtttggtgattacgggttcacaggaaagttggcccggacgtggtttaagtcggtgaagcagctaccgatgaatgttggagatcggcattacgacccattgtacccattcggtttcgggttgaccacaaaaccatacaaaatgtagacttccttttagttattcggcaaggagaggacaatattaagggacaaaacgaaataacttcgatgcacaattttgtgggttctagctctcaagttaaggttgaggctttgagattgtctgtctacaaaactagtatgttataaacagtgatgatatgaatcatcttttgttattttcccgttaataaatttttacttttttattatatttttatatattttatta

SEQ ID NO: 128028 - DNA, 410 bp, Arabidopsis thaliana
gaggagagacaaagaaggatgagtatgttgtcagggaaagctgcttacgatctctttgtctatggcagtctccaggaacccgaagtcgtatacgtgcttcttaatcgcgtccctgaccatgtctccgccgtactctccggctttcacaggtttagactcaaaggccgtgtctatccaacaattctaccggacggtaccggaaaagtcaacggaaaggtgctaaagggcataacagatgatgaactgaagatgttagatgagtttgaagatgttgaatatgacagaaagactgttgaagtaatgctgacggatacttcagagaagctgcaagtcgaaacatatgtatggaagaacaaagatgatccggatctttatggagaatgggatttcgaggaatggagacaacatga

SEQ ID NO: 128029 - DNA, 816 bp, Arabidopsis thaliana
atccataagctccctatcgaattcgcggccgcggcgattcgaggagttcccatggtggaacagaataccctagagcctttatgctgccactaattatcactcttcactattgaattggggatggactcagagaaaatcctcaatccaagacttgtttcgattaatagcaccagccgcaaaggtatgtccgttgagttgccgcaaaaaccgccgccaccgccgtcgttgttagaccggtttaaagctttgcttaatcagcgtgaagatgagttcggtggtggtgaagaggttttgcctccgagtatggatgagattgttcagctttatgaggttgttttgggtgagcttactttcaattctaagcctattatcactgatctcactattatcgctggtgaacaacggtaacatggtgaaggaatcgataatgctatttgccactcgaatccttgaggctcctgttgagcacaagttgccatctctgtatcttttaaacagcattgtttaaaacattgggcgggaatatggtcgctatttttcatcccggccaccccgagggccttctggccttgccatatatggcaagccaccatatcgaggtttaaccattccgttcaaatgccgttcacccttggttttgggggactctggggtccgcaaggtgtttttttctcccacccccccccttggttacccttaccccccaagagaatattgaattcatatggcacacaatatgccacatactcttcttcacatttttggccaagcgcaaaatacccccaaatacattattccggttataggggggccctc

SEQ ID NO: 128030 - DNA, 451 bp, Arabidopsis thaliana
  unsure (1)..(451): unsure at all n locations
atttccgatataatctgatcaaatcatcgccgacgatcaccgattcagcgatgcaacagggagattacagttcgtactatcaccaccaatactctcaatttcaaaatcctactccgaatcctaatcctaatcccaatccttctccgccggcgccggcaaccgtagctggtccgaccgatcttactcgaaacacgtacgcatcagcgccaccgttcaccggcggttacggttccgccgattactctaactattcacagaattacactccttacgggcaaaactntgngcatgtccctccttcagctccttccttcacttnaccatcanaaccttcttcttntccgccggcggcatcactaaaccctaatttttattcaacctttnaacccaancaccaaccttcanccanggttnattcnnaanccttttttccttttatggntcaatttng

SEQ ID NO: 128031 - DNA, 440 bp, Arabidopsis thaliana
cccacgcgtccgaaagaagatggtcggttgagctatttttgcttctcccgacaaaattctcaggatccgaatacttccaccatcagtgcattcatttataagatctgggttttacacagctctgcgagtacagtaactatgagaaggagaggaggggatagtttccggagagctggacggaggaagatctcgaatgtggtatggtgggttctctctggtattgccctccggctcttctttctcattctctccaaagctggtcatattgaacctagaccctctattcctaagcgacgttaccgtaatgacaaatttgtagagggtatgaatatgactgaggaaatgttgagtcctacttacgttgctcgtcaagttaatgatcagattgctcttgctaaagcttttgtagtcattgctaaagaaaggaagaatcttcagtt

SEQ ID NO: 128032 - DNA, 855 bp, Arabidopsis thaliana
  unsure (1)..(855): unsure at all n locations
atgattctccagctctctacgactcactattgggaaagctggtccgcctgcaggtaccggtccggaattcccgggtcgacccacgcgtccgcattgacacgatcattaccagcattggctccaactacgaagcttgggcggttgatttctcctcattcgtggtcgactcgagagactctctctcggtccaaaggttcgagaagtcccttaagaagatgaagcccgagacagctcttgccttagctaagatagtgtttggtagcgacgagagagagattttgggacaagtgtcagtgccttgccatgtcatacaaccaggaaacgacgtcgtagtgcctgtctccgtcgcatacttcatgcaggagaagattaaggggaaatcgacagtggagatcatcgaggacgcgatcgggcattttccacagatgacatcacatttggagctgcttggcgtcatgaggcgcctccttgagttttaaggcttatataagagctttgcgtcgtttgatcgagtttcttcttgtctataatatcgtattactaatataacgaagtgggtctattagaatttttcatatatgtttgtgtaatgtgaatgtgttattatattcttagcacaatgattttcatttttagtgttttttttttaaacataggattgaaagtaatatgttataagtttctttatatcacactgtcaaattttttatttcttacgataattttgttgttgttgaataaaacattccaagaaaaagccnnnnnnnnnnnnnnnnnnnnnnnnnnnnnnnnnnnnnnnnnnnnnnnnnnnnnnnnnnnnnnnnnnnnnnnnnnnnnnnnnnnnnnnnnnnnnnn

SEQ ID NO: 128033 - DNA, 675 bp, Arabidopsis thaliana
  unsure (1)..(675): unsure at all n locations
cnnnnnnnnnnnnnnnnnnnnnnnnnnnnnnnnnnnnnnnnnnnnnnnnnnnnnnnnnnnnnnnnnnnnnnnccacgcgtccgtgcgtttgctgtatttgaagatatggtaaaagaaggcatgaaaccagatgttatactatacaacaacatcatctcagcattctgcgggatgggtaacatggatcgagcgatccagactgttaaggagatgcaaaagctgaggcatagaccaaccacacggacatttatgcctatcatacatggatatgcgaaatccggagacatgaggagatcactagaagtttttgatatgatgagacgatgtgggtgtgttccaaccgttcatactttcaatggtttgattaatggtttagttgagaaacgtcagatggaaaaggcggttgagatattagacgagatgacattggcgggtgtaagtgcaaacgaacatacttacacaaagatcatgcaaggctatgcatcagtcggtgataccggaaaagcctttgagtattttacaaggctggaaaacgaaggtttggatgttgacattttcacttacgaggcgttacttaaagcgtgctgcaaatcaggaagaatgcagagcgcattagctgtcacgaaagaaatgcgtgcacggaatatcccgcgcaattccttcgtctataacata

SEQ ID NO: 128034 - DNA, 998 bp, Arabidopsis thaliana
  unsure (1)..(998): unsure at all n locations
nnnnnnnnnnnnnnnnnnnnnnnnnnnnnnnnnnnnnnnnnnnnnnnnnnnnnnnnnnnnnnnnnnnnnnnnnnnnnnnnnnnccacgcgtccgaacgctgcaaggcctaacccccaaggctcataccattacggaaagatcaacattacccgtagcatcaagcttgtcaactctaaaagtgtggttgacggtaaagtccggtttggtttcaatggtgtatcacacgttgacaccgagactcctttgaagcttgctgagtacttccaaatgtcagagaaggttttcaagtacaatgtgatcaaggacgagcctgcagccaaaatcacagcattgactgtacaacctaatgttctcaacatcactttccgtacctttgtagagatcattttcgagaaccacgagaagaccatgcagtcatttcatttggatggctactccttcttcgctgtcgcttctgagccagggaggtggacacctgaaaagagagagaactacaacttgctcgatgcggttagcagacacaccgtgcaagtctaccccaagtcttggtcagctatccttttgacattcgacaacgccggtatgtggaacatcaggtctgagaacttggagaggaaatacctaggcgagcaattgtatgtcagtgttctatcaccggagaaatcgctaagggacgagtacaacatccccctcaacacaaacctctgtggcatcgtcaagggcttgccattacctgcacactactcctaaatcaatattcaattaactactactctacaaagtggggtgcaatattaaattaactaattaaccctttcctaaattttaagtgtaatttgtaaaccccttctttcatatactatcattaaaccataatcatataccaagttttgctttcaaaaaaaaaaaaaaagaaaagnnnnnnnnnnnnnnnnnnnnnnnnnnnnnnnnnnnnnnnnnnnnnnnnnnnnnnnnnnnnnnnnnncgtctataaatc

SEQ ID NO: 128035 - DNA, 421 bp, Arabidopsis thaliana
cggaaacatttctttcttctttcttcttcttctcacgatcggtcaataacttgctcataacagtttcgaaatcctctgcttcatcatttgaacttcgatttaagggttcttgaatcttcgaataaaaatctcacctttaaatgggaaagccaacggcgaagaagagaaatccggagacgccaaaagatgcttccggcggcggcggcggcggtggaggccggtcagggaaaacttaccatcgttctacttcgagggtatttgacgaagatacggagattttcattagcagagcacttgagctcaaagaagaaggtaacaagttgttccagaaacgcgaccacgaaggtgcgatgttgagtttcgacaaagccttgaagctcttgcccaaagatcatatcgatgtagcttatcttagaacgag

SEQ ID NO: 128036 - DNA, 472 bp, Arabidopsis thaliana
ctccgccgaaatttatccttcatcggcgttgtcttttcgctggatttctcaaagccctagctgaagaatctctgaacaagtggaaatgccgttttggtggccactgatcgtcctcgccttcgcttacgcgatctgcaagttccttcttatgctcattcctcccaatgttccttccattgacgttgacgcatccgatgtgttggctcatgggaaagatacggaggagaatagcttcatctatattcctcccagaggaaggagccaacagtctgacaaaaaagttcaatgttatgaacctgccacaatgaaatatctgggatatttccctgctctgtcgcctactgaggtcgaggagcgcgtaacactatcaaggaaggctcaaaagacatgggctcaaagtagctttcaagcttagaaggcagttcttgcggattcttcttaagtacattattgaacaccaagagcttatatg

SEQ ID NO: 128037 - DNA, 573 bp, Arabidopsis thaliana
  unsure (1)..(573): unsure at all n locations
gcgtccgcaacgagaaaataaaaaacgcaccgccggtaacaattttccggcgaatctgaaaactaacgatttttctcgagtttggtagagaaagagaaagagattgattcgttcctggttcgtggatcgaatagagaagaagaaagagtaagtgcaacagaatcaatggtatttcccggtgagatgacgacgacgacaacgagacctgagcaacgatcgaagactcttcacaatttccctctcccgaacttatgggggaatcagagacaactcaagtgcacgaagatcgactctatcagcaacaacaacaacaacggaggaggtcccggcggcgatcaccgactacgacgccgatcttccgcctctggaattcgctgattctcccgtttcgatgccgtttcgattcggtaactccgatcatcgccgaccgtttaaatcgggaagcgaagaagggttcnaaggggttaagggttaagnttnttttcngacnttaaggcggggcaagntnaggtnccaaaattgntttttanaaangggtacccnaggggnggggcaaattgcgggtttgtttgg

SEQ ID NO: 128038 - DNA, 511 bp, Arabidopsis thaliana
  unsure (1)..(511): unsure at all n locations
cccacgcgtccgaaagagaagaacaaaacatcatcatatattctattgactagattaatttcttctaagtgcaaaagaggagaaatggagtcaatgaagatgaagctcatagtggtgttgatggtggctattgtggctttctccgccgtaggaaacgtggctgcgcagacagaggctccggctccaagtcctacttccgatgctgctatgtttgtcccggcattgtttgcatctgttgctgctttggcatcagggtttctcttctaaaccaatctccacatttcattgagttaggttctaaattgttttgccttttactttcgtttatgtcttatggcatgagctttttgttatttgtttctaatatttggactactatgtgttgtgtgtatatgattcataattaatactatatttaatggggttgataaaaaaaaaaaagggggggccncnnntggggggncccccggttcngaccgggnnnattnggcggcaaaagccctctannggg

SEQ ID NO: 128039 - DNA, 560 bp, Arabidopsis thaliana
  unsure (1)..(560): unsure at all n locations
atgatactccagctctcnnnnnnnnnnnnnnnnnnnnnnnnnnnnnnnnnnnnnnnnnnnnnnnnnnnnnnnnnnnnnnnccacgcgtccgcgtttctcttggcagttttttttgttgtttgaagatggtgtcacatgaagagaacacaagtattgtggaatggtttcttggtccacatccatacacgtatccgccttatggtattgagatgattcatgaggatgatgaagtagcagtagctcatcagcatcatcatcaccagagcggtgagtattacagagagtatgaagatcatcgtagtagcgatgtagataacgatgagatcattgctagaactctccaagacgattttttgcagcttgaaatcgcaggaagtaacgattattcgcatcagaatcaacaacaacaacatcaacaagaaggttatactaacaactatagtaataacaacaatggttatgcttggaatgatcagtctcctgctgtggattattcttcagaatggataggaaatgataatgatcaagatgggaggagcgatgattcggttaatgtcttt

SEQ ID NO: 128040 - DNA, 705 bp, Arabidopsis thaliana
  unsure (1)..(705): unsure at all n locations
gaaaagtaaaggaccctnntnaaatccggtangnnccgtcagaaccattctngtnagaccgcgatccggtcancantggacccnacgacagtnattattgtcatcagtggactgtggaacattgagcaaccaagaagcagtagccatagtccagaatcatccgcgaaacgggatagcaaagcggctggtgaaagtagcgctacaagaagcggcaaagaagagagagatgagatactcagacctgaaaaagatagacagaggagtgaggagacatttccacgatgacataacagtgattgttgtcttctttgatacaaacctagtgagcagaggaagtatgttgagaggaccagccgtgtcagtgagaggagcgggtgtgaatctacctcacaacaccctggcgccttgcaccacgcccactcaagctgctgctgtggcgcctcctgactattgaatttttacggtgtccttaaaattctttccaagatccttcctgtaactatatataaatatatatatttgattattattatcattgactgggaaaggatatatcatcatcaagtgggaaaggatatatcataatcaagtggttagttttgtttgttccctttgttagctgtgtactggagaaagaaaggtgacaagaattcttcttcttcttcattaattttcattgcttgctttttaaggtattactgattc

SEQ ID NO: 128041 - DNA, 582 bp, Arabidopsis thaliana
  unsure (1)..(582): unsure at all n locations
nnnnnnnnnnnnnnnnnnnnnnnnnnnnnnnnnnnnnnnnnnnnnnnnnnnnnnnnnnnnnnnnnnnnnnnnnnnnnnnnnnnccacgcgtccggtcagattgatcaggcttgtcaagtttttgaagatatgaagaagaggcattgtagaagagatgagtatacttacacgattatgatcaggactatggggaggattgggaagtgtgatgaagctgttggtttatttaatgagatgattactgaagggcttacgcttaatgttgttggttataatactttgatgcaagttcttgcgaaaggcaaaatggttgataaggcgattcaggttttctctagaatggtggaaacgggttgtcggccgaatgagtatacgtatagtcttcttttgaatcttttagttgctgaaggtcagcttgtgaggttagatggagttgtggagatttcgaaaaggtatatgactcaggggatatattcttatttggttagaacgttgagcaagttagggcatgtaagtgaggctcacaggctgttttgtgatatgtggagcttccctgtgaaaggagagagagatagttacatg

SEQ ID NO: 128042 - DNA, 442 bp, Arabidopsis thaliana
aacaaaacaaaactaaacaagaaacagaggagaaaaaagggaaacgacgaggaaaaacaaaaacaaaataaaaacaagcctcgttcttcccttttctctcttcaaatcttttcttttacatattttcttttcttttttttgtctttaatacaaatttactaactaatcagaataaaaatgggttcgagtaagtttaaacgagccataggagccgtaaaggaccaaaccagcgtcggtctagccaaagtcaatggtcgaagcgcttctttatctgaacttgacgtagccatcgtcaaagccactcgtcacgaagagtttccagcagaagagaaatacattagagagattcttagcctaacttcttactcacgcagttacatcaacgcttgcgttagcacgctttcgagacgccttaataaaaccaaatgctggaccgttgccc

SEQ ID NO: 128043 - DNA, 636 bp, Arabidopsis thaliana
tgatacgccggacctatacgacttacttagggaaagctggtacgcctgcaggtaccggtccggaattcccgggtcgacccacgcgtccgcggacgcgtgggaaactcttccccaaaaatttgcaaattcaacgactcgtctcggcgatgatggaacgaacctacggccgccgtaagccggggattccgaggaccctatcggactctctaaacgactctgtttctcagactgagtatctctcttcctcttcgtcgccggacatcgagcccattgattactctctccttcctttctccagtcaagagtcttcctctctctggcattcttcttccaggtcaaatttcagagaggattatccacagaacggaggtgttgtacggagggcgaaaagagtcaggaacggtgctgaggctgctgcttttacttccactttgcttgaggctcaggagtttggtgagctgatggagcatgaggatgaggttaactttgcgcttgatgggttgaggaaaggacaccagctcaggatcagaagagctagcttgtcctctctattgtcgatttgtgcatctcaacaccagcgtcgctccttgagggctcaagggatttcccaatccataattgatgcgattttgggtc

SEQ ID NO: 128044 - DNA, 610 bp, Arabidopsis thaliana
  unsure (1)..(610): unsure at all n locations
atgctacgcgcgnnnnnnnnnnnnnnnnnnnnnnnnnnnnnnnnnnnnnnnnnnnnnnnnnnnnnnnnnnnnnnnnnnnnnnnccacgcgtccgcccacgcgtccgaaagcaggaaagaagcatatcaactttgttaaatcttgcctagcatttagcgaagtgaccatcccatctatttcatctcccacgaaacacttaaatctttatcttgaaactgctgaggttgcacttttaggtggtttgatttctcattcagatgaactggtcatgtcagctgttgagtatctagagaatgtagtgctgacagatggtttaaaatcaattgatatagatagtatggcctcggttatatgcaaattgtgcagcctcttggtaatgatcccaggtaatcccgagaaaggcgtgatggagatccttaaaagtatcttctctgctactcgctctagttcatgggcaacactgagagtaaaggtgaagattttctgtgctataatgtcactgttgtcgacactttctcaggacaatctgccttaccattctgccaatccagagataattggaaatgaattgctgttctttggtgattcatcatacaagcaggaacttgtc

SEQ ID NO: 128045 - DNA, 742 bp, Arabidopsis thaliana
  unsure (1)..(742): unsure at all n locations
atgctacgcgnnnnnnnnnnnnnnnnnnnnnnnnnnnnnnnnnnnnnnnnnnnnnnnnnnnnnnnnnnnnnnnnnnnnnnccacgcgtccgggatctacacctctcctcagtctcatactcaaatcaataatccaaaccccaaaaaaaagaaaaccagagaagagagtttaaaaaatgagaggttcttgcaaagtctctatagttcttcttctggttttaatcaatggtgtgcttggagataacccttatagattcttcacctggaaaattacttatggcgacatttatccccttggtgttaaacaacagggaatattgataaatgggcagtttcctggacctcacattgacgcaatcacaaatgataatatcattatcagtgttttcaattacttgaaagagccttttctcatttcttggaacggagtgcaacagaggaagaactcatggcaagatggagtcgtagggacaacatgtccgattccaccaggcaaaaacttcacttatgtaattcaagtcaaagatcaaattggtagcttctactatttcccttctcttgccttccacaaagccgctggtgcatttggagccatccgtgtctggagtcgtcctcgcatccctgtcccgttctctccccctgacggtgatttctggcttctcgccggagatgggtacaaaaccaatcactatgttttgagacgtctactaaaagccggaaggaatctaccgaatcctgatgga

SEQ ID NO: 128046 - DNA, 764 bp, Arabidopsis thaliana
  unsure (1)..(764): unsure at all n locations
atgattcttcaggtctctacgactcactatatggaaagctggtccgcctgcaggtaccggtccggaattcccggggtcgacccacgcgtgcggaaaaaaaaaaaacgagatggaggaattccaatctcctagaatacgatcttacaaatcgtatgaaggagataggaacctccaactggttaatcctgcagatttaaaactggtcagagggatatatgttgttagagaatcgaggcgcaatcgatctccgataaaaacagatatatggcgcaagatgtcttacaaagacatgcccgttagaccgagaagatcttcttctcattcgacattgttcaaaggatggtggaacgatccggagataaagagaaagagacgagtggcgaaatacaaactctattcagccgaagggaagatgaagataactttgagaaagagttacaaatggattaagatccaatgctcgaagatcattcatggaatataggtctctctatctctactctgttttatctgtttagaagtttgttttgaaaaaaggtattaaatcatgtatcaaatttaatttattttattcattctgtaactatgttcattgtgtatttctatgacattcaattaacttgtacatccaaaaataaacaaatacgactatatttatatattgttatgatttttttaaaaaaaaaaaaaaagnnnnnnnnnnnnnnnnnnnnnnnnnnnnnnnnnnnnnnnnnnnnnnnnnnnnnnnnnnnnnnnnnnnnnnn

SEQ ID NO: 128047 - DNA, 621 bp, Arabidopsis thaliana
  unsure (1)..(621): unsure at all n locations
ctaatacgacttacttagggaaacctggtacgcctgcaggtaccggtccggaatttccgggtcgacccacgcgtccgcccacgcgtccggtcgaggacatcaaggctaaggtcgaagctgcaaacaaggcagtgtcgaagatcggagaacacatgtctaagggatctggatcatctggttccgatggaagctctggtgagggtacaagtgggactgagcagacgcctgaagctgaattcgaggaggccagtggttcaaggaagtgaggttgccgctaaccggttccatacagaaatcaggtttttcccaaaataagtttacatgcttatctcctccctcacaaatttgattagttttgtgtatttaaaaccttatttgagaggtatcatctcttcgaaacctattgagagtcccggatgtagtttgtttgattggttattttcatgaatttacggttattatcttgaccggttaaatgattcaatttcacataaaaaaaaaaaaaaagggggnnnnnnnnnnnnnnnnnnnnnnnnnnnnnnnnnnnnnnnnnnnnnnnnnnnnnnnnnnnnnnnnnnnnnnnnnnnnnnnnnnnnnnnnnnnnnnnnnnnnnngctgaat

SEQ ID NO: 128048 - DNA, 757 bp, Arabidopsis thaliana
tgcaaatggtattactactgtctcagcgaaagacaaagcaacaggtaaagagcagaatatcacaatcagatcttcaggtggtctctcagacgatgagattaacagaatggtgaaagaagctgagcttaacgcacagaaggatcaagagaagaagcaacttatcgaccttaggaacagtgctgatacaacaatttacagtgtagagaagagcttgagtgaatacagagagaagattccagctgagattgcctctgagatcgaaactgcagtgtctgatctcaggactgctatggctggtgaggatgtcgaggacatcaaggctaaggtcgaagctgcaaacaaggcagtgtcgaagatcggagaacacatgtctaaggggtctggatcatctggttccgatggaagctctggtgagggtacaagtgggactgggcagacgcctgaagctgaattcgaggaggccagtggttcaaggaagtgaggttgccgctaaccggttccatacagaaatcaggtttttcccaaaataagtttacatgcttatctcctccctcgcaaatttgattagttttgtgtatttaaaaccttatttgagaggtatcatctcttcgaaacctattgagagtcccgcgatgtagtttgtttgattggttattttcatgaagtttacggttattaaaaaaaaaaaaaaagggcggccgctctagaggatccaagcttacgtacgcgtgcatgcgacgtcaaaatcttactatag

SEQ ID NO: 128049 - DNA, 444 bp, Arabidopsis thaliana
  unsure (1)..(444): unsure at all n locations
ggccagtggttcaaggaagtgaggttgccgctaaccggttccatacaaaaatcaggtttttcccaaaataagtttacaggcttatctcccccctcccaaatttgattaggtttggggattttaaacccttttttgaaaggtatcatctcttcgaaccctattaaaaagtcccgagatgaagtttgtttgattggttattttcatgaagtttccggttattatcttgaccggttaaatgagtcaatttcccataagattatgcccttttaagtttggtttatggatgaagaatggcgataattgaattgttttgtnnnnnnnnnnnnnnnnnnnnnnnnnnnnnnnnnnnnnnnnnnnnnnnnnnnnnnnnnnnnnnnnnnnnnnnnnnnnnnnnnnnnnnnnnnnnnnnnnnnnnnnnnnnnnnnnnnnnnnnnnnnnnnnnnn

SEQ ID NO: 128050 - DNA, 389 bp, Arabidopsis thaliana
  unsure (1)..(389): unsure at all n locations
cagacgcgtgggcggacgcgtgggaaaacacaaaaaaaaataaaacctttctatttctcttcctcctttgagctttgacctctcctccatctcccccacccttttatgcaacaatgggaaattgttgctctcacggacgggactcagccgataacggagacgcattggaaaacggagcttccgcttcaaatgctgccaattcgactggtccaaccgcggaagcttctgtaccacaatcaaaacatgcacctccttctcctcctcctgcaaccaaacaaggccctataggccctgtcttaggtcgacccatggaagatgtaaaagcttcatattctttanggaaagagctcgggcgaggccaatttggtgtcacacacctctgcacacag

SEQ ID NO: 128051 - DNA, 1139 bp, Arabidopsis thaliana
  unsure (1)..(1139): unsure at all n locations
nnnnnnnnnnnnnnnnnnnnnnnnnnnnnnnnnnnnnnnnnnnnnnnnnnnnnnnnncggtccggaattcccgggtcgacccacccggcggagacgaacaacaacaacaccaacagaagacagaaatggcaaccgcagctctctccgccgcccgacccaaccgccttagctcagcctcctccgatgttcctctccaccccctatatctccctaccaagctccaatttccttcccgtaagactcagctgtggcgctccgccgcgattctcttacccacacggcggcgatgcgctccgcctagagctagttctcgcgccgacgattctccacccttcgatatgtctgtggagacggcgcttaaggttctcggagtctccgaaggagcttccttcgacgaaattcttcgtgccaagaaatcgatcctggcttctcgtaaggacgaccccaacgccatctctcaggctgaggctgcatatgacatgctgctgatgcagagcctaaaccaacgccgagcaggaaaagttgtaagcaacaacattcgctacgctgatgttaaatctagtaaccctctgggaacaagtactgtgactcagtggatgaagaatccacctgtctctgttgatatgccttccacgagcgatctcgggatacaagctggagtctatggagccatgatggttttgacttatgtgaatgggagttcctttgaatcttctgggatgccttatgctggtgctgatgtgcccggacttatattggctagcagctttggggcttccctatactttatgaccaaaaagaaagtcaagctagggaaagcagctgcgttgacggcaggaggattagtggcaggtgcagtggtgggatcagccattgagacctggctgcacgttgatgtggttccgtttctgggtctccactccccagctgcagtcgtgagtgaattcatagtattctctcagttcttggtgtctctatgcttaaggtagaactttgtacattggcttatgcaaatttggctcaacctgtcacgctggtatatgtacttcgtttatatgcattttgtacagaacactcaaaagtaaacaactcttagacatccattttcatactcaaaaaaaaaaaaaaaaaaaggtcgt

SEQ ID NO: 128052 - DNA, 490 bp, Arabidopsis thaliana
  unsure (1)..(490): unsure at all n locations
cggcacgaggagagaactagtctcgagtttttttttttttttgttggtggagacgaacaacaacaacaccaacagaagacagaaatggcaaccgcagctctctccgccgcccgacccaaccgccttagctcagcctcctccgatgttcctctccaccccctatatctccctaccaagctccaatttccttcccgtaagactcagctgtggcgctccgccgcgattcttttacccacacggcggcgatgcgctccgcctagagctagttctcgcgccgacgattctccacccttcgatatgtctgtggagacggcgcttaaggttctcggtgtctccgaaggcttttcccttcgaccggaaattcttcggtgccaaagaaaatcggttcctggggtttttggtaaaggaccggccctaaaggtcatttttttaaggcttgagggttgcaataattgaaaagctttcttgattnaagagcctttaaaccaac

SEQ ID NO: 128053 - DNA, 565 bp, Arabidopsis thaliana
aaaaagatggaacctcagagaaaacactcgacagccctccacacgtgtcatccctgccggcgaaccattccatacagagatctgacgccgtatttcacacgtgtggcatcatagctctcatgtatcaccatgtacactcaattgtcaacgcaaacaacactctaataacatgtcttcttctcctctccgatattgttctcgccttcatgtgggcaaccacaacttccctccggttaaacccgattcatcggaccgagtaccctgaaaaatatgctgctaaaccggaggactttccaaagctggacgtttttatatgcacggctgatccgtacaaggagcctccgatgatggtggttaacaccgctttatcggtgatggcttacgagtatccgtctcataagatctcagtgtacgtatcggacgatggaggttcgtccttgactttgtttgctcttatggaggcagctaagttctctaagtattggttgcctttttgcaagaagaataatgttcaagatcggtctcctgaagtttatttctcatcaaagttacgttctcggagtga

SEQ ID NO: 128054 - DNA, 523 bp, Arabidopsis thaliana
ctctatacgactcactttagggaaaggtggtacgccttgcagggtacccgtcccgaatttccgggttgaaccacgcggtccgacccggctctgtttcaataaaaaaaatcccctccctctcatatttacctcccgaataaaaccggagggagagaaaaaacataaaaagcaaaaaaaaaggtaaaatcaaaaaggggaaaaatatataacaacaaaaaaaaaaagttagaaaaaatggcagtaggaaaggttgtggtatctgtggcatcactcctcctagtggtgggtgttgccataggagttatcacgttcgttaataaaggaggcggcgccaatggcgacagtaatggtcccataaactctcatcagaaagcggttcagacaatttgccagtcaaccacagaccaaggttcgtgcgcgaaaacactcgacccagtcaaaagtgatgatccaagcaagctggtcaaagccttcctgatggctactaaagacccgatcacaaaatcctcaaacttcacggctt

SEQ ID NO: 128055 - DNA, 794 bp, Arabidopsis thaliana
  unsure (1)..(794): unsure at all n locations
nnnnnnnnnnnnnnnnnnnnnnnnnnnnnnnnnnnnnnnnnnnnnnnnnnnnnnnnnnnnnnnnnnnnnnnnnnnnnnnnnnnccacgcgtccggtgattcatatcaagcaacaggatgttacaatcttctatgttcgggatttatccaaacaaataacaagattgccattggagcagccatatctcctctttctacgttcaaaggaaaccagtttgatatcacaatactcatttggaaggatccgaaaatggggaattggtggatgggtttaggggatagcacactagtcgggtattggccagccgagctattcacgcacttggccgaccacgcgactaccgtggaatggggcggtgaagtcgtcaacacacgtgcttcaggcaggcacacgacgacccaaatgggctctggtcattttccagacgaagggtttgggaaagcaagttattttcggaatttggaagttgtggattcggacaacagtctcgtaccggtgcatgatgtcaagatactagccgagaacaccgaatgttacgacattaagagttcgtatagtaatgaatggggaacttatttttactatggtgggccggggttgtaatcctaggtgtaattgatattagagtgtacatagttcgggttggaggagtggaggaaaaaatagagggggtcgatatatgtattttttttcaagtatgggtagtggaagattgaatactgccgtcctgtttttgccttgtcatatagttcgcgcccccccattcgatatctagcttatcgataccgtcgacc

SEQ ID NO: 128056 - DNA, 928 bp, Arabidopsis thaliana
  unsure (1)..(928): unsure at all n locations
tgannnnnnnnnnnnnnnnnnnnnnnnnnnnnnnnnnnnnnnnnnnnnnnnnnnnnnnnnnnnnnnnnnnnnnnnnnnnccacgcgtccgcggacgcgtccgcccacgcgtccgcccacgcgtccggcagcgcgaatcagagatcttttcaatgcagcaaggaaaaactcaccttccattatattcattgatgagcttgatgcggttggaggaaaacgcggtaggagtttcaacgatgaacgtgaccagacgttaaaccagttgcttactgagatggatggattcgagtcagacacgaaagtcattgtaattgcagcaactaaccgaccagaagcgttagactcggctctttgtcggcctggaaggttctctagaaaagttttggttgcagaaccagaccaagaaggccgtcggaaaatcttggccatacatctgagagacgttcctttagaagaagatgcatttctcatatgtgatctggttgcttctttaactcccggatttgtaggtgctgatctcgccaatattgtcaatgaagctgcattgcttgctgctcgtagaggcggagaagcggtggcacgggaagatataatggaagctatagagagagcgaagttcgggatcaatgataaggaagcgaggccaaggacgttaggaaatgaactcagcaagatgttcccatggatgccatctttggctagaagaaacggaccagatcaagacggtttacaaggacccgttaggttatcaaaactctcagcttaaaccaaacccaaggcagccccgttagagggcaaatcccctttgttaccaagtttctttgtatctgaaaatcttttgggaaatgtacgtttttttgtgtgtttacattgcaaagtcaattgctttttggttcgtagtaccttccaatttgacaaatctcttagat

SEQ ID NO: 128057 - DNA, 370 bp, Arabidopsis thaliana
ttgggattagggttcttcgagtggcagattatcttatggttatcgattgggttggcgatttcgcaacaagcgctgggattgagacctattagggagaaacctcgatcatggagtgacgagtggctctttggtaggaaacaagaagctgaacttggacccttttctgcttggaatataacagagaacttatagaggaacttggaagtttctgaattccttaactagcgcttcgaagtttcaagactttcaataggtagctggtaattctgtggttgagtcagtagcacttccaacgacgatacctggtgtgcattatgttcagggtgtagttgttttccatgacgtatttgacaatgaacaaaatgtgggt

SEQ ID NO: 128058 - DNA, 621 bp, Arabidopsis thaliana
  unsure (1)..(621): unsure at all n locations
nnnnnnnnnnnnnnnnnnnnnnnnnnnnnnnnnnnnnnnnnnnnnnnnnnnnnnnnnnnnnnnnnnnnnnnnnnnnnnccacgcgtccgatttggtgttgtatatgttggatctacatcagtgtatctgaagctggagttcactgtgatataattgcccgtgaactcaggattccgctgcttcaagtcaaggaagcgttagaacagctctcaaacgatggttgcatatactcgactttggacgagacatgcttcaaatcgactgctaacgcttgatgaaaattgatttatatgtcaacacatatcaatcctcctctcatgttcaaaagtcttttgtataggccctaaggtaggacaatatgtagttttaagactaaaaatctttcttatggcttttggatttttttaaagggaactaaactcanaagttcanaatcattttcgtcacttgaaaaaaaaaaaaaaaaaaaaaaaaaaaaaaaaaaaaanagggggggacgctgtagaggatccaggctcaacgccgccggcccgcggacgtcctacctcttctttattgtcacctaaatccaatacactggccgccggtttacatcgtcaagactggaaaaaccctgacgta

SEQ ID NO: 128059 - DNA, 502 bp, Arabidopsis thaliana
ctctattatgctcttagatcttccctctcatccggatcaagcttcaaaatttgtatgctttattcgatttaatgtctttgatacacttgttcttgttgttgggtctgctgagccttgaagctgcggcgtcgttttcaccgggatcgcgctcgattctccgggacatcggcagtaacgtcgccgatcagaaagacaacgctatcgaattgaacgctaccaactttgattcagttttccaagattcccccgccaaatatgccgttttagagttcttcgctcactggtcagttttctcattctctctctctctcgtaaaaaatctgaaaaaaattcaaactttaggcttttaagcactggatcttacacggaatttgtttgcaagtgttcttcatattcgaacctgactttacgttatccaattctctgagatttatccggaaataacttaactttatatataaatgcgaaaggcttgtatactgacattgacccataatttttg

SEQ ID NO: 128060 - DNA, 934 bp, Arabidopsis thaliana
  unsure (1)..(934): unsure at all n locations
gctctttttgctcttagatcttccctctcggccggacccggcggcaaaatttgtatgctttattcgatttaatgtctttgatacacttgttcttgttgttgggtctgctgagccttgaagctgcggcgtcgttttcaccgggatcgcgctcgattctccgggacatcggcagtaacgtcgccgatcagaaagacaacgctatcgaattgaacgctaccaactttgattcagttttccaagattcccccgccaaatatgccgttttagagttcttcgctcactggtgccctgcatgtagaaactacaagccacattatgaaaaagttgcaaggctattcaatggagcagacgcagtatatcctggtgtcgttttgatgaccagagttgattgtgcgataaagatgaatgtaaagctttgtgacaagttctctatcaatcattatccaatgctcttttgggctcctcctaaaaggttcgttggtggcagctggggacctaaacaagagaaaaatgagataagcgtagtcaatgaatggcgcactgctgatcttttgttgaactggatcaacaagcagataggcagctcttacggcttagatgatcagaaattaggaaatcttctgtcaaatatatctgaccaggaacagatttctcaggccatatttgacattgaggaggcaactgaagaagcttttgatatcattttggcacataagggttctgcagcttttagtggcacatccatccatccaagaaggtgccgtaccggnagtgctgaaatccttgtgaattttgntgntaaatgcccggcagncgaatncccggatgnccaggaacctggagcgaaantncccctcggaactcccaaaaagnggaagggtgtccncgngngacanngggttccgggggggcaaacaacngggggtcccngggc

SEQ ID NO: 128061 - DNA, 524 bp, Arabidopsis thaliana
  unsure (1)..(524): unsure at all n locations
nnnnnnnnnnnnnnnnnnnnnnnnnnnnnnnnnnnnnnnnnnnnnnnnnnnnnnnnnnnnnnnnnnnnnnnnnccacgcgtccggtcgatttccttctgcattgcttttccttccttttggaggaatttttaggtctcggagttttgatttcgacctttaaattttgcttcagaggagagattctatccgttacagttcgtgaatttcgcgtttgaagaacttgaacttgattctgaagaatgtcaggtcgagaacaaacaggagagaaactatcagattctgagtacatagaagaagagccacggcgttctagaattgggaatttgaagaagaaggcttttagttgttcaactaaacttacacatcctttgaagatgagaaaaggcaaacgtaaaatcgatttccagattcctttgattgaagatgttagagatgagaaagaggagaagcttgtttctaaattgcgtcaacaacttctttagaaagatttgttgcctccagtacatgatgattatcatatgtt

SEQ ID NO: 128062 - DNA, 664 bp, Arabidopsis thaliana
  unsure (1)..(664): unsure at all n locations
ttgacgtcgcttcgccccttccgtaagctcggatttcggttcgaggattctctgagatttccccaatttttcatcttcttcgagtgattagtacagattagggttttattcgttattattgtctatattactccttgattgtggtcgatgacctcgctacttcttctcagaacgcttccgcttctccgcaacggatttctcaaccatcgtcatcaagttggtatcgtagctggtggaattctcagtcaccgtcggcgtttgttgtgttctcttgctgatagaccacagttttacgagaataatgattctgtttctccggtggagggatccggcgcggcggcgatgaacgtgacatcgcctgttgttgataatagctggcgttatgaagatcctgattatcggaaatggaagaatctagaggctgagattcttcgagatattgaacccatttcctcttctcgctaaagatattcttcaattccgatagggattttggattgggaacccttagnattttaangggttgngaaaattttcaatggaaaactntttcctatnacccnnttncaaagcaaaatttggttgggccttnntttnaaaagggttaccggaccccaatttnggccnaaaggnccctttttttanacaatggggngnaagtctg

SEQ ID NO: 128063 - DNA, 510 bp, Arabidopsis thaliana
  unsure (1)..(510): unsure at all n locations
nnnnnnnnnnnnnnnnnnnnnnnnnnnnnnnnnnnnnnnnnnnnnnnnnnnnnnnnnnnnnnnnnccacgcgtccgcggacgcgtgggcaaaaccagatcaagcttctttcaccattttcactcttctttaagctttctttcttaatttctctcatttcgaattttaaacacaaaacctaaacgatgcctgaggcaccaaagatcgcagctttggaggtttctgatgagagcctcgctgagaagaacaagaacaaactccaattcatcgaagacgtgaccacgaacgcagatgatgttcagagacgagttcttgaagagatcctttcacgtaatgctgatgtggagtatcttaaacgacacgggctcgaaggacgaaccgatcgtgagactttcaaacatatcatgcctgtcgtaacttacgaagatattcaacctgagatcaacagaatcgccaatggggattaggtctcagtccctctgttctaaccccatctctgagttcctaccag

SEQ ID NO: 128064 - DNA, 473 bp, Arabidopsis thaliana
gtgactcttctctctcttcctctccatcaatggcgaccacaaactctttccaccaccaccaccactcctctccttcttacacacaccaccgcggcaatctccattgccaatctcacttcggaccaacttctctttccctcaaacaacccacttccgccgcaacattctcactaatctgctctgcttcttccacctcctcctccaccaccgccgtatctgccgtttcaaccacaaacgcctccgccacaactgccgaaaccgcgaccatattcgacgttctggagaaccatctcgtcaatcaaaacttcagacaagccgacgaggagacacggagattactcattcagatatccggagaagccgccgtgaaacgtggctacgttttcttctccgaggtgaaaacaatctcccccgaagatcttcaagctatcgacaatctatggattaaacacagtgattgtagattcggatac

SEQ ID NO: 128065 - DNA, 529 bp, Arabidopsis thaliana
  unsure (1)..(529): unsure at all n locations
atgatctgccggcannnnnnnnnnnnnnnnnnnnnnnnnnnnnnnnnnnnnnnnnnnnnnnnnnnnnnnnnnnnnnnnnnccacgcgtccgcccacgcgtgcgaagaaatctcgtttcatccgccattaacgacctctcaagatttgtttccgtcgcgaagtatgtaccggccgggtgcagtctgggggaaacttggttatgttgtttaaaggatgcagacggtttgtgagaacaacgtgtcgcgtttcgatccctggtggttctttggggaatgaatcaaaagcacctccaaggtttctgagggatagaaagattgttccagatgctgatccccccaatatggaagatatccacaagttgtatcgactctttgagcaatgctcgagactcaccatcttgactggagctggggttagcacagaatgtggaattccggattacagaagtccctatggagcatacagttctggattcaaaccagttacccatcaggtgatctgaaggagttcactctatcaagccgagctc

SEQ ID NO: 128066 - DNA, 287 bp, Arabidopsis thaliana
agtcttggaccacatcgttaatcaatgttgtttgttgtttgatgtttactttttttttttactcagttttgaaaattcgataagtattctagctctagaattccatatctaggttttttgttttctcctagatagtctgaagaatcaattgtaatggtctgtggaattacacggaaacagttttgttgtaataatggagcatcagttttctttggttgaatgaaaaatcataatttttttgccttaaaacaaaaaaaaaaaaaaaaaaaaaaaaaaaagggccgggc

SEQ ID NO: 128067 - DNA, 876 bp, Arabidopsis thaliana
  unsure (1)..(876): unsure at all n locations
cagctctctacgactcactattgggaaagctggtccgcctgcaggtaccggtccggaattcccgggtcgacccacgcgtccgcttataattaaagaaccataaagacgaacacaaaagaaactctcacattctcaagagtttctttcttctttcaatggctttactaactttcttgccggagaacgcagaggcgccacaaaaacacaagccaacgtctagcaaacgaaagaaacgcgataatcccaccgaccaaacgcagacacagaaacataaaccgcagaaaccgaagaaagcagtacctccgaagcagccatcttcatgggaccaaatcaagaacctattgacttgcaaacaaatcgaagggtcaagagtccatgatccttccaagaactctcaatctggtccgtccatgacaactaacttatctccttccaagcttggctcgtcgtgcagctccatttgcagctttagagacgtggctcacggcaacactcgtgtggttcatagagctgatcactcaccagacgtaggtaactcggctactcctaactcggagactcggcttctgactcggaaacctggtcaacacggttcttcttcgtctcggtctcttacatctggctcaacgagatctaacgccagtgggagttacacgtcatcgtcaacgacttcgtttagagccatgcagttccgtaaactctccggatgttacgaatgtaacatgatcgttgacccgggcagggatccgatttcgcctaggggttgtncttgtncccaatntggngnaggttttcccaaggttnaaantttngngtnatcaagcagttgtaaggagtttcggagtnaggnccgagggttcgggcgaaaaaaagnna

SEQ ID NO: 128068 - DNA, 562 bp, Arabidopsis thaliana
  unsure (1)..(562): unsure at all n locations
nnnnnnnnnnnnnnnnnnnnnnnnnnnnnnnnnnnnnnnnnnnnnnnnnnnnnnnnnnnnnnnnnnnnnnnnnnnnnnnnnnccacgcgtccgggaatagaaattctcgctttggtagaggaaacttgttgtctgcaaggaaatggttgagcggatggtagttgataactaacctcagttttcctcgtacttgttcagctctgtttgttaacatagaaggtttcacatgcccatggggaggtggtcttctcaatgaggtcttctctttggagttggtcgacttcttcgagagcaagattatagtggtttggattcattcctggaaggcttgcttgtgttggatgacatcctcattcttcttgaagggtaatgatatgaaaaagtccggattctttcataaaggtgatgaaaatttggtgaggaactctgaatgtgaagtagcacaagaagccttgataatctcgtctttgatagaatttcatattccatggggtagagatgggagacattagtccatggtagcagttggttcttgtgcttaagtctttttggattccaagat

SEQ ID NO: 128069 - DNA, 598 bp, Arabidopsis thaliana
  unsure (1)..(598): unsure at all n locations
nnnnnnnnnnnnnnnnnnnnnnnnnnnnnnnnnnnnnnnnnnnnnnnnnnnnnnnnnnnnnnnnnnnnnnnnnnnnnccacgcgtccgcgtggtggtatcagcaaggcctctcgggtcatcaatattagtgaagatatatttgctggtttcaacacaactctacgtcaagggaatgttactcatcatgagtatattcaggtgggcaaagggcgatgatgttgggctcaatcaaatagctctgtttgaagggaaggttgctggtgggaatggtgaacaggttcttagtcgagatgtatacagacttggccagctccttgatttcttccgtatgatgtcattcttctttacaaccgttggcttctatctatgtacaatgttgacggtgcttactgtgtatattttcttatatgggagggcatatctggcactttctggagttggagctactattcgagaaagagctattcttctggacgatactgcacttagcgccgccttgaatgctcagtttctgtttcagattggtgtcttcactgctgtgccaatggttttgggatttattttggaacagggttttctccaggccatcgtcagttt

SEQ ID NO: 128070 - DNA, 601 bp, Arabidopsis thaliana
  unsure (1)..(601): unsure at all n locations
nnnnnnnnnnnnnnnnnnnnnnnnnnnnnnnnnnnnnnnnnnnnnnnnnnnnnnnnnnnnnnnnnnnnnnnnnnnnnnnnnnccacgcgtccgcaaaaccgccgcaaaatcctctaatgacaactaacgcggttaacggaattaacccggaccggtttcgtgatccgaccaccgcgtggcttggacgtgacggagaatggcgagtaatcgtcggaagctcgacggacgatcgacgaggattagcgattcgttacaaaagcagagatttcttcaactggacgcaatcaatgaagcctttacattacgaagacttaaccggaatgtgggaatgtcctgattttttcccggtttcgataaccggatcggacggtgtagaaacgtcgtcggttggtgagaatgggattaagcatgtgcttaaagtgagtttgattgagacattgcatgattattacacgattgggagttatgatcgtgagaaagatgtttacgtaccggatcttgggtttgtgcaaaacgaatcagctccgaggttagattacgggaaatattacgcgtcgaaaacgttttacgatgatgttaaaaaacgaaggatcttgtgggg

SEQ ID NO: 128071 - DNA, 835 bp, Arabidopsis thaliana
  unsure (1)..(835): unsure at all n locations
nnnnnnnnnnnnnnnnnnnnnnnnnnnnnnnnnnnnnnnnnnnnnnnnnnnnnnnnnnnnnnnnnnnnnnnnnnnnnnnnnnnccacgcgtccgcacgctttgggagtgaaaaagattgcagtaccatccctgcaaccgcttggttgtctccctcccttcacattcgtaacctcgttccagcgttgcaacgagacacaaaacgctttagttaacctccacaacaacttattgcagcaagttgtggcaaagctcaataacgagactaaacagtcgactttcatcatccttgatctctacaatgctttcttgactgtgttcaagaacaaaggatctaatccagggagtacaaggtttgagagtccattaaaaccgtgttgcgtaggtgtgagcccgcgagtataactgtggaagtgtggatgagaagggagtgaaagaagtatattgtatgtgataatcctaaaactgctttcttttgggatggacttcaccctacagaagaaggatggagatcggtttactctgttttacgcgaaagtcttaccgcgtctttgattaaagcgtgagaaacaaaagaaaccccccttttgcttaggttttttcttatgaagctcaatgtttgagcgctctgttcctgttttcagtatctcttcattcatttgtgtttgtgtgtttaaagattgtgtgactaataaaatctcttaactggttcaaaaaaaaaaaaaaaaaaaaaaaaaaaaaaaaaaaaacccaaagggcgaccgctctagaggatccaagcttacgtacgcgtgcgatgcgacgtcatagtcttctatagtgcacctaatagaatcg

SEQ ID NO: 128072 - DNA, 420 bp, Arabidopsis thaliana
  unsure (1)..(420): unsure at all n locations
gaaaacatgaatcanctctctctccctctctccggttccacagtaaagaattgattcctcaatctcacgcggaagcaaaatccaaattctaaaattctaagaaaccactctaatcacatcgctctatcgatcaaaagcgaaacccttattcaaaaatctcttattttttccatttttctctcaatcatctgaatcggttttgagatgagctccgattcaccggcggctggagacggtggcgaacaagccgctgcggcgaacaaagcgtgccttcaccttcatacggcaaacagtagggtgaaggcacgtgtgagtaggaccatctctggttactatggcacgcgcagccagtacggccgcagctgcaagttcgggaactcttggaggaagatgcgactttggttcacgctagagactatg

SEQ ID NO: 128073 - DNA, 1116 bp, Arabidopsis thaliana
  unsure (1)..(1116): unsure at all n locations
gacccacaacgtccgcggacgcgtccgcccacgcgtccgctgagtctttcttggttcactttcctgtaaacaccatttgacatggatgcaatttcatctcttgggaccaattgtgttctttctggggtttctccattttcacaagagaatcaatcacaatcgaaactttctccgtttatgagtcttgatttgaaggaacatccaatggcttcagcagatttcaccaaccaaaccttaaccgctttctcttcttcctctgcgtctccttttcaggcaaagacatcatcgattggtatgagtagaggaatgagatggtgggagaagtcaacaaatcacaacatgttagagattcaatctgccaatcatcttgttgactctttgttaaacgctggagatagattggttgttcttgatttctactctcctggttgtggtggctgcaaatctctccacccaaagatatgtcaattggcagaaacaaacccaaatgtgatgtttctgaaagtgaatcaagaagagcttagaacaatgtgtcatggtctaaacgttcatgtgctgcctttctttaagttctatagaggagcagagggtaaagtctgtagcttcagctgcactattgcaactatcaataagttcaagaaagcgttggataagcacggtagtgaaaagatgcagcctcggggatgcaaagggattagacgagaaggaactcgcggctttggcatcggttggtgaactgaaaatgaattctttaacaatgcatcaagctagcaacattggttataaaacagaggagcaatatcaaacgatggtgttataaagagatgacttttttcattaaggttcttattgaattgtagatattagtattatttgtgcttggtttggcacttacattcattttagtttcacaccattactaccagtggcaatttcaattaactgataagattgaatcaatctttggctcttatgattatattgtgataaatcttgtagcttcaacttttttaatacaatctcttttacaataaaaaaaaaaaaaaaagnnnnnnnnnnngtgtacctannnnnnnnnnnnnnnnnnnnnnnnnnnnnnnnnnnnnnnnnnnnnnn

SEQ ID NO: 128074 - DNA, 432 bp, Arabidopsis thaliana
  unsure (1)..(432): unsure at all n locations
tccaatttgatgtcgagaggtcaataaagtgatgagctttttgtgattttttcctcattcaaaatctttgcactttttcactctccttcaatctcaaatttctgagtctttcttggttcactttccttaaacacgatttgacatggatgcaatttcatctcttggaaccaattgtgttctttctggggtttctccattttcacaagagaatcaatcaaaatcgaaactttctccgtttatgagtcttgatttgaaggaacatccaatggcttcagcagatttcaccaaccaaaccttaaccgctttctcttcttcctctgcgtctccttttcaggcaaagacatcatcgattttttggtttccnttaaanccaaacctttgggggctttanagggtcccnaaattggcttgggnttgaaaangggnaggttc

SEQ ID NO: 128075 - DNA, 1042 bp, Arabidopsis thaliana
  unsure (1)..(1042): unsure at all n locations
atgattctccaggtctctacgactcactattgggaaagctggtccgcctgcaggtaccggtccggaattcccgggtcgacccacgcgtccgcaataagcagcatctctataatccctaagattcacaatggagcttggaggaaaatgcaatgcaattacaaccacaacaatgatctcaacagaagtaaagccacatacggatccggaaccagaagccaaacccgaatcagatccatccatggctttattcccgatcaagaaagaaaaccaaaaaccaaagacacgtgtcgaccaaggagctaagtaccgggaatgtcagaagaaccacgcggcctcaaccggaggacacgtggtggacggatgctgcgagttcatggccggcggagaagaaggtacactcggtgctttaaaatgcgccgcctgtaactgtcaccggagcttccaccggaaagaagtgtacggacacaggaacagtaaacaagatcatcagctgatgataactccggcgttttacagcagtaacagctcgtacaagccacgtgtaatgcatccaacgggtgagattggacggaggacttcatcttcaagcgaggatatgaagaagattctgagtcatcgtaaccaaaacgttgatgggaaaagtttgatgatgatgatgatgaggaagaagaagagagtgaggacaaagatcaatgaagaacaaaaggagaagatgaaggaatttgcagagagattagggtggaggatgcagaagaaagatgaagaagagattgataagttttgtaggatggtgaatctgaggagacaagtttttaaggtttggatgcataataacaagcaagcaatgaagagaaacaatagtaacattagtgaatagtttgatgatctgataaaagtgaaataaatttttacaatcccgttttgcttttatatataatttttgcccttcaaaaaaaaaaaaaaaaaagnnnnnnnnnnnnnnnnnnnnnnnnnnnnnnnnnnnnnnnnnnnnnnnnnnnnnnnnnnnnnnnnnnnnnnnnnn

SEQ ID NO: 128076 - DNA, 393 bp, Arabidopsis thaliana
cgtggacccacatcctctttaagctcactagctgattgatatcgtcttatacctttggccgtttcgtctctctctctctcgtttaattacttgtacctatcaactcagtgatactctcgcttctgagagagaagagagaaagcgaagctcgtttcgtatcgtcttctttctcttcatccgacgctggattcataagggcattgataattggacttgttggttaagatttgaatcaacctggagctatgtcgagttttaatctgagtgtagatgtgaatcagaatgggaatatcaagaatgttgattctttatctacattggacgatattgatgacattgattttgccaagttgctagagaagccaaggccattgaatattgatagactgagat

SEQ ID NO: 128077 - DNA, 510 bp, Arabidopsis thaliana
  unsure (1)..(510): unsure at all n locations
nnnnnnnnnnnnnnnnnnnnnnnnnnnnnnnnnnnnnnnnnnnnnnnnnnnnnnnnnnnnnnnnccacgcgtccgcaaaagtagttgcgaaaaggagtggaagagttaaacggaagaggagcagaaggatatctcttgttgcagagggaaattatcaacaagtatctgcagctgaggctatagttgatatttctagaaagtctggtcgagaaactgctgcttgtatcacttccttaagcaaaaatctactttggttcgccgacatttcttcctcggttgctgaggacaacaaaatagacacattgcagctgacagaaaagaagctagaggagcacgagacaaatctaaggttgaactcttcagacaacattgcagcagtctccagcattgtccttaaaaagcagaggagaagccgagccaggcaagggaagcggaaatgccaagatgaccagcacattgtggacacattttcagaatgggaagctaatgatgatctgcaggtaataggaa

SEQ ID NO: 128078 - DNA, 666 bp, Arabidopsis thaliana
tcagtttgctgagtgttatggaaacatggcaaacgcgtggaaggaaaaaggggacactgatcgtgcaatccgctactatttaattgcaattgagctgaggcccaattttgctgatgcttggtcgaacttggcaagtgcatacatgcgaaagggaagactcagtgaggcaacacaatgctgtcagcaggccctctcattgaatccacttctggttgacgcacatagtaatctggggaatctgatgaaggctcaaggattgattcatgaagcatacagttgttaccttgaagctgttcgtatacaaccaacatttgctattgcatggtcgaatcttgctggtcttttcatggagtcaggtgatctcaacagagcccttcaatactacaaggaagctgtgaagttgaaacctgcattccctgatgcatatttaaatttaggaaacgtgtataacgccctcgggagacctactgaagcgatcatgtgttatcagcatgccttacacatgcggccaaattctgcaatggcatttgggaatatagccagtatatactatgagcaaggtcaactagatttagcaattcgacactactagcaggctctctcccgggatccacgatttttggaggcttacaataacttgggtaatgcattgaaagatattgggcg

SEQ ID NO: 128079 - DNA, 448 bp, Arabidopsis thaliana
gaatgacgataatgtcagatcttccacgggatttgttagcggagattctcagtagggttccgttgacatctctaagagcagtgcgattgacttgcaaaaagtggaacgatttatccaaagatcggagctttctcaagaagcaaatcgtcgaaacaaagaagaagcaattggaatcgaaggagattgaggtgatcatgatgaggaattttagggtttatctaacaagcatcgatatccacaacaatgttgatccatcatttacgcctaaaggtacacttattagcttaagcgatgatgcaaaccatcatcaagtcgataatgtatctagagtctttcactgcgatggtttactattatgcatcaccaaagacctccactataggcttgtggtttggaacccttattttggtcaaacaagatggatccaacccagaaattcttaccacag

SEQ ID NO: 128080 - DNA, 958 bp, Arabidopsis thaliana
  unsure (1)..(958): unsure at all n locations
atgctacgcgagctctaatacgacttacttagggaacgctggtacgcctgcaggtaccggtccggaattctccgggtcgacccacgcgtccgctcttttttcaatctcgtttaaaattaacataatgatgacgccagtgaagaaaagtatcgccattagaccggtgtcgttctacggaaacgggcttcctcgtcctcgtttcttcgataatcctaagttcaatgattaccgtgttgatcctcccctctctgtgctagatcctcttctctcatgggcgagagacgctcactggtcaatgggtggtctcaacttcacgcgtctccgtctccaaggccggatcgaaggaaacgtcaacaagctccgtgcacagcttgagaaatccacccctgtgaaactcgaatctggaaggaagaagaagagatctggttctgagtctcctccttctgctccgattgtggtgaaacgaaggaggtacttagatctgaacgattctgatgatgaggaagtcggatctgaagatgaaggtgtggttagaatcaggagaaaactctctgatgattttgatagagtcgctgaagaaagcaagaactaaacttgttgaagctaacaagaaatcgattaaatctgagtttgtggagaagaagagattgattgagaagaagaagatcgtaaaagttaacaagacaagttcaacgaggtcatctccaagactggctaagcgtagctctaattagttttcatatttagcctcttcaataatttctcttagggtttagaattgttgaggccctagtttgtttttttgtatttgtgcttataaatatggatttatctatgaactctgacccaatgaacttgaatgcatcaagantatttaaaaaaaaaaaaaaagnnnnnnnnnnnnnnnnnnnnnnnnnnnnnnnnnnnnnnnnnnnnnnnnnnnnnnnnnnnnnnnnnn

SEQ ID NO: 128081 - DNA, 934 bp, Arabidopsis thaliana
  unsure (1)..(934): unsure at all n locations
gcctatacgacttacttagggaaagctggtacgcctgcaggtaccggtccggaattcccgggtcgacccacgcgtccggagagggaggaactaaacgggtctggagaaatgtacgtgcaaaagtatccgaagttgaagataagactagtggacgggagcagcatggcagctacggtggttatcaacaatattccaaaggaagccacggaaattgtctttagaggaaatctcacaaaggtggcttcggctgttgtctttgctctgtgccaaaagggcgtcaaggtggtcgtgttacgcgaggaggaacacagcaaactcatcaaatctggggttgacaagaatctggtactgtctacaagcaatagttattactccccaaaggtgtggttggtgggggatggaatagagaacgaagagcagatgaaagcaaaagaaggaaccctctttgttcccttttctcactttccgcccaacaaactccgcaaggactgtttctaccagtccactccagctatgcgtgttcccaagtctgcccaaaacatcgactcctgtgagaactggctggggaggagggtgatgagtgcatggaaaataggaggtatagtgcatgcacttgagggttgggaggagcatgactgcggcaacacttgcaacgtcctccgtctccacgccatatgggaagctgctcttcgccatgatttccaacctctcccaccatctcctctatgagcttttttcatattcatacatctatgtcccctttcttgattatatctacttcccttccatcattgtttgctgtttactatgtttttctatcgacaatatataagtacccttgttaccaaaaaaaaaaaaaaaaaaaagnnnnnnnnnnnnnnnnnnnnnnnnnnnnnnnnnnnnnnnnnnnnnnnnnnnnnnnnnnnnnnnnntc

SEQ ID NO: 128082 - DNA, 1047 bp, Arabidopsis thaliana
  unsure (1)..(1047): unsure at all n locations
atgannnnnnnnnnnnnnnnnnnnnnnnnnnnnnnnnnnnnnnnnnnnnnnnnnnnnnnnnnnnnnnnnnnnnnnnnnnnnnnccacgcgtccggtttgtttcaatagctatgcggatactagtggagctggaaatgatgtttatgagtttgtaagtattaacatagagatgttctttcttcttcttatgctgtttcttaaagatttggagtttattttgtgcaggtaaagtcgattgggaagtttaaggagactaaacgaacagaggggatatcgacatctgatataatcatgagaatagtgaaagattataaccagtatgtgttgcgtaatctggaccgaggttattcaagagaagaactcggtgtcagcttcgttaaggagaagaggcttagagtgaatatgagattgaagaaacttacaagagaaagttaaagaacaacaagaaaagatacaaaccgtagcaaaaactgctgggatgcaccatgatgagtggcttgaaaatgctgatcgttgggtggctggatttcttgaaatgtttgaggaaggttgtcataaaatgggaacagccatcagagatgggattcagcaacggctaatgaggcaagaatcggaagagaaccggcgattgcttcaaaatggactgacgatttccaaagacaatgacgatgaacaaatgtctgatgccaacgagtttgcagaagaagactgcgtcaatgtgagcaacaaagggattgtaacagtaaagaaatgagagattttgggtcatggttgaagtatttccagatacagaaccaaaatctactagatttccccagtaatggtattaggcttgtttattcaactgtacatcaaactctgtttcaaaatctctacttgtgtttaaaactcaaatgcatcagaaatcaaaagcagtcatggattnnnnnnnnnnnnnnnnnnnnnnnnnnnnnnnnnnnnnnnnnnnnnnnnnnnnnnnnnnnnnnnnnnnnnnnnnnnnnnnnnnnnnnnnnnnnnnnnnnnnnnnnnnnnnnnnnnnnnnnnnnn

SEQ ID NO: 128083 - DNA, 557 bp, Arabidopsis thaliana
  unsure (1)..(557): unsure at all n locations
nnnnnnnnnnnnnnnnnnnnnnnnnnnnnnnnnnnnnnnnnnnnnnnnnnnnnnnnnnnnnnnnnnnnnnnnnnnnnnnnnnccacgcgtgcgctttgttaaatttgaagttttcgaacaagttgcaaagaatgcggtgaggggactatgggcacgtcgttcaaatctcgacttggttggtgctcacatcaatgtctttacaggtgaatggacacagaaggtaacaaaaaatggcttctgtatatgtcagaagaactacggtttgatgaactttgcttcaacaaactaattagtctttttttgtcacccaaattctaaaatggtagtgtttacttggcaggatgctggtataggaacaagcattgattccttctatgagtatctactcaaggcttatatactatttggggatgaggaatatctatacatttttcaagaagcttatagatctgcaatgcagtaccttcacaaggatccttggtaagctttctgtatcttgtatgatagagaaacaagaacaaacaattcctttgtttggacttactgttttttctagt

SEQ ID NO: 128084 - DNA, 638 bp, Arabidopsis thaliana
ctcatgcacacaaacgctgcgtctaacaattccgagttttttgatttcgttggacattttaaccgctctgaaccggtcgcttgtcacttcccaatacgcctgtggtgtgtaaaccatctgaatctgctatcgagaaagctcttgaaatcgccaatattgatcctaaccgaacgctgttctttgaggacagtgtccgaaacgtacaagctggaaaacgcgttggtctttacacggttctggttggtaaatcgaccaaagtcaaaggagcggattacgcgttggaaaacattcacaacatgaaagaggcgataccggagttatgggaatccgacaggaaatcgtcggatgttggatattccggcaaggtcgccgttgagacttctgttagagcttaggaggagtactgtttcgccgttgtacctaattttccaccactgtcattttcattttcttttttcaaatgacgtaatgtcatttttgttttttttttcgacttgtgtttataaaagattaataaaaaatgagaaaataatttccatctaaaaaaaaaaaaaaaaaaaaacaaaagggcggccgctctagaggatccaagcttacgtacgcgtgcatgcgacgtcaagactcttctatagtgcacc

SEQ ID NO: 128085 - DNA, 614 bp, Arabidopsis thaliana
  unsure (1)..(614): unsure at all n locations
nnnnnnnnnnnnnnnnnccaaaaagatctcgcttttctcgattttggttttttttacaatatccacccacccctccgtgctgctcctgctctgtttttataagcctccacttcccgccaagcccctcttagccataaacagtgaaaaacccttttgttccttcaccaagctctaagaccctatccatggagacgccgacgatgaagcctgatacggttttgattcttgattacggctcccaatacacacatctcatcactcgccgtattcgttctctcaacgtcttctctctcgttatcagtggaacttcatcgctcaaatcaatcactagctataacccacgagttgttatcctctccggtggtcctcactctgttcacgcgctcgacgcgccgagtttccccgaggggtttatcgaatgggcagagtcgaacggtgtttctgttttggggatttgctatggtttgcaattgattgtgcagaagcttggaggcgttgttgtggaaggagagagtaaagagtatgggaaaatgggggttgaaggtgaaggggaaaatcggagatttttgggtcggagagtggtggagagaagcaaatggtttggatgagtcatg

SEQ ID NO: 128086 - DNA, 671 bp, Arabidopsis thaliana
tgattcaattgcgtcatagtataatctccatcaacacacagagacgataattctcatatggttaagggaattttgggattgaatgacgttcgttgacgatgatgaagaggaagacttctctgttcctcaatcagcttccaattattatttcgaagatgatgataaagagcccgtttcgtttgctcgtctcccaattcaatggagcgtggaggagaaagttgatggtagtggtttaggtttttacttgcgaggaagatctgataacggccttttgcctctgcataagcttgttaaggcttggagatacgatctttcgaacttccagcctgagatttctgttcttacgaaggataatatatggattaagcttgaggaaccgaggaaaagctatggggaattgattagaactgttttggtcacgttgcattccattcagtttcttaggaggaatccccaagcgtccgagaaagctctctgggagaaattaactagaagtttgaggtcatatgatgtgaagccatcgcagaatgatttggtggatcatattggtttaatcgctgaagctgcgaaaagagatagaaatttggcgaattcgaagtttatacttgcatttctcacaaaaaagcctaccaaaaggagattacctgacgaggacaatgcaaaagatgatt

SEQ ID NO: 128087 - DNA, 604 bp, Arabidopsis thaliana
  unsure (1)..(604): unsure at all n locations
nnnnnnnnnnnnnnnnnnnnnnnnnnnnnnnnnnnnnnnnnnnnnnnnnnnaaaatcccgagttcccgacacaatcccccctttcgttcccctttaactctgaacacatcaggtttggtttcgtgtttcaactttgagatacttctctagatttcaatcggagagtcttttgttccgccaaagtttcaatttttcaataccccacgacggcaaatagggttcatggaagatcaacccattaaccagtgctctagtagcaccaatgcgtctgagaaaactccagaatcaacccttgagcttaacatcaaaacgttagactcgcggacgtatactttccaagtgaacaagaatgaaactgttttgctattcaaggagaagattgctagtgagacaggggtgccggttggtcagcagcggctcattttccgaggacgggttttgaaagatgatcatcctctctcggagtatcatttggaaaatgggcatactttacacttgattgtgaggcagccagcagaatcagctccttcctctggtacaccttcacaaggggcaactgcaaatgatggaaataatacaaatggtggaccatctcgaaatggaa

SEQ ID NO: 128088 - DNA, 631 bp, Arabidopsis thaliana
atgctacgcgagctctaatacgacttacttagggaaacgctggtacgcctgcaggtaccggtccggaatttccgggtcgacccacgcgtccgaaaaaaaagtcccactagaaaagctcattatgaaagtgaacgaggaaaacaacaagccgacaaagacccatgtcttaatcttcccatttccggcgcaaggtcacatgattcccctcctcgacttcacccaccgccttgctctccgcggcggcgccgccttaaaaataaccgtcctagtcactccaaaaaaccttccttttctctctccgcttctctccgccgtagttaacatcgaaccacttatcctcccttttccctcccacccttcaatcccctccggcgtcgaaaacgtccaagacttacctccttcaggcttccctttaatgatccacgcgcttggtaatctccacgcgccgcttatctcttggattacttctcacccttctcctccagtagccatcgtatctgatttcttccttggttggaccaaaaacctcggaatccctcgtttcgatttctctccctccgctgctatcacttgctgcatactcaatactctctggatcgaaatgcccaccaagatcaacgaagatgacgat

SEQ ID NO: 128089 - DNA, 394 bp, Arabidopsis thaliana
ccacgcctccgaaaacatcgaaccagcacaagtattctctcgctaggaccatcgttatgtggaagttgaagataggagagggaaatggagaagatccttacttgttcagcagcaacaacttcgtcggacgtcaaacatgggagtttgatcccaaagccggcacacctgaggaacgagccgccgtcgaagatgctcgccggaactatttagacaaccgtccccgtgttaaaggttgcagtgatctcttgtggcgaatgcaatttttgaaagaggcgaaattcgagcaagtgatcccgccggtgaagatcgacgacggcgaaggcataacttacaaaaacgcgacggatgcgttacggagagcagtttcgttctactcggctttgcagtcctccga

SEQ ID NO: 128090 - DNA, 756 bp, Arabidopsis thaliana
  unsure (1)..(756): unsure at all n locations
cggactcggataatatatttcttctctaataattgaaagcaaaagaaaacagtttttttttttagaaaggtaaagaaatggaggaaacaaaggagagaaagatagtagtagcagtagacgaaagcgaagagagcatggaagctctgtcatggagtcttgacaatctttttccatatggttccaataatacactcatcctcctctacgtcaagccccctcttcccgtttactcttccctcgatgccgcagggtttatagtgacaggagacccggttgcagctttgaagaagtatgaatacgagctcgtggaatcggtcatggctcggtctcgaaccgtgtaccaagattatgagtctgatattaatatagagagaccgagttgggaagaggagatgctaaggaagttatatgcaacgcagttcagaaacttagagttgatatgttagtaatgggcactcatgactatggcttcttcaaaagggctttgctagggagtgtgagcgagtattgcgccaaacgagtcaagtgtcctgtggttatcgtcaagaagcaagctcaagataattaagctcatatgattgcattgtgtatatgtttcgaaagaactggtgtaacccttgaatcaatcttcgtatgcgataataaaatacaaaacggttttanccnnaaaaaaaaaaaaaaaaaaaaaggngagcggcggacagtatacaagcttccgtacgcgtgcatgcgacgtcatagctcttctatagtgtc

SEQ ID NO: 128091 - DNA, 631 bp, Arabidopsis thaliana
tgtaagcttatttctatcgattttttatcacttaatttgctggattatacttgcttaaaaaacttgagaaattatgagaaagtgaatttaatcaagtagttatgagttaatctgtttatcatgagcaatatttagtacaaaaaatataacatatgataagcaaaatatggttgttttcaaagagagttggcgaaataaatgtaaatataaccaaattaatgtgcagattaatatagagagacgagttggaagaggagatgctaaggaagttatatgcaacgcagttcagaaacttagagttgatatgttagtaatgggcactcatgactatggcttcttcaaaaggtaaggtttcaatctcttataagaaacaaaaatattttggtttaatggttatttgataatcatttgatatatttgatagggctttgctagggagtgtgagcgagtattgcgccaaacgagtcaagtgtcctgtggttatcgtcaagaagcaagctcaagataattaagctcatatgattgcattgtgtatatgtttcgaaagaactggtgtaacacttgaatcaatcttcgtatgcgataataaaatacataacggtttaaacaaatttaaaagatatttttgctt

SEQ ID NO: 128092 - DNA, 496 bp, Arabidopsis thaliana
aacctgctttcaaagcttttgacatgcaaggactaatcaacaggattaacagatcaatcgttcctccacttccggcgcaatattctgctgccttccgaggtctcgttaagagtatgctccggaaaaatccagaactcagaccaagtgctgctgagcttcttagacaaccgctgcttcaaccgtatatccagaagattcatttgaaagtgaatgatccaggaagtaatgtgttacctgcgcaatggccagaatctgaatccgccaggagaaacagttttccagaacagagaaggcgtcctgctggcaaaagccatagctttggtccaagcaggtttaggggtaacctagaagattctgtttcttccataaaaaaaactgtgcccgcatatctgaatcgtgaaaggcaagtggacttgtctacagatgcaagcggtgatggaacggttgttcgtagaacttcagaggcttctaagagttctaggtatgtaccagtgag

SEQ ID NO: 128093 - DNA, 361 bp, Arabidopsis thaliana
accacacgtccgaaaaaaaaaagcctctctctctcctctcctatttatacctctctcgatctctctcgccggcgctgcaaatccctaggtttttcaatcacacccaaaacatttgtagagccccaagtactcaatttcgcttattgatagagagagagagagattgagaatcgcgatttgattttatcaatcgatgccgtgaaaatctcgtaatcagattcaaaattgaggatggttagctgctaccgtaatccttgcgtgaagattgagaagaactaattttggtttgtgagcaactttcgaatcagctctgttagatttgatttgaacttttatttgaagatggatcggtgtgacacct

SEQ ID NO: 128094 - DNA, 413 bp, Arabidopsis thaliana
cttcttctcctgccttctgaatcttcttccatggcttctgattctcacacggcaggtgttactacacctgagaaggcattggagaataaggtgagcgaggaagctaagttgatggagaaagagattatttcgtcggattctgcagatgtggtgaatgataaaccggcatcagattcaaacccggtggtcaccaaagaagaggagattgatcaaactcctgctggtgaaccagagaaagaatcaccagcagtggtggaagacgttggagctgttgtgaaagcagaggaatctacagagacagtgaagcatgagaacggtgagaagggagctgaacaagtggaacttaaagagccaatccttgttaaagagacttgtgcagaagttaatgttgaaactgttgataccgaaaaagc

SEQ ID NO: 128095 - DNA, 487 bp, Arabidopsis thaliana
aaacaatttacaaaaggccttaaaaaagcaaagattcttcgctgacttcgttctctctttcgctggcgaagaagattttctagggttttttgtttgattttcgtgaagtcggaaaaattattattattaatcgtgttgagctgtttgatcggtgaagactatggcgtcgtcttcagcttcggcgacggtggctgttgataaagctaccagcgatcttttgttaggtcctgattggactacgaatatggaaatctgcgattctgttaattctcttcactggcaggcgaaagatgtagttaaagctgtgaaaaagaggctgcaacataagagttcgagagttcaactacttgctcttacgcttttggagacgttggtaaagaactgtggagattatttgcaccatcaagttgcagagaaaaacattttaggggaaatggtcaaaattgtgaaaaagaaggcagatatgcaagtaagagataagatattg

SEQ ID NO: 128096 - DNA, 607 bp, Arabidopsis thaliana
cgacccacgagtaatattaacacttagtttttcttttccttttcattattttcttttattttgtaacagaaataaaagaaaataaaagaaaatacaaagatgggttacatttcaatgtccgtggttgcattccttgttgtttttgcttcgccggtggttctagccaccgatacagatccgattccagaaaacagagcccaaatcccgcaatggtttaaaacaaacgttaaaccatattcccagagaaagggcacgctagaccccgccctcgaagctgctgaagcagcgcgacaaattatcaccgtgaatcaaaaaggtggcgctaatttcaagacattaaacgaagctatcaagagcattccgacaggaaacaagaaccgtgtgatcatcaagttggctcctggtgtatacaatgagaaggtcacaatcgacatagctcgaccattcattacattgcttggtcaacctggtgcggaaacggtcttgacttaccacgggacagccgctcagtacggaaccgttgagagtgcaactcttatcgtctgggctgaatatttccaggcagctcacctcaccattaaaaacactgctccaatgccgaaaccag

SEQ ID NO: 128097 - DNA, 782 bp, Arabidopsis thaliana
  unsure (1)..(782): unsure at all n locations
cactaatacgactttatatagggaacgctggtacgcctgcaggtaccggtccggaattcccgggtcgacccacgcgtccgcaaaatgcatgtatccataattttcgtcttcaacgtcctcgtcgtttcatatccaaatccatgacaaaaacgatgccggatgctaatcctcttgacctccgtcgacgctcgggcaactatcaaccttcttcatgggaccatagttatctcctctccatcgagaacaaatatgtgaatgaaaaagaagtgataactagacatgtgttgaagaaaaaggtgaagaagatgctagaggaagtagagacgaagagccgtctcgagaaattagagctcatcgatgatttacaaaagcttggggtttcgtatcattttgagcaagaaataaataacattttgacaaattttcatcttgaaaatggaaaaaatatttggaaatgtgacaaggaagaagatttacatgcaaccgcactcgaattccgacttcttagacaacatggttcttggtgtctcagaaggttagtattttcacactcggtaaaaacgaaatgaaaaaattctataaattagtttcactgtataaatatcatatgtaactaaaaagaccatgcatttcagatatatttgatgtaatcatcgacaaaatcgaaagtaatacgttcaagagtgacaatataacaagtaaaaaaaaaaaaaaagnnnnnnnnnnnnnnnnnnnnnnnnnnnnnnnnnnnnnnnnnnnnnnnnnnnnnnnnnnnnnnnnnn

SEQ ID NO: 128098 - DNA, 367 bp, Arabidopsis thaliana
ccggtcagtgaggaacataaagaactggggaacattttggatattttttctccaagtgaagttaaaaggaacaaggagacaaggttggagtcgaccaatcattggtggatctagagaaatctggctacaattcaatttcagatgaggttttcaaaaacacagaagatgaatgttcaaatagcataagaagctgtgaattttcttccttcgtttttgtccaatgggaacaatggcacaattgggaaccatgggaaaatttggagccatggcacaagagcagcaagttaaccagatgatcatggataaacaatcagtagaagaatggctatcgcgcgtcaactcgctaataccatccgtcctcaacaag

SEQ ID NO: 128099 - DNA, 530 bp, Arabidopsis thaliana
  unsure (1)..(530): unsure at all n locations
gtgagaagacgaaatggttgaaagaaggaatggattgcattttgctctattggaaagacaaggttatcgatttcgatctaccgattacagttaagctaaaagtggttgacgttgatcctggccttcgcggtgatactgtgcaaggtggatcaaaaccggcgacaatggaaacgggtgcaatagttgctgtaccactctttattaacgtcggtgaagagatatttgtggacacaagaactggtgcatacatgaaccgagcgtgatccgggtctactacacctagttaattgggtcgttaacaacaaggcaatgatacatcttttttgtatatgagaatgttcgaatccggggacacatgtttgtttttctgaacatcgagagacaatttttcgattaaataaatttatatatattttaggttgaaaaaaaaaaaaaaaaaaaaaaaagnnnnnnnnnnnnnnnnnnnnnnnnnnnnnnnnnnnnnnnnnnnnnnnnnnnnnnnnnnnnnnnnnnnnnnnnnnnnnnnnncg

SEQ ID NO: 128100 - DNA, 1063 bp, Arabidopsis thaliana
attggctaagaaaacagagagaatcggtatttttagcctttgctaagatattttgatcaaaaatcccacttttgagcggtcttatctttattctccacctcaaaggaccatttctcatggcttctgttccggtgagacctctacctcttcttcgccggaacatcacctcgacgacggcttcgaaatcatctccaatgctcgccaacgtttcgagccggcattctctcgggatctctacgtatgatgaatttttgaagcaaataaaaactccggcaactgtgaaccaccggcggcgagtaagtacggtggtggcgtcggcgggaaacttgacggcgccgtcgtgggattcgtggaagcctgataagacggcggcggctacggctcttttgctgagtgacgtcatatggcctgctgctggagcgtttgcggcaatggcattattgggaagaatggatcaaatgctatctccgaaaggcatttcaatgtcagttgcaccacttggcgcagtctccgccattcttttcatcaccccttctgctcctgctgctcggaaatacaatatatttttggctcaaataggttgtgctgcgattggggtggtagctttctccgtcttcggcccaggctggctcgcccggagtgtcgccctcgccgcttccatcgcttttatggtcattactcgtgccaatcgccctcctgcggcgagcttaccactaatgttcatagatggagcaaagttccatcacttgaatttctggtacgcattgttcccaggtgcagctgcttgtgtcatcctctgccttctccaatcgatcgtatgttacttgaaggaaaacatgaatttttgatgaatcacccaccccccatgtacgatcgaattaatggtatatataatacatacatatcgatggaaatcttgtgaaaatatttgattcatatgtatccacttgatgaacgtatgtaaatgcctaaataattattacgttcattcaatattatcgtggtctaaaaaaaaaaaaaccccaaagggcggcagctctagaggatccaagcttacgtacgc

SEQ ID NO: 128101 - DNA, 464 bp, Arabidopsis thaliana
gcgtccgaacgaagcgatacttggttacttgaaaacagagctctattgaggtggtcatgggtcagaactcaagaatcaagagcggcggtatcatgcaaagtgggagccggcgtcaagaaaacaaacaccagcccagaagaatcttcaaatccatgacctttaacggagatctctgtttcttctacccattccaggaaccaaatcaaagatgcgtcgtttggccgtggttggaagtatcaacgtgaatggtacacctgatgatgctgaaggagtagaaggagaaggagcggttgatgtcaaagcgattggagaaatgaggaaatgtgtggatttgaaggaaatgaaaggagacaaagggattattactaaaggttttgttttgtttagaccagccgacgttgtctgttgttcctgttgaggaagatgtttggaatatgatttgtgaattgggaaaatgggtttgt

SEQ ID NO: 128102 - DNA, 617 bp, Arabidopsis thaliana
  unsure (1)..(617): unsure at all n locations
cgcctgcaggtaccggttcggaattcccgggtcgacccacgcgtccggactcaccgactggtaaacgaaccaaatcggagagatttcctctctcacggtgggaattcgccgtgtttttcaccgtctttctcgttttcaccaccggactcttttgtatttacctcaccatgcctgccgctgaatacggcaagctcaaagttcctagaactatctccgatcttcgattgctcaaagagaatcttgggtcttatgcaagtgagtaccaagcacggttcattttaggttactgttcgacgtatatctttatgcagacatttatgatacctggaacgatctttatgtcattgcttgctggagctcttttcggtgtggttagaggttttgttcttgttgtccttaatgcaactgctggagcatgttcttgcttcttcttatcgaaattggtcggtaggccattggttaactgggtatggcctgaaaagtttgaggttttccaagcttagatttccgaaagaagggntaaggntcctaaactacatgcggttcttaagggtacacccacatttccaaacngnttataaatttggnttcncaanngtgnaacccttaagggtnna

SEQ ID NO: 128103 - DNA, 400 bp, Arabidopsis thaliana
aaaatttgccgcctagcaaaacaaagatgcaccggcacggggcgtatttggcaaagagctagccgcagcatatactactggccggtattaaaaaatgtaaataactaacaatcatatttatctttctttattttaaaagcatatttattttgtcgtgattatgttaattagatttcaaatttatatattttcacatagaccaattaacaactacaatgaaatacttgataacacataccccgatgaagtagttttttattgaataaaaaaaacaaattgaactggtgtagaaaacttgtgaataagagaggttaacattttgtccaaaaaaaaaaagaagaagagagtttaacatattttttttcggttttaagtttagttaacatttttcatatccaaa

SEQ ID NO: 128104 - DNA, 798 bp, Arabidopsis thaliana
  unsure (1)..(798): unsure at all n locations
tgannnnctcagattcgtgctttgttgaggatggaacatttcagaaactttcagacttgcaggctttcaaagatcatttgcccgcgcgtccagaaacaaggaaagaaggagaaactgacttggttgtgctctgttccgagggttctgaatcgaatagtcaagctggacagtcacattcagagcgtgaaagcttcttggaacttgttagttctgtagaacaatccggcagtaaatatacagctctttatgtttctgatccttattggtacacatcttacaaaactctccaaaggtttctagctgaaactgctaaaggaaacagtactcctgaaattgctactggctgtgatgaactctgcaaatttaagtcatcacttttggagggcatactagtgggaatcgtttttcttctcatcttgatcagtggactttgctgtatggcgggtatcgatacaccgactagattcgagactcctcaagattcttaagctgttgaccttaagagccatccccaccttttgctttgcttttgacgagtcttttcttgtgcatagtgcgcattgtggaaggtacttcaatgtcgatttgttacattattacttcaaaacaaaatctgcatatgccataaaatccccttgtatcatttattcatcttgtttgtgagtctttcttaaacgtcataaattaataatggagaacgagtaaaaaaccaaaaaaacaaaaaaagggcggccgctctagaggatccaagcttacgtacgcgtgcatgcgacgtcaaagctctcntataagtcacct

SEQ ID NO: 128105 - DNA, 426 bp, Arabidopsis thaliana
cgttgacggaaaatttgggagagaatattctcgatggggaaaggaggaggttgtgttccgagcaagaagaagaagccggccaccaccggcgatggtcccggaatcgatgatgataacgacgctactaatgctccgatccaaattgacgatgatcaaaccaccattgacggcgatcgaacaacggcgacgaatactggaggaacaacaacaccagcgattactactacggctgctaagatctcgtcaccgctcaagatcttcgtcgtgttctattcgatgtacggacatgtggagagcttagcgaagaggatgaaaaagggagtggatagcgtcgaaggagtggaggcgacgttgtacagagttccggagacgctttcgcaagaagttgttgagcagatgaaggcgccgggtaaggatttggagatt

SEQ ID NO: 128106 - DNA, 791 bp, Arabidopsis thaliana
  unsure (1)..(791): unsure at all n locations
atgannnnnnnnnnnnnnnnnnnnnnnnnnnnnnnnnnnnnnnnnnnnnnnnnnnnnnnnnnnnnnnnnnnnnnnnnnnnccacgcgtccgcaaacttgtagagatgtccatcctatcagcaaccaaaagccatgggagcgaccatgtgttttctcttgcttccacagtggtgaaatttgttcttgaaacaaaaggggcccacagtgcgaggaagatatacaagaggttcttggctcttcctggtcccagtcttgttctatacaaaggttgcattgaaatagagcccaacctcatatcagtaggtgataaagatggtcccagtaatgcccggaagctgtatgattctgctgttgcaagttacggtcaagacgtggagctgtggaagaattactactcattggagacaaagctgggaacatcagagacagccaatggagtgtattggcgtgcgagaagactctgaatgaatccgcggatttcatagtttgatctctgatttataggtagtctagtatgtatgatgaaggaaacactatgtttgcctcgtatttgtggatgcaggtttcagttatgtgatccttaagatatgaattttggttgtaacagaacaggagtcgatgtactactttatgagtctagttatactctaaaacacttttttgatacaaaaacatgttgaagttccaaaaaaaaaaaaaaaaaaaaaaaaaaaaagggcggccgctctagaggatccaagcttacgtacgcgtgcatgcgacgtcatagtaatctatagtgcagctcaatc

SEQ ID NO: 128107 - DNA, 482 bp, Arabidopsis thaliana
ggtgataaagatggtctcagtaatgcccggaagctgtatgattctgctgttgcaagttacggtcaagacgtggagctgtggaagaattactactcattggagacaaagctgggaacatcagagacagccaatggagtgtattggcgtgcgagaaagactctgatgttcccagtcttgttctatacaaaggttgcattgaaatagagaccaacctcatatcagtaggtgataaagatggtctcagtaatgcccggaagctgtatgattctgctgttgcaagttacggtcaagacgtggagctgtggaagaattactactcattggagacaaagctgggaacatcagagacagccaatggagtgtattggcgtgcgagaaagactctgaatgaatccgcggatttcatagtttgatctctgatttataggtagtctaatatgtatgatgaaggaaacactatgtttgcctcgtatttggggatg

SEQ ID NO: 128108 - DNA, 792 bp, Arabidopsis thaliana
  unsure (1)..(792): unsure at all n locations
cgtccggacaaagtcgagctcttgtacacaaagtttttttttttggtcaaatcaaaactcctggtgcaggcgctactgcctccacccccccaaggagagatctgtgacattaatggaacctgtgtggatgctgcggaagatgagtttttcaggttaacgacaaaagaagggaaattgacagttgaaagagagacttttaggacaccaacagctgatttctcgccgatcttgcaattcgagcaagaccctgttcagattcttgatgctttgttgcctctgtatcttaacagtcagattcttagggcattacaggagtcattggctagtgagcttgcagctagaatgagtgcaatgagtagtgcttcggataatgcatcggatctcaagaaatcgctttcgatggtgtataatagaaagcgtcaagctaagattactggagagattcttgagattgttgctggagctaatgcacaggtttgatttgttttgaaccctctttgaatcttctatatgagtccaaaactctcttcttcttctttttttttcgttatcgtttgtataatgtataattgataatctctagaactctttataatcatgcaattacaaacaaaaacgcggttgtatctattttggcttttcattggataaaatgatggagatcttcgttgaaaaaaaaaaaaaaaaaagnnnnnnnnnnnnnnnnnnnnnnnnnnnnnnnnnnnnnnnnnnnnnnnnnnnnnnnnnnnnnnnnntcggtctcaattcaattcnnnnnnnnnnnnnnnnnnn

SEQ ID NO: 128109 - DNA, 945 bp, Arabidopsis thaliana
  unsure (1)..(945): unsure at all n locations
nnnnnnnnnnnnnnnnnnnnnnnnnnnnnnnnnnnnnnnnnnnnnnnnnnnnnnnnnnnnnnnnnnnnnnnnncaaaaagagtcacttccgtgtcacaagaaaccatgaaactttctcttcatcaaccacttctcttcttcttcttagccagcgtcctcccattaatcctgaccgtccattctcaatcagacgactcagatttcatccgtactagctgcaacaccacattataccctgacctatgcttctcttctctttcctccttctctagctctgttcacaacgatccagccctcttggctcgagccgccatctccgtcactctcaccaagactctcgacttagcctcatacctcgccaatatcaccactctccagccagagagcaacgaagatggtgctcaccacccaaccgcagccgctgtttttcacgactgcttcgacaatcttaaagacgcggtcgaagaaatgaaaggctcgatgaaacagatgagggagctggtctcgactggctcgctcgagtccttcaggttccaaatgagtaacgtgcagacgtggctcagtgcggctttaactgatgaggagacttgtacggacggatttaaagacattcacgatgagccgaggaaggatgacatatgcgcacgggtcgatgacgttaaaaagatgactagtaatgcgttggctctagttaatcgatgtgttgataaggccatacattgatcattttatcattattcactaaatattcttcttcttttttttcttacttgaaaaagaagttattggttaaatgtttttggttatcacgcgtgcatgatagagatataataagataagcctgtttgtgattggctgtaatgaaatagtgatagggcggcacgctctagaggatccaagcttacgtacgcgtgcatgcgacgtcatagatcttctatagttgtc

SEQ ID NO: 128110 - DNA, 618 bp, Arabidopsis thaliana
  unsure (1)..(618): unsure at all n locations
cacccccccnttnccgctntcgcaanttaagcccgncgaagaatgaaggcccgtgaaccgatgnggnnctgtcncgctggcncgctcgagccttcaggtccnaatgggtancgtgcagacgtggctcagtgcggctttaactgatgaggggacttgtacggacggatttaaagncattccacgatgagccgaggaaggatgacatatgcgcacgggtcgatgacgtttaaaagatgactagtaatgcgtgggctctagttaatcgatgtgttgataaggccatacattgatcattttatcattattcactaaagattcttcttctttttttttcttacttgaaaaagaagttattgtttaaatgtttttggttatcacgcgtgcatgatagagatataataagataagcctgtttgtgattggctgtaatgaaatagctgatattatgtagttggttaacgcttttttgtttgtcgaaattacgaaaagaatcaagcctgtgtgtacaaagaattagtagtcaattatttcttaaaagaaaaaaaaaaaaaagggaggccgctctagaggatccaagcttacgtacgcgtgcatgcgacgtcaaactcttctatagtg

SEQ ID NO: 128111 - DNA, 563 bp, Arabidopsis thaliana
  unsure (1)..(563): unsure at all n locations
atgatactccagctctcnnnnnnnnnnnnnnnnnnnnnnnnnnnnnnnnnnnnnnnnnnnnnnnnnnnnnnnnnnnnnncccacgcgtgcgctcagcgtacttagttatatctctgctggaggggtgattgcatcagtgctagtggttttatgtttgttttggattggtttggtagatgaagttggaattcacagcaggggaactacactaaacttgtcaacattacctgtggctataggactctatggttactgctactcaggacatgctgttttccccaatatttatacttctatggccaaaccatctcaataccctgctgttctcttgacatgttttggtatttgtactctgatgtatgccggcgtcgctgttatgggttatacgatgtctggagaatcaacacagtcacagtttactctcaacttgcctcaagatttaattgcaactaacattgctgtgtggactaccgtgggcaatccatttaccaaatatgctttgaccatatctccagtagcaatgagtcttgaggagttgataccatcaaggcatatcaggtcac

SEQ ID NO: 128112 - DNA, 883 bp, Arabidopsis thaliana
  unsure (1)..(883): unsure at all n locations
acccacgcgtccgggaaaacgatcaatctttgttatctctcactcttcctcttcttattttgatcttcctcacttctgtttgattcctaataatggaacacgagggcaagaacaacatgaatggtatggagatggagaaaggaaagagagagcttgggtcaagaaaaggagttgagttaactatgagagtgttggctttgatcctaacaatggcggctgcaacagtacttggtgtcgcaaagcaaacaaaggttgtgtctattaagcttattcccactttgcctcctcttgatatcactactaccgccaaagcctcttacttgtcggcatttgtgtacaacatttctgtgaacgctatagcttgcggttacacggcgatctcgatagcgattctgatgatcagcaggggaagaagaagcaagaagttgttaatggtggttttgctaggagatctagtgatggtggctttgctgttttccggcactggagccgccagcgcaattgggctaatgggtttacatgggaacaagcatgtcatgtggaagaaagtttgtggcgtttttggaaaattctgtcaccgagctgctccttcgcttcctctcactcttcttgctgcagttgtgtttatgtttcttgttgttcttgacgctattaagcttccttaattattaattgtttctgttcttgtcgttttgtgtgatgtaaaataactatcaacaatcatgtaattgtctattgcttctaatgttttatcacatcgttttctatggtgagacgatatattcaaaaaaaaaaaaaaaagnnnnnnnnnnnnnnnnnnnnnnnnnnnnnnnnnnnnnnnnnnnnnnnnnnnnnnnnnnnnnnnnnnnnnnnnnnnnnnnnc

SEQ ID NO: 128113 - DNA, 590 bp, Arabidopsis thaliana
  unsure (1)..(590): unsure at all n locations
nnnnnnnnnnnnnnnnnnnnnnnnnnnnnnnnnnnnnnnnnnnnnnnnnnnnnnnnnnnnnnnnnnnnnnnnnnnnnnnnnnnccacgcgtccgctaagagtctcttcaaagtttatctggtcgggttgggaaaaatccaactagagaagagcataaaagtagacatctgatcaacccgacccataataacctttttttgttggccgcgtaatatgttcgagcgcggccatcacactaagaacattcataaaaaaaaatccacaggattcaaagcccttaagctttgatcatagtctcttaaagaggtagtaaaaccataaactagagccccaatttgcattcacaagccacctaacacattagcttctggtcatttctgctttatatacacatcaagtaaaaaatggtgagaagaagagaaggtcttacattgccaatcataaaaccggcgcttcccgaggtcagatcagcagcgacaacgccggtggcctcacagaaaccaaaacatcgtttatcgaaacaactatctatgtgtgaaacaccaagagacgttgcttgggaaagaagaaggcgtcagatgataatgatt

SEQ ID NO: 128114 - DNA, 539 bp, Arabidopsis thaliana
  unsure (1)..(539): unsure at all n locations
atgattcgccggcannnnnnnnnnnnnnnnnnnnnnnnnnnnnnnnnnnnnnnnnnnnnnnnnnnnnnnnnnnnnnnnnnnccacgcgtccgcggacgcgtgggctctctttatctctcccattttttttttcttctctaaatttttattttttctctgttttatttttcatttctgtaacttcttctccgtcaaagacacagagagtagaaaaaaaagaaaaacagaggaacagattaaaaaaaaaagaaactttattaaacgatgatgcaactgggtggtggtactccgaccactacagcggcggctacaaccgtcacaactgctacagcaccaccgccacaatcaaacaacaacgattcagcggcaacagaagcagcggcagcagcggttggggcgtttgaggtgtcggaagagatgcacgaccgtgggtttggaggaaatcgttggccgcggcaggaaacgctagcgttgttgaaaatacgatctgacatgggaatagcgtctcgagacgctagcgtaaaaggtcccttatcgga

SEQ ID NO: 128115 - DNA, 581 bp, Arabidopsis thaliana
  unsure (1)..(581): unsure at all n locations
aacatggaggatgaagaaccaagatggagagagcttgagtgtagcgcattcccaggcgtggttgtaccgcctccaagactagaccatgtggctgtgagcatgccgtgtggtagggtcatcatctttggagggtcgattgcagggcttcactctccttcgcaactgtttctaatagatccttcaaaagagaaaccgtcatggaggatcctgaatgtcccagggaaaccacccaagttagcttggggacatagcacatgcgttgttggaggaactagagtattggtccttggtggtcacaatggtgaggaatggatactcaatgaattacatgaactctgcttggctagctggcaagactcggatctgtaaagactctttccttattcatttggtttgtggttatgtatctgtcacattccaaactcttatgacagaagcgtgtgtacatagtaaattagtgattgttgtacgctttagatatcaatgtaatgatggtaatggggttgctgcatgagatccttccataatatacttactccctggtacatgaccatgtagcatttgactttgacgganannaa

SEQ ID NO: 128116 - DNA, 1060 bp, Arabidopsis thaliana
  unsure (1)..(1060): unsure at all n locations
tacgcgcgnnnnnnnnnnnnnnnnnnnnnnnnnnnnnnnnnnnnnnnnnnnnnnnnnnnnnnnnnnnnnnnnnnnnnnnnccacgcgtccggttgtccgtttgagtgatgctattaacgatgaaggcaagcgcatagagaatctggtcagagggatatttgctggaaacatctttgatctgggttctgcacagcttgctgaggttttctcaaaagacggcatgtcctttttggctagctgtcagaacttggtttcacgaccatgggtcattgatgacttggataactttcaagctagatggctcaagaagccttggaagaaggctgtgatatttgtcgataattctggtgcagacataattttgggtatcttgccctttgctagagaaatgctacgtctaggaatgcaggttgtactggctgctaatgagcttccgtctatcaacgatgtaacttatatcgagcttgcagagatcttgtctaagctgaatgatgaaaatggacaattgatgggtgttgatacctcaaatcttcttattgcaaattcagggaatgacttaccggttattgatcttgcaagagtatcacaggaggttgcgtacctctcaagcgatgcagacttggtcatcttagaaggcatgggccgtggaatagagacaaacctttatgctcagttcaagtgtgattccctcaagatcggaatggtgaagcatccagaagtagcacagtttctcggaggacggctttatgactgtgtcatcaaatacaatgaagttcagatttaattatatttcacacacatttttactaaaccagccattcagtttattatattaaaaactgttaggctttgtaagttagagatccaatctctatctctgcattcagatgtaagaattgaaaactctttcgacattctttatcaaacacacacaaaaagcaccaatctttctgattggcccttaaaaaaaaaaaaaaaaaaaagnnnnnnnnnnnnnnnnnnnnnnnnnnnnnnnnnnnnnnnnnnnnnnnnnnnnnnnnnnnnnnnnnnnnngctcatt

SEQ ID NO: 128117 - DNA, 576 bp, Arabidopsis thaliana
  unsure (1)..(576): unsure at all n locations
ccgnnnnnnnnnnnnnnnnnnnnnnnnnnnnnnnnnnnnnnnnnnnnnnnnnnnnnnnnnnnnnnnnnnnnnnnccacgcgtccgcggacgcgtgggttgaagctaaatctctctctctctaactacctctgtggtacagagtctccgtgttctaaaagctttgagaccatcttcaatttcacagagaaaaacaaaacaagcaaggagaagaaacatgaacatcttcactaagaaacctaatcccagagaagtgcttcgggagagtaagagagagatgacacaagctaccagaggaatcgaaaaggaaatcggatctctgcaatcagaagaaaaaaagctcgttctcgagatcaaaagaactgctaaatcaggcaatgagggagcgactaagattcttgctcggcaattgatccgtctaaggcagcaaatagctaacttacaaggtagccgagctcaaatgcgaggcattgctactcatacacaggctatgcatgcacacacttcagttgctgctggaatgcaaggtgccactaaggcaatggcagctatgagcaagaatatggatccagcaaaac

SEQ ID NO: 128118 - DNA, 380 bp, Arabidopsis thaliana
ccacgcgtccaataagcttattgctagataaggtgaccaggttctgatcaaagtcgttaatcaagtgccaaacagcatctctctccactggcatgggatccggcagttacgaagtggttgggctgatggtccagcctatataacccaatgtcctattcagacaggacaaagctatgtttacaactataccattggtggtcaacgaggcactctgtggtaccatgctcacatttcatggctaagatcaacagtctatggtccacttatcatccttcccaaacgcggacttccttacccgtttgctaaacctcacaaagaagttcccatgatccttggggagtggttcaacgcagacactgatgcaatcatccgccaagcaa

SEQ ID NO: 128119 - DNA, 549 bp, Arabidopsis thaliana
  unsure (1)..(549): unsure at all n locations
nnnnnnnnnnnnnnnnnnnnnnnnnnnnnnnnnnnnnnnnnnnnnnnnnnnnnnnnnnnnnnnnnnnnnnnnnnnnnnnnnnnccacgcgtccgcggacgcgtgggaaaaaaaatcaaaaataaactcttgagcgatgagcaaccacctcttaccaccggagaacaagatcccgactctcaacttcgaccatctagagattttctcagcccttggacgtggatctaaaggagttgtgttcttagtaaaagccgataacaaatggcttgctttaaaagtcatactaagagaatcaatcgagtcaaagaaggccaaagatgagtacaaacgcataagtttcgaacaaggagtgttgtctcgattcgaccatcctctgtttccacgtcttcatggtgttatatccaccgataaagttatcggttacgcgattgattactgtcctggaagagatctcaactctttaaggaaaaaacagtcggaagaaatgttttccgatgagatcattagattttacgcggcggagcttgtgattgcacttgagtatttgcat

SEQ ID NO: 128120 - DNA, 610 bp, Arabidopsis thaliana
  unsure (1)..(610): unsure at all n locations
tgctacgcgcgnnnnnnnnnnnnnnnnnnnnnnnnnnnnnnnnnnnnnnnnnnnnnnnnnnnnnnnnnnnnnnnnnnnnnnnccacgcgtccgaaacaatgaaaggcgtctcctccaaaaaccaaaaagttattgaatctctctctggctgattgattaatggctgaggagaccgtacgtttgcctaattcgccggatgtaaacatatcatggagaaggatttctactggaaaactgagttttttatacactcaagagaaagttgttcctaattatctcacatctcccactggttcttgtcatgatgcttgtaaatcccgaaggaaagatgaatctgaagacaagccaagagttccacatcgcaaaagcgttagcagaagctattctggagctataaacttggattcaccactgaggaagagggcattgacaaaaccgctgttgagtccttctcgtagatgtgattctgttggtggctttgaacatgcgaagagccaagttaggaacttttctagcggagtttgtgatgttaataacagtcttgcacatggaacaattgaaaaggcactggctgcttctgaatctaggttagctgattcgactaagcgaa

SEQ ID NO: 128121 - DNA, 646 bp, Arabidopsis thaliana
atgatacgccggctctaatacgactttattagggaaagctggtacgcctgcaggtaccggtccggaattctccgggtcgacccacgcgtccgctctgcctcacactttaaaataacatcaaatctctatctatttatacaaacccttttcatctggcatcttcagttcagtaaaatagaagaaagcatctaacgaattggacaagtaagtgcgtttatgagtgatacagggatatcagcagtagcagttgctgctgctgtagtggtggtaactacggttacggtatggatatggaaaggtctgaatgtagcttggcttagaccaaagaaaaatgaggcttatctaaagagacaaggtctctctggaactcctttcacctttcttgtcggagacattaaaagggaagccagtatggtggagcaagaaaagtccagacccatcaatctaactgatgattacacgcatcgtgtcatgcctctgatacaacagaccgttaaggatcatgggaagacatcttacatgtggatgggacctatagcgagtgtgattgtgacgaaaccagaacacatcaaagatgttctaaacagagtttacgatttcccgaagccgccagtgcacccaatcgttgagctcttcgcgactggag

SEQ ID NO: 128122 - DNA, 950 bp, Arabidopsis thaliana
  unsure (1)..(950): unsure at all n locations
gatgcctcttgttgttagcgactcagctgaatctgtggagnagacatcagctgcgagcaaggtattgaagcatattttttcttagaacgatgcagnaaaagctaagaacagtattggaattcgtcctggtaaaggtaaaatgaggaatcgtcgttacatttctaggaaaggtcctcttgttgtgtttggaactgaaggagccaagattgtgaaagcttttaggaatcttcctggtgttgagctttgtcacgttgagaggcttaacttgttgaaattagcccctggtggtcaccttggtaggtttgtgatttggactaagtctgcttttgagaagcttgaatctatctatggctcgtttgagaaaccatcagagaagaagaagggttacgtcttgcctcgtgcgaagatggtgaatgctgatcttgctaggattattaactccgatgaggtacagagtgtggtgaacccgattaaggatggttccaagagagcggttctgaagaagaatccattgaagaaccttaatgtgatgttcaagttgaatccttatgctaagaccgcaaagagaatgtctctgttggctgaagcttcaagggttaaggctaagaaggagaagctcgagaagaagaggaaagtcgtcactaaggaggaggcccaagcgatcaaagcagcaggcaaggcttggtatcagactatgatttcagacagtgactacaccgagttcgataacttcaccaagtggcttggcgctagtcagtaatgatgctctcgtcatcgcaaagtctcttatatctaggcaaagattttggttttctgatttatgttcttcgtttgtattggatttatctgggattttatgttgttgagttggtaagacgatttttaagaactatgatggtgtttttcaaactcttttcaatctgtttcccatctgtttcccttagcgcccc

SEQ ID NO: 128123 - DNA, 793 bp, Arabidopsis thaliana
tccatacaactcttataggaaaagctgctccgcctgcaggtaccggtccggaattcccgggtcgacccacgcgtccgttttggactaagtctgcttttgagaagcttgaatctatctatggctcgtttgagaaaccatcagagaagaagaagggttacgtcttgcctcgtgcgaagatggtgaatgctgatcttgctaggattattaactccgatgaggtacagagtgtggtgaacccgattaaggatggttccaagagagcggttctgaagaagaatccattgaagaaccttaatgtgatgttcaagttgaatccttatgctaagaccgcaaagagaatgtctctgttggctgaagcttcaagggttaaggctaagaaggagaagctcgagaagaagaggaaagtcgtcactaaggaggaggcccaagcgatcaaagcagccaggcgaggcttggtatcagcctatgatgtcagacagtgactacaccgagttcgataacttcacccaagtggcttgccgctagtcagtaatgatgctctcgtcatcgcagagtctcttatttctacgccaaagattttgggcttctgcattcaatgcccttcgtgtagcattggatttaatctgggattttcatgttgctggaagttgcgtaagaccactttttaagaaactaatgatgggtggttttcacaactctcttcaacaaaaaaaaaaaaaaaagggcgggcccgctctagtggatccaagctcacgtacgcgtgcatgcgacgtcaaagctcttctatagtgtc

SEQ ID NO: 128124 - DNA, 515 bp, Arabidopsis thaliana
  unsure (1)..(515): unsure at all n locations
nnnnnnnnnnnnnnnnnnnnnnnnnnnnnnnnnnnnnnnnnnnnnnnnnnnnnnnnnnnnnnnnnnnnnnnnnnccacgcgtccgcaagaacggcttcgatgcctttcacatcgccgccaaaaacggaaatctacgtgagttgacttgattctcaaaagtctttgtgctcaagaattaccaattttgcatatatatgctgaagatcaactccatttttatctctaattaggttcttgatgtgttaatagaggcaaatccagaactctcatttacatttgattcatccaaaaccacggcgcttcataccgcggcttcacagggtcatggagagattgtttgtttcttgttggataaaggtgtggacttagctgctattgcgagaagcaatggtaaaaccgctttgcactctgcagctaggaacgggcacacggtgattgtgaagaagttgattgaaaagaaggctggtatggttacaagagtcgacaagaaaggtcaaaccgctcttcatatggcg

SEQ ID NO: 128125 - DNA, 589 bp, Arabidopsis thaliana
cggagcaagagatcgacttctttggggagatcttggttttccatttaccccccgccacagcaagcactcttcataggcgtttgggaccgcacttacggaagtctaattgagtatagccggcgccacaactactcctaccttgattcatttctatgatcacccgacataccagaggaataaaagagccgatacatatgtgctgctgcactctcctgtcgctctgttaaactaagaaacccgagaaaagagaaaacataaactcaagtcgatctctaatggtgtaaatgatgtgttgtgcaagtactagtaggaatgttgtcacagagagcggatttagttagttaatgttcatttcttgtatgagagttggagttcgtgtattgtacataagtatatgaggttcgggtgagtttgcatcaagtctcaactcttggcacagagacaactttactcgagtctgtggctcgttatttggctatggtcacttgtagaggcactcaatttgagatgtgtctgccccattgatggatcaaacgcggccgcgaattcgatatcaagcttatggtagaccctcgacaacaaggggggg

SEQ ID NO: 128126 - DNA, 602 bp, Arabidopsis thaliana
actacgactcaccttagggaaagctcgcacgcctgcaggtaccggtccgcaatacccgggtcgacccacgcgtccgctcgttatttgcgctatggtcacttgtagaggaactcaatttgagatgtttctgccgattgttggatcaaattatatatcatgatgtttcataatatttctgtttcctagactattaaagtgtatcaatgcggagttggctagctttcttctgacagcgatggcttccttagcgtcgtcttggtcggcaccactccggaagcagtagcttacatagtatcgtcttgaccggatttcgggtttgtctccgccgttgttatgtttttcttccagttgtttatttacttacaataaattttattagggatgtgttgataatatcgattgaagcgaattatcgcttaatgaagtgtattattcgatgcttttacttttgagtttgcaattacaggaattgattcatagcttttcaatgaattatggactcttattggctttaaaaaaaaaaaaaaagggcgaccgctctagaggatccaagcttacgtacgcgtgcaggcgacgtcataactcttctatagtgtgtccta

SEQ ID NO: 128127 - DNA, 358 bp, Arabidopsis thaliana
cattctctctcttaacacactcttattcttcagagagagaatgagaattccggcgacaactggtttttttgttttatacatagtttctgacttttgacggatctctctttccgcttagtcagattttaataattttcggtttagcttggttcgtttccggttaagatcggattatttttagttttatgttttttccctctttctacaggatttcagtgtaaatcccgcttgctgtcaattggtttctttcaggttcatctgttggcttgactcttctccaaagttagagtaatatcttcgccgtaatgtcttcgtcgttatgcgaagtggacctctctatcggtcttgggcggagctt

SEQ ID NO: 128128 - DNA, 693 bp, Arabidopsis thaliana
  unsure (1)..(693): unsure at all n locations
nnnnnnnnnnnnnnnnnnnnnnnnnnnnnnnnnnnnnnnnnnnnnnnnnnnnnnnnnnnnnnnnnnnnnnnnncttcttcttcccactctacgccatagctatggttttaccagagcttctcgtgattctagcagaatgggttctttaccgtcttcttgctaattcatgttacagagctgctagaaagctcagaggctatggtttccagttaaaaaatctcctaagcctctccaaaacacaatctctacacaacaattctcagcatcatcttcataaccatcatcaacaaaatcaccctaaccaaacccttcaagattctctagaccctctgttcccaagccttacaaaataccaagaacttcttctagacaaaaacagagcatgctctgtttcgtctgatcattatcgtgatacctttttctgcgatatcgatggtgttttattaagacaacattcgagcaaacacttccacacgttcttcccttacttcatgctcgtggcttttgaaggaggatcgatcatcagagcgatccttctcttgctctcctgttctttcctttggactctgcaacaagaaaccaaactcagagttctctctttcataaccttctctggtcttagagtcaaagacatggacaatgtttctagatcggttctaccaaaattcttcctcgagaacttgaatatccaag

SEQ ID NO: 128129 - DNA, 1003 bp, Arabidopsis thaliana
  unsure (1)..(1003): unsure at all n locations
atgatatcgccggcannnnatacgactactatagggaaagcctggtcgcctgcaggtaccggtccggaattcccgggtcgacccacgcgtccggcaacctctaaacaacacacaatttcgaaaatggcgcagcgatctagggttatcaccatgtctcctctcattctcgatcaagaagttgatctcgatctctgggaagttgttaatccttctgatggcgagttctccgacgattctttctccgtcgatagtctttccgacgatgacgtcatatctcttgacgacgcttcctttgtcgcaccctctgtcatttctccgccgcatgagataattcctattgctgacggtggtgatctcgccgtggatctggatggtgatgatgatgttggcgatgatgtcgttcgcgatgaagttgatgagaatgatcttggatggtctcagcagcggatgatgtttctcggtggaggttctggttattctgttggaattacgtacggagatagtgttaatgacgacggcgaagaagatcgcgagtacgacgattcgtatgatcttgacgaagagttggttccgcgtagcgtgagtaagaaggtggggagacaaaggatgaggaaactggggaaaagagcaatcgccaaggtctatgcctcgaagatatctccgtttttgaagcctggtatcgttcgtggtaagcatggtctcggcatgaaattcaagtgctgattgtgttgggatttcgaagtttcacaaggcgatgggatggtttcttcaagaactctcggtagaatttctcagtttctgggtttaattgatgtgtaaatttgttagttcaatttcaattcctctttagtagtaagtaattcggatgcttctgaagatctcattgtacatgatggaaattaaataactcgcattttaggaaaaaaaaaaaaaaaagaaaaannnnnnnnnnnnnnnnnnnnnnnnnnnnnnnnnnnnnnnnnnnnnnnnnnnnnnnnnnnnn

SEQ ID NO: 128130 - DNA, 518 bp, Arabidopsis thaliana
  unsure (1)..(518): unsure at all n locations
nnnnnnnnnnnnnnnnnnnnnnnnnnnnnnnnnnnnnnnnnnnnnnnnnnnnnnnnnnnnnnnnnnnnnnnccacgcgtccggtagctctctgtctttcgaagcagaagtgagactttgacgacaacagtgggaggaactatgagttcttgtgttgtgacgacaagctgtttctatacaatttcagattctagtatacgtttgaaatcccccaagctcctcaatctgagtaaccagcagagaagacgctctcttaggtctcgaggtggtttaaaggttgaagcttactacggtctaaagacacctccttatccacttgatgctttggagccgtatatgagtagaagaacactagaagtgcattggggaaaacaccatcgaggttatgtagataatctgaataaacagttagggaaagatgatagactctatggatacaccatggaagagcttatcaaggctacatacaacaacgggaatcctttacccgagttcaacaacgctgcacaggtctataac

SEQ ID NO: 128131 - DNA, 746 bp, Arabidopsis thaliana
  unsure (1)..(746): unsure at all n locations
agctgttaggattgatccttcttactccagagctcaccaaagacttgcttctctctatctcagattgggtgaagctgagaatgcaagacgtcacatttgtttttctggtcaatgtccggntcaagctgatctccaacggctacagacgctggagaagcatctccgacgatgctgggaggctcgaaagattggagattggaaaaccgcgattaaggaaaccgatgcagccattgcaaacggcgctgattcgtctcctcagcttgtagcttgtaaagcagaagcctttttgcgtcttaagcaaatagaggattcggatttttgtgtatcttgcattccaagattggatccatcattacccattttcaaccgcaggggaaaactctctttggtatggtagttgaagcttatgtgctctgtatccaagctcaagttgatatggcattaggaagatttgagaatgcggttgtcaaggcagagagagctgcgatgcttgatcaaaccaatcctgaggttgtatcagttttaaacaatgtgaagatggttgtgcgggcacgtactcgtggtaatgagctatttagttcggggagattctcggaagcgtgtgtagcttatggagacggtctcaagcaagatgactccaattcggttttgtactgcaacagagcagcgtgttggtataagctcggtttgtgggagaaatctgttgaagattgtaaccatgcgctcaaaagccagcctagttacat

SEQ ID NO: 128132 - DNA, 643 bp, Arabidopsis thaliana
  unsure (1)..(643): unsure at all n locations
atgtctcgccggcannnnnnnnnnnnnnnnnnnnnnnnnnnnnnnnnnnnnnnnnnnnnnnnnnnnnnnnnnnnnnnnnnnccacgcgtccgcccacgcgtccgcccacgcgtccgcccacgcgtccgcggacgcgtgggctcagtaggctccaacttgagcaatcttgagagtggaaaagtttatcaagataatcatcactcagctgtggagaaacctgttttggtccaaaatacagtaagtagggaacaaatcgatcagattactaacatctcagcatctctagcgcagtttcttgcaaatggtcagcccattccacagcttgaacaggcattgcagctgcctctgcattcagaatctgttcaaccaaatcaggctactactcaaagtaatgtagtgagtagtaatccaaatcagctatggggattagggatgagcactggcgctgaaggagtccccgcggttactgcatcaaagataagcaatgtcgaagagattcaagaagtatcgctagatcccaaggataacggggacaaaaagactgatgaagctagncaggaagaagagggtaagaaaactggagaagacactaatgatgctgagaatgtcgtggatgaagatgaagatggtgatgatgatggga

SEQ ID NO: 128133 - DNA, 517 bp, Arabidopsis thaliana
  unsure (1)..(517): unsure at all n locations
nnnnnnnnnnnnnnnnnnnnnnnnnnnnnnnnnnnnnnnnnnnnnnnnnnnnnnnnnnnnnnnnnnnnnnnnnnnnnnnnnnnccacgcgtccgcccacgcgtccggtttatatctcagaaaatggcaaaaatcgtgatattatttgatttcgatcggactttgatcgacggagatagtgacaattgggttgtcactgaaatgggacgcgcagagatcttccatcagctccgtttcactttaccatggaatcgtcttatggataggatgatgatggagctacaatcacaaggtagatcgattgatgacattaaatcttgtttgaagaaaatgcctattgattctcatattattgaagctatcaaatcagctaaatcttcaggatgtgatttaaagattgtgagtgatgcaaatcagtttttcattgagaagatactagagcaccatgatttggtggattgcttttctgagatttacacaaatccaacctctcttgatgataatgggaacttgcggat

SEQ ID NO: 128134 - DNA, 518 bp, Arabidopsis thaliana
  unsure (1)..(518): unsure at all n locations
tgatatnnnnnnnnnnnnnnnnnnnnnnnnnnnnnnnnnnnnnnnnnnnnnnnnnnnnnnnnnnnnnnnnnnnnnnnnnnnnccacgcgtccggtgaaatcaacaacagcgacgactgcagccgtgccgagcactcatctcttcttctctctcagtctcgctcgccatctccgtggagatcctcggacatggtcatgagatcgtaagagagaatcttcaaaaaattgaaattggaaatcgataagctaggagctaaggagaaatgtcggggaaactttggatcccgagatttattctcatcactctactgtttattagctcacgagttaactctcaatgtgaattcagtttcactggacgcaacaaggtctttcatttcaacctagcatcttcgattcggaattatcctcacggtgtgctcagcgaagatgggttttataaagtggaagcgaacagttccgtgttatggtttcagctttgtgacgtgctgattttcaatcatgatccccctcgatgtg

SEQ ID NO: 128135 - DNA, 671 bp, Arabidopsis thaliana
  unsure (1)..(671): unsure at all n locations
nnnnnnnnnnnnnnnnnnnnnnnnnnnnnnnnnnnnnnnnnnnnnnnnnnnnnnnnnnnnnnnnnnnnnnnnnnnnnnnnnnnccacgcgtccgcagaacaagatgatcagagaactcgaaagactcagcaaactttgccatgaccatttggttagaccgatagggtttgttatatacgaagacgttgctctcttgttgcatcagcatttacctaatggtaacttaactcagctgattcatgagtccaccaagaaaccagagtaccaacctgactggccaatgagactgtccatagctgttggagcagcagaaggtttagcatttctccaccaagtcgccatcattcacctcgacgtttcctctagcaacgtcttgctagactctggttacaaagccgtgcttggggaaatcgaaatatcgaaacttctagatccctctagaggcaccgcgagtattagctcagttgcaggctcttttggctacattccaccagagtatgcatacacaatgcaagttacagctccggggaatgtttacagttatggagttgtgttgcttgagattctaacctcaagagcgccggtggaggaagagtttggtgaaggagtagatttggtgaaatgggtccatggagcttcagcgagaggagaaacaccggaacagatactca

SEQ ID NO: 128136 - DNA, 805 bp, Arabidopsis thaliana
agctgatatcgataaccctcttttccagaatgctactcagcagaacgacaaatactacattctcaagaagcgaacagcatcatattcaagctatgcagatcatcattctcctggtttaacaactcaaggcaccaaatttggcaggaagatagttaaaaccttggcgtatcgggttaaatcgacgcagccgtcttctggtaacgctaagactgctggtgaaacttcagaagaagatgggttgaagacagatgcttcttctgttgagccacctactctgtctagtactgtgcaaagtgaagcctaccacacgaaaaactctgttgtaagtcttggaaaatctccatcctacaaggaagtagcattggcaccacctggttcaattgctaagtatcaagtctgggttccacaagcggaagtttcagataagcaagaggatgatgagatggagaaaaaaactgaacagggtacatcaatggagcttacaagggatgagcaaatgataacagggttagaggaagaggtaaaaaaggaaatttctgcagacccagaatctaacataacccaaggcgaagaagagatcaaagtagagttacaaccatctgaaggagtactcggaggaagtcatataaatgaaaacgacgaatctgggggtggaattcaggttgaagaacaagtcgaagttgaattgataaacgatggtgtaacagatatgattcattcgaccagagagcaacaagtgatagatcaattagctgctgattccgaagatctgaaggcaaaactgtcaatttctactacggactca

SEQ ID NO: 128137 - DNA, 198 bp, Arabidopsis thaliana
ccacgcgtccgaatttgaaagaaaagaaggtttctcatgagtttgtgagctcacggtgaaagtccataagttatatatagcttgatttgctttcttacagttgttttgatatgacggatatacagaactcccatgtaatgacgtaccacagttgcgcataacgtttgaacgcttttattgatctatataatggacctt

SEQ ID NO: 128138 - DNA, 524 bp, Arabidopsis thaliana
  unsure (1)..(524): unsure at all n locations
nnnnnnnnnnnnnnnnnnnnnnnnnnnnnnnnnnnnnnnnnnnnnnnnnnnnnnnnnnnnnnnnnnnnnnnnnnnnnnnnnccacgcgtccgagagtctagacaatgaatagctcgatgacgacgagtccaacggctcgagccttccttcatcttcactcgtcaccattcactttacgttcgagaaagtcaccgtctggagtttgtctagtctcgtggccgccttctcggtctcgcaggactcgacgactcgtttgtatggccgaaccttacctcattaggaaaatggagtctgttgagaagacatggaaggagttatcggtgaaactagctgacccagatgttgtttcgaatcaatctgaataccaaaaactggcacaatccatgtcggagcttgacgaggttgtaacagtcttcagaagattcaaggactgtgagaagcagttactagaaagcaaagttttggcgaaagaggctggagatgatgaagatatggctgaaatgataggaagtgaaatcaactcg

SEQ ID NO: 128139 - DNA, 437 bp, Arabidopsis thaliana
gggtccacccactcctgcaaactaataaatttccaacccttatataaggaattctgacagagtcggctgctagattagttttgtgtctctctcgtcatctctcttcctctctgtaatcccaaccggagttacgattccttcttatcgtaactcctgcttccgatctcgatccaattttcacttttgttttgtccgaacggtaaatcatttcgcggcttttttttttttaagggaaggaggaataagcaaattttgatttgattccgtttttttgggggtgttagtgatcttttagatgaagtaaagaaattttgattattgaggggactatgtgggttatggtactcatcggcaactatattgcggatggtagcaccatgttggaggcgaccttctgttaaaggagatcattctactagagacgctaatggtcgatg

SEQ ID NO: 128140 - DNA, 847 bp, Arabidopsis thaliana
  unsure (1)..(847): unsure at all n locations
aatacngactcactataggagaaagcctggtaccgcctgcaggtacctggtccggaattcccgggtcgacccacgcgtccggatgctccagaggagagtattcctgcgtttcaaaaggcaggaaccatcatcccaaggaaggaccggtttaggcgaagttcctctcaaatggacaatgatccttatactttggtggtagctttgaacagttctcaagaagcagaaggtgaactctacatcgatgacggcaaaagctttgaattcagacgaggctcttacatccatcgtcgcttcgtcttctcaaagggtgttcttacatcaacgaacttagctcctccagaagctcgtctctcttcccaatgcttgatcgacagaattatcctcttgggacacagctcaggtccaaaatctgcgttggtggaaccgttgaatcaaaaggcagagattgagatgggacctctgcgaatgggtgggcttgtagcttcctcgggtacaaaggtgttgactatccgcaaaccgggtgttcgagtggaccaagactggaccgtaaagattctgtgattgaacggtttgaaccagtttcactcatggccgttagagtggccgaaatctgcttttccggcgacggaatatcacactttttaatatatgtttggagatttagacttaaatagttgtaagagctaacagtttgaaagtcactttgcattgttgtttatcttcatataaatgagtttagattttgataaaaaaaaaaaaaaaaggcggccgctctagaggatccaagcttacgtacgcgtgcatgcgacgtcaagactcttctatagtgcnnnnnnnnnncattcgg

SEQ ID NO: 128141 - DNA, 541 bp, Arabidopsis thaliana
ccggaacggaagtcccgggccgagcgacgcgacactagagacacactgatgccatacttctacacgttgttcagagaagcaaacgttacgggtggtgctgttgtacgcccattatggatggaattcccgcaagatgaagctacttttagcaacgatgaagccttcatggtcggtagtggtctactggttcaaggagtttacaccaagggaacaacgcaagcttccgtgtatttgcctggcaaagaatcatggtatgacttgagaaacggtaagacttacgttggaggcaagactcacaagatggatgctccagaggagagtattcctgcgtttcaaaaggcaggaaccatcatcccaaggaaggaccggtttaggcgaagttcctctcaaatggacaatgatccttatactttggtggtagctttgaacagttctcaagaagcagaaggtgaactctacatcgatgacggcaaaagctttgaaagtcactttgcattgttgtttatcttcatataaatgagtttagattttgataattccc

SEQ ID NO: 128142 - DNA, 389 bp, Arabidopsis thaliana
accgttgaatcaaaaggcagagattgagatgggacctctgcgaatgggtgggcttgtagcttccctcgggtacaaaggtgtggactatcccgcaaaccgggtgttcgagtggcccaagactggaccgtaaagattctgtgattgaacggtttgaaccagtttcactcatggccgttagagtggccgaaatctgcttttccggcgacggaatatcacactttttaatatatgtttggagatttagacttaaatagttgtaagagctaacagtttgaaagtcactttgcattgttgtttatcttcatataaatgagtttagattttgataatttcagaattcgtggaatcataattaacaattttgattgggaaaaataatttgttttttt

SEQ ID NO: 128143 - DNA, 447 bp, Arabidopsis thaliana
  unsure (1)..(447): unsure at all n locations
catttacacaaaaaccctagatccacaacaatggcggaagagaagaaatcgaagcagagacatcgagtcatggtcttcgaatccatgtatcccatcctcgctcttatgcttatactcgtcgcttgcgtcgagctttgcgatgcagctactgttgtagatgtttatcgtctaatccagtacgatatctctggtgttccttttggttctcgtttctcttctcttaatcatcatgctgcttctcttagcttccaacgtggtgccgatctatctcgttctgtacttatacttcctcttcgtgagcttgacattgcttttgttcaagattacatctcgcaaaagcagtcgcttggtggattgttgattttgcttcctcagacgtttaggcctgggaatgttggtgggtgaagtttaagctctgaaaatgatgggtntaggagtttattaggt

SEQ ID NO: 128144 - DNA, 667 bp, Arabidopsis thaliana
  unsure (1)..(667): unsure at all n locations
nnnnnnnnnnnnnnnnnnnnnnnnnnnnnnnnnnnnnnnnnnnnnnnnnnnnnnnnnnnnnnnnnnnnnnnnnnnnnnntcttcttcctctgattcccccagaaaaaacctagctccttccctcatttccccccaaatctcacgacttatttatgctcgggggagactaatcaaaggtcaaaatccattagggagggaatcgaatctcgatcgatctcaatttcttctgagaaaagaaaaaaatgtcatcggagattgaggtggtggaagaaatccaatcgaatcccaaggagaatggggaatcgagttctaaagggattgaagaagagagcttgaagaacgatgtctatactgctgccgcttatggtgatttggagaagcttcatagattggttgagtgtgagggttcctctgtttccgagcctgatgctcttggctactatgctcttcagtggtctgccttgaacaaccgcgtcgccgttgcccagtaccttatcgagcatggtggagatgtaaacgcgacggatcatactggacagactgcattgcattggagtgctgttcgtggtgcgatacaagttgcagaactgttattacaagagggtgcaagagtagatgcaacggatatgtatggctatcaggcaacacatgttgccgcacagtatgg

SEQ ID NO: 128145 - DNA, 510 bp, Arabidopsis thaliana
ggtgtagcagcagtgatcctagcccaaaagcctgatgatcttctttctcgatgcaatggtgtaccatgcatttttccagattacgagtttggaactgagattttaaaatacatacgtaccaccagatctcccacggtgagaattactgcagctactacactaactggtcagcctgcaacaactaaggttgctgcattctcatgtagagggcctaattcggtttcaccagccattctcaagcctgatatagcagctccgggtgtgagcatactcgcggcaataagtccgcttaatccagaagaacagaacggatttgggcttctttctagggacatcaatgtaaactcctgttgtttctggaataatagctctcctaaaatctcttctccctcagtggtctcctgctgcagtgagatcagctttggtcacaacagcttggaggacaagtccatctggagaaccaatctttgctgaaggatcaaacaagaagcttgcagatccatttgacta

SEQ ID NO: 128146 - DNA, 583 bp, Arabidopsis thaliana
  unsure (1)..(583): unsure at all n locations
nnnnnnnnnnnnnnnnnnnnnnnnnnnnnnnnnnnnnnnnnnnnnnnnnnnnnnnnnnnnnnnnnnnnnnnnnnnnnnnnnnnccacgcgtccgcccacgcgtccgaaaacctttagaattttcatttttttacgattccgatgttaactgtttctccggctccagtactcatcggaaacaactcaaaggatacttacatggcggcagatttcgcagattttacgacggaagacttgccggactttacgacggtcggggatttttccgatgatcttcttgatggaatcgattactacgacgatcttttcattggtttcgatggagacgatgttttgccggatttggagatagattcggagattcttggggaatattccggtagcggaagagatgaggaacaagaaatggagggtaacacttcgacggcatcggagacatcggagagagacgttggtgtgtgtaagcaagagggtggtggtggtggtgacggtggttttagggacaaaacggtcgttcgaggcaaacgtaaagggangaaagtaaagattttttntnccgntngaaccgtnttnangaaaaacc

SEQ ID NO: 128147 - DNA, 972 bp, Arabidopsis thaliana
  unsure (1)..(972): unsure at all n locations
nnnnnnnnnnnnnnnnnnnnnnnnnnnnnnnnnnnnnnnnnnnnnnnnnnnnnnnnnnnnnnnnnnnnnnnnnnnnnnnnnnnccacgcgtccgcccacgcgtccgcccacgcgtccgcccacgcgtccgattctctattaatgggacctgaagattttcttcccaaccaagaagcccttgaccagaaacctgcccctaaagaattggagaaggaggtcgcaggaggcaaagaggcagtggaggaaaaggaaagtggcgaaggatcttcttcaaaacaagatacagatttcaaggactttgattcagctccgaagtacccatttctcaaaaagacgagccacatgcttggagccattcctactccatcttcatttgcttcacagttccaaacaaaggacgcaatgcgtctacacgcagcacaatcttctggttcagttcacgtgactgcaggtatgatgagaatatcaaacatgactctagcagcggacagcggtatgggctggtcatatgacaagaacggtaacctcaacgtagtcctttcattcggggtagtccaacaggatgatgcgatgactgcctcgggaagcaagacaggaattacggcgacaagagctatgttagtcttcatgtgtttatgggttctcctactctctgttagcttcaaaatagtaaccatggtgtctgctcggtaataggatcaaagttgaatcgtctcaaagactttttttggtgtttgtacctctccaatcatatagcctttaactttggcagtgctttgctgctcaatatttaaatttttattcgaagggtttggtgtagcttgaattctctatatggtttctagtttgagtttctagaaataagaacattaaccaccttcttttgacccaaaaaacaaaagggcggccgctttaaaggaacccaggctaaggaagggggccaagcgacgtcaagctcttctaaggtcacct

SEQ ID NO: 128148 - DNA, 633 bp, Arabidopsis thaliana
  unsure (1)..(633): unsure at all n locations
nnnnnnnnnnnnnnnnnnnnnnnnnnnnnnnnnnnnnnnnnnnnnnnnnnnnnnnnnnnnnnnnnnnccacgcgtccgcattttcaagtccagcaaaaaaagcgaagagagggttttaatacgattccactcttctcaacaaatttgacgtttttgttcttcgaaattcaaattcacccagaaaaaatctcaatccgcgatggttgaagaatcagcttctgcgtcggaagcttcggtgatacaaaccctaaccgagccggcgacggagattgcgcaaaccctagaacctaacctagcctcaatcgaagccaccgtcgaatcggttgttcagggaggcactgaatcgacttgtaacaacgacgctaataacaacaacgccgctgacagtgctgctactgaggtttgtgatgaggagcgtgagaagacgcttgagttcgctgaggaattgacggagaaaggctctgtgtttctgaaagagaacgatttcgctgaagccgtcgattgcttcagccgtgctctcgaaatcagggttgcacattatggtgaacttgatgctgagtgataaacgctactatcgatatggattagctctcctggcaaggctcatgctgaagctgatccacttgngaacat

SEQ ID NO: 128149 - DNA, 529 bp, Arabidopsis thaliana
  unsure (1)..(529): unsure at all n locations
nnnnnnnnnnnnnnnnnnnnnnnnnnnnnnnnnnnnnnnnnnnnnnnnnnnnnnnnnnnnnnnnnnnnnnnnnnnnnnnnnnnccacgcgtccgggagagtagaacctaaagaaaaaagtggtcgtccaatggacctctcactaattcaaggcatgtctctgcctctctattttctcttaacattattctttttcttctttgctaccgcaaaaacgcggagaagctctagcaccggcacgcttccaccgggtcctccgatactgccattggtcggaaacatattccaactcggattcaatcctcaccgttcacttgctgccttttcgaaaacgtacggacctataatgagtttgaagcttggaaggttaaccgcagtggttatatcttcaccagaagcagctaaagaggcacttagaacacacgaccatgtcatgtccgctcgaacctttaacgacgctcttcgagcctttgatcaccataaacattctattgtctggattcccccctctgctcgttggaggtttctga

SEQ ID NO: 128150 - DNA, 419 bp, Arabidopsis thaliana
cgagacgcgtggggatctaaaaccctatcagagaccatttcgcgtgaacaaagatggcggggcctttgcttcgatctctttggtcaaacaccactcgaagatccttctcttctcattcatcaccttccaaattcggatactcgctctcctccttacgctccttttcagcagccaccgcttccacagctgcagccggagctcctaatagctcgcttgaccctaatcgactaagaaacgtggctgtgatagctcatgtcgatcacgggaagacaacacttatggacaggcttcttcgtcagtgtggtgctgatatccctcacgagcgtgctatggattctattaatcttgagcgtgaacgagggatcactatttcttcaaaggtgacatcaaatatttggaaggacaacgaacttaacatg

SEQ ID NO: 128151 - DNA, 529 bp, Arabidopsis thaliana
  unsure (1)..(529): unsure at all n locations
taatacgactcactttagggaaagctcgtacgcctgcaggtaccggtccggaattcccggttcgacccacgcgtccgagcaagtgtagcaagttctgatttgttcgagattgagaacataacgagcagtgtctatgagccgagtgaggccagcattggatggagtgtggtaacgggaagtatggcagatcaatcggtgatttcggatttcgatatgatgaagagggtcacgagaaatggtccggtggttaaaaccaaaccggtgattggtgagaaagtccggtcggctgggtttttgtcgggttgtaagagtcacaaagctgtctcggttgttgatagttctagaaaagtgaaagaaacagccaaggttgatcatcacgagatgtctcatcagaagaagtttaaaactgagattaggattcaagacttgagctttctttaataaacaatgtttgtgtatgtgtgtgttcttaagtagttttcatcaaatatttttgtaatatttcttcgtgagtatgctaangattttg

SEQ ID NO: 128152 - DNA, 556 bp, Arabidopsis thaliana
  unsure (1)..(556): unsure at all n locations
nnnnnnnnnnnnnnnnnnnnnnnnnnnnnnnnnnnnnnnnnnnnnnnnnnnnnnnnnnnnnnnnnnnnnnnnnnnnnnnnnnnnccacgcgtccgagacggaggcagaatcacagtaccttaatgtactctctgctttcctcgccatcgaaccggtggactccgtcatcactctcgctagagggtgcactggaggatcaattactgagaacgcccagagatttttctgggaaatttgcgttgaagctgctgcgaatggtaacggatcatacgcgaagaagttactgaagaaactcataaatgaagttgagttagagaatggtgaagtattggatgaagtgtatgaagagtatgctctttacatgttaacttctaaggaagatatattggtgaaagaaaacataaggataaccaaattcatttcttttcttttccctgaaggttcgtacaaacacccgagttgtccaagggtcgaggaaattaaggttattcccggctggcattggtccggttggaaccaattgcctttgaacgggagatccccgggggggtnccna

SEQ ID NO: 128153 - DNA, 515 bp, Arabidopsis thaliana
  unsure (1)..(515): unsure at all n locations
nnnnnnnnnnnnnnnnnnnnnnnnnnnnnnnnnnnnnnnnnnnnnnnnnnnnnnnnnnnnnnnnnnnnnnnnnnnccacgcgtccgcggacgcgtccgcccacgcgtccggttcgttggagtcacctgaggagttcattgccatggaattccggtttactctgagagacaatggaatgcaagcggcttttcagctgcttcacatggtgcttgagcgtagtgtctggttggaagatgcatttgatcgagcaaggcagctatatctttcgtattttcgatcaattcctaaaagcttggagcgtgcgactgctcataaacttatgatcgctatgctgaacggtgatgagcgttttgttgagccgacacctaagtcactacagagcttgaatctagaatctgtgaaagatgcggtcatgagtcattttgttggggacaatatggaggtaagcattgtgggggacttttcagaggaggaaatcgagcgttgcatccttgattaccttggtacagttaaag

SEQ ID NO: 128154 - DNA, 767 bp, Arabidopsis thaliana
  unsure (1)..(767): unsure at all n locations
nnnnnnnnnnnnnnnnnnnnnnnnnnnnnnnnnnnnnnnnnnnnnnnnnnnnnnnnnnnnnnnnnccacgcgtccgcccacgcgtccgcccacgcgtccgattgaatggctgtggctacagctccgtcgctaaaccgccatttcccccgccgcatctcgaacctttactcgagagttaagcaacgaaggccatggctgccaccaggagacgcgacccttttcaattctcgccggaattgggattcccatctgtttgtttacgcttcctcttcttcttctccgtcgtcgtcgcctccgtctccaaattcaccgacggatgatctcacggcagagttgtgcgtcaatactggtcttgatctctttaagagaggacgggtgaaagatgctcttgttcagtttgaaactgcactgagtttggctccaaatcctattgagtcacaagctgcttactataacaaagcatgttgtcatgcttaccggggcgaaggaaaaaaagctgtggattgcttgcgaattgcgttgagagattataatctgaagtttgccacgattcttaacgatcctgatttagcatcctttcgcgcattacccgagtttaaggagctgcaagaagaggctaggttaggcggggaagatattggcgataatttcccgggagatctgaaacttatcagtggagggcgagcaccgtttcgtggcgttagaaaattcttttattttgcatttgcaacagcagcgggttatttcatgttctttaccggaccaag

SEQ ID NO: 128155 - DNA, 531 bp, Arabidopsis thaliana
  unsure (1)..(531): unsure at all n locations
nnnnnnnnnnnnnnnnnnnnnnnnnnnnnnnnnnnnnnnnnnnnnnnnnnnnnnnnnnnnnnnnnnnnnnnnnnnnnnnnnnnccacgcgtccggatcagctcatctacattcctcttcctgatgaggagtctcgttaccagatctttaagtcttgcttgaggaaatcacctgtggcgaaagatgttgacctgagggctcttgctaagtacacccaaggcttcagtggtgcggacatcacagagatttgccagcgttcttgcaagtatgcgatcagagaaaacatcgagaaggatattgagaaggagaggaagagagcagagtcgccagaagcaatggaagaggatgaggaggagattgcagagattaaagctggtcactttgaggaatccatgaaatacgctaggagatcagtgagtgatgcagacattcgcaagtatcaggcttttgctcagactctccagcaatcacgtgggtttggaagcgagttcaggtttccagatgcgccgacagggactactggagctttccc

SEQ ID NO: 128156 - DNA, 579 bp, Arabidopsis thaliana
  unsure (1)..(579): unsure at all n locations
ctaagaaaccttcaagtatgantngttcatatganaacagagctatgtncgttcaaggcgattcaggccttgtcctcaccaccgaccctaaaccgcgtttgctttggaccgtcgaactccacgagcgttttgtggacgccgtcgctcagctcggcggccccgacaaagcgaccccaaagacgattatnagagttatgggtgtgaagggtcttactctttaccacctaaagagccatcttcagaaattcaggcttggaaagcagccgcacaaggagtacggagatcactccacaaaggaaggttcaagagcttctgccatggatattcagcgcaacgtagcttnttcttctggcatgatgagtcgcaacatgaatgagatgcaaatggaagtcccagagaagggttgcatgancagcttggaggtgcaaaggccatctgcaactgggggttttaggcccaagggaagtcccatgcaattttttntttggggggggctttccaanccttcgccggttggacctttggaaccgcccccgaagaaccncctttggngggggtcaanggnnttttggnntttgg

SEQ ID NO: 128157 - DNA, 523 bp, Arabidopsis thaliana
  unsure (1)..(523): unsure at all n locations
gccnnnnnnnnnnnnnnnnnnnnnnnnnnnnnnnnnnnnnnnnnnnnnnnnnnnnnnnnnnnnnnnnnnnnnnnccacgcgtccgcggacgcgtgggcttctgccatggatattcagcgcaacgtagcttcttcttctggcatgatgagtcgcaacatgaatgagtaatattttaatcagatttcgttaattttctcaactttcattttaatatatattacagcaactcacaccaggttggtttgatcaggatgcaaatggaagtgcagagaaggttgcatgaacagctagaggtgcaaagacatctgcaactgaggattgaagcacaaggaaagtacatgcaatctatcttggagagagcttgccaaaccctagccggtgagaacatggcagccgccaccgcagcagccgccgtcggaggaggatacaagggtaatctgggaagttcgagtctttcagcagcggtgggcccacctcctcatcctcttagtttcccgccgtttcaagacctaaacatctatgg

SEQ ID NO: 128158 - DNA, 447 bp, Arabidopsis thaliana
aatttagctccttgaaggctcataacgctcactgcccttggcttcatcgttttctctcttgatgaatttggcattgtatatctgaggtctgattgcgtgaaaaaaccacaaatgaaaggagtttagacacaaatcacagtttaagacaaaattatagtcttgtttctttcaaattatgcaaaaaaatcaagaatctgagacataagagaaacgtttatgtctctctcttttaatcaatgctatgttgcttttctcaactgtttcaagcgttattacattactagctaaaaatcttgatgtcttgttcttatttttgcagtttctcctcttgagctttggaattgaagctaagataagaaatttagagagaaatgggatggtctcattcgaaggttgatgacgatgaaacctgtcaaatctgttaagataggaaacgtttcatcaaac

SEQ ID NO: 128159 - DNA, 547 bp, Arabidopsis thaliana
agctccctacgactcactattgggaaagctggcacgcctgcaggtaccggtccggaattcccgggtcgacccacgcgtccggcctgagctagttgattggttcaagtttgcagctttagatgatcctttaactgagctatcttcattctttaattaccaatgggagagtgggtcatcggagctttcatcaacatttttggaagtgttgctattaattttggcacaaaccttctcaaattgggacataatgagagagaaaggttagccctacaagatggcggaggaaagatgccattgaagccaattatacataatcagacttggagagttgggatccttgtctttcttcttgggaattgcctcaatttcatttcgtttggttatgctgctcagtcccttctagcagctcttggatccattcaatttgtatccaacatagcatttgcttatgttgtattgaacaaaatggttactgtcaaagtactcgttgctacagcctttatagttcttggaaacgttttccttgtagcttttggtaatcaccagt

SEQ ID NO: 128160 - DNA, 609 bp, Arabidopsis thaliana
actaccccagctctccccctcatcagccacctcttgcaccaccccatcccccatccatccccaacgccaagccctcgcaccccatgtccccagctctgcattgattcttctacaatcaatcgttggaccatctgtatccgcaagagaagaagcatttctacgagtcgaactggcatcgttggagagcgaagaagggaggagaagaatggtgaatccgacagtacaagccacttgtcgaaacggatcactgataagagtgataactctgatgaacaaatgtgtttcacctgaatctttaagccgaccgtccttcgaagatatcttgtggaatttacagtatgcttctcagttgcaagctgcttctgatggtgaccagtgttaatatattcatagcttcttcttctcttagtaaaaaattcaaacgaactttttaatgctttaaagattcgtgtaatgtgtgtgtacgaaaatcccctcgttatttatgtaacgattgggaaaaatggaaattaataacattaactcctttacttaaaaaaaaaaaaaaaagggcggccgctctagaggatccaagcttacgtacgcgtgcatgcgacgtcatagatctct

SEQ ID NO: 128161 - DNA, 641 bp, Arabidopsis thaliana
  unsure (1)..(641): unsure at all n locations
nnnnnnnnnnnnnnnnnnnnnnnnnnnnnnnnnnnnnnnnnnnnnnnnnnnnnnnnnnnnnnnnnnnnnnnnnnnnnnnnnnnccacgcgtccgcccacgcgtccgtgtgatttagggtacatttctgaaacatccaagtttggttcagaggatttaccggtatgtagacagtttagcttagaagagatagttaaagctacaaagaacttcgataagactatgatactcggtgaaagctccttatatggcacgctttacaaaggaaatcttgagaatggaacaaaagtggcaataagatgcttaccttcatcgaagaaatactcgataaggaatcttaaactgcggttggatttgctcgcagagcttagacacccgaatcttgtctgcttgttgggtcattgcatagattgtggaggaaaagatgattacagcgttgagaaagtctttttgatttatgagtacattccaaatggaaacttccaatcttgtctctcagataatagttcaggtaagggtatgaattggtcagagaggcttaatgttctcacaggtgttgcaaaagctgttcattctcttcacactggagttattcctggattcttcagcaatagactcaagactaacaacgtgtttgctttaa

SEQ ID NO: 128162 - DNA, 969 bp, Arabidopsis thaliana
  unsure (1)..(969): unsure at all n locations
nnnnnnnnnnnnnnttcaattgtcaaaatcggcgatcatccaaagttatcatctttctcataaacccaatttttttcccagtcttccttaatcccaacaacttcttaacaattcaagattcatggctactacacccatctttaatgcttcttgcagctttccttcgactagaggaatcgattgcaaaagctatattggtctgagatcgaatgtgagtaaagtgagtgttgcttcttctcgcattgcaactagtcaacgtcgtaatcttgtcgtaagagctagtgaatccggcaatggacatgctaagaagcttggaatgagtgatgctgagtgtgaagctgccgttgctgctggaaatgttcctgaagctcctccggttccacctaaaccggctgctccggttgggacaccgataattaagcctcttaatctaagccgacgcccacgtcgtaaccgcgcttcccctgttactagagctgcctttcaggaaactgatatctcccctgcaaattttgtatatccacttttcattcatggaggtgaggaagacacgcctattggagctatgcccggttgctacagacttggctggaggcatggtcttgtacaagaggttgcaaaggctcgagctgttggggtaaacagtatcgttttgttccctaaagttcctgaggctttgaagaattcaacaggggatgaggcatacaatgacaatggtttggtgcctcgaacaattcgtcttcttaaagacaaatatcctgatcttattatctacactgatgtgggctttggatccttaactcatcctgatggtcacgatngggntagttagagaaggatggggtaattatggaatggcggaacagtacnccagcnctgtaaanangtgtttcccaggcccgaccnggggctnngnattaancccggggnnnattntgggtgggcnatnagggnaanccgccaacccct

SEQ ID NO: 128163 - DNA, 671 bp, Arabidopsis thaliana
  unsure (1)..(671): unsure at all n locations
nnnnnnnnnnnnnnnnnnnnnnnnnnnnnnnnnnnnnnnnnnnnnnnnnnnnnnnnnnnnnnnnnnnnnnnnnnnnnnnnnnnccacgcgtccgcccacgcgtccgatgatattgaaaacaaactctggtttgagccagaatgtcctggcagcgagtctgaaggacaagtgggtcctacacctcgtgcgtttcatgttgctattacaatcgattgtcatatgttcatctttggtggacgttctggtggcaagaggttgggtgacttctgggttctagatacagatatatggcagtggtctgaattgactagcttcggcgacttacctacacctcgtgattttgctgccgctgctgctattgggagccaaaaaattgtgttgtgcggcggctgggacggtaaaaagtggctgtcagatgtttatgttatggacacaatgtcccttgaatggctggagctatcggtttcagggtcattgccacctcctagatgtggtcatacggccacaatggtggagaaacgattacttgttttcggtggccgaggaggtggtggcccatcatgggtgatttgtgggctttgaagggtctgatagatgaagagcgtgaaacacctggatggacccaactcaagcttcctggacaagcaccatcatctcgatgtggtcataca

SEQ ID NO: 128164 - DNA, 552 bp, Arabidopsis thaliana
gccagcactatacgactcatatagggaaagctggtacgcctgcaggtaccggtccggaattcccgtgtcgacccacgcgtccgagcagacaagcattagcatcatagatacatagagagcttaagcaaaagatctcatactttcaagattgatcgatctctcaagtctcaacaatgtcatcatcatcatcagttcctgcttacttgggagatgaagatctgacacaagaaacaagagctctgatctcttctcttcctaaagagaaaggttggttagtgagtgaaatatatgaattccaaggactttggcacacacaagctattttacaaggaatcttgatctgccaaaaacgctttgaagctaaagattccgacattatcctcgtcactaatcctaaatcaggtaccacttggttaaaagctcttgtctttgctctccttaaccgacacaagtttccagtttcttcttctggtaaccatcctcttctggtcaccaatccacaccttcttgtgcccttcttggaaggagtttactacgagtccccagatttcg

SEQ ID NO: 128165 - DNA, 527 bp, Arabidopsis thaliana
  unsure (1)..(527): unsure at all n locations
nnnnnnnnnnnnnnnnnnnnnnnnnnnnnnnnnnnnnnnnnnnnnnnnnnnnnnnnnnnnnnnnnnnnnnnnnnnnnnnnnnnccacgcgtccgctcgtctagctctcacttttgttcgtctcttctgcgtcaaacatttccaccattttcgtttcttaaacctttcttcagctcttctcttcgtcaatctgcgatagtggaattgaagtctcttcggtgagtttctttactaatggagaccgccgcttcgagcgtagctacaactcgtggcggttcccttcagaatccgtcgccgacggctccgtcaagaaaagagtggcgcgccgtttcggattcacaagacaccacagattatgtggatttggtacagttaaagctgaacaggacagatgagagaacgatttatgagaatggaagagaacaggatggttattcaaatagtgagatgttgcagcaacagattcttaatgtttctagaaagaaaggagaattacagcagttggagattgagcttcgagctcagatg

SEQ ID NO: 128166 - DNA, 507 bp, Arabidopsis thaliana
  unsure (1)..(507): unsure at all n locations
nnnnnnnnnnnnnnnnnnnnnnnnnnnnnnnnnnnnnnnnnnnnnnnnnnnnnnnnnnnnnccacccacgcgtccgggattctgcttcctcgtcagaattcaatttcccggaaatcggtgactggaactcgccggaaaatttgggattcagatgggaagaagacgagggtggaataggatgtgaaggtttgattgagataaagctcgatcattatagccataataggaagatgatgagtaaaacagagattgattttcatgcagaggaagatggtttgatcgagatcgatctttttccatgaagaagaagaagatgatgattctctttgtgcttccgattagaaagcatttttccgattagaaagaaagaaaaagaagcaacaattaatggttgttcatttttttctatacgaatatcatttgtgtaaatattattatacgagtgtaattcaattttcaactttttacacaaggattaattaatctccgataaanaaaaaaaaaaaa

SEQ ID NO: 128167 - DNA, 1086 bp, Arabidopsis thaliana
ctaaaccgaatgttcctggatcgggcaatgtatccgaggatactcagtctagtggtggtaatggtcagaaaggcagagaaacctcttccaacacaaagaagaggaaaagaaatgggcagaagaactctgaagcagctcaatcacacagatcccagcagtctgaggaagaaccagacaacaatggtgatgaaaagcgcaatgatgagcaaagtccaaattcacctggaaagaagtcaaacagtgggaaacaacagggcaaacaaagttctgatcctccaaaagatggatatattcatgtacgggcacgaagaggccaggccacaaatagccatagtcttgcagaaagagttaggagagaaaaaattagtgaaaggatgaagtttcttcaagatctagtaccgggttgcaacaaggtgactgggaaggcagttatgcttgacgaaatcataaactacgtacaatcactacaacgccaagttgagtttttatcgatgaaacttgcaactgtgaacccacaaatggactttaaccttgaaggtcttcttgcaaaagatgcacttcaactacgagctggttcttcatctacaacaccattcccaccaaatatgtcaatggcttatcctcctctacctcatggattcatgcaacaaactctttccagcattggaaggaccattacctctccattgtctcctatgaatggtggattcaagcgacaggaaacaaatggatgggagggtgatttgcaaaatgtgatcccacattaactatggagctggtgatgtcacacctgaccctcaagcagcagctacagcatctcttccagctgcaaatatgaaggttgagccatgatatttcgtcctgttagatagaatattaaattattgtaatcttttttatttatttatttaaagttgctatatgtactatattgtaatgatgttactattaacgaatccgatacttagactaacctaaaaaaaaaaaaaaaaaaaaaaaaaaaaaaaaagcccggccgctctagaggatccaagcttacgtacgcgtgcatgcgacgtcatagctattctatagttcgcctcaatt

SEQ ID NO: 128168 - DNA, 974 bp, Arabidopsis thaliana
  unsure (1)..(974): unsure at all n locations
attggattcacgagagctgtccagatcgagattcagacatggattctaatcctaaaactacttctacagagataaaccagaaaggggaagccgccacggaggaacctgaaagacctggagccattgtgtccaatcatgtttcgtacttggacattttgtatcatatgtctgcttcttttccaagttttgttgccaagagatcagtgggcaaacttcctcttgccgcccgcccgagcaaatgccttggttgtgtctatgttcaaagagaagcaaaatcgcctgatttcaagggtgtatctggcacagtaaatgaaagagttcgagaagctcatagcaataaatctgctccaactattatgctttttccagaaggaacaactaccaatggagactacttacttacattcaagacaggtgcatttttggctggaactccagttcttccggtaatattaaaatatccgtatgagcgcttcagtgtggcatgggataccatatccggggcacgccacattttattccttctctgtcaagtcgtaaatcacttggaagtcatacggttacctgtatactacccatcccaagaagagaaagacgatcccaaactttatgctagcaatgttcggaaattaatggccaccgagggtaacttgattctatcggagttgggacttagcgacaaaaggatatatcacgcaactctcaatggtaatcttagtcaaacccgtgatttccatcagaaagaagaatgaaattttctggcctgacaatgtttgtaatgtagtagtctttaccaaaaacaaccacgaccttgattgaataatggttcttgtgatgataataaaaaccaaaagtttgattacacaaatcgacctttttaccaaaaaaaaaaaaaaaaagnnnnnnnnnnnnnnnnnnnnnnnnnnnnnnnnnnnnnnnnnnnnnnnnnnnnnnnnnnnnnnnnnngtcctaaa

SEQ ID NO: 128169 - DNA, 525 bp, Arabidopsis thaliana
cccacgcgtccgcacacgcgtccgcccacgcgtccgcccacgcgtccgcccacgcgtccgcccacgcgtccgcggacgcgtgggctagatcgcgagcggccgccctttttttttttttttaagtttaacctacaaattttataagttgtaattccttttggactctgaccagacaaatgctagaccaggcatgcttggttcgcagttcgcaaatcgttattgtctgtggttacaaaagagaactaagaagcaacaatttttattcaatatctcaggttctttaaatagtatatccgatgatctttaagctcttccttacttggcaatttattagacttgcaataaagcggggagaaagttgctggtttttttgattttatgatttatttcaagatcttttcggtatctcatctaattcatgtctttatcttttcattgtccttcttctttttaatattaatttcatatactattttataatttgttttcttatgattgtctatatttttttatatttcgtacatt

SEQ ID NO: 128170 - DNA, 964 bp, Arabidopsis thaliana
  unsure (1)..(964): unsure at all n locations
nnnnnnnnnnnnnnnnnnnnnnnnnnnnnnnnnnnnnnnnnnnnnnnnnnnnnnnnnnnnnnnnnnnnnnnnnnnnnnccacgcgtccggagatgagaagaaagttgttacgcctttaagggaaatgacgcccgaaaggattttcggaaagatgggtcatcttcaacggttacttgatacgtttttgtcattgagacctactggtttagctaagaacagtaggatgatattgatcgcgttgtatcccgttgtgagggagagttttaagctgtatgctgatatttgtgaggttttggctgttttgttggataagtttttcgatatggagtattcggattgtgtcaaggcctttgatgcttatgctagtgcggctaaacagattgatgagcttattgcgttttataattggtgtaaggaaacgggtgtggcgagatcgtctgagtatccggaagttcagaggattacaagcaagttgttggagactttggaagagtttgttagagatagggcaaaaagagggaagagtcccgagaggaaagagatcgaagctcctcctccggtagttgaagaagaggagcctgagcctgatatgaatgagatcaaagctcttcctcctcccgagaattacactcctccacctccgcctgaaccagaacctcagcccgaaaaacccgcaatttaccgaggatttagttaacttgaagggaggatgaagtcncagctgatgaccaagggaacaagtttggcgcttggcactccttggctggtcccaccggggttattaacggaaaaatggggaagcttttcctccctccaaaccggaattgaccctcctggctttgggcaaaaaatccccccctggccaaaaccccnggttcaaaaccnggatttggggaattttggcctttggggttgaaaaccaacccaacccttttttttaaaaaacccnancaccccccntttn

SEQ ID NO: 128171 - DNA, 532 bp, Arabidopsis thaliana
  unsure (1)..(532): unsure at all n locations
nnnnnnnnnnnnnnnnnccattgtccaaattccttatcaaaaaaaaactctactctcggtggcaccagatcactcctcctctcccacgcgtccgctttttcacattctcttcttcttcttctcgtgagaaaaagaaagagagattctttattcattagatcgaagcaaaaatgtccacagcgccgtctccaggcactactccatcaccatctccaccgtctcctcccacaaactcgacaaccaccactcctcctccagcagcctcttctcctcctcccaccacaactccttcttctcctcctccgtcgccgtcaactaattcaacctctcctcctccttcttctcctttacctccttctcttcctcctccatctcctcctggatctttaactcctcctctccctcaaccttccccctccgctcccatcactccttctccaccgtcgcccaccacaccctcaaaccctcgaagccctccatctcctaaccaaggaccaccaaacactccctcaggatctactgcgagaactcc

SEQ ID NO: 128172 - DNA, 549 bp, Arabidopsis thaliana
  unsure (1)..(549): unsure at all n locations
nnnnnnnnnnnnnnnnnnnnnnnnnnnnnnnnnnnnnnnnnnnnnnnnnnnnnnnnnnnnnnnnnnnnnnnnnnnnnnnnnnnccacgcgtccgaaaaaacttcgaagaacaaaaaaaatccaaaaaaaggtgaaatcgaagaagaagaaaaaaaaggcaaaagcttgaattgattatggaagacgacgatcagcagaaggctgcagatctagtacaagagcttgttcttcgtctcgtctcacaaaaccctcaaacccctaatctcgatcccaattctcccgccttcctcaaaacccttcgttacgcttttcgtatcctctctagtcgtcttactccttccgtcctccctgacgccaccgctatcgctgagtctctcaaacgccgtctcgctactcagggtaagtcctccgacgcactcgcttttgccgatctctacactaagttcgcttccaaaactggacctggcagtgtcaataacaaatgggctcttgtttatttgcttaaaattgtttctgacgatcgtaaatcggctataaatggtcttgatt

SEQ ID NO: 128173 - DNA, 529 bp, Arabidopsis thaliana
  unsure (1)..(529): unsure at all n locations
angngccaccnnnaatctttntgccggggggnccntccgggncaatttttggaccccccngtactcgggggcgtgaattgggcaagacttctggctnncatgggcctaaatccctggaaatttcccccaaaatttactcaaaaggcttcgtcgtcctgctggtgctcttgttcccaccaatggccacctggatcacgtttatgaagttaagattggatcgtgttctgtatgatccctttgaagctacctctcttgatgaagctttggcctccaatcctaccactcttgagttcgataagcctaaaaattgggtggcgccataccccaagtatgaacctggatggtgggataccttcttgcctaaagtaacccaagaatctgcagtatagaactttgctttttgtcttgtttttgcattctccaatctcagctttgtcttagtgcttcaaagttttgtactactgagctcattatccaagtctatatctttcctngtgtagcttctattactcaaagttgcctgtttgat

SEQ ID NO: 128174 - DNA, 685 bp, Arabidopsis thaliana
  unsure (1)..(685): unsure at all n locations
nnnnnnnnnnnnnnnnnnnnnnnnnnnnnnnnnnnnnnnnnnnnnnnnnnnnnnnnnnnnnnnnnnnnnnnnagataagatttccacgcgtcctgcctcgatcaacagactctaatcagcagcaaatgtggagcgtcaccggagcattgactgtggcggtgccgcctaccgccgccgcttgccgtacgaaaccctttctcatctcctcttcctttcccaagcagacaaagaaactccatctctcttcgccttctctgtctctaccatcatcacatttctcctcctctttcaaaaccgcagctacctccatcgagcaacagtcttctgttaacaagggagagagcaccaagtaccatttcctggtagcaaacgctaaattcatgcttgacgaagaggagcacttccaggagcaattgtttgaacgtctccgttacttcggtgagcgtgaattagtgcaagacttctggcttgtcattgagcctaaattccttgacaatttccccaaaattactcaaagacttcgtcgtcctgctgttgctcttgtttccaccaatggcacctggatcacgtttatgaagttaagattggatcgtgttctgtatgattcctttgaagctacctctcttgatgaagtcttggcctccaatcctaccactcttgagttcgatatgcctaaaaattgggt

SEQ ID NO: 128175 - DNA, 676 bp, Arabidopsis thaliana
ggaggggtgttactcgatgacttattggttgctgaagatcttgctgctgcggaaacaacatatgctgcttctcatgctgctgcagctgcggcaacaaattctccaccaggtcgattacctggaaggtatggtttttcagatgaaagccgcgggcggttatctgaatcagctgctgatggcgctgtggtgctgggaagccctgttgcaccccctgtaaatggtgatatgcggactgatattagccctgaaaatgcattacttccaggaactcggagaacgaataagggtgtggagtatcttgttgaagcatcagcagcggaagctgaggcgatcagtgcgacgttggctgctgccaaggcaagacaagtcaatggtgaagttgaactccctgatagggattgtggtgcagaggctacacccagtgggaaacctacattttcgctaatcaagccagattctatgggctcaatgagtgttacacctgcagggattcgtcttcatcatagagctgtggtggttgctgctgaaactggtggcgccttatgtggaatggttagacagttatccattgatcaatttgaaaatgaaggacggcgtgtcagttattggacaccagaaagtgcaacagcagcaagggaactattagatcgacaaatgtcaatcaacagtgtttcaa

SEQ ID NO: 128176 - DNA, 668 bp, Arabidopsis thaliana
  unsure (1)..(668): unsure at all n locations
cagcactaatacngactcactatagggaaagccggtacgcctgcaggtaccggtccggaattcccgggtnacccacgcgtccggtttttctgtgaagagttatgatgccgaaagctgcgtgggaaccagaataccacagagtatttgtggacttatgcgtcgagcaaaagatgttagggaatcaacctggaacgcagcatatattgaaaccttttctacaaagaactggcgctaggttcaccagaaaccagcttaagaatcactgggatacaatgatcaagcagtggaagatttggtgtagacttgttcaatgcagtgatatgcaatgggatcctcagactaacacttttggtgctaatgatcaagactgggccaactatttacatgtgaatcctgaggctgggcagtatcggttgaatcctccatcgttcctcgagaaacttgagcttatctttgaagatagtaacttagatgatgaaggtacttcaggtagcaaaaggaagcgaatagccaagcatcgtgatgaagataatgataatacctggagatgaagaagacacgcaaagcgcttctaatttctcgagtcctcagtcgaaaggatactggtcaccgtcttcacatgagctgtttgttgatttgttgttccaagaggctnttaaaggaaacaa

SEQ ID NO: 128177 - DNA, 828 bp, Arabidopsis thaliana
  unsure (1)..(828): unsure at all n locations
nnnnnnnnnnnnnnnnnnnnnnnnnnnnnnnnnnnnnnnnnnnnnnnnnnnnnnnnnnnnnnnnnnnnnnnnnnnnnnnnnnnnccacgcgtccggaagatttcaaggtttagggtttctgcaattcaaccatggcagagcagacggagaaggcgtttcttaagcaaccaaaagttttcttaagctcgaagaaatctggtaagggaaagaggcctggtaaaggaggtaatcgtttctggaagaacattggccttggtttcaaaactccaagagaggctattgaaggaacatacattgaccagaaatgtccctttactggtacggtttcaatcaggggtcgcatcttgtctggaacttgtcacagtgcaaagatgcagaggacgatcattgttcgtagggactatcttcattttgtgaagaagtatcgaagatatgagaaaagacactcaaacattcctgctcatgtttccccgtgcttccgtgtcaaagaaggagatcgtgttaccattgggcaatgcaggccattgtcaaagacggtgaggttcaatgtcctgaaggtcattccggctggaagctcttctatcgggaaaaaagcattcactggaatgtaaaagagattcagatttgttgaaaaggtgcgaactagtattctaagagtttagaatttttctagcagagttattggattcgtttcttaagatctatgatcaaaggaaaccagattttctgtttcatttagtgattcaagtatcaagatatgtctatggttatagttttactccaatatatctagtcatgagttgctatctactagtcatgatttcgatg

SEQ ID NO: 128178 - DNA, 547 bp, Arabidopsis thaliana
  unsure (1)..(547): unsure at all n locations
actacactcatcaaagctcacaaaaagagaagagaagagacgaggatcaatcaccattctcatggcttcagcttctttctctgcggtttcttcgctctcgtatcaattccgttcaaaagaagcgatcttttcatcgaaagcttcctgttttagctcgacggctttatcaggaaggagagtgtttggatctatcaaagcagctcaagtgacaagccatgagaatcctagaagacgaactcagaacgtcgaaggagatatatttgttgacaatacttgtattgattgtgatacatgtcgttggatggttccggatttattcactcgagtggacaacatgtctgcggttacaaagcaaccaacttgtaaggaggaaagactgaatgctcttcaggccttactatcttgtccgacgggctctatttcgcactcaaactccacctgctgacataggggaagctcaaggggcctttccccttgtagtggccaaggcaacatcccgggggtttnaattngggttnannccagaancgnatgggaaccntttccc

SEQ ID NO: 128179 - DNA, 689 bp, Arabidopsis thaliana
  unsure (1)..(689): unsure at all n locations
atgtatgccagcactaatcgactactatagggaaagctggtacgcctgcaggtaccggtccggaattccgggtcgcccacgcgtccgttctctcataatatcttctccacaatttcaactcttctaaagtctaaaccatgaagttactctcaaagacctttttgatattaactctcaccttcttcttctttggcattgcactagcgaaacagagctttgaaccagagatcgaagctttgaaatccttcaagaatggtatttccaacgaccctttaggagtattatcagattggaccatcatcggttcgttacgacactgtaattggaccggaatcacctgcgatagtaccggacatgtagtctcggtttccttgctggagaagcaacttgaaggtgttctgtctccagccatagcgaatctcacctatctccaggttcttgatctcacttcaaatagttttaccggcaaaataccggctgaaataggaaagttaaccgagcttaaccagcttattctgtacctaaactatttctctggttcgattccttctggaatctgggagcttaagaatattttctatcttggatcttagaaataatttgttgtccggtgatgttcctgaggaaatctgcanaaccagttctttggtattgattgggtttgattacaacaacttaaccgggaaata

SEQ ID NO: 128180 - DNA, 989 bp, Arabidopsis thaliana
  unsure (1)..(989): unsure at all n locations
atgattttcgccnnnnnnnnnnnnnnnnnnnnnnnnnnnnnnnnnnnnnnnnnnnnnnnnnnnnnnnnnnnnnnnnnnnnnnnccacgcgtccgtctctctttcactttctctctaaaaaccagaaaaaaaaaaaatggagctttcatcgagaaagccttatttcattgaggaagaagaagaagagaatttggcttcttctttatcagaaatggaagctgggttttctggtaacaataataatagtaataaccatggaaatccccaaaacggtgtcgtttcttcaagccgtttctcttacggtagattaaacagtcttaggaacagtcagagttattattacaatcaatactctgtttcgtctccgagatctgttgtgtctggaagatttcatgatttcagattcgatattcaacaacctcatttcttggactcgtgtttcctctgtaagaaacctcttggtgataacagagacatctacatgtacagaggagatacaccgttttgcagtgaagagtgtagacaagaacagatagagagagatgaagcaaaagagaagaaacagaatctgtctcattcggtgaaatcagctatgcggaggaaagaaccatcttccccaactagatctcgtgattatgcttttcaccatggaactggtgctgctgcttaattaaaaatagctggggactttgagaattattataattaattagggtaaggaaaaaattaggtatattggatcctacgctaagaaactggattcgggtcctcttttttttttttgaggtttttagggttcttttaaaccttaagctccagttctggggaaaaaaatgaagaagttaaggacccttaaattttcttttcttttttggtaagaaaaaaatggtttcttgccatgaaaaaaaaaaaaaaaaaggcggccggcttaaaaggatccaagctaacgtacgcgtgcatgcgacgtcaagcttcttctatagtgtcaca

SEQ ID NO: 128181 - DNA, 327 bp, Arabidopsis thaliana
agaaacgtgaaggggaagatggtatcagtgtcattatctcatcataatctctggccaccggaatctggatctacggcgtttcgtggtttcgcaaccgccgcttccgtacacgcctgccaccatgttagccgtcacctccgccttgatttccatcttcgctcttcccttaagaaactgcagcatttttctgatgatgcaagaatgaagtttgcaagataccaaagagtatttgtattcaatggggctaattttctcaagtctagagttgatatccggttgtcccaatcttcgccatttgtatgtttctttaatggtggagagagtaga

SEQ ID NO: 128182 - DNA, 534 bp, Arabidopsis thaliana
tgattcgccggcactaattcgactcatatagggaaagccggtcacgcctgcaggtaccggtccggaattcccgtgtcgacccacgcgtccgcccacgcgtacgctctcagtgaccctgtacagcgtatggtttacgatgaaattcatgggtatacagtgactgccatcaatccttttcttgatgactccaccccaagggatcatgtttttgttgatgagtttgcttgtataggctgcaaaaattgtgccaatgtggctccagatatatttcaaattgaggaagactttggtagagcaagggcttgtaatcagcgtggcaacccagatttggttcagcaagcagttgaaacatgcccggttgattgtatccatcagacttctgctgcacagttgtcattgcttgaagatgaaatgcgaagggttgaaagagtgaatgttgctctgatgctttctggaatggggtcaggagcagttgatgttctcagaatggcgagatctcgatgggaaaagaggcaagcaaaagttttgaatcaa

SEQ ID NO: 128183 - DNA, 508 bp, Arabidopsis thaliana
gccgagcactatacgactcatatagggaaagctggtacgcctgcaggtaccggtccggaattcccgtgtcgacccacgcgtccgaaactatctcttccacgacgtcgtcttcttcgtctccgtcctgcgatgtagacgttgacaatcgtggaaaacaattaactccttctacaagacgatctcgagccggcttctctgattctttctcttctcatgatttatcatcattctgtcgagatgaagaagtaaaaacattctgccccatcaaatcggaatcagacgatgaattattaaggagcatagaagccgaaacttcatcttccgtggtgagcacgtcagactcatcagaaactcatcaccatcaccatcatcatcattcgtctggaggtcccaacaacggtcactggagaagaggtttcttccgtttgcttaagaaaggatcatccgcaatgccattcaacacgttcacacctctcaaaggagttccgaaactgaccagacggaagag

SEQ ID NO: 128184 - DNA, 694 bp, Arabidopsis thaliana
  unsure (1)..(694): unsure at all n locations
atgatcttnnnnnnnnnnnnnnnnnnnnnnnnnnnnnnnnnnnnnnnnnnnnnnnnnnnnnnnnnnnnnnnnnnnnnnnnnnnccacgcgtccgcccacgcgtccgattttttttgaaaagcttcacttcccactctctctctctctctctctcttcctacggctgcgaaaatgacaatcggttacagagacgccgccggagacccgctcttcccgtggcttatggagattaaaaattcgatggaggatctatacgctggtaaaaattccggatacgatctcgataagcttctatttgattgtatctcaacttataagaaagattctcggtaccgaaatgacctcagattcctcaagatctgggttctctatcttgaaggcagggaagattttgagagggtttatagagaaattgaagagactgagatatgtaaagggcattcgttgctctatgaatggtatgctatttttcttgaggtcaaaggattgtggcgaagagcatattctgtttatcagactggtctttcaaggaaagctgaaccatctgacaggttaaaagaggctcactcattgttcttacaaagaatctctaagaggaccaaagcatcttcccttganaaggttggtgatgatgctcaggccactgacttggagacgcgttttgtgaatccatgggaaacatccactgtgaacg

SEQ ID NO: 128185 - DNA, 993 bp, Arabidopsis thaliana
  unsure (1)..(993): unsure at all n locations
nnnnnnnnnnnnnnnnnnnnnnnnnnnnnnnnnnnnnnnnnnnnnnnnnnnnnnnnnnnnnnnnnnnnnnnnnnnnnnnccacgcgtccgggctactagggaagagagagataagtatagatcagtccttgaagatgcaggacaggttcaatggaggtatgataaccctccagacttcaatagtgtgaaccagctctttgaagaaggccagactaaggtgtggccagaaggttcgttagaagagacagtgcaaaacgcgatcaagtcatgggagatggagttctcacataagatccgtttacaggacttcaagactataaaccctgagaagtttaagctctttgtcaatgggagagaaggtttatcagctgaagagacgcttaggcttgggagttacaatgctttgctcaagaactctttgcctgaagagtttcagtactataagcccgaggaagagagctttgagtcatcacatgacgcctttagatctgctttaccacgcgggtttgcgtgggaaatactctctgtgtactcggggcctcctgttatagccttcaaatttagacactggggatactttgaaggaactttcaaaggtcatgctcctactggggaaatggttcaattcctgggtctaggagttctaaaggttgacgaatcacttagagcagaggagattgagatttactatgatccaggagagctgttcgggggactactcaagggacctcctatatcagagaccaaaaccacagacagtggagacaacactgcagagaaacaaagctgcccattcacacactaagataataagaaaagtagaagtgtatttgaccctttaaagaatatattgtaacagtctcttggttattgatgcatggaataaattataagtaaaaaaaaaaaaaaagggcggccgctctagaggatccaagcttacgtacgcgtgcatgcgacgtcatagctaataatgatagtgtcacgctaaattca

SEQ ID NO: 128186 - DNA, 515 bp, Arabidopsis thaliana
  unsure (1)..(515): unsure at all n locations
nnnnnnnnnnnnnnnnnnnnnnnnnnnnnnnnnnnnnnnnnnnnnnnnnnnnnnnnnnnnnnnnnnnnnnnnnnnnnnnnnncccacgcgtccgaaaatatattctctcggttttttccagagcgtatattcaaattcttccttaaaaagtaaaaattaatctgattctctctactactactactacgatgggtgagaaaaaggaagaaacggcgacgaaacctcaaggagagaagaaacctaccgatggtggaatcaccaccgtcgttatgaagcttgatatgcattgtgaaggttgcggcaaaaaaatcaaacgcatcttcaaacatttcaaaggtgtggaagatgtgaagattgattataagagtaacaaattgacggtgatcggaaacgtagatccagtggaagttcgtgataaagtggccgacaaaattaagagaccagtcgaacttgtctctacagtagcgccgccgaagaaagagacacctccttcatcaggcggtgcagagaagaag

SEQ ID NO: 128187 - DNA, 720 bp, Arabidopsis thaliana
  unsure (1)..(720): unsure at all n locations
nnnnnncnnnnnnnnnnnnnnnnnnnnnnnnnnnnnnnnnnnnnnnnnnnnnnngttatttttgtttcgtcgtctctcccacgcgtccggaaaaattagcagaatccgtcatgtcttccggcgtaaattcaactggctccgccgcagcagcaccggaggttgacaagatgttcttctgctaccagtgcaatcaaacagtcacaatctcaatttcctcatccgctgatcctttttgtccaatttgtaaccaagggtttcttgaagaatacgaagaccctaaccctaatcaatccctcaatttcaaccctaactcttctgattcctttttccccatggccgatcctttctccaccttgctcccgctcatattcggctcttccgctgccgctccttccggcatggacttcatgagcttattcggtccttcgatgcaaccacaggctcgttccactcagcagaatcctcagtctgacgcgtttgatccgtttacgtttcttcagaatcatctccagactttgcgatctagcggtacgcactttgagttcgtgatcgagaatcatccttcggatccaggtaatcgtatgcctgggaatttcggtgattacttcttttggtccaggtcttgaagcagttgattcaacaactagctggaatgatccaattggaanggaacncnncngttccaaancgncataaggtttccnactgtaaggaacgngg

SEQ ID NO: 128188 - DNA, 900 bp, Arabidopsis thaliana
  unsure (1)..(900): unsure at all n locations
nnnnnnnnnnnnnnnnnnnnnnnnnnnnnnnnnnnnnnnnnnnnnnnnnnnnnnnnnnnnnnnnnnnnnnnnnnnnnnnncccacgcgtccgctcaaacaaagaaaacgattacaaaagagaagaggtatcaaaaagaagaccagaatcttttaacattttgaaacaaatggcgtccaaagccatcttcttcttctttgtctctgccgtgtgcctgtcctctctcgccggtgtggccatcgctgatgccgatgactttgaccgtttccaaattcagggatcggtttattgtgacacatgccgtgtccaattcgttacccgtctcagcaagttccttgaaggcgcgaaagtgaagctagaatgcaggagcagaacaaacggaaccgtaacattgacaaaagaagccgtaacggacaaaacagggagctacagaatggaagtgaccggtgaccatgaggaggaagtttgcgagcttgtgctcgtcgaatcaccagacagtggttgcagtgacgttagcaaagaggcttacctacgtaacgccgctaagatcagcctgaccgcgaatgacggaatcgtctctcacgagacacgtatcgttaaccctctcggtttcatggttcaaactccgtcagctgaatgtcccgctgctttcaaggagctcgggatcgttcctgatgtcaccttctaaatttaatgatttcaagatcgtcatttaagtgtaatctattgtttgtttctatataacaaaacaaaaatgtaatttgataaaacacaaaaaaaatgcagtaaataaaataaattattttcttaaaaaaaaaaaaaaagnnnnnnnnnnnnnnnnnnnnnnnnnnnnnnnnnnnnnnnnnnnnnnnnnnnnnnnnnnnnnnnnnnnnnnnnnnnn

SEQ ID NO: 128189 - DNA, 451 bp, Arabidopsis thaliana
tcgcgggacgcgtgggctcaacttattgtttgaatataaaaagagatatcaaaaagaagagaagaccaaaaacaaaacaaaaatctctaataaaaatggcttccaaagctatcttcttctctttctttgtcgtctccgccgtgtgtttgtcttctctggcaggtttcgccgccgctgatgctgacgacttcgatcgtttccagattcaaggatcagtttactgtgacacttgccgtgtccaattcgttacccgtctcagcaaattcctcgaaggcgcgaaagtgaagttggagtgcaggagcagaacaaacggaaccataacattgaccaaagaagctgttaccgacaaaacaggaagctacaaaatggaagtaaccggtgaccacgaggaagaagtttgcgagcttgttttggtccaatcaccagacagtggttgcagtgatgtcagcac

SEQ ID NO: 128190 - DNA, 869 bp, Arabidopsis thaliana
  unsure (1)..(869): unsure at all n locations
nnnnnnnnnnnnnnnnnnnnnnnnnnnnnnnnnnnnnnnnnnnnnnnnnnnnnnnnnnnnnnnnnnnncatttttngctcttcccagcagcctctctctctttaagatttggaaaagacctttgcttctcttcgttcggaaaaccagctcaaagattcaatatgtcaggtgatgaggctgttgctgctcctgtggttcctcctgttgctgaggcagcagtgatcccagaggacatggatgtgagtactgcattggagttgactgtaaggaaatctcgtgcttatggtggtgttgttcgtggtctccatgaaagcgctaagcttattgagaagcgtaatgctcagctctgtgtcctggctgaagattgcaaccaacctgattatgtcaagcttgttaaagctctttgcgctgaccacagcatcaaattgcttactgttccaagtgccaaaacactcggcgaatgggctggtctttgcaagattgattctgagggcaatgcaaggaaggttgttggatgctcatgtctcgtgatcaaggatttcggtgaggagacaactgcactaaacattgtcaagaagcatcttgattctaactaaatcaagcaaaaaggtcaagtttacagatgctttcttctcaaaaggaaacgcattttgtggccactctttttttctttccagtcttttctgtttttgacattaaatactcagtagtggacatgtcttgagatttgtttggaacatgaaagttttgatgtttatgtaggttctttcagttcgctcaaaaaaaaaaaaaaaagnnnnnnnnnnnnnnnnnnnnnnnnnnnnnnnnnnnnnnnnnnnnnnnnnnnnnnnnnnnnnnnnnnnnnngaa

SEQ ID NO: 128191 - DNA, 672 bp, Arabidopsis thaliana
  unsure (1)..(672): unsure at all n locations
atgatctgccagcactaatcgactcacttagggaaagctcggtacgcctgcaggtaccggtccggaattcccgggtcgacccacgcgtccgcggattcggagctgctggtataaggccatgtgtttcctcatttggtgctgaccagtttgatgagaagagcaaagactacaagacacatttagaccgtttcttcaacttcggcgagctatcggtcactttaggcgcaatcattgccttcactttggtggtatatgttcaaatggaacttggttggggtatggcttttggcacattggccgtagccatggggatttctaatgctttgttctttgctggtacaccgctntatcggcataggttgcctggtggtagtcccttgactagggtagctcaggtcttagttgccgctttccgcanacgaaatgcagctttcacaagcagtgagttcatcggtctttacgaagttcctggcttgaaatctgctattaatggcagtcgtaanatccctcattccaatgatntcatatggctagaaaaggcggtagagtggcagcgcttagccgagaaagcgacggaacatanacttggttcttccgttatgaattttgagacnggttgtagcaagtttcttttgngacannaatcacaggattaactaaaatataagatga

SEQ ID NO: 128192 - DNA, 906 bp, Arabidopsis thaliana
  unsure (1)..(906): unsure at all n locations
tatacgactactatagggaaagctggtacgcctgcaggtaccggtccggaattcccgtgtcgacccacgcgtccgatcgattcagagggttgctctagccattgctcctcgtcctggctccaatatcagtccaatatctgttcccacttcccctgaagctctcactctggtccgttggatctcccggagttacagccttcacactggtgcagatctctttggatctgattctcaaaccagtggtgacacgttgctgcatcaactctggaatcactctgatgcaatcttgtgctgctccctcaaaacaaacgcttcaccggttttcacattcgcaaaccaaaccggtttagacatgctggaaacgactcttgtagcccttcaagacataatgctagacaagacccttgacgaacctggtcgtaaagctctttgctctgagttccccaagatcatgcaacagggctatgctcatctgccggcaggagtatgtgcgtcaagcatgggaaggatggtatcttacgagcaggcaacggtgtggaaagttcttgaagacgatgaatcaaaccactgcttagctttcatgttcgtgaattggtcgttcgtttgaagaataataagaaataagaagaccagattttactccatttttcccttggtagggaggttatttatgtaagatattaaagttaggtcccactaggctccaaagtcttttgaaattcgaggaccaatatgtaatatgacgaaggtctgatctggtatggatggttctggtccctatgttacgttatatggcaagattattatgataaaaaaaaaaaaaaaaaaaaggcnnnnnnnnnnnnnnnnnnnnnnnnnnnnnnnnnnnnnnnnnnnnnnnnnnnnnnnnnnnnnnnncgtcctaaa

SEQ ID NO: 128193 - DNA, 550 bp, Arabidopsis thaliana
  unsure (1)..(550): unsure at all n locations
nnnnnnnnnnnnnnnnnnnnnnnnnnnnnnnnnnnnnnnnnnnnnnnnnnnnnnnnnnnnnnnnnnncttttttgtattctctcattacttcgtctcttcccctgtaatggcgcttccacacgtagtctcttcaccttcttcaacttcattatctccttccttcaaatccaaaccaccgtttcactcccttagatctttatcaccgacggttgataatcgccggcgttgtaaactcaacagttccttccgatgttcatcttcttcattctccgagaagcatcacaacgcgaaatctccaaaatccgatgatatcgtcgagcttcctctgtttccactcccactcgttctcttccccggagcaatccttcctcttcagatcttcgaattccgttaccgtatcatgatgcacacgcttcctccaatctgatctacgattcggcgtagtttactccgattccgtctctggctccgccgcagaagtaggatgtgtaggagaagtcgtgaaacacgagcgtctcgtcgatgatcgattctttctagtctgcaaag

SEQ ID NO: 128194 - DNA, 596 bp, Arabidopsis thaliana
cgcgggtcgacgcaagactctatactgattcgaaataacgacagaaggggatgtcgagacaaaatgcaggcatacacactaccattcgtattcggagaattattgcgggtatcggtgttgaaattgtgtttcccatatactctcccaacatcaaagagataaaagtggtgagtcacaggaaagtaagaagagcaaggctttactatctgagggacaagcttcctcgtctgtccactttcaagtgaacaccatccaccgtgctgtgtttgacctccagaggtagtaatcttccgcattgtgctctttttttgtaagaattggttctttctttcttttttttaagcctgtaagtcattccctgcacattttctgagaaagtaaattaagattagttgaacttccggttgatggatgtagacctgttccttgtttgataatgaatgatatatggcttaggatgacctaaagtccatactttaatagaaactatgtattgaaaaaaaaaaaaaaaaaaaacccaaaaagcggccgctctagaggatccaagcttacgtacgcgtgcaggcgacgtcataactcttctatagttgtaccta

SEQ ID NO: 128195 - DNA, 1141 bp, Arabidopsis thaliana
  unsure (1)..(1141): unsure at all n locations
atgatttgccnnnnnnnnnnnnnnnnnnnnnnnnnnnnnnnnnnnnnnnnnnnnnnnnnnnttatccgcccgagtaactgagagtttgctgcagctatggcgatgagctttcatcgtcttcctcaggcattgcatatgatacccagaaaccctacgcaatcatcgaagaatttagggttttcttcgtttctatcgtgtgcaccatcgatggattctcgtatatcagtttctaggctttctctgaatcatcccggctcgaaatttgggttctcactcgatactagggtgagaaatgagtttatcgttagagcagaagaaggtaacacagaagctgaatctgaagaatttgttgctgaaatcgctgatacggaaggaaatgtagaggaagtggtcgaagctaaacctacaagaaaacctaggatcaagctcggagatgtcatggggatactgaaccagaaagcaattgaggtagcagagaaagtgagacctgttccagaaatcaggacaggagatattgtagaaatcaaattggaagttcctgagaacaaacgtaggctatctatctacaaaggcatagtgatgtcgagacaaaatgcaggcatacacactaccattcgtattcggagaattattgcgggtatcggtgttgaaattgtgtttcccatatactctcccaacatcaaagagataaaagtggtgagtcacaggaaagtaagaagagcaaggctttactatctgagggacaagcttcctcgtctgtccactttcaagtgaacaccatccaccgtgctgtgtttgacctccagaggtagtaatcttccgccattgtgctctttttttgtaagaattgtttctttctttcttttttttaagcctgtaagtcattccctgcacattttctgagaaagtaaattaagattagttgaacttccggttgatggatgtagacctgttccttgtttgataatgaatgatatatggcttaggatgacctaaagtccatactttaatagaaactatgtatgaatgagtctgtgttctgtgcaaaaaaaaaaaaaaaaaaaagnnnnnnnnnnnnnnnnnnnnnnnnnnnnnnnnnnnnnnnnnnnnnnnnnnnnnnnnnnnnnnnnnnnngtaccta

SEQ ID NO: 128196 - DNA, 1053 bp, Arabidopsis thaliana
  unsure (1)..(1053): unsure at all n locations
atgatcctgccaagcatcaatacgactcacgttagggaaagctggtacgcctgcaggtaccggtccggaattcccgggtcgacccacgcgtccgcggacgcgtgggcgagctctcatcttcttcctcaggcattgcatatgataccgagaaccccttctttctcgtcgaagaatttaggggtttcttcaattctaccacgagcatcatcagtgaactcaagactatcagtttctagggtttttctcaatcattcgagctccaattttggtttcgccatcgattccaagaagagaaaagagtttatcgctaaagctgaagagagtactgaaggtgaaactgaggctgttgtggagaatgctgttgaaactgaagcggaaggagaaggagaagccactgttgcggcggaggaagctaaacctccgtggaagacgagagtcaagctcggagatatcatggggctactgaacaagaaagctattgaggttgcagagactgtaagaccggttcctggacttaggactggggatattgtagaaatcaaactggaagttcctgagaacaaacgtaggctatctatctacaaaggtattgtgatgtctagacaaaatgcaggcatccacactactatccgtatccggaggattattgcaggcattggtgttgaaatcgtctttcccatatactctcccaacataaaggagataaaagtggtaagtcacaggaaagtgagaagagcaagactttactatctgagggacaaacttcctcgtctctcaacttttaaatgatcaccaaacccaacaccagtcttgtcttgtgttgtcttcaatctccaaaggtagctagctactctcttttctcttgtaataattgtttgtttgtttcgtcttttggatttcatttcttttcatgtaatttacagtaacagtaatttaagaaaagtaaatcaatgttgattgttaaaaaaaaaaacacaaagnnnnnnnnnnnnnnnnnnnnnnnnnnnnnnnnnnnnnnnnnnnnnnnnnnnnnnnnnnnnnnnnnnnnnnnnn

SEQ ID NO: 128197 - DNA, 516 bp, Arabidopsis thaliana
  unsure (1)..(516): unsure at all n locations
nnnnnnnnnnnnnnnnnnnnnnnnnnnnnnnnnnnnnnnnnnnnnnnnnnnnnnnnnnnnnnnnnnnnnnnnnnnnnnnnnnnccacgcgtccgcttagtttttgtgcttcgcgaacagcaagttgagctatggtgaaggagagtgagtactacgacatattaggcgtcaagattgacgcctctggtgctgagattaagaaagcttagtatgttcaagcaaggcaagttcatccagacaagaaccctggtgatcctcaagctgctaaaaactttcagatactaggtgaagcttatcaagttctaggcgatccggagaagcgtacagcttatgacaaatatggaaaagaaggggttcaacaggatgcaatggttgatcctgcagctgtgtttggtatgctctttggtagcgagctctttgaggattacgttgggcaacttgcccttgcttcagcagcctcaatcgatgctgaattagaatcgtatgagcctgagattagaaaacagatgcttcaggg

SEQ ID NO: 128198 - DNA, 595 bp, Arabidopsis thaliana
  unsure (1)..(595): unsure at all n locations
ggaattaccggggcggaccacacccgtccgcggacgcgtggccagccgaaaatccaagtcgactattacgacgattttagttattcggccggaaaggttgataatttcgtgtgattaatctatggagttggaatttgaatcaaagtacgagattaaccgtacggcggagttcattattagcaaaagcttcaccagaattgctttacagttcccggatgagttgttaaaagattcgactaaggtcgtgagtgctcttaagagcaaaactcgtttgcttactgacagagaagtcaggttctttgtaatggctgacacaacttatggtagttgctgtattgatgaagttggagctttgcatattgattctgaatgtgttgttcattacggtcaaacatgtctaagcccgacatcagttcttccagcattcttcgtttttgggaaagcttcgataaacgtctccagctgtgttaagcatttgatagattatgcgtcaaagagcgataaagccatttcatgggttcctttattgggcctagaataccgcgcatttaaatcccccaaaatccggggngntttngggtntnccgaggctngt

SEQ ID NO: 128199 - DNA, 971 bp, Arabidopsis thaliana
  unsure (1)..(971): unsure at all n locations
acgcccgtnnnnnnnnnnnccccctctagggttggttggtccgcctgcaggtaccggtccggaattcccgggtcgacccacgcgtccggatagtgataacgaaatcctaattccatggccgacaacgacggagcagtgagtaacggcatcatagtcgagcagacgtcaaacaaaggacctcttaacgccgttaagaaaccaccgtctaaagatcgacacagcaaagttgacggaagaggaagaaggattcgtatgccaatcatttgcgcagctcgagtttttcaattgaccagagagttaggtcacaagtccgatggtcaaaccatagagtggcttctccgtcaagctgagccttctatcatagccgccactggaactggcactactccggcgagtttctccactgcttctctctccacttcttctccgtttactctcgggaaacgtgtcgtcagagcggaggaaggagaatccggcggcggaggaggaggagggttaacagtgggacacacaatggggacttcgttaatgggtggtggtggttctggtgggttttgggctgttccggcgaggccggatttcggacaagtctggagctttgcaaccggagctccaccggaaatggtttttgcgcagcagcagcaaccagctacactcttcgtccgccaccagcagcaacagcaagcttccgccgccgcagcagctgcaatgggtgaggcttcagcagctagagttgggaattatcttccgggtcatcatctcaatttgcttgcttctttgtctggtggagctaacgggtcgggtcggagggaagacgaccacgaaccacgttgagaaatggtattgtctttttggtaatgtatagaaaaattcctatgttttatgtcatcgaaagtgtttagaaagtacctctaatttgcggtttcttttgctccttttttacttcatttaagcttattgcttgtttgatt

SEQ ID NO: 128200 - DNA, 658 bp, Arabidopsis thaliana
  unsure (1)..(658): unsure at all n locations
ctcacttttagggaaagcctggacgcctgcaggtaccggtccggaattcccggttcgacccacgcgtccgataaactccaccgttaggcccttgttgtgtccatcccgtctcgccgtttgaaaccgtattcgttgttcgctccatcagtccaatccgtcaaagttggagagaaaggttttcatgtcgtcaaataggaatatatatgctgaaagacattggatgtatgaaagaatcgatcctacaaccaatcgagtatcacaagctttttatgaaggattggacaattttttgaagtttgcaaaaagtcagcctttatttttggagaataaaaaacttttttgtccgtgtattaagtgtggaaatggaggaagacaacaagaagaacacatccgtggcaacacattttgttcaccaaagggtttatgcttaactactgggtttggacttctcatggggaaattataatatgttataaacaacaattctgaagagatactgttaggtttgagtctcacacagaaccagtggatccttatgtggaaatggtgtcagatgcaatttggtagtacagaaatcagagtttgatcagatgagggaagatgatcctaattttgaggcaaaaaagtttatgatattttggatgctgcnaacaaccta

SEQ ID NO: 128201 - DNA, 534 bp, Arabidopsis thaliana
  unsure (1)..(534): unsure at all n locations
nnnnnnnnnnnnnnnnnnnnnnnnnnnnnnnnnnnnnnncggacgcgtgggcggacgcgtgggctccaatgcttaagctgaaatctagtttattttttctatttactaaaacctcccaaggaccaaagaacatcgacaaaggaagacgacgaagaagatttcgagcttcgacaaatcatgcggattcttactgctcgcatagctaaccatttttgcagggcacgaaacgcgaatcctcgatctcgaaatttctcctcgtcgaacaagaaagatgaccttacattggaggaagaagctgagaggaaaataggttggtgtctcaaaattttctttgcgggcacagcaacgtatattggataccagtttttcccttacttaggtgataacttaattcatcaatcaatatcgcttttacatgtgaaggatcctttgtttaagagaatgggagcttctcggctttcccgtttcgctattgatgatgaaaggaggatgaaggttgtagagatgggtggggctcaagagctactacatatg

SEQ ID NO: 128202 - DNA, 852 bp, Arabidopsis thaliana
  unsure (1)..(852): unsure at all n locations
nnnnnnnnnnnnnnnnnnnnnnnnnnnnnnnnnnnnnnnnnnnnnnnnnnnnnnnnnnnnnnnnnnnnnnnnnnccacgcgtccggaagaggatagttctaacacatccctgacaaatactcttgctgaatttgatcccttctccccatcatcgttgtaccccgaacatgagatcaatgctacttctgatctcaacatggaccaagattacgatttttcacaatttttcgaaaaattcggaggagataaccacaatgaggagaacagtatgaatgatctccttatgtccgatgtttcccaagaagtctcatcaactagcgttgatgatcaagacaatatggtaggaaacttcgagggatggtcaaattatcttcttgaccataccaattttatgtatgacaccgactcagactcgcttgaaaagcatttcatatgagtcttcatatccaaacagaaaggtttcaaactattcgacgacttaaaataatggttctgtacccaaggttagtcgattactaactcgctcgaacgagatattgtgtatgtattaattagtatttgggttgtttactatatgtccaaggcgtgtttatttccatgttaaccaagggttaatcttaacccttaagtttccccaagaataaataaaatagggtttgagttagggtttctcttacattgagacccatgcatgtatcctcgcgaatcaattggtaattgatttgtgcgggccacgatgtttatactaatatttctttctaaaaaaaaaaaaaaaaagnnnnnnnnnnnnnnnnnnnnnnnnnnnnnnnnnnnnnnnnnnnnnnnnnnnnnnnnnnnnnnnnnnnnnnnnnn

SEQ ID NO: 128203 - DNA, 763 bp, Arabidopsis thaliana
  unsure (1)..(763): unsure at all n locations
cgccgcaggaccggcattaggcgtcgaancgacccacgcgnncggaccaatgaaaaggtgagaacccttatggagttagcccaactacgacaggaatatcagtcgctaagagacaaaatgagtggtagaagagaggaagaatcaacgggaaacagtggcaggatagttatctccaatgagaaagatggaagactaaagaatatgtggaagaaatcttacataaaccgttggattgacccaagttcaagaggcggaagtcacttgaacactgaagcagattatgccagtaacatcgaatattccagaatgaaagtagaatatgcagctataccacgcgtccgggaaagcatggggcacttgacgacttcaatccgcaggctccgtctagcgctcttgaaggtaaaggaattaaatgatactgaaacaactgcaagaagttgcgaagtagcgattgccaacatccttgtggaggcaacccatttgaagactgcccttgggatctccataccaattagctggtcggcggaatcagacattgaatcagttactgatggcgagtcgagctgtgaaaggaccgattctgtttctgctgcaggatttgagatggtggagcttgttattctagcagccgagataatgaaagaacaacaccattgaaattcattcttcagtttgttaccggcattttaagttggtctgtggctctgtgaatataatttattgagaatttgatttcaaaatctcttgtataacctctcatggg

SEQ ID NO: 128204 - DNA, 511 bp, Arabidopsis thaliana
  unsure (1)..(511): unsure at all n locations
nnnnnnnnnnnnnnnnnnnnnnnnnnnnnnnnnnnnnnnnnnnnnnnnnnnnnnnnnnnnnnnnnnnnnnnnnnnccacgcgtccgttcaccctcggagcttttcttgaagcagggattcttctaatcattaatccctacttctttctttcttttttgtttgttctcctttgagatctatctagtactagtagtaaggccccctcccctccattgaatttgaattgaattgaatctctgggaatcaaatctttgatgtcgcatctggacgacattccttctacgcctgggaaattcaagatgatggataaatcccccttcttcctgcaccgtactcgttggcaatcctccgtcgccaagcttgccttttggtcccttgtctttttcggattgctcttcatcttcttctaccgatctcccatctccaatcccgattcctctcgccgctctcttcgcacctactcttggggcgggcccgcctgggagaaacgcgtccgatcctccgctcgtgt

SEQ ID NO: 128205 - DNA, 937 bp, Arabidopsis thaliana
  unsure (1)..(937): unsure at all n locations
nnnnnnnnnnnnnnnnnnnnnnnnnnnnnnnnnnnnnnnnnnnnnnnnnnnnnnnnnnnnnnnnnnnnnnnnnnnccacgcgtccgtggagctgactggataagttcagataagcgggaagatgatcttggtggacgaataggtggtctagttcaggaatacgcagcgaaaggaagtcccgagtttttcttcattgtaaacatacaggtccctggttcggctatgtacagtctagcattgtactatatgctgaaaacaccattggaggagcatcctttgttagagagttttgtgaatggtgacgatgcttatcgaaactcgcgctttaaactcatccctcatatctccaaaggttcatggattgtgaaacaaagtgttggaaagaaggcttgcttggttggtcaggtacttgaagtttgttacacccgcggcaagaactacttagagcttgacattgatgttgggtcttcaactgttgcaagaggtgtaaccaatcttgttcttgggtatctcaacaatttggttatagaaatggcatttttgatacaggcaaatacagtagaggaactaccagaactgctactaggaacttgtcggctcaattatcttgatgtttcaaaatctgtaaaagaaaggtgagacatccttaacaacaaacactattgcaggagcagaggatattttcgatttttgtttctttgtaaaagctgtgttttaaactgtgattcttgttatgtcaactcgtttttacactcaaactgatgtatagtcaggatcagtagtttggttctctgtgttgtctgatccaagattgaataaataaacttgttgataagacatgaaaaaaaaaaaaaaaaaaaaaagnnnnnnnnnnnnnnnnnnnnnnnnnnnnnnnnnnnnnnnnnnnnnnnnnnnnnnnnnnnnnnnnntgtcctaa

SEQ ID NO: 128206 - DNA, 662 bp, Arabidopsis thaliana
  unsure (1)..(662): unsure at all n locations
ctcactatagggaaagctggtacgcctgcaggtaccggtccggaattcccgggtcgacccacgcgtccggcaactctggagagagcgtgttcgtcattgaaatcgaagcttggagattcaatatttcttcgatctcgtgttcttcgtctcgtttcgtcggtccagtgttaataaaaaatgagttcaactgtttcaaatccccaaggaatcctgcaaccaggctcatttctgcttccagaatcagaatctatgaaaaaagaggaagcagagttagtttctgtgtgttggaatcaggattcaagttgttttgcagctggaacgagtcatggttttcgtatatataactgtgaacctttcaaagaaactttcaggcgtgagctaaaggacggtggttttaaaatcgtagagatgcttttccgtagcaatatactggcacttgttggtggtggacctaactctcagtatccttcaagcaaagtactaatttgggatgatcatcagagccgttgcattagtgaatntgcatttaggtctgagattcgtgcagtgaaattaagaagggatcggattgttgttgttcttgaacataagatttatgtttataactntatggatcttagacttcttcatcagattgaaactcaagctaatcctagaggatt

SEQ ID NO: 128207 - DNA, 628 bp, Arabidopsis thaliana
  unsure (1)..(628): unsure at all n locations
actcactttagggaaagctcgtacgcctgcaggtaccggtccggaattcccgggtcgacccacgcgtccgtacggtggagaaacagaagggggccaaatcctttcaacgccaaaccattcccctatataattatatatacaattacaaattttatgttacagtcttcatttattcgcgtaaagatttcaaaaagtagtgaatatattcttgtaggaagctgcaggggttaaggagagaaaagggatggtgaaactgagagaaacagaagtgatcctgagactctgcatcgtcttttttcttctcctcacttcttgtttgatcggtttggattctcagaccaaagagattgcttatatccacaagaacgtcagtttcagatatttgttagctctcgaggctgagttatacatagatgttgtggttgctgcgtataatttggttcaactagggcttggttggtacaatgttgaacaaaaagacctccaatcccaaatggttctcttaccctctttggntcagacggcggcatacgtggttttcgccgggacaatcanccgggnngaaacactcatttnctagttggnttacggggttcaaaggnngcttcaantggntnaaatggggtcc

SEQ ID NO: 128208 - DNA, 672 bp, Arabidopsis thaliana
  unsure (1)..(672): unsure at all n locations
aactgcttcttcagaaaattcattacttctaaagatggatgttgtaggtggctgatgactcttcttccctagcatgacctttattgatacagagatgtgtatgagaagaaagaacatcaatttaacaacagtcatagattctaacgaagccattggtatggaacatgaattagattctgctagacatcaatattcttcagtgctcactgcaattccattcttctccgctacattgtttattcctctctctttgaaaatcactatacgtgacgggtttcacgaaagtctttaataacatttccatacacaaaacacaaatagtttagagatttgttcttagggagatttagctatctctctgttcaaaagattggtctaaagatgcaagcttttgctttaagtgggaagaaaaggattgtgaatcacggcatgtgtttttccaaaggaaatcttgatctcggttcacgcttgtctgagaattttatggatgatcctttgatcccgggattgcctgatgatgtcgctaagcagtgtctagcgcttgtnccgcgtgctaggttcccatccatgggaagtgtatgcaagcaatggaggnttgttgtncagagcaaagagtttattactntgagaagactcgctggtatgctttaggngtggctttatttcttaacg

SEQ ID NO: 128209 - DNA, 657 bp, Arabidopsis thaliana
  unsure (1)..(657): unsure at all n locations
nnnnnnnnnnnnnnnnnnnnnnnnnnnnnnnnnnnnnnnnnnnnnnnnnnnnnnnnnnnnnnnnnnnnnnnnncgctaatggaccacgcgtccggattcaatacgttacgaacattattgtccatgggattcatgtccatgactgtaagcctacgggtaacgctatggttagaagctctccgtcccattatgggtttagatcaatggctgatggtgacgcgatctcgatttttggatcgagtcatatctggattgatcacaattcgctttctaattgtgctgatggacttgttgacgctgttatgagctccaccgccattactgtctcaaacaattttcttcacccaccacaatgaggttatgttgttggggcatagtgattcatacacaagagacaaggtgatgcaagttacaattgcttacaaccattttggtgaaggtttaatccagagaatgccaagatgtaggcatggatatttccatgtagttaacaatgactacactcattgggaaatgtatgcaattggtggtagtnctggtccaaccatcaacagtcagggcaatcgatttcttgctccagtcaacccatttncnaaggaggtgactaagngagngtacacaggtggatcggaaatggnngcnctgggnttggggtca

SEQ ID NO: 128210 - DNA, 562 bp, Arabidopsis thaliana
  unsure (1)..(562): unsure at all n locations
tcccgggtcgaccacccgtccgttctttaaaacaattattttcagacacagagagactcagacaggagatatgaactgcggaggaaaggtggtctgcgttaccggagcttccggctacatagcgtcttggattgtcaagcttttgctcctccgtggctacaccgtcaatgccactgttcgagatccaaaggacaagaagaaaacagaacatcttcttgcactagacggtgcaaaagaaagactcaaattgttcaaagcagatcttttggaagaatcttcttttgatcaagctatcgatggttgtgatgctgtcttccacactgcttctccagttctattcactgtcacagatcctcagacctgagctgattgatccagccttaaaggggtactattaacggccctaatacatgcaaacaaggtttttctgtcaagagggtcattctgacatcttccacggctgcggttctctttcgtagccccctttgccaaagggccctggtggccgggtttttttcgtccagnttnaggggnanattggttnccccantttggcggatta

SEQ ID NO: 128211 - DNA, 594 bp, Arabidopsis thaliana
taatacgactcatttagggaaagccggcacgcctgcaggtaccggtccggaatacccgggtcgacccacgcgtccgcccacgcgtccgctcttaactcatcttatactttcttcttctattagtaaagatgagtactctctctaccaaataaataaggaaacataaaaaacatctctccttctttctctacatgaaaaacaaaagattcctcaattttgttcttatttttcatttagtcacagtacctctctcactataaaccacactgtcttgagataaaatacaaaaagagaagagattaaaaacctcatccgatgatagactacgagagaagcaataccaccaagaacatcaacacccatcatcacaaccctcctccatcttcatcttcctctgatcttcttcccgacggtaatggaaccgccgtgactcagaagcggaaacggagacccgccgggacaccggatccggaggcggaggtggtatctttatcaccaagaacgttactagaatcggatcggtacgtatgtgagatctgtaaccaaaggtttcaaagggaccagaatctacagatgcatagaagacgacataaa

SEQ ID NO: 128212 - DNA, 647 bp, Arabidopsis thaliana
  unsure (1)..(647): unsure at all n locations
gactcactatagggaaagctggtacgcctgcaggtaccggtccggaattcccgggtcgacccacgcgtccgcaagtactatggatagagattttccagcaacagtgaagataggaactatgagaacattcaaaggagtgtcactttacaaaggcagaacagttttgcctaagaataaacagtatcctctggtttacttaggaaggaatgcaagtagtcctgatccaacctcgttctgtctagatggagctttggatcggcgccatgtagcgggaaagatcgtgatatgcgaccgcggtgttactccacgtgtgcaaaagggtcaggttgtgataagagctggtggaattgggatggttttaactaacactgcaacaaatggtgaagagcttgttgcagattctcatatgcttccagctgttgcagttggagagaaagatggtaaactaatcatacagtacgcgatgacgagataaagagcgacagcgagtttagagattcttggaacaagatttgntatcaaaccttcaccagttgtagcagcgttctcttcaagaggaccanattgtctgtctttggagaatcttgaaccagacttgttggctccaggagtgaatattcttgcagcttggactggagacatggcac

SEQ ID NO: 128213 - DNA, 1080 bp, Arabidopsis thaliana
  unsure (1)..(1080): unsure at all n locations
agggaaagctcggtacngcctgcaggtaccccggtccggaattccacgggtcgacccacgcngtgcgtccttctccaactcctcctaaggaatcaccttatatctgtaacatgactgtcaaagaggatcttagaaggagaggaattgggtggcatttgttgaaggcgagtgaggaactgatatctcagattagtccatcaaaagatgtatacttgcattgtaggatggttgatgaggctcctttcaatatgtacaagaaggcaggatacgaggttgttaagacagatacagttttggtccttctgatgttacagcggcgtaagcatttgatgcggaagaaacttcttccactatgcaccaatcctatagtagaaatggtggggtctgataatgagctgacctcctctgcaaatgtgtaaacatgggagctaaatgtgacatgaccaagggtcgggttgataatcccgtttgcttcgacctattgtttatatgatcttagtagagcacccggttctgttcttttgggccctgagttaagtcaactgctctgcgtccagtaagtagttctagcagcacaaccccaaatgcataaatgtcgctttgtagagtaagtttacctgtctgccacagaagaggggaacaaaaattatgctaaaaattgtcctccgttgcctattggctctgatatgtttccattttgcatatattcatatactaggaaccggtgtttcccatctgcccaatagccgatcaaagagaccagatttgggtggtcgagtctgctcaagatatccacctccacacgaaattctctttctccgtcagcctttttaaacgtaggtaaatccatcttcttgattgcaacaaccttcaaataacaagggattaagatatgtatcctactctaatagctcctcttcgatagaaaagtttttgtaacattacaaagcctgtaaatcacataaatgaagctatatagttcctaccaaaaaaaaaaaaaaaaagggcggccgctctagaggatccaagcttacgtacgcgtgcatgcgacgtcatagatcttctantagtgcgtcctaa

SEQ ID NO: 128214 - DNA, 621 bp, Arabidopsis thaliana
  unsure (1)..(621): unsure at all n locations
agntttaacnanaacagttnggccctctgnttttnccccggcgtaancatttgatccggnanaancttttcccactttgcnccaaccctatggtagaaatggtggggccggataatgagctgacctcctctgcaaatgtgtaaacatgggagctaaatgtgacatgaccaagggtcgggttgataatcccgtttgcttcgacctattgtttatatgatcttagtagaggtttccattttgcatatattcatatactaggaaccggtgtttcccatctgcacaatagccgatcaaagagaccagatttgggtggtcgagtctgctcaagatatccacctccacacgaaattctctttctccgtcagcctttttaaacgtaggtaaatccatcttcttgattgcaacaaccttcaaataacaagggattaagatatgtatcctactctaatagctcctcttcgatagaaaagtttttgtaacattacaaagcctgtaaatcacataaatgaagctatatagttcctaccaaaaaaaagaaaaaaaaaaaagnnnnnnnnnnnnnnnnnnnnnnnnnnnnnnnnnnnnnnnnnnnnnnnnnnnnnnnnnnnnnncattcnnnnn

SEQ ID NO: 128215 - DNA, 869 bp, Arabidopsis thaliana
  unsure (1)..(869): unsure at all n locations
nnnnnnnnnnnnnnnnnnnnnnnnnnnnnnnnnnnnnnnnnnnnnnnnnnnnnnnnnnnnnnnnnnnnccacgcgtccgaccttcttccttcacagtgaatcaatggcgtcttcttctctatcaactctttgcagctcaacttcttcttctctacatcccaactccaaactctcacattctctttcagctaaattatcctccaaagcaaatgtttccgtccaatttctgggaaagaaacagtctccgcttctctcctcaactccgagatttctcactgttatcgccatggctccacctaaacccggaggcaaagctaaaaaagttgtgggagttatcaaacttgctttagaggcgggaaaagcaactccggcaccaccggttggtccggcgcttggttctaagggagttaacattatggctttttgcaaggattataatgcaagaactgctgataaagctggttatatcattcctgttgaaatcactgtcttcgatgataagagcttcacgtttattctcaagaccccccctgcttcgggtttggtgcttaaagctgcagggtgtggagaagggatcaaaagatccccaccaagataaagtgggggggataacaatagaccaactcccacaattgcagaagagagcctaccgacctgaccggacgccattgaaccgctatgagatcattgcaggaactgaactaacatggggatagacatggaccctccaatcttgacccaaaagaaacagtttattggaaaacccggggggaggttcattccctaaagcctattccgttaaaggggaatttccaccggaccctaaaaagagcgattaaggtgcccccggtggggttttttgtttaaaa

SEQ ID NO: 128216 - DNA, 674 bp, Arabidopsis thaliana
  unsure (1)..(674): unsure at all n locations
nnnnnnnnnnnnnnnnnnnnnnnnnnnnnnnnnnnnnnnnnnnnnnnnnnnnnnnnnnnnnnnnnnnnnnnnnnnnnnnnnnnccacgcgtccggtgtgaaccatgctcctcagactattgtggcttgttgtgtgttgcataatctttgtcagattgctagagaacctgaaccggagatttggaaggatccagatgaagctggaacgcctgcaagagttttggagagtgagaggcagttttactattacggggagagtttgaggcaagcattggcagaagatttacaccagagactctcctcgaggtaaaagacatgaacagatcttggtcaaaaaatggagctttctatctttgttatcatgtaagaagcagatgctttcaagtgtttagaactttagatagcattgtagattcaatcctcttgagaagaaagtttgaggattcagaaatgttaaaaagctgactttgttgcctagccatcccaactgtcagttttgtaacttaggaatgggtttatggtttgttctgtaacaccttttgagaatgaaatgtatgacttctattgatatggattaaaaaaaaaaaaaaaaaaaaaaagnnnnnnnnnnnnnnnnnnnnnnnnnnnnnnnnnnnnnnnnnnnnnnnnnnnnnnnnnnnnnnnnnncgtcctaaa

SEQ ID NO: 128217 - DNA, 865 bp, Arabidopsis thaliana
cgggatcgccgcaccggcccacgcacgcgtgctcacaacccttcggcaccggttaacaatggctcaagaatttagcggctcgtcgtcagcttctgttaacctgcacgctcaagcaacatcatttgcacgattatctgccacgcgcccgggaaaaactcacagtctaaacagtgattcacctgttcttccagtatcagctgagatggcaaagttgcttcctcaacgcaaagagagtgcaagaggatctgatttaatgttagaggcggttcttgaagcggaagtagcacacaaggcgaaaagctttttcgcacaagccgagaaagaaactccagctttgaaagggaagtttttcagtgacaggaaaggagaaaattgaactcaaaagttttggggaccatcatcgatcacaagacaccggcaaggtacaaaagagtaggccttgttatttaactgtttttttttttatgttcgatgagccaagaatctgagggacctttgtttctgatgcggcaacaagtgagctaaacttggagcgaagtcagttcactctttcatcttgtaattaatgcttccgctttataggtttaggttttgttgtttacttcggaggtttagtgtgagttggatttgcatagagttggttgggtttttttaaagagtagagatctattaaattttataaaattttgtgtatttttacaagtgtagttataaaaatccaatggacatccatggttttctcaaagttttcctttataaaagaaaattaaggttatgattaaaaaaaaaaaaaaagggcggccgctctagaggatccaagcttacgtacgcgtgcatgcgacgtcaagactcttctatagttgtc

SEQ ID NO: 128218 - DNA, 951 bp, Arabidopsis thaliana
  unsure (1)..(951): unsure at all n locations
acgactcactatagggaaagctggcacgcctgcaggtaccggtccggaattcccgggtcgacccacgcgtgcgtgagcttaagctcaaggctctcaaggaaaagagcacattgctcactaccctttaccagtccaccggtttgggccaacagcaaaacggtttcctcaactgcaccaaatctaacggaaagatttactttggttctggtgtgaaaggcgctcctcaaaccgctgaatacatcacaaccgttttccgtaacccgtacaatctctctgtggtccagatcagcatgcccattgtggcacctggactcgggtctccggttaaggttcctccaccaccacccatgtcttcaccaccggccccatctcccaagaagggtgcagccactccagctccagctcctgctgatgaaggggattatgcagatgctcctcctggtttagctccagaaaccgcacctgcatctgcaccatcagaaagtgattctccagctccagctccagataagtctggcaagaagaagatggcagcagctgatgaggctgaaccaccttcttctgcttctaacaccggtttgagcttcggtgctgtccttgttctcgggtttgtggctagctttgttgggttctaagatgatttaagacagcgagtcgaggataaattaaactgataatgagactcgaacatagtcagaggcaatggtgatacgaagtggatcaaagacactaacaatttctactcacattattgtacctcaatcatttatcattagacaatgaaagtgtgatgttctgtcctgtgaagcttgtattaccacattgtaactaaatgttttatcttcattcatccaatccgtaaaaaaaaaaaaaaaagnnnnnnnnnnnnnnnnnnnnnnnnnnnnnnnnnnnnnnnnnnnnnnnnnnnnnnnnnnnnnnnnnnnnnnnnnn

SEQ ID NO: 128219 - DNA, 788 bp, Arabidopsis thaliana
  unsure (1)..(788): unsure at all n locations
nnnnnnnnnnnnnnnnnnnnnnnnnnnnnnnnnnnnnnnnnnnnnnnnnnnnnnnnnnnnnnnnnnnnnnnnnnnnnnnnnnccacgcgtccgttttactatagaataataagggtaataaacaaagacacccaaagatgggtctcaaggtctcctcttctctcctctgtctcaccatcttactcgctgtttcatccattgtatcagcggttaacataacccgagtgctcgagaaataccctgaattcagcaccatgaccgagcttcttgccaagaccgagctcacaccaattatcaacaaacgtcagaccatcaccgtgctggcccttaacaacgatgctatcggttccatctctggtagacccgaggaagaggtcaagaacattcttatgaaccatgtggttcttgactactttgatgagcttaagctcaaggctctcaaggaaaagagcacattgctcactaccctttaccagtccaccggtttgggccaacagcaaaacggtttcctcaactgcaccaaatctaacggaaagatttactttggttctggtgtgaaaggcgctcctcaaaccgctgaatacatcacaaccgttttccgtaacccgtacaatctctctgtggtccagatcagcatgcccattgtggcacctggactcgggtctccggttaaggttcctccaccaccacccatgtcttcaccaccggccccatctcccaagaagggtgcagccactccagctccagctcctgctgatgaaggggattatgcagatgctcctcctggt

SEQ ID NO: 128220 - DNA, 795 bp, Arabidopsis thaliana
  unsure (1)..(795): unsure at all n locations
nnnnnnnnnnnnnnnnnnnnnnnnnnnnnnnnnnnnnnnnnnnnnnnnnnnnnnnnnnnnnnnnnnnnnnnnnnnnnnnnnnnccacgcgtccgcaccaccatcttctaatctagcgtggacttcttaccagaatgcaccacattatcaaagaagaaggactgaaaggtctgaacttgcacgtaggtccttgctttcttcccttgcagcagatgctacaaaccagagatctggtgatcatccaacacttcgttcgttggcccctcctgcctcttcggatgggcttgtgcttcagcctggtggtgataatagtcagatgcataatcgggcttactcgagagcaggtccgttgtttgataggcaaggggatagtgtggttggtattcctcatcctttgcgggccttggcagctgcaagcagaggaagaagcagacttatggtgtcccagatgcagaatgtcttggatgtcatgcgtagggatgctaataataacaacttgcggcttgaggacgttatgcttctaaatcactcagtactatttgatggggctactggtcatgaccggtatagagacatgcgacttgatgtggacaacatgtcatatgaggaattgttggcactagaagagcggattggagatgtttgtaccggtgtaaacgaggaaaccatatcaaaccggttaaagcaacgaaaatacaaaagcaacacaaaatctccacaagatgcagagccatgctgtgtttgtcaggaggaatacaccgaaggagaagacatggggacactagaatgtgggcat

SEQ ID NO: 128221 - DNA, 496 bp, Arabidopsis thaliana
  unsure (1)..(496): unsure at all n locations
ggggcttactcgagagcaggtccgttgtttgataggcaaggggatagtgtggttggtattcctcatcctttgcgggccttggcagctgcaanaagaggaagaagcagacttatggtgtcccagatgcagaatgtcttggatgtcaatgcgtagggatgctaattaaataacaacttgcggcttgagggcgttatgcttctaaatcactcagtactattttgattggggctactggtcatgacccggtataggggacatgcgaccttgatgtggacaaacatgtcatattgagggatttttttggccctagaagagccggatttggaggatgttctttaaccccgtgtaaaccgnggggaaccccttttcaaaacccggtttaaaggcaaccggaaatttccaaaaggnaccacaaaatttttccccaangnttcaaagggcccatccttttttttttaaaggggggtttnncccngnggggnanganntgggnncc

SEQ ID NO: 128222 - DNA, 633 bp, Arabidopsis thaliana
  unsure (1)..(633): unsure at all n locations
taatacgactcatatagggaaagctggtacgcctgcaggtaccggtccggaattcccgtgtcgacccacgcgtccgagcaagtggaagtagaagaagaagaagcgaaggggatatctggtggattcggtggtgagttcatgacggtggttcaggagatgataaggacggaggtgaggagttacatggcggatttacagcgaggaaacgtcggtggtagtagttctggcggcggaggtggcggttcgtgtatgccacaaagtgtaaacagccgtcgtgttgggtttagagagtttatagtgaaccaaatcggaattgggaagatggagtagagtgataagaacaagttttccctctgtttctcgggaaaataaaagtttcaggcttttcatgtatagagccagtagtagagacgacgaaaggaggaagcgaaatcaaaaaatgttttgttatcatcatcatatgatcttctttcgtgattcaattaaaagcaaagcaagatcatttattaccattaaaaaaaaaaaaaaagggcggccgctctagaggatccaagcttacgtacgcgtgcaggcgacgtcataactcttctatagnnnnnnnnnnnnnnnnnnnnnnnnnnnnnnnnnnnnnnn

SEQ ID NO: 128223 - DNA, 517 bp, Arabidopsis thaliana
  unsure (1)..(517): unsure at all n locations
nnnnnnnnnnnnnnnnnnnnnnnnnnnnnnnnnnnnnnnnnnnnnnnnnnnnnnnnnnnnnnnnnnnnnnnnnnnnnnnnnnnnccacgcgtccgctcttccagatcttcaagtgtatctagatcgagctctccttcttccttatcggattccatatctgtaagaggctcttggttttcttcttcggtctgatccctagactcttcttcggtaggaatggtttctgtctcagttggactttcttccactggttcatcagcttcattgtcttgttgtgcttccacatattcctctgttttctcctctgcattctcggcttctgtttcttcattgtcaccatcagttgtagttgtagcatccatcaattcgtctatggctggctcttttgcaaggttttcaccttcggaagtatcaggatgagactcagatccttttgccttcttcgatgcaggaggtgcaatctcagaactggtttccccttgagtcagactatcttgttgtggctcagaaaccaacg

SEQ ID NO: 128224 - DNA, 674 bp, Arabidopsis thaliana
  unsure (1)..(674): unsure at all n locations
ctactatagggaaagctggtacgcctgcaggtaccggtccggaattcccgtgtnacccacgcgtccgggcactccagaaccgcctaaagggaaagggaaggcatctttaaaaggaaggacggatgaagctatgcccaaaaagaaacagaagatagattcttcatcaaagagcaaggccaaagaggtggagaagaaggcctcaaagcccgaaactgagaaaaatggcaaaatgggtgatattggtgggaagattgtagcagcggcatcacgcatgagtgaaaggtttcggagcaaggggaatgtggatcaaaaagagacatcaaaggcctcgaaaaaaccaaagatgtcttcaaagttgaccaagaggaaacacactgatgaccaagatgaagatgaagaagctggtgatgatattgatacttctagcgaagaggcgaagcctaaggtgttaaaatccntgcactccaatgctgatgaagttgctgaaaattcttctgatgaagatgagcccaaggttctaaaaaccaacaactctaaggctgataaagatgaagatgaagaggagaatgaaacatctgatgatgaggctgagcccaaggccctgaaattgagcaactccaactcttgatatgggtgaaacaattcatctgatgatgagaaagagataacantat

SEQ ID NO: 128225 - DNA, 509 bp, Arabidopsis thaliana
  unsure (1)..(509): unsure at all n locations
cggacacgtccggtttctccttttacgcttcttcacacgcagctaacgaagagatttgtggaatcatcgcgtattcgtttcaggagtcattcatttttggtgtctctgcttcacaggggacttgacgatctctcctactgaaaggagcttgctttcttcactgtgacggttgacattggttgaaagatgggttatatgtgtgatttctgtggtgaacacagatcaatggtgtattgtcgatctgatgcagcgtgtttgtgtctttcgtgtgaccgtaatgttcattctgctaatgctctatcgaaacgtcattcgcggactttggtatgtgagaggtgtaatgcacagccagcttctgtccggtgtagtgatgagagggtttctctatgtcaaaactgtgattggtcacgccatgcccgcccgcccccccccactactttanattattaaaggcaaaccattaacccccccccccccccgcccctccagtgccgaattattctcgatat

SEQ ID NO: 128226 - DNA, 736 bp, Arabidopsis thaliana
  unsure (1)..(736): unsure at all n locations
nnnnnnnnnnnnnnnnnnnnnnnnnnnnnnnnnnnnnnnnnngtcccggttccggattcccgggtcgacccacgcgtccgatttcttctgtaagcggatttcatcagcattcagcagccagacgaaacttttaacgatctaccatcgaaccaggatacttcttcattaccatggcaacaagaaatgctttgagaattgtgtctcgtaggttctctagtggcaaagttcttagcgaagaggagagagccgctgagaatgttttcattaagaaaatggagcaggagaagcttcagaagttagctcgacagggtcctggagaacaagcagcagggtcagcaagcgaagcaaaggttgctggtgcaacagcatctgcatcagctgagtcgggcccaaaggtgtcagaagacaagaacagaaactatgcggttgtggcaggtgtggttgctattgtcggttcgattggttggtacttgaaagcaggtggaaagaagcagccagaggtccaaggagtaagagatagattgattgatggacttgtgatgagtgaataaaacagggagtagcattactcattcctcccttgtgagacactttggaatcaaatcttacgttgctgctactctctttgagtctttccttttgttttggttacttcacagttttttttgttccggtttttcattnggttccaaccaaacnccnnncttttccgcccctttnnccaagttggggntct

SEQ ID NO: 128227 - DNA, 841 bp, Arabidopsis thaliana
ggatttcatcagcattcagcagccagacgaaacttttaacgatctaccatcgaaccaggtgtctgagatcttccgatcatcgtctgggattacgattctttccttctcgtttttagattagctcagaaatttttctaaccttttcttctctgtcgatctaacacctgacctcgattttcgttaccgataccaccattttcgaggatacttcttcattaccatggcaacaagaaatgctttgagaattgtgtctcgtaggttctctagtggcaaagttcttagcgaagaggagagagccgctgagaatgttttcattaagaaaatggagcaggagaagcttcagaagttagctcgacagggtcctggagaacaagcagcagggtcagcaagcgaagcaaaggttgctggtgcaacagcatctgcatcagctgagtcgggcccaaaggtgtcagaagacaagaacagaaactatgcggttgtggcaggtgtggttgctattgtcggttcgattggttggtacttgaaagcaggtggaaagaagcagccagaggtccaagagtaaagagatagattgattgatggacttgtgatgagtgaataaaacagggagtagcattactcattcctcccttgtgagacactttggaatcaaatcttacgttgctgctactctctttgagtcttttcttttgtttttgttacttgacacagttttttttggtttccggtttgttgacatttagtttctcaatctaaacttcagaaacttattttggttaaaaaaaaaaaaaaaaggcggccggcttaaaagaatccaggctaaggaaggcgggcatgcgac

SEQ ID NO: 128228 - DNA, 686 bp, Arabidopsis thaliana
  unsure (1)..(686): unsure at all n locations
nnnnnnnnnnnnnnnnnnnnnnnnnnnnnnnnnnnnnnnnnnnnnnnnnnnnnnnnnnnnnnnnnnnnnnnnnnnnnnnnnnnccacgcgtccgctggaactgttactcttgaagaggtaaacactgttggcgccaaggtgctagaatttatttctgatttcggaagacccactgcccctcttcccgcagcaatagttgcttgtgttcccactaaggtgcatgttgatggggttggtgagagtgatttcaatatatctcctgatgaaataatagagtctgtcaaatcaggattattagcacccattgaagctgagcctgagctcgaggtgccaaaagaattgatctctcaatcacaattgaaagagttaaccttgcagagaaatccatgttttgtccctattcctgggtcaggtttaaccaaattgcatgacaaagagactgggatcactcagcttcggttatccaatgggatagctgtaaattacaagaaatctacgaccgaatcccgggcaggtgtcatgcggctcattgttggtggtggacgagctgctgaaacatctgattccanaggagctgtggttgttggtgttcgtacactcagcgagggtggtcgagttggagactnttcaagggagcaggtggagctgttctgtgtaaatcatttgataaactgttcgttggagtc

SEQ ID NO: 128229 - DNA, 831 bp, Arabidopsis thaliana
ccaagattatactcaagcagaggcctgacgtggttgcctttggtggtatgtccctcttcttgtatggtatgggcgtcgctgtctattccttcgaaggcgttggtatggtcttgcctcgtgaatcggggatgaaggacaaggacaagtttggcaaagtcttggctctcggtatgggattcatctctctcatatacatcgcatttggtatcttatgttacttggcttttggtgaggacaccatggacattatcactgctaacttgggggcatgacttgtcaacactgttgtccagcttggactgtgcatcaacctcttcttcaccttccccttgatgatgaatccagtgtttgagatagtggagaggcgtttctcacgcgggatgtactctgcgtggctcagatgggtactcgtcttagcagtgactctggtgcccctttttgtgccaaacttgcagattttttgtcattggttggcagcagcacttgctgtgtgttaggctttgtgttacctgcattgtttcatttattggtgttcaaggaagagatggggtggctgcaatggagttcagacacagcgattgtggtactaggtgtggttcttgctgtgtcgggaacttggagttccctgagtgagatcttctctgtcaaagtgtgagcgtccgtgaagtcagagattggagaggtttttctctccttgtgtgcaattatgtatatggaattggttgtggttttaagagtaactgtgattgtatttgtattttgatggtttggaataaaagagaccagctctgtcttctgttttgtgtttacaagaacaaaaaaaaaaagaaa

SEQ ID NO: 128230 - DNA, 932 bp, Arabidopsis thaliana
  unsure (1)..(932): unsure at all n locations
nnnnnnnnnnnnnnnnnnnnnnnnnnnnnnnnnnnnnnnnnnnnnnnnnnnnnnnnnnnnnnnnnnnnnnnnnnnnnnnnnnnccacgcgtccgcccacgcgtccgttcgaattttccatctttcgattctcagtagtttcgtctcaatttcataattccattgtagccgataatgaattccgctttagattttgcttttccggctacatttccggttaaatcgagttctgttggcggacatcggattgcttcccctggattcagttcccgcttaagattgtgctctcttcctccttcttcatctatcaaggctgagtcatgtttaaaaagagacgtgcacaggcaaagaagcagtcttgagtcaatgttctgttatgataaaccaataccagaggaaataatcgaggagccagttggattatccatgtcagagagagagattggtgataatcagcgttgcacttgttgtgaagctaaaggtgcattgctttgttccacttgttctggaactggtctatatgtagattccattatggagagtcaaggcatcattgttaaagtccgttgcttaggttgtggtggaagtggtaatattatgtgcaaactttgtggtgggcgtggtcacgtaggacactgatgactccgtgtttcacttgtttgcactcatggttctgttttacctattcgccactttttctagctctgatcttattgtaaaagcctacttttttgagttccatacatagatttgtgttcttgtactgatgtaatctctagctaaactatgcacaatcttgtcccagactactcattttctgttgttatataaaatggtttcctaaaaaaaaaaaaaaaaagnnnnnnnnnnnnnnnnnnnnnnnnnnnnnnnnnnnnnnnnnnnnnnnnnnnnnnnnnnnnnnnnnngacctaa

SEQ ID NO: 128231 - DNA, 662 bp, Arabidopsis thaliana
  unsure (1)..(662): unsure at all n locations
nnnnnnnnnnnnnnnnnnnnnnnnnnnnnnnnnnnnnnnnnnnnnnnnnnnnnnnnnnnnnnnnnnnnnnnnnnnnnnnnnnnccacgcgtccgagcagaccctgttgtagagaaggattgtctgtcgatagatgataaaaaaaatctttccactgcagccatttccaattcagatgttgccagtgtcatcagcttaaagagaaagcattcagattgcagtggggatgatggcaactcagaaactaaacctgagatttacgaatctctcaatgaactaaaactggaggaagaggaagaattaactaccgttcaccacgagagcagatccccttcaaacaatacaactgttgatatattcagcattgtcaaaggaactggccgtagaaaaaatctcatgcgttcaaatcctactgataagtcttcagaagcagagaatgctgctggtttgagggtaaagaagatcaagaggacaccggaggacgagaaagagtcaatggttctggttgagaaactaaggaaaganataagagaagccgttcgtaacaaatcgatggaggacatcagagaaaaccaattcgatccaaaacttttggctgcctttagagctgctgtggcaggacctaaaactggtgaagcacctagaagaagttctgctctggct

SEQ ID NO: 128232 - DNA, 507 bp, Arabidopsis thaliana
gccgagcactatacgactcatatagggaaagctggtacgcctgcaggtaccggtccggaattcccgtgtcgacccacgcgtccgggtagtctctctctctccatttgataggaagaagaagaaagatacaaaaagataaaagaaagagagaaaaagagttttaattaaaatgcaatgttatacaaatgaagaagcactagcaagtctcttcatcaatgtctcaacatctttctttcttctcctcatcctcctctactccgccgtctccctcctaatcaagcttctccacttcatcggcggctaccctctcctccaaaggaatgaagatgaatatgattccgcggcatggtattccgaagaagaggaggaagaggaagaagaaggggaagaactcaagatgtcgtgtaactcaagttaccatgtgatatctagagatccaaatccggatttgatagctgatatagcagacgacggagaatctttagtgttttacaataatatttctca

SEQ ID NO: 128233 - DNA, 820 bp, Arabidopsis thaliana
  unsure (1)..(820): unsure at all n locations
ctccccctctggcgctcgggggggagtatcgccagcacctnnnnnnnnnnnnnnnnnnnnnnnnnnnnnnnnnnnnnnnnnnnnnnnnnnnnnnnnnnnnnnnnccacgcgtccgcggacgcgtggggtttatctctctctctctctcattctcttccaactcttcctctccttcatattctccgtctgtcttctgctaatttaaggaaacaaaaatggtggatcttgaaagaagagtgtgttgcatgtgtggtgatgtgggattcttcgacaagctctttcactgcagcaagtgccttaatcgctttcaacactcgtactgtagtagctattacaaagagcaagctgatccaatcaagatctgtgattggtgtcagtgtgaagcaaaaagtcgaaccggagcaaaacacggtgttaatggtggatcgtctaagagatcgtaccggtcggaatattcttcacctcatcaccaaatcaaacagcaagagattaaccaaaccactagtagtagtattcctccagcagccgacaagggaaaaactggcgtgccttctcctagaccggccactcgtaggtacaagcttctcaaggatgttatgtgttagtaatgttttcgaaataaccaaaagttaagagagacatagagagtttattaggatctgggatgatgataatangacacatggcctgtaaggtttnttaaaccgngcctangggctatgataanctggttgtaatgggtttgaaaanncattgtaattancccccggngggggttttttccccgggggtntaanaaaagngttttgggggnaatttt

SEQ ID NO: 128234 - DNA, 506 bp, Arabidopsis thaliana
  unsure (1)..(506): unsure at all n locations
aatggtggatcgtttaaaagatcggaccggtcgggaatattttttacctcatcccctaatcgaccagcaagagattaaccaaacccctagtagtagtattcctcccaccagccggcaagggaaaaactggcgtgccttctcctagaccggccactcgtagggacaagcttctcaagggatgttatgtgttagtaatgttttcgaaataacccaaagttaagagagacatagagagtttattaggatctgggatgatgataataagacacatgtctgtaagatatataaaactagctagggctatgatagctgttgttatggtttgagaagcaatgtaatatacctgcggagttatttcatggattagtaagtgtttgagataaattaattaagtatatctatcccaaaaaaaaaaaaaaaaaaaagtaaaannaagnnnnnnnnnnnnnnnnnnnnnnnnnnnnnnnnnnnnnnnnnnnnnnnnnnnnnnnnnnnnnnnnnnngtc

SEQ ID NO: 128235 - DNA, 751 bp, Arabidopsis thaliana
  unsure (1)..(751): unsure at all n locations
nnnnnnnnnnnnnnnnnnnnnnnnnnnnnnnnnnnnnnnnnnnnnnnnnnnnnnnnnnnnnnnnnnnnnnnnnnnnnnnnnnnccacgcgtccgcggacgcgtgggtcttgacgtctcgctgatctgttttgctaagattcaagcttcaaaaccctaatttctctagccattagcatcgatttcagctcaacttcagattcaaggaaacaattattagcttctcaagtgcttcagtgatccgatacaatgtcagctttgttcaatttccattcgtttctgacggtggtgctgcttgtgatctgcacatgcacatatctgaagatgcagttccctgccattttagagcagaaaactgggtttcgaggatttttctggaaggctgctagaataggtgagcgtttgagcccttgggtctccgctggatgcttcatgatgggtgtgtcgatcattttcttttgagtgtcaacttcttacatatccagttcttgtagatttttacttctttgggatgctcatttttctgtatgcaaaagattccaaggggttgttgatgaaactgaaagagtagaatattatcctctttggattatggatatggtcttgtatttggaacaaattgtgtctgttattttaatgtggagacaagtccataaaaaaaaaaaaaaagnnnnnnnnnnnnnnnnnnnnnnnnnnnnnnnnnnnnnnnnnnnnnnnnnnnnnnnnnnnnnnnnnnnnnnnnnnnnnagattc

SEQ ID NO: 128236 - DNA, 800 bp, Arabidopsis thaliana
  unsure (1)..(800): unsure at all n locations
aagaaatcaagggaatatgaccatgttagtagaagaagcctctagtgtggataacaagggaccacattttacaccggtaaagaaatcttcggaagaaacagaagagaaggctaactcagggggaccagatataatcaaacatactatctctgagaaaagcagggaagatagtaaagtatcccgcgcggccggtttgaggtctggctcaagggttgcaccttgtagtgacgatggtgattctgtaaagaattgtaaagatgatgttgaagagagcaagaaagatagtgaggaactgtctttgatacgggaacagcttgctctgattgagaaccaacagtctagtctcttagacttactacagaaattcatgggaacctcacagagtggaattcagtctctggagtctcgtgtaagcggtctagagatggcgttggatgaaatatcgtgcgatctggcggtttcaaacgggagagttcctaggaatagtagtggctgcgcaggagacagttgttccaaactacctggtacagagttcttaagtcccaagttctggagaaaaaccgaggagagaccacggaacagaaacacagctaatgaaatggctgcgtacgaccaggggatgcgagaatcaacagatacgaacaacggtcaaagaggaggttcagtttttcaaaagagatcacgaagagaccagttccaagactgtatgcatacaacactacagaaaccaaccaccagattatctacttgaagcanaagtgaaaagagtgcactntttgagaagaaagtgatgtgataat

SEQ ID NO: 128237 - DNA, 653 bp, Arabidopsis thaliana
  unsure (1)..(653): unsure at all n locations
nnnnnnnnnnnnnnnnnnnnnnnnnnnnnngggacgaccccgcggncggacagagagagagagagagagagagagagaaagaaagatccaacttccacaaagaaccatggaagctgagaaagaaacagaacaagaaggaaacttgacagtaatgaaacttccggtgttaccaactaaacccaacactcacagccactctatgtcatcaccaattcacagttccatatcagcttcagttccctttagctgggaagaagagcctggcaagcccaagcaacactctacttcttcttcctcctcttcctcttcctcaccattaacttcttattcttcatctccttttgaaactcacaagtccttagagctaccaccaaggcttcacttacttgaaaaagatggaggatcagtaaccaaacttcactcgcctataacagtctttgatggaccttatagcatgacgacatcaaaaaggatggattcaccttcctttaggatgatggtgaaaggtagtgctgattgttatgggtctttcagggggtgatttcgtgggtgatttagggggtttggaagtgggctctaagcagcaggagaacttgagtagtggctctttggctgttgtgaagaagagagggagattagggttttttgggttt

SEQ ID NO: 128238 - DNA, 933 bp, Arabidopsis thaliana
  unsure (1)..(933): unsure at all n locations
nnnnnnnnnnnnnnnnnnnnnnnnnnnnnnnnnnnnnnnnnnnnnnnnnnnnnnnnnaaactctgagacagagcaagaaaaagataaagtgagtgaaaagaatggcaacggtcacgattctctcacccaaatcgattccaaaggtcactgattccaaattcggagctagggtttctgatcagatcgtcaatgtcgtaaaatgcggcaaatccggccggagattgaagttagcgaagctggtctcagcggctggattgtcacagatcgaaccagacatcaacgaagacccgattggtcaattcgagactaatagcattgaaatggaagatttcaagtatggatattacgatggagctcatacttactatgaaggagaagttcaaaagggaacattttggggagcaattgctgatgacattgctgctgtggatcaaactaatgggtttcaaggtttgatctcttgtatgtttcttcctgctatagctcttgggatgtattttgatgctccgggtgagtacttgttcataggtgcagcgttattcacggtagtgttctgtataatagagatggataaacctgaccagccacacaacttcgagcctcagatatacaaattggagagaggagctcgtgacaagctcattaatgactacaacacaatgagcatttgggactttaatgacaagtatggtgatgtatgggatttcaccattgagaaagatgatatcgccacacgataagataatggattgtgatctcgttataatcatgacttttgatgtaaactgttttataaaattgatgaatgaacggggtacaatgtgtataatatggattgttcattctcttatttaaaagtagtaccatnnnnnnnnnnnnnnnnnnnnnnnnnnnnnnnnnnnnnnnnnnnnnnnnnnnnnnnnnnngtaccta

SEQ ID NO: 128239 - DNA, 527 bp, Arabidopsis thaliana
  unsure (1)..(527): unsure at all n locations
nnnnnnnnnnnnnnnnnnnnnnnnnnnnnnnnnnnnnnnnnnnnnnnnnnnnnnnnnnnnnnnnnnnnnnnnnnnnnnnnnnnccacgcgtccgcagagatcttagccaatagacttttgagctactcgaggcatttccatggcggcgacgatagctgtttttaccggtggtctgaaagtgaaggctggagttctcgccgttcaaatctcatcgcttcctctccgccgcgaattccctcgttacttgtcgtcttcctcgaggaggacagtagcggcaatctcctcgtctcttcgagtctccgccgtatataaccatcagcagcgtaatcgaagctcttggcctcgagttgctactttctgtacggcggctccagatgccggcacgacggtttcagcggatgaatcggagaagaagagcgaatctcagaaggaagaggagaatgtgaaggagacggcgaatctgttagatataaaagtaggacgaattgtgaaagcttggcaacacgaagaagctgattctctgtatg

SEQ ID NO: 128240 - DNA, 535 bp, Arabidopsis thaliana
  unsure (1)..(535): unsure at all n locations
nnnnnnnnnnnnnnnnnnnnnnnnnnnnnnnnnnnnnnnnnnnnnnnnnnnnnnnnnnnnnnnnnnnnnnnnnnnnnnnnnnnccacgcgtccgcttcattttctcaggctccaatgtcgctggacttagctcgttgatcatcgtacaaaaagcttgctcgtagctatcagctccccggagaagaagatggtgcggaaacagtttcaacaggctaaaactggaatagaggcattgaagtcaatggatgctaacaactacttgaagaaggttggattagggcgtgacgatatgttcttttggaaacaagtgggaaaagcattgctatgcacttacacaatctttggtatggcttggatttacaatgaaacgtctcctttaggttggtggacgctgaagccaagaccaaaggaagagagagaattggctcatttgtatgagcggcgtgagtttccttatcctggtgatacagaggctatggaggattttgttgcaaaggggggaatgattggtactgcaattggaccgaaaggaatt

SEQ ID NO: 128241 - DNA, 821 bp, Arabidopsis thaliana
  unsure (1)..(821): unsure at all n locations
nnnnnnnnnnnnnnnnnnnnnnnnnnnnnnnnnnnnnnnnnnnnnnnnnnnnnnnnnnnnnnnnnnnnnnnnnnnnnccacgcgtccgcggacgcgtgggggatactatatatacgaaaagggaagcaaaccaaaacctgatccatcagtgctttcaattgttgagaaatcaaggaaactgaccaatatcatgcctggtgggaagcctatatcagtaactgataaagaaattgtagagatgatcttattccctgttgtcaacgaggcatgccgcgtcctagatgaaggagttgtgatccgagcctcagacttggacattgcgtctgtccttggaatgagttttccttcttaccggggaggaattgttttctgggcagacactgttggaccaaagtacatatatgagaggctcaagaaattgtcggagacttatggcagctttttcaaaccatcgaggtatctggaggaaagagcaatgaatggaatgcttttgagtgaatcgaaatcgtcgaggtccaaattgtgaagcgtttaattaagtatatgcagaaggagaggctgaaggtgttagtcactaaatgaaaataaatcagtctctcttgttgtttcaaagttcaaagttaaaatgctattaaggtgtggttgttgttaacactcttaaaataaacaattttctgctcttaataaatgtttgtagtgacgtcagtttcataaagtaaaaaaaaaaaaaaaaaaagaaaaacccaaagnnnnnnnnnnnnnnnnnnnnnnnnnnnnnnnnnnnnnnnnnnnnnnnnnnnnnnnnnnnnnnnnnnnnnnnn

SEQ ID NO: 128242 - DNA, 820 bp, Arabidopsis thaliana
atgatttgccagcactaatcgactcattaagggaaagctcggtacgcctgcaggtaccggtccggaattcccgggtcgacccacgcgtccgcggacgcgtgggtgtttctcaagacaaaaaaagaaaaaatggtggaagatgaacaatgacgaagaatcattgttattgttcatgcattaaccttgttgttatgttcctccatggcctgttacatcgttccttattaccaccatcctgttttgtctcatcccaatagagaaatcttcagtcaccgtcaccaccaccaccaccgtttctgcaacaatctcttgaatagaagaattagtgttcctcgaagctccgctattagtgacggtggtgtctcctacaatactctagtctccgaggcggtgaggcttttggttccacaagcaaactttgattcttcaaagcttaaagttgagttcttaggagagttattggagaacaagagtaacggaggaattattacgccgcggacttatattctttcgcattgtgacttcactgctaacttaacgttaacaatctcaaacgttatcaatctggatcaactagaaggctggtacaagaaagatgatgtggttgctgagtggaagaaggtgaatgatgagctgcgtttacatattcattgttgtgtgagtggtatgagtttattgcaggatgttgctgctgagctcaggtttcatattttcttcaacgaattgcctgtgggggtgaagctgtgatgcatggagattcaatcttgtttagtgagaatccttgcctaatggtttcctatttattggtttatttccattc

SEQ ID NO: 128243 - DNA, 658 bp, Arabidopsis thaliana
taatacgactctaatagggaaagctggtacgcctgcaggtaccggtccggaattcccgggtcgacccacgcgtccgctctaccaccatggcaccaaatcgtcatcctcctccaccaaatcaccctcatcctcaacctccaccgaaacaaccgctgcctctatctcttcttcttccccttggcgttggattcactctttcgttgcagatttggagctgttttttctggaaagaatcttggcggtgaagttcggttgcttgtgttcgggaggaaagaagatgataaaaaaaaaccggatcggatccggtccgcggatactcgtactttttcacagacttcaggatcccgaatatccgaggttggcagatacggatccagagactgaaatgacggatccgccggatacggatccggatccggatacctcaaaaatcccggatatccggatccgtaacaggcctaatagccaaccatttaatataaaaacttgtcaatacagctaagttttttttcttaacaactaattatttttggtctttctaaattctttattataaaaagaatagtcgtttattatattgatctcaaatcactaaaagtctaaactcttataagtctttcctttcttagtaatgaagcctaaatcttaaaacatatat

SEQ ID NO: 128244 - DNA, 310 bp, Arabidopsis thaliana
ggtgaagttcggttgcttgtgtccgggaggagagaagatgataaaaaaaaccggatcagatccggatatccgcggatactcgtactttttcacggacttcaggatcccgaatatcaggggttggcggatacggatccggagactgaaatgacggatccgcctgttacggatacggatccggatacctccaaaataccggatatccggatccgtaacaggcctatttgatatagatgtacaaacaaaatcagtatatcttttttcccatgtgttgctttctcataaaaattaaattggtacaaatgtactt

SEQ ID NO: 128245 - DNA, 861 bp, Arabidopsis thaliana
  unsure (1)..(861): unsure at all n locations
caatatatcggctagaggaatgggaagagtggatagtagaacaaggctctatgccctttcttcatactctctatatcgatgattgtccaaagttaaagaagcttccggatgggctgcaatttatctattcattaaagaatttgaagatatcagaaagatggaaggagagattgtcggaaggaggagaagaatattacaaagtccaacacattccttctgttgaattctaccatagggtgttgcatatctttaggagcgtcggacgtgatataactgggagactcttgatgagatgagatgttggcctatctggaattcttcccagttgggagaccaacggagattaacaccgtcaacaacgcacctacgacccatctcaagagcttggacacgagggagaaggttgttgcctggatcaaacagtggtgcatccaaaacgcaagccatgtagatttttgtttcgggttctacatggccatggcgaagaagggtgaccagttggaaggtgcatacaccctaaagacgtcctacgctttgagggaactcagaagacacaatttgaacttttttctttagcactcatagaagaagagcaaagagaccaaacggataatatgaagtctttaccatccttaagtgatgttggtagtgttgtatttgccattattggcacaagagctgatcttgcttggtttgtgggagtgacatgtcgtcccatgatatgttgtctatcagcttcagtatatgttgcttatgtaacagtttttctataataactttgtgtaccaaaaaaaaaaaaaaaaaaaagggcggccgctctagaggatccaagcttccgtccgcgtgcatncnacgtcatag

SEQ ID NO: 128246 - DNA, 777 bp, Arabidopsis thaliana
acgactcactatagggaaagctggcacgcctgcaggtaccggtccggaattcccgggtcgacccacgcgtgcgcggctgcgagaagacgacagaaggggccggaagttaaaaaggcgaaaagctacagaacccttttggaagcggtgttgcctatctttaagagcgtcggaggtgatataactgggagactcttgatgagatgttggcctatctggaatacttcccagtagcgagaccaacggagctgaacaccgtcaacaacgcacctacaacccatctcaagagcttggacacgagggagaaggttggtgcctggatcaaacagtggtgcatccaaaacgcaagccatgtagctttttgtttcgggttctacatggccattgcgaagaagggtgaccagttaccctaaagacgtcctgcgctttgagggaactcagaagacaatttgaactttttttctttagccctcatagaagaagagcaaagagacccaacggataatatgaagtcttttccatccttaagtgatgttggtagtgccccctttgccattattggcacaagagctgatcttgcttggtttgtgggagtgacatgttgtcccatgatatgttgtctatcagcttcagtatatgttgctaaaccattacaaaagtttttcaataataacttcgtgtaccatatttgtaaaaaaaaaaaccccacaccaaaaaaaagcggccgctctagaggatccaagcttacgtacgcgtgcatgcgacgtcatagtcttctat

SEQ ID NO: 128247 - DNA, 668 bp, Arabidopsis thaliana
  unsure (1)..(668): unsure at all n locations
atgatttgtccggccactaatacgactcacttagggaaagccggtacgcctgcaggtaccggtccggaattcccgggtcgacccacgcgtccgcgaaccaaaaacttcctctctcttttataatatctttctctcaatctatgtttagaagaatggtttcgtattctaataatcattttgcatacgcatttctacttcttctaacaatcggtaacacgcttgcattttcttcgagtttgccggatcatgttcaagatccaaatctagtcgttgacgacgttaacagaagtgtattcaatgcgtcaaggaggagcttggcctacctatcttgtagaaccggaaatcctattgacgattgttggcggtgtgaccctaattgggaaacaaaccgccaacggttagcagattgtgccattggatttggcaaaaatgctatcggagggcgcaaaggtcgaatctatgtagttacggatcctgccaacgacgatcccgtaaaccctagacctgggactctaagatatgcagtgacacaagaagaaccattatggatcattttcaagagagatatggtcattaggctcanaaaagaacttatcatcacatctttcaagaccattgatggtagaggctcgagtgttcacattaccgatggaccatgcttaaagatc

SEQ ID NO: 128248 - DNA, 426 bp, Arabidopsis thaliana
ctatgacgtcgcatgcacgcgtacgtaagctcggaattcggttcgaggacgacgacgactgcttctctggttaagacttttctgtttcggtgcgactcgttttcatctttcaaattcaaatgcaaattcgaatctcccgcgaaaacgcgattgctctctccggcgaccgagaaacatgttgtcagatcgtcaagagcctggcgtattcgttgcttatccgatgatcctggttcgagtcatgttttcgttgcaagtagaaggaaaatggtagtcttgttgtcgacggtgcagcttctgtctcatatgcttccgcaaaacgggaacgcagctgagatttatccggtgatgcaaaacgaaataaggaaagtggtgacaaagggcaaggctgctggtgtgcttcgtttagtgtttcatgatgctggaacc

SEQ ID NO: 128249 - DNA, 528 bp, Arabidopsis thaliana
  unsure (1)..(528): unsure at all n locations
atgatttgccnnnnnnnnnnnnnnnnnnnnnnnnnnnnnnnnnnnnnnnnnnnnnnnnnnnnnnnnnnnnnnnnnnnnnnccacgcgtccggggagagagtagaagagaaatatcaaatttcccttcaaaagcctctcctctctttgttcaagtttttttccttggatgtgcatgtttcttgtggaacaaggcagttctgtttttaagtaaaattcatggcgacggattcgttcatcaagttaaatccaatttcctttaaccgtgcccgcttcgacctccgagattttgctggcataagtcctaaaagcatctcttctctgtgttgcattagcccaagattgatatcttgcaaccatttcagcccgagaacattgatatccggcgagaatggtaacatattgttttccaagaaaaagatccccgcgtttgtccgatgtcagacaagtcttgggatcggaaggaaccaaaaatggtgggagaaggaattgaaaccgaacatgaagtcggttacatcaccgcaagatctt

SEQ ID NO: 128250 - DNA, 559 bp, Arabidopsis thaliana
  unsure (1)..(559): unsure at all n locations
aatgaggtcaaacgatgtctgggtttataaccctattacattgaagtaactaacaacaagcactacaatttttgaacttattgttggagaattaagatctctctactattcctcggtaacaacaacacaaatctatctatcaaatcaaatcgaagaaggagagaagaacagagaaaaagagttgaatcaaatatggctgggagagctacgatccctgctcgcaactctgccctcatcgcaatgatcgccgatgaggacactgttgttggatttttgatggctggagttggtaatgttgacataaggaggaagacaaattacctcatcgtggattcaaagacaactgtgagacaaattgaggatgctttcaaggaattctcagcaagggatgatatcgctatcatccttttaagcccatatatcgccaatattgatcgggttcttggtggatacctccaacaancagtcctgnatcttgggancctccaaggcatcccatggccgnccangtcagtccccccgggcagacccttctggaaccgggccacggnaaaanagc

SEQ ID NO: 128251 - DNA, 873 bp, Arabidopsis thaliana
atcaaatcaaatcgaagaaggagagaagaacagagaaaaagagttgaatcaaatatggctgggagagctacgatccctgctcgcaactctgccctcatcgcaatgatcgccgatgaggacactgttgttggatttttgatggctggagttggtaatgttgacataaggaggaagacaaattacctcatcgtggattcaaagacaactgtgagacaaattgaggatgctttcaaggaattctcagcaagggatgatatcgctatcattcttttaagccaatatatcgccaatatgatccggttcttggtggatagctacaacaagccagttcctgcaatcttggagatcccttccaaggaccatccctatgatcctgctcatgattcagttctctctcgtgtcaagtacctcttttctgcagaatctgtgtcacagcgttaaacatatgcattttgcaagctctcggagcctatatcatttgtttgtttttgatattcttgtctttctccttcggaacccgaaaaatctacaataatgtataactcttgatttttatttggagaggaatgttatattatgaagaagcaatggtagcttcatctggttctttgcattcaattaagaaagaatcattgtgggtattcaagagacaagagcagacttcaaagatttagtgaagaattctagctccttaagtccttgctcaggtgattcagactcgcccaagatcttaaccatcgcgctaccaacaatgactccgtctgctccccattcagctacctgtttcacatgctcaggttttgatatgccaaatccaactgccactggcttgctagttgcctctttgatttgttgtagaagagattgaacttt

SEQ ID NO: 128252 - DNA, 414 bp, Arabidopsis thaliana
ggatgcttgaaatcatcgcctgaagctagaactaatgaggtcaaacgatgtctgggtttataaccctattacattgaagtaactaacaacaagcactacaatttttgaacttattgttggagaattaagatctctctactattcctcggtaacaacaacaccaatctcgcctctctcaagcaaatcatagaagactcttgttttcctctgctcgttccagtgatgcatcttccatagcccaccagccgctagtcccagtgtgagaccaataactaactccttcacaacacttgggccttttaaagttgcgtgtgctatcttgtgcccagccatctctttgccactctccctgttgtccaagtgtatgttcctacccaattgtataattgtatgttccaatacgaagaagaatca

SEQ ID NO: 128253 - DNA, 527 bp, Arabidopsis thaliana
  unsure (1)..(527): unsure at all n locations
nnnnntactgccnnnnnnnnnnnnnnnnnnnnnnnnnnnnnnnnnnnnnnnnnnnnnnnnnnnnnnnnnnnnnnnnnnnnnnnccacgcgtccgcggacgcgtgggccgttttgcaaggagttttccaagttttgggaagttgatgattcctcatcagctcccaaggagccttcaattctcatcggtggtaaaatgggggaccgaaatagctcgtttaagattgagaaagctggagaaggagctagagcaaacgtttataagttgaccaccttttacggaaccgttggagccatcccaggggtttggttaagcgcaccacaactaattatcaccaaggatacggctaagaccttactcgtcaaattcaaaaaggttgatgatgctactacggctactagcaacttatacttcccgggttgataatttaggtctaaggatgttcccgttctactaatcaactggtaaaaattattgtaatattaagcctgagactcgtccatggccctaaataatgagttattttcaa

SEQ ID NO: 128254 - DNA, 668 bp, Arabidopsis thaliana
  unsure (1)..(668): unsure at all n locations
cagcatctatacngactcactatagggaaagccggtacgcctgcaggtaccggtccggaattcccgggtcgacccacgcgtccgcccacgcgtccggctaaatgacattcctggtgtgtcctgtcctgatgacatagttatgagattctcggtgctacagaatgaggtggttcaaagcactatgaagattggggaagcaagtacccgtattaaaccaactggaggagacatctggaggctatacaacttggcagacagaatgctgtaagtgaggctgcattagcgaaagagaaatctgaggctctcaaaacagacgtgaagagaattgaagtaatgctcactttggtcacggaggagaaagaacagttgaaagctgttgttaatgaattaaggaagtcaaacagtgaaggatctgtgtctggagccgcagatggagcccttattcaggggtttgaatcttctcttgcaaagaaggagaactatattaaggatttagagcaggatctaaatcaactgaaggatgtcaataatcgtcaacgtactgaaatagaacttctaaatgagaaactagttgatgaagcaaggaggaataagtcgctggaagggatagtgatcgtcttcgctctgagatctctntactggagtcaaagctgggtcatggtgattat

SEQ ID NO: 128255 - DNA, 660 bp, Arabidopsis thaliana
  unsure (1)..(660): unsure at all n locations
atgatctcgccggcactaatcgactcacttagggaaagccggtacgcctgcaggtaccggccggattccgggtcgacccacgcgtcgctaaacccagaggacatggagatacacatgggaagctcaatctcattctccaaaccttcgtctctttcttttcgattccaaaactaaccctaagatccactgcaaaagcctcaatgtatcaaccatcgtcggaaaatctcaacttctcgtcacatggatcaacgaagaagatgaagaagctgcaagcaaagaagagattgtttctcttctagttcctatccctagggtcttactagatactgaatctcctgtaaatttcaaagctttagacgatcacatcgaggttagacttgttctgttactccctgttgatcatcctttagtctcagacttcaatttggtgactgattctagagaaaagtcggcgcctttagtgatgggttatgatctaaagactctatctttaatgggaggagttcattnttactgtagaagttgttcanataggttaacaaagaaggaacttttagatttctcagaaatgccgtctattaattggagagaatcagctgataattgggttggacttggtggtgtcatttggtggattagtgagagatggttgtaagacac

SEQ ID NO: 128256 - DNA, 906 bp, Arabidopsis thaliana
  unsure (1)..(906): unsure at all n locations
ttttaggtgcactatagaagagctatgacgtcgcatgcacgcgtacgtaagctcggaattcggctcgagtgtagccatcggtttagactctcgttaccacggtgaacgtgctgattgcaaaactgcatatcgagatgctcttatatcatcttggagaaatggaaacactatgccttttatctttgatactgtatgggatttgatcaaactagctgaatatcttactcagagggatgatatagacccgaaaaagataggaatcaccggtatttcgctaggagggatgcatgcttggtttgctgctgcagctgacactcgctattccgtggttgtcccattaatcggtgttcagggttttagatgggcaatagagaatgatgagtgggaagcaagagtcaacagtatcaaacctttatttgaagaagcaaggattgatctcggaaagaacataatcgacaaagaactagtcgagaaggtgtggaacagaatagctcctggcctagcttcgaagtttgattcaccgtactcattaccagtgattgctccacggcctctttacatccttaacggcgcaaatgatcctcgatgtcctcttggcggactagaacttgcgttaaagagagctgaaaaggcgtataaggaaacagcttctcctggaaacttcaagttcaaagcagaagatggagttggacacgaagcgacgagtttcatgatcaaagaatcatcagactggtttgacaaattccttaaacaagaagatatgacaacttgacagattgtaatattgtgaactaataaagaagaatcatcttcttctcgttaataatgtattcactcaagcaaatcaatatcattacnnnnnnnnnnnnnnnnnnnnnnnnnnnnnnnnnnnnnnnnnnnnnnnnn

SEQ ID NO: 128257 - DNA, 532 bp, Arabidopsis thaliana
  unsure (1)..(532): unsure at all n locations
tggcttcttcacttcctctgttacccaaacccatttccccattctttaaaacgccgccgttttctacctccaaaccactcgtcttcctcaactttcagactcgtcttacgtcgagatcttccgatgtatcggtcaatctcaagaagaagaataatccgtggctcgacccgtttgatagcggtgaagacccggataacgaatacgggtccttgtttgccgacggaaaacaagacggggatccaagaccaccggataatcctgataacccttacggcttcttgaagtttccaaaggggtacaccgtcgagcttgcttctttaccgttgaaaatcagagggagatgttagacggatgtttgctgcggtatctncggtggnggtttacgnggaatttactcttttttcccggcttttntagntaattnaaaggcaanggtttcctnggggttcagggagggtatntttaccggcttnaaaggggggaacnaancatttgggngtaacaaaaaacgnggggttggccaatntttnta

SEQ ID NO: 128258 - DNA, 385 bp, Arabidopsis thaliana
cttttatttctaacaagatatataacaatggcaagagttcagctatttttatgctttaccattctttttgcatcagtgactcttctggacatcgtttcagctcatttgaagcttaagccaactttgcctcagattgaacctccacaaacgttgaaggatgttgaaccttacaccgttaaagtagtgatagtctttgtgtccgacctcgagaaagaatgtcccaagacaaataaattcaaggctttctttgagaaacttagggcattcgccaagtatgtctgcccaataaaaagaaaagaccaagtagattacgaccgagacatgaaggccaaggctggaggcctcttccaagtcatatcttcttttgcgattggaaagataaaaa

SEQ ID NO: 128259 - DNA, 795 bp, Arabidopsis thaliana
  unsure (1)..(795): unsure at all n locations
nnnnnnnnnnnnnnnnnnnnnnnnnnnnnnnnnnnnnnnnnnnnnnnnnnnnnnnnnnnnnnnnnnnnnnnnnnnnnnnnnnnccacgcgtccgaataaataatattccgtggcgcctgcggcagagatcaatgacgataccggatctctgtaacgatttggtcgatgagatactctgtcgcgttccggcgaggaatctgaaacggttacgatctaccagcaaacgatggaaccgtttattcaaagatgataggagattcgcaagagagcacatgcataaagccccaaaggagtatctacctctcatgttgacaagcgagtacaggatctgtcgcggtgagcatcaatctccaaggagatgttccttctgtagtgttaaagagagagcttagcctaccagatccggattattcacatcaattcgatataggtcgagtctttcactgcgacggcttattggtatgcaaccacgtaggcaagaatccccgatacggatctaaaatgcgggtttggaacccgctgactggtcaaaccaggtggatcgaagccggctatcgttggaaggaatacgaagtcagatttgttctcggatactgctaccagcaagacgagaacaattcctgcagtaaaaaaatctacaaaattttgtgtttttatcctaatggccaagatacagaaatctacgagcttaactactctgataggtggacaaggacgattcctgatggtgatctcactccaggctggaccttgatatactcagagcagaccgtgtctatgaacggaaatctttac

SEQ ID NO: 128260 - DNA, 433 bp, Arabidopsis thaliana
ctcagaaaccttatgttctctgcgaaacattctcttatttcattttctttctctaaagtttttacttctctgacaaggaagatatccctttaggtggattcttgtttaaatttaaaaatcctcaaggagaagaagaagaagaagaagatagtcaaatgaaaatacattcttctgatcattcatggcttttactagccgttctcgtgattctcctctccttctctggagctctctcaagcgatgacaaagagaagaagacgaagtcggtcgataaaaagaaagaagtaacttatgatggaacgtctttgatcatcaatggaaatagagaactcctttactctggctccatacattaccctcgtagcactcctgaaatgtggccaaacatcatcaagagagcgaaacaaggcggtttgaacacgattcagacata

SEQ ID NO: 128261 - DNA, 443 bp, Arabidopsis thaliana
ctcaagtgttcgtcttcaccatcatgctctctcgtttattccttagacattcgaatctccggtggcgtaaccctagttgcatcgaaatcaaattctcagatcttctcttcgtttattcgtccgctttcgactaacagtagcggcggcggaggaaatggtgacgggaatggtcgtaatcggaatgattgttccgtggagtttcactggagtaaacgatgataagtctggacctttctcttccgatgattcttttggttcctctggagttgcaggatctgctttacctggtggagaggggaaatggccggaggagcctaagagatggaatataaaggaggaagaggaaaaagttgtgtttgatactggtggtgaagtaggtcaagggattgagactagtcgcgagaggaggggtaatgaatgggaggagactaagagatgggata

SEQ ID NO: 128262 - DNA, 447 bp, Arabidopsis thaliana
acgcgtccgatatattcaatatggccactctcctgcaaataggttcaggtgtgatttatagtaatgcccttaggaagacgcttcgacgtcctcagtcgtctacatgcatcatagtgaccgaaaccacaccatgtgggaagtctcccacagttcagcgtcgttctgcgaactatcagccttctcgttgggaccatcaccatctcctctcggtcgaaaataaatttgcgaaagataaaagggtacgagagagagatttgttgaaggaaaaagtgagaaagatgctcaatgatgagcaaaagacttatcttgaccaattggagttcagtgacgatctacaagaactcggggtttcttagcattttgaagcggaaatcgacaacattttaacatcttcttataaaacagatagaacaaacatccaggagagtgacctacatgccaccgcac

SEQ ID NO: 128263 - DNA, 553 bp, Arabidopsis thaliana
  unsure (1)..(553): unsure at all n locations
nnnnnnnnnnnnnnnnnnnnnnnnnnnnnnnnnnnnnnnnnncacgcgtccggatcatggagatcattgtcgacgcggaagaagaaaactacattcctgccattgcaattattggtcggccaaatgttggcaaaagtagcattttaaatgcacttgtccgagaggatagaacaattgttagccctgttagtggcactacccgtgatgctatagatgcagaatttaccggaccagatggggagaagtttcggcttatagatacagctgggatcaggaaaaagtcatctgtggcttcatcaggcagcactacagaggccatgtcagtgaatcgtgcatttcgagcaattcgtcgttctgatgttgttgcccttgtcattgaagctatggcatgcataacagagcaggatctgaagattgcagaaagaatagaaagagaagggaaaggatgtctggttgttgtaaacaaatgggatacaataccgaacaaaaaccaagagactgcagcacattacgggggcggttttcggggggagntccgtcccncaattggccc

SEQ ID NO: 128264 - DNA, 669 bp, Arabidopsis thaliana
  unsure (1)..(669): unsure at all n locations
ctcactatagggaaagctggtacgcctgcaggtaccggtccggaattcccgggtcgacccacgcgtccgaggtaagcaagttcacgcctttctaatcgtaaacagcatttccggtgatagctataccgatgagaggatcttggggatgtatgcaatgtgtggtagcttttcagattgtggtaaaatgttttacagactagatttaaggcgtagtagcatcaggccatggaattcgattatcagcagttttgttcgaaatggtttgttgagtcaagctttggcattttacttcaagatgctctgttttggagttagtcctgaggtatctacgtttccttgtctcgttaaagcttgtgttgctttgaacaattttaaagggattgactttctttctgatacggtttcttctcttgggatggattgtaatgagtttgtggcgagttctttgatcanagcttatcttgagtatggaaagatcgatgtgccgagtaaattgtttgatagagttcttcagaaagattgtgttatatggaatgtactgcttaatgggtatgcaaagtgtggagcttntgatagtgttataaaagggtttagtgtaatgaggatggatcagattagtcctaatgctgtcacctttgattgngtttatcggtgtgtgcatctaagtgt

SEQ ID NO: 128265 - DNA, 688 bp, Arabidopsis thaliana
  unsure (1)..(688): unsure at all n locations
nnnnnnnnnnnnnnnnnnnnnnnnnctcactatagggaaagctggtacgcctgcaggtaccggtccggaattcccgggtcgacccacgcgtccgcggacgcgtgggcggacgcgtggggggctgttttctttcaaactaaatagggccggtcagctcgaaccaatcgtggttagcctgtggggaaaattgcgaaccagaagtagcaggtgaggtcggtcagaaacagatggttctcgctacctccacgaagtagcaggggcttacttttcctgacgatgaaacccaaatcctattgttgttaatatcaaattgaataatcaaaccaagatggtgaatttgttcttatctgaaccaaagtggaacgatgatgcccagaaaagtagtaacatcaatgttattttgcctctgttaaacaaattaggctctcaaattcaatcattggtgactcatggagctcgatcagaagctaggctttggctttgtagtgctctttccactatttctatatctcctagcaagcaacttaatatcttcatgaagttattgagatcaaaacctagaaagatgcagtttttatctcaggttttgacaatgatgtttgagaagagaccaaggaaaacttggattttgttagctaaaagaagttatatacttgagaagttctttgaagggaatcagaagcgtata

SEQ ID NO: 128266 - DNA, 521 bp, Arabidopsis thaliana
  unsure (1)..(521): unsure at all n locations
nnnnnnnnnnnnnnnnnnnnnnnnnnnnnnnnnnnnnnnnnnnnnnnnnnnnnnnnnnnnnnnnnnnnnnnnnnnnnnnnnnnccacgcgtccgcggacgcgtgggttcaatttctccacttcttcttcttcgtttcgcttcttcaacgtctctccttgttcgacagttctaaattcaccatgaggaagacggtgaagcgagaatcggaagccaccggcgggaaaagagaagccgacgacgagccggagaagttgaggtctgtgaagaaagagaaacagagaaaaaccgaagctgactccgtacgacccgacgagcctcctccgcctcaggaggaagaacaaggaatatctgatcggagaattctcagatccaagtatctctctcttcaaaacgaaatcaacgattgtaaagatgatttgatgaagattgattctgacaaattctccagaattattaatgcagttgaaaacttgcaccaacaagtttcggaagcctagggaacaaattgcagacgcagagg

SEQ ID NO: 128267 - DNA, 862 bp, Arabidopsis thaliana
  unsure (1)..(862): unsure at all n locations
cccatgtgtccggcataagcagctcggttgttgacgatggcttgataaacaaggaagagtttgaacttgctttgttcaagaacagaaagaaagaaaatttgtttgccaataggatatttgatttatttgatgttaaacgaaaaggcgtaattgattttggagactttgtgagatcactcaatgttttccatcctaatgcttccctagaggagaaaacagactttacctttaggctttacgacatggactgcacaggcttcattgagcgccaagaggtgaagcagatgttgattgcacttctctgcgaatctgaaatgaaactggctgatgatacaatagagatgatacttgatcagacatttgaggacgcagatgtggatcgggatggaaagattgataagacagaatggagcaatttcgttatcaaaaacccatctttgcttaaaatcatgactcttccgtatctcagggatataacgacgacatttccgagtttcgtatttaactcggaggtggacgagattgcgacgtgaaagagacaagacaagctggtttatagagaccaagtcgtaggctggaccaagaataaaaagaagattgattccaacaatgttatatagcaggatcgagctctatttcctttggaatttttagtctattggatttcaatttcatgtattgcgattacttttggctctctttctttaacagttttgaatactcaagttgtagttctacgaaaagattaatataaaaccacaatttctgattaaaaaaaaaaaaaaaggnnnnnnnnnnnnnnnnnnnnnnnnnnnnnnnnnnnnnnnnnnnnnnnnnnnnnnnnnnnnnnnnnncaccnnnn

SEQ ID NO: 128268 - DNA, 572 bp, Arabidopsis thaliana
  unsure (1)..(572): unsure at all n locations
agttgcaanggttatagatatgaagtcccggtcttcctcttctgtggatatctcggnatctctctcctcagccctgtgatgcacaatctctggatatggcggggacccggaaatgcaaatttctactttggaaacgctatccgctacgcgtgctttcagatcgttttcgtggttgagagcgtaagcgcaatgctaaaccatgacagggcgctgaagagatcaaactcaaaccatcgagaagtcaagagctaagccattgaaggtcattgcgccacttttctgttacacgtaaagaaaagagttgggtctttagcttaaagttggcaacatgtgatttgtgtgagtagcttttctttgtttgagaacatcatataaataacaaatctcctgtgcctttccgtttagagtaaccattaatttgtactttttaccgagaggttttaaagttcttgttttgatccgcaaagcacacaatcatccctatatttgaagttacatcgcatgtaaaaacaaaacccaaagggcggccgctctagaggatccaagcttacgtacgcggcgatgcgacgtca

SEQ ID NO: 128269 - DNA, 670 bp, Arabidopsis thaliana
  unsure (1)..(670): unsure at all n locations
nnnnnnnnnnnnnnnnnnnnnnnnnnnnnnnnnnnnnnnnnnnnnnnnnnnnnnnnnnnnnnnnnnnnnnnnnnnnnnnnnnnccacgcgtccgctaaatcggctgagcatcaccgggaaatcgccggtcctttagccggaccgagcagtggtattaaagccggagtatttagtctctttaccgttcttggtatcccattggccattacttacagtattccatttgcactagcgtccattttctcaaccaattccggtgccggccaaggactttcattaggcgttttaaatatagcgatttgtataccacaaatgatagtatcattctcaagtggaccattggacgctcaattcggcggtggaaacctaccttcatttgtggtcggagcaattgccgcggcggttagtggagtcttagcgttaaccgttttaccttcaccgcctccggacgcaccagccatgtcaggggctatgggattccattagttaactagtttttacatatatatgaatttccatctaatacagtattgttgtgcaaaagtgaaacccccaaaaaatggataaagtgagaaaaaaaaaaaaaaaaaaaagnnnnnnnnnnnnnnnnnnnnnnnnnnnnnnnnnnnnnnnnnnnnnnnnnnnnnnnnnnnnnnnnnnnnnnnnnnnn

SEQ ID NO: 128270 - DNA, 637 bp, Arabidopsis thaliana
  unsure (1)..(637): unsure at all n locations
actcattatagggaaagctggtacgcctgcaggtaccggtccggaattcccgggtcgacccacgcgtccgcccacgcgtccgcccacgcgtccgcccacgcgtccgcggacgcgtgggaatcgttcctcctcctcctcatcttcctcacagctctcgcttctgatctcttacttgcacagaaatcgaaaaggttcggaagcttttgttctattctcttcgttttcctctgagtttattaactttcactgatgggtttcggttctgtgtatcgatctctaacggaaatatttcctcagattgatgcacgaattttgagggctgttgcaatagaacacccaaaggatgctgatgaagctgctgctgtggttctttcagagattattccttccttttcctcanatttgttccataattttactcaatcttcgtacaagtcatctggaagcatttcagagcgcgaagaacatggtttggaagatgttgcttctaggtgccgcccttttcttggagcttctggctcanaggccagcacttcttcttcttcttcttcttcagaaactcttccnctgggtgttacccgtgaccacaatancccgtgctctaagtactgatttggtctanacatgaacgagctac

SEQ ID NO: 128271 - DNA, 627 bp, Arabidopsis thaliana
  unsure (1)..(627): unsure at all n locations
nnnnnnnnnnnnnnnnnnnnnnnnnnnnnnnnnnnnnnnnnnnnnnnnnnnnnnnnnnnnnnnnccacgcgtccgataaagaagagtctttgagtttgttggttgcattgatcggatataagagacatgggtcgagtgaaattggagataaaacgaatagaaaacacaacgaatcgacaagttacattctccaaaagacgaaatggtcttataaagaaagcttatgaattgtccattctttgtgacatcgacattgctctcctcatgttctctccctctgatcgccttagcctcttttcgggcaaaacaaggattgaagacgttttctctagatacatcaatctttctgatcaagaacgagagaatgctctagtattccccgatcaaagtcgacgcccagatttccagagcatagagtatctactccggactttgcagcaactcaaggctgagaatgatattgctcttcaacttaccaaccctacagctatcaactccgacgtcgaggaacttgagcatgaagtttataagttacaacaacaacttctcatggcagaggaagaactaaggaaatacgaaccagatccaatcaggtttacaacaatggaagagtacgaaacttgtgag

SEQ ID NO: 128272 - DNA, 1000 bp, Arabidopsis thaliana
  unsure (1)..(1000): unsure at all n locations
atgatcttgccnnnnnnnnnnnnnnnnnnnnnnnnnnnnnnnnnnnnnnnnnnnnnnnnnnnnnnnnnnnnnnnnnnnncccacgcgtccgcggacgcgtgggcggacgcgtgggcttgcttcctgttattgttggggatgctgctgttgagaaacttttagacgtaccactacaaggccacactgaggaatgccctgatcagttccagttcgtgtctgctgttgtcgacaaacttggatatgaagttaaaatggtgaaacttacaggtagaattgtaaacacttattatgcaagtctatgtcttggcaagcctggggacattgaggctatatgcattgattcacggccatcagatgccatcaatgttgcaagagcatgccaggctccaatatatgtgaacaaagcaatagtgctggaagaggctatcaaaattggttatggaggcagaccgcagagcgcaaagcctgttttcaatgttatccttgacagcgctcccgatggaccagatcctttatcggaagagcttaaattagtgaggaatatggatttggcgtctaaagaggaaaggtacatcgatgcagcgatgtggagggacagactgaagaaccttcagaactcgagctctgttgtatataataagggtgtagaaactcctgagagctatgagtagtgaaagaataggagctaagaaaggaaatggatgtagatataatgtggtggatttcaagggtatggagagagaaatataagaagctcatagattgatggtaccgcatgtacctgagaggaagctcttagattgatgggatcgcaggatgtattcaaagtaaatgaaagatgtatgaataacctgagggaatgtgtaaatgtaaatggaagaagactaaatgaaatgcatttcttttaaaaaaaaaaaaaaaaaaaaaaaaaaaaaaaaaaaaaaaaagggcggccgctctagaggatccaagcttacgtacgcgtgcatgcgacgtcata

SEQ ID NO: 128273 - DNA, 654 bp, Arabidopsis thaliana
  unsure (1)..(654): unsure at all n locations
nnnnnnnnnnnnnnnnnnnnnnnnnnnnnnnnnnnnnnnnnnnnnnnnnnnnnnnnnnnnnnnnnnnnnnnnnnnnnnnnnnnccacgcgtccgcaaggctacttgaaaaagagcaccgggcttttgccttgttggctagagggtgcatgtcttcacctattgaaagctgtatagctgatgccattagagcttccagtactgataattacccagtagaaagcatcttaaacacactcgagaagagagatcggattggtcgaaccccttcttattggtcgagtactgggcaacacaaaactacggtgcccgaatcacttctttacaagttgattggtgatttgtgtctcattactgaagtcagcatccatcctttccaagcttattttcagcgcggtcatccgatatactcttcacattatgttcgtttccggttgggtcacgaaaaggacaattcacctcactacaacatttcacaggataaaaaaggtgagccaggatagagttcaattgaaagcaactatgtatggacttacacttcacaagagttttcgatggctcatgataatcgattgcagagctttcagcttccagaacctgttctttgcattggtgggtatctgctagtcgagtttctaggtcgagttcagacacaa

SEQ ID NO: 128274 - DNA, 994 bp, Arabidopsis thaliana
  unsure (1)..(994): unsure at all n locations
nnnnnnnnnnnnnnnnnnnnnnnnnnnnnnnnnnnnnnnnnnnnnnnnnnnnnnnnnnnnnnnnnccacgcgtccgtcaaaagagtcgttttctttcctctccccactttttcagcgtttcttagatctctctctctctgcaaatattcaccattgtcttcttcttcttcaacgacgcttttggattttcttctctaagcaatgaagtcaggaagttctacattgaatccttacgcagcagcttatgtaccactctcgaaaagagaaggttctttggttgatacaaagcctgtcacacaacaacacatgcagcagcagcaccaccagcaacaaccttattatgggtatggagttcaaggaatgggaagttatcaaggaactcaaatgtcacctaagaagtcaccatctgagatggtatacaatcatcagctgaaggatgaggatttggagatggacatggatattgagtatctattagctacataccctggtctttcacaagagtctatcaatgatgtttacttggctaacacttgtgatcttgatgcaactatcgaaatgctgaatcaactcgagatttccagtactgaagctgaggaataccttccagacacactggacattggtgatgtacctgagatcatcacagagtcttcgaaacaaaagaatgatgggagtagtgcatcgtcatcttcgggtatccgcaacgctaacgtatcctcctcctgatttggtccgtccttaaaaaaatgtgaagtttttttcttcttaagtttcttttgcaaatggatgatatgaagttcatgatatattgttaggagatctctttctacattttccccactttgtctctgggaaaagagagtacaatgtatagtttttaagaaagatttcagtttgacaaaaaaaaaaaaaaagggcggccgacaaannnnnnnnnnnnnnnnnnnnnnnnnnnnnnnnnnnnnnnnnnnnnnnnnnnnnnnnnnnnnnn

SEQ ID NO: 128275 - DNA, 529 bp, Arabidopsis thaliana
  unsure (1)..(529): unsure at all n locations
nnnnnnnnnnnnnnnnnnnnnnnnnnnnnnnnnnnnnnnnnnnnnnnnnnnnnnnnnnnnnnnnnnnnnnnnnnnnnnnncgacccacgcgtccgaaacaatcaatcaaaaacataaaattcaaagtgtaagcaaaaccagaacgagagaaaatggacaacaagcaaaacgcgagctaccaagccggtcaagccactggccagactaaggagaaggccggtggaatgatggacaaggccaaggatgctgctgcttcagctcaagactccttgcaacagactggacaacaaatgaaggagaaggcgcaaggagctgctgatgtcgtcaaggacaagaccggcatgaacaaaagccactaagcaagcaccttggacttcttttctaattaattcccctcttcgacttgtgtttaataaatttggggttttaattctcattcctgctactttctgatgttgtttccttgcgtccatttggatctttatgtaatcttatctatctagttaataaaagtatgctttttaatatc

SEQ ID NO: 128276 - DNA, 755 bp, Arabidopsis thaliana
  unsure (1)..(755): unsure at all n locations
nnnnnnnnnnnnnnnnnnnnnnnnnnnnnnnnnnnnnnnnnnnnnnnnnnnnnnnnnnnnnnnnnnnnnnnnnnnnnnnnnnnccacgcgtccggttgaagaatcagatgaagcaagaaagaagttcacaaacgcaaagtccatatcttcagctcagtactttggggatcagaacaaaaacgctgatctggaatcaaaagctacgcttgagatagatgctgagcctgcaaacttctgaagcgctgatttttacggtcacgaccaagatgattccaatattgatataacagctagtgatctcattaaccgactttctttccaggcgcaacaagatctatcgtcgctggtgaacatagcaggagaaacaaagaagaagcttggaactttggcttctggtatcttcagtgatattcaagacagaatgctgtaagaagaccacgagtctctcacatgtttttgatattgacagagaaaaaaaagtaagaaagaagctttgtcggaaaacttccaatgaggttcacgtttctctgtttttattttatagaactttttttttgaaaactattgagacgtggctattgttgttactcaccaaaatctatattgatactattatactcgatatgttatagactttattaaaaaaaactttgtttgtttgcagaaaaaaaaaaaaaaagnnnnnnnnnnnnnnnnnnnnnnnnnnnnnnnnnnnnnnnnnnnnnnnnnnnnnnnnnnnnnnnnnnnnnnnnnna

SEQ ID NO: 128277 - DNA, 988 bp, Arabidopsis thaliana
  unsure (1)..(988): unsure at all n locations
atgattcgccggcactaatacgactcactaagggaaagccggtacgcctgcaggtaccggtccggaattcccgtgtcgacccacgcgtccggaagagactagttctcttagaaaacaattggacactcagacaaaggagcttaaccagagaatgcgccaaatagaagaacttaaagaaaaggagaggatagcaaacgaaaacgttgaagggcttatgactgacattgctgctgctgaagaagaaataacaagatggaaagtagcagccgagcaggaggctgctgctggtggagctgttgaacaagacttcacgtcacagctgtatgtgctaaaagaagaacttgaagaggcaaagcaagcaataatagaatcagaaaagaaactaaagtttaaggaagagacggcagcagcagcaatgggtgcaagggatgcagcagagagatctctgagactcgcagacaatagggcgactaagttgagggaaagaatccaagaactaaaccgtaaagttgaagaattagaaacccatcgagatatgaatacttcaaacaagagctagatatgcgtgttggccatggcaacttctcgggattgattttgtgcccggtcgaagaattgagtcgggacaagaaagtgcgaacgagatggaactcgctgaacctttactatgaaaaaaaccgggtattgtataccaaacccatactctcgggatttggtttagatttttatgtaaaaaccacctgaaaaatgtttttaaaagctttaaaacgttctcatgttgtaatgtttgagttaaagaagtttaatttggaggcttggcgaaaagtaagatgtttcccacacccaaccagtgatcaataaaatataaaacttcccaaaaaaaaaaaaaaaaaaaaaaaaaaaaaaaaaaaanaaanaaagggcggccgctctagaggatccaagcttacgtacgcgtgcatgcgacgtcatagatacttctatagtg

SEQ ID NO: 128278 - DNA, 683 bp, Arabidopsis thaliana
  unsure (1)..(683): unsure at all n locations
nnnnnnnnnnnnnnnnnnnnnnnnnnnnnnnnnnnnnnnnnnnnnnnnnnnnnnnnnnnnnnnnnnnnnnnnnnnnnnnnnnnnccacgcgtccgcccacgcgtccggttctcttctctccatctgtctgccgctcctttaacgtcggttcccattttcttattcacaatgaccccaagaaactcgaggagatggaaaaaagcaaaaggtaaaacaagggcaaaaaagctttcttcgagaaccagagcacattgattccaagattgaatgctgtttctggtggattagtttctctgagttttggtgatagatcagattaacaggcagaattttgagaatgtcgacagtgggaaattcaacgaacatattttggcaagaatcccccattgggaaaactgaaaggcagaagttgttaaatcagaagggttgtgtggtgtggatcacagggctcagtggctcagggaaaagcacgttagcttgctcgcttagtagagagctgaacaaccggggaaagctatcatatattcttgatggtgacaatcttcgtcatggtttgaacaaagatcttggtttcaaggcagaggatagagtggaaatatacgcagggtcggagaagtagccaaactctttgcggatgctggtttaatctgtattggcagcctcatatccccgtatagaaaaga

SEQ ID NO: 128279 - DNA, 857 bp, Arabidopsis thaliana
  unsure (1)..(857): unsure at all n locations
atacngactcattatagggaaagctggtacgcctgcaggtaccggtccggaattcccgggtnacccacgcgtccggtgggactgaaaggtgaagctatgaatcttgcatttccaaccaacactccctctattggatggatggatgcgtccttaactgtacaaaagcctcagcctttgacatggcacaagacttattttgatgcgcccgaaggaaatgagccgcttgctttggacatggaaggaatgggaaaaggtcagatttgggtgaacggtgagagcatcggaagatactggacagcatttgcgactggtgactgcagtcattgtagctacactggaacatataaaccgaacaaatgccaaaccggctgtggtcaacctacacaaaggtggtaccatgtgccgagagcttggttaaagccgagccaaaatctgttggtcatattcgaggagcttggtggaaacccatcaactgtctctttggtcaaaagatcagtatcaggagtttgtgctgaagtttctgaataccacccgaatatcaagaactggcaaatcgaaagctacggaaagggacagacatttcatagacccaaggttcatttgaaatgtagtccaggtcaagcaattgcatccatcaaatttgcaagctttggaactcctttaggaacctgcgggagttaccaacaaggagagtgtcacgcagctacctcatacgctatcttagagaggaagtgtgtagggaaagcgagatgcgcagtgacgatatccaacagcaatttcgggaaagacccgtgtccaaatgtgctgaaacggttgactgttgaagcagtttgtgccccagagacatctgtaagcac

SEQ ID NO: 128280 - DNA, 562 bp, Arabidopsis thaliana
  unsure (1)..(562): unsure at all n locations
atgatctnnnnnnnnnnnnnnnnnnnnnnnnnnnnnnnnnnnnnnnnnnnnnnnnnnnnnnnnnnnnnnnnnnnnnnnnnnnnccacgcgtccgtacggctgcgagaagacgacagaagggggtgagaaaaaacacagagaaagagagagaaacaatggaaacggaaggaagaagacgagaagtggttgtttcatctctccaattcgcttgctccgacgatatctccaccaatgtcgccgccgctgagcgattagtcagagaagctcacgctaaaggagctaatatcattcttattcaggaattttttgaaggatattacttctgtcaagcacaaagagaagacttctttaagcgagccaagccttacaagaaccgtcctaccattgcaaggatgcagaagctggcaaaggaattgggtgtagtgatacctgttagtttctttgaggaggcaaatactgcacattacaattcgattgctataattgatgctgatggaactgacttgggaatttataggaagtctcatattcctgatggacctggttatcaagagaagtttta

SEQ ID NO: 128281 - DNA, 708 bp, Arabidopsis thaliana
  unsure (1)..(708): unsure at all n locations
agggaaagctcggtacgcctgcaggtaccggtccggaattcccgggtcgacccacgcgtccgaaggggaggcttttgctacacggaagataatgtctttgattttcgcacagatgatggccaagatgttgaaggcttgccaactgaaggggttgagattacgtgtttccatctggatggatcacactatatggtctacacaccttcagatccacttctctttgttgctgctaaggatcaaaatgggctgctgcaaatcgctgatgatgaactcttagacgatccagctgtgatcagcgccatagacgaggaaaccgaattcaatgccttggtggaggaagaggcggctctcctggaatcactgcttggggaaagaatttgatgttttcatagggactacttagctttctttttgtattccataattgcaatgccatgtaatctaaattttctcttagaaaaactcattttgcctttccaaatctctcttgttgacaattgggttcgatcattaccgaaacagaagtccctccaaatgaacatgcacctacttgtaaaccgaaggattcttttcagttttcactaatacatcattaatatatgttatgcgtgctcaaaaaaaaaaaaaaaaaagnnnnnnnnnnnnnnnnnnnnnnnnnnnnnnnnnnnnnnnnnnnnnnnnnnnnnnnnnnnnnnnnnnnnnnnnnnn

SEQ ID NO: 128282 - DNA, 413 bp, Arabidopsis thaliana
  unsure (1)..(413): unsure at all n locations
atgactcgccggacnnnnnnnnnnnnnnnnnnnnnnnnnnnnnnnnnnnnnnnnnnnnnnnnnnnnnnnnnnnnnnnnnnccacgcgtccggatgagtatcgtgatcgttcttttgagggtcatcggtgaattcacaatctttgttttttatgtgttatcttctctagtgatagattcgctatgtgtaacttggaaattggaatagtcaaatctctgtgacatataatgctgataagagtgttcaatgaatcaagtatttatcaggttttagatgatagagttcgaatctaactcatgtagtgacttggttatatgatggttagaaattaacaatgaagtttcctgtgtattgatagnnnnnnnnnnnnnnnnnnnnnnnnnnnnnnnnnnnnnnnnnnnnnnnnnnnnnnnn

SEQ ID NO: 128283 - DNA, 429 bp, Arabidopsis thaliana
agatcgatttctctctatatcggagccgtcatgaatcatcgtcggagctcgatcgtactattgatcctctcaaggttatctcccgtgacacgctcgtgtacgatacgagctactttctgggcacacgaaatgcatctcagaggagattcacgcaaacgcaatgaccatcggaaaatacagcattataaaccctcacgaggatcatcctcttccttcttcccataaagtcaccgtcagggtcacatcgccacaagggacggcttatcacgaatcggacggagtagaatcgggacaattctcgtttgtagctgtggaaacaggggattacataagttgcttctccgccgtcgatcacaaaccagagacgacgctgatcattgactttgattggaggacgggtattcataccaaggattggtcgaatgtggc

SEQ ID NO: 128284 - DNA, 919 bp, Arabidopsis thaliana
  unsure (1)..(919): unsure at all n locations
nnnnnnnnnnnnnnnnnnnnnnnnnnnnnnnnnnnnnnnncgcctgcaggtaccggtccggaattcccgggttgacccacgcgtccagctgttcgcaccactaccttctctccgtcagttgaaaccgaaacacatctctatttccgccgcagcgccgaagaaaaaatcggagactgtcacggcgccgacaccggcagcgaagaagaattcgagcgtggaggaggaaacagaagaggaagtagaggaagatatgccgtggattcaagagaaggcgttagacctagtcgagttcactggatcggtgagtcaggcgattcctggtcctcgagttggaagtagcaaattgccgtggatgctcgccgttccgttagcttacgccggcgtcactttcgtcactgctttcgtcaaaaccggtcagaagttcccttctcctaaagctcagcgcaagaaactggtgaatcagaatgctatgctttgcagatctatagatgaggcattaaggaaagctggaacagtgcatagctctgagcttaaggcacttgaacaaaagacagagtttaacatggaggagatattgcggaaatacattcgttatgcgttgaatgagaaaccgtttaatcccgaccttgttgctgatctcattcatctaagaaaagcttctggtttgaatgattctcagattcctgagattttaaatgagatctctcgtcgtattgtcaaggaaaaaggtccggtagtgatgaaaatgcaaggctttaccgaaaaaggattcaagagaaaactcgccgtgcaagcgctttttggaaagatttactatctttctgagcttcctgacttctgctcaaaagacaactccttaatcgtcaaggaaatattcggcgttacagatgaagacgcagagaaagctgcgatacacgct

SEQ ID NO: 128285 - DNA, 540 bp, Arabidopsis thaliana
caaaaaatccagattttgtgtttagccgacgagaattgggaaaaatgtcgtgtacgcatgatcacaactgcgaagatcatgagtgttcttccgattggtctctctacaaacacattgatctctccaaggtttcagctctgaatgaatctgtttcgggaagtgcaaaatcagtcttcaaagcgtgggaacagcgattacactcttctggggagcatttggagagcaatgagggagaccctgaattgcttgtttttgtaccatttacatcagacgtcaagatcaagagcatatcaattgttggtggccctgaaggaacaagtccttctaagttgagagtgtttatcaatcgtgaagggattgacttctccgatgctgagagtatgcaagccgttcaggaatgggagttagctgaaaatttgcaaggagtcttagaataccagaccaggtattcaaagttccagagtgttggaaacatcaccctgcatttccctgagagttttggaggtgacacaacccaaatacgttatatcgggttcaaag

SEQ ID NO: 128286 - DNA, 631 bp, Arabidopsis thaliana
cacacgcgtccgatctttttttactttcctcagagctctctcctctccgcaacttccaccaccaccaaatcggaactctcggcgttctactccgtctccggcgttacctccgtcgatttcatcttctcagttggaaggagtgaattgagaaggtcgggccaatatggcgaacttacaagtttctgggatactcgaaaagtttcagatgacgggtaaagataaagattacagatacatggcaacctctgatttgcttaatgagttgaataaggattcctttaaaagcgacctggacttggcggtgagattgtcgagtatcatattgcaacagctcgatgatgtggctggtgatgtttctggattggctgttaaatgtcttgctccattggtgaagaaggtcggagaagaacgaattgttgaaatgaccaacaagttatgtgataaactgctgcatgggaaagaccagcatcgtgataccgtaagcatagctctcaggactgctgtcgctcaaattgctcctacgcttgctccatctattcttgttactctaacaccacaaatgataggaggaataagtggccaggcgatgagctcagggatcaagtgtgatgtcttgagatcatgtgtgatg

SEQ ID NO: 128287 - DNA, 893 bp, Arabidopsis thaliana
  unsure (1)..(893): unsure at all n locations
nnnnnnnnnnnnnnnnnnnnnnnnnnnnnnnnnnnnnnnnnnnnnncctgcaggtaccggtccggaattcccgggcccccccgcccgcaatactctcaagtctaaagaagaataaaaaaaatggatgaagaagttgagaacaaagtgatactccatggatcattcgcgagtccttacagcaaaaggattgagttagccctaaggcttaaatctataccttaccaattcgtgcaagaagatctccagaacaagagccaaaccctgctccggtataacccggttcacaagaagatcccggttcttgtccacaacgaagacccttatagaagatctaaagtccggttttgggctaactacatccaattacatctttacgatttggtgataaaagtggtgaaaagcgaaggagaagagcaaaagaaagctctcacagaagtaaaggagaagctgagcgttatagagaaagaagggcttaaggagattttctctgacactgatggtgaaccaactgtgacgaacgagaccatgagcctcgtagacattgtgatgtgcactttgcttagcccttacaaggcacacgaagaagttttgggtctgaaaattattgacccagagatagttcctggtgtctacgggtggatcaatgctataaacgaaaccagcgtggtcaaagatctaagtcctccttatgaacaaatcctagagattcttcgggctttcagacagatgtctctctctcccgttcttgaaacttatcagtcataactcttaagttttggattgcttgatccaaagttataaaattatgtgctctgttttcatnnnnnnnnnnnnnnnnnnnnnnnnnnnnnnnnnnnnnnnnnnnnnnnnnnnnnnnnnnnnnnnnnnnnnnn

SEQ ID NO: 128288 - DNA, 824 bp, Arabidopsis thaliana
  unsure (1)..(824): unsure at all n locations
nnnnnnnnnnnnnnnnnnnatacgactcaccttaggggaagcacgnacgcctgcaggtaccggtccggaattcccgggtcgacccacgcgtccgcccacgcgtccgcccacgcgtccgcaaaatcttaaaaacaacaacaaaaatgaaaagtctccactttttagctcccaattcaacgattatcaatctgaagcaacaatcttatacaaaaaccaagttccagttgcatcgtagcaacagaagaactctatcgataaactgcgtaaacagtggcggtgatgaagagaagattactcagccgttggatggagtggagataagattcaaaagaggatccagaaggaaaatgagggaagagggttcaggagaaggaggaggacaaagcgggaagaaaaaagagactgttcaaaagccatgggaagagatgacattgaatgagaaggcattggagctttatgttggagagaaaggtttgttgttttggctaaacaaattggcttacgcgtcgatatacattgtcattggaggttggatttttttccggtttgttggaccggcgtttaatctttatcaactcgatacaccgcctcttgatcctaagaacatcttaaagggttaagaaatgctttgtagctgtgtctgcattctctgttccaaaacattttgaggcttatatattcaagttagtttcgagtaatgtgtagccatgtctcactagattaagatacacaagagaacaacactcttcatgaattttcaagattgttctgttggagttatgtcctgatcaaggatatctcgtgtagtcttgcccctgacatgg

SEQ ID NO: 128289 - DNA, 885 bp, Arabidopsis thaliana
taaaagaaattggaaattgttgtagtctgccctttttttaaaaaaagtttattgttaaaaggagagggacccggtaaaaggggatttccccttgggttgccccacaggtaagaaggcccaggggtccgaagggggtaatttctcaaccaaaaaggggtggaagggttgaccaaaagggttttggtttcgaaaaccattaaatttaaacccccgcctttttttcgttgaggaaaaatttctgatttcaaaatgggcttttttcaggaaagggggtagcccaaaaccaataggccaggtttccttgtgaaaatgtcgggttaaaaaggccccccaaagtctaagttgagcaggtttccggtggggtcttaattggaaaataatggccagggataaggaaaagttttagttaggggttaaacaagctttaggttccggtttattctgtgaaacatcaaaagccagaaaaaggtggagtcttttccagttaaccaagaaaccaatcccgaaaaaacatggacttggccaaaagaagacattccaagggatggcaagatcaccccaatgggttgaatggcttggtctttccaccaatggaaaatggggaagataagaccgaagagcatataaaggaaccaatctctaaggtgataatgaagaagtaatgttctatgggagcttgaaacccatatgtcccctcgatcacttgttggatcccttctctgtaaatagaatccgtggatcctgtgcactgtgatgttgttatggtttttctctgagaaaccctaaactatgtaatgtgaaaggtacaaagaagcccagttacccagaaaaaaaaaaaaaaaagggcggccgctctagaggatccaagcttacgtacgcgtgcat

SEQ ID NO: 128290 - DNA, 514 bp, Arabidopsis thaliana
cgcctgcaggtaccggtccggaattcccggttcgacccacgcgtacgatcagattgaaataccacgagcttttgtttgcgctgagggaaaagtctttgatgtctcagaatgggctatttgtcagggaatggcgtgtagaccaaatacacataggccaagtttccatgtgaacatggtcggtttagaaaaggcaacacagagatcaaagtcgagcaggttcccgtgggatcttgatgtggagatgatggacgaggatgaggaagagtttgagttatggcttcaacaagctctagcttccggtctattctgtgaaacatcaaaacgcagaaaaagctggagtcctttcaagttaaccaagaaacaatcccgaagaacatcgacttgaccaaaagaagacatcaacaaggatggcaagatcaacaacaatggctgaatggcttgttctttccaacaatggaaaatgggcgaagataagaacgaagagcataaaaaggaaacaatctttaaggtgata

SEQ ID NO: 128291 - DNA, 492 bp, Arabidopsis thaliana
  unsure (1)..(492): unsure at all n locations
gatgtctgggcaacacgtggtggattagagaaaattgattggagcaaagctccattttatgcttattacaaagatttcgacatcgaaggttgtcctgttcctggaccaaccttttgtccatcgaaccctcataattggtgggaaggttatgcctatcagtctcttaacgccgttgaagctcgacgttaccggtgggttagagtaaaccatatggtttatgattattgtactgaccggtctaggtttcctgtcccaccacccgagtgtcgtgcttgaaaataattgcatacgtacgttgcaatgatcatgtttcgtcttgtacgagattttatatataaattgtgggaaaatgtggattgtattgtcctcttacgcaattgtgcagacgtacgtgagtgtgtatagatataattgtgatttgtggttatttgaaatttttatcaacatagatgaattctgtgnnnnnnnnnnnnnnnnnnnnnnnnnnnnnnn

SEQ ID NO: 128292 - DNA, 478 bp, Arabidopsis thaliana
ttttaccccaagctctaatcagaccccctatagggaaagctggtccgcctgcaggtccggttccggaattcccgggtcgacccacgcgtccggcagattgttgctactgccgctcctcctgaacaatctgatgaacaacaacctaatgtcaatggtgaagctcaggttttacctgatcagtcagtagaaccaaaacctgaggaatcatgatccttataccaagtctagttgaagaaaagtggatgagaattgagaactattgtctccacagatgttgcgctttgcttttctgtctttcaaaagcattatatgctgtttgttgtacttaattctagaggctttagggaagtgattcttgacatttttgtatgtttatgttttgggcaaaggttttttaaatcgaagcaaagccagcagttccatacaaaagcataacccaagggcggacctctagaggatccaagcttacgtacgcgtg

SEQ ID NO: 128293 - DNA, 347 bp, Arabidopsis thaliana
gtggatttggtaagggcggaggatttggcggtggaggcttcggaggtggtggcggaggtggaggcggaggaggtggcggaatcggacaccactaaacaaaaacacatgaagaagttgcattgagtgcatgtctcacgtcacgtacaacatggtttacaagtttgagagtgttgttaccaaatatagtactagttttatctttttatgtactttgtctctatttgaattactagctatgagttttgttagacgtacgcactctaataatattcattttatcatgtaaaacgctaggactgtatttggttgtaagtcaatgttcttaaaaaaatattgatgaagcaatg

SEQ ID NO: 128294 - DNA, 822 bp, Arabidopsis thaliana
cgtcggtcacgctgttccacgaagcttcgctgtcaacaccatcatcggaacttaccggagttcgttacgaaacacaaagatgaacgctgagaataatcagactactactactcactcgaaagtgatctcacatgtattctgcactggtactgctaagctaggctctgttgggccacccattggtcttgttgatattggcgtcagcgaagttgcttacatcttccgagtctctcttcctggcattgagaaaaatcaagataagatcaaatgtgaaattcagagggaggggagagtttgcatccaaggagttatacctgagattgcgattccaagtgacacgggatgcttatacagaatgcaagtgcaacagctctgtccgcctggtccattctcaatcacgtttaatcttccgggacaagtggatcctcgcttgttttctcctaattttagatctgatgggatctttgaagtcgtcgtagtcaagctcggagtgcgcatcccaacttcatagttccggttttcattcacccacgatatcctccatgcttaatcagcatttagttgcagtggccgacctgtaagtctttggtcggatttagcagaggttagaccctccacaatagttctagtttcttttgtgtagaaccatgtccaatgatccggttccttaagatgttcttagactctgaaaaaaagcaccttgatgtgaaacggaactgttttaaccaagattttggcaatcacatcttactgctaaaaaaaaaaaaagacaaaccccaagggcgaaagctctagaggatccaagcttacgtacgcgtgcag

SEQ ID NO: 128295 - DNA, 430 bp, Arabidopsis thaliana
agcacacgcgtccggccgagtggtgcgggaaggagttacggggctgcataggggccatcttccaagaaagcttatagtcaggagcagcatggtttggactggaaggaagacgcgggtgtacgctcagttccccctcttgctcctcctgaaaattatgctataaaggaatctgaatctcctgcaaacattgatagaatgtcttcctggaaaaaacttccatctccagcactgaaaactgtgaaagaagcgccagcgtcagaagagcagaatgatagcaaagttgaacctccaaatatagttgggagtcgacaaggtacggatgatgccgctgttgctattctcaactttcctccagcaaaagattctcatgaacactcctccaagcatcggcacaatatttcttggggttactggggggaacaacccctta

SEQ ID NO: 128296 - DNA, 1080 bp, Arabidopsis thaliana
  unsure (1)..(1080): unsure at all n locations
tgactaatgactggagggtttctgtctatgcggcaaggggctggtgctgcttcgagatcagctatttttggaggggttttgcttgctttgattgaaggagctgggatcatgttgaacaaggtactggctcagcctcggaatatggtgatggaggaccctggaatgcaaggaatgcctggnatgcagggaatgcagggaatgcctgggatgcccggaatgcaaggaatgcctgggatgcaaggaatgcagatggggcagatgcagagtcaagcacagataaggtcagagagtcaaaaccagaatacagcttcatcatcatcatcatcatcatggtttggagggctttttgataagaaaaaggaggaggtgcaaccaggcagtgaaagtaaaacagaggtgttggagagttttgatgctcctccggtgccatcatttgagttcaagtaagctttgtggacatctatttctctgtcatccaatggtttacctactgcctcaactatcaattccatttcgtcgtctttttgtctatcctaagttctcagctgaactcttcttgttcatggaagaatcagcatgctatgttctctctcttttcacttatggttatgtttcaatgagcttatgcactcaatctaggaatattctctttgtgaaaccattccacagatattgttggttcttaaataatgtagttataaaactccgacgaacgaaaaatgaagtcattagcttcgccgccgtgtctccgcctgataccgacggcacaccgtcagctcaattcgcgtcaatcttcctccgcctgttatatacacggtggctcttctgtgaacaaatccaataatctctcattctcctcatccacatccggatttgcgtcaccactagctgtagagaaggaattacgctcttcattcgtacagacggctgctgttcgccatgttacggggtctcttatcagaggcgaaggtcttagattcgccatcgtggtagctcgtttcaatgaggttgtgactaagttgcttttggaaggagcgattgagactttcaagaagtattcagtcagagaagaagacattg

SEQ ID NO: 128297 - DNA, 322 bp, Arabidopsis thaliana
tcgcggacttttgggcggacgtttgggcttcaacagaataggcaaataatgggggcccttcccaacaggataagcttccacgtgatggcggcgcctcaaaacagaagcgcttgggttataagcagaagcaaaatattatatttgagaaaaaaccgacagggagctctgttgctactgcagaggtgtttgatgttgtcccgtctcctgaggttgttaatgaaggtgtctcaagcaataactcagacatgccagcgacgtcaaccgtttcagctgagtcaactttcccgaaaagaaaaaataacaggaatggtaagaaaaaaca

SEQ ID NO: 128298 - DNA, 529 bp, Arabidopsis thaliana
  unsure (1)..(529): unsure at all n locations
cagctctcatacgactcactatagggaagctggtcgcctgcagtaccggtcggaatcccgggtcgaccacgcgtncggtctctctaaaccttggcttccttcgacttcttctgttttctccggcaatgtcgttaaaactcaacactccttttccaattttcgcgccatctctatttcctaatcataacccaagagcacccagcgagatccgattctctagatggggcaacgctaatgccgaacggttcgagcagcgtcgccggagccaagaagaactcgaggctgagatccgtcgggaccgccgattcgacgccgctactaaaatcgtccatacccatgattccgaagcagcagctgctgagcctaaaacgtcaccgtttagatcaagaggcactccttcacttccctctgctcgttcgattccgggtcgaagatccaaatactccaaacccgattcaggacccaatagacccaagaacaaacctagagtacccgattcgccgccgcaactagacgctaagcctgaggt

SEQ ID NO: 128299 - DNA, 427 bp, Arabidopsis thaliana
gggaaagctggtacgcctgcaggtaccggtccggaattcccgggtctgacccacgcgtccgagggtattggaggatttcactgagcttgcaagagagaacactgagaaggacctcgagacttgtgggactctcgctgcctttcttgaaagaggaattttttatgtaaccactctgataatacctaagcaagaatcaacttctaattcttgtcaggctatgaatgaagtggaagtgttttccattcaaaacgaaagagaactctatcccgtaggatggattcatactcatccttctcagggttgtttcatgtcatctgtagatctgcatacacattattcgtatcaggtaatggtgccagaggcttttggcattcggcggagctcccactgatagctctaagaattaccggatatttaagcttaccgg

SEQ ID NO: 128300 - DNA, 677 bp, Arabidopsis thaliana
caagaagaaaaaaaaaaacagagtagagattgataaaaaaaaaatgagtagctccgattctcctcagcttcacaatatcttcgtctatggtagctttcaagagcctgacatcatccatgtcatgcttaatcgtattcctgagattgtctctgcaacacttcctggctttaagagatttaggcttaaaggacgtttgtatccatgtattatcccctctgagaatggagaagttcatggaaaggtactaatgggattgactaatgatgaacttgagaatgtagattgggttgaaggaaacgaatatgaaagagtgtttgttgaagttgtaagaaaagacaattctgagaagatgagagtggaaacatatccatggatcaacaagaatgatcctgatattggtggagaatgggatttcgaggaatggaaacgattacacatgaagacattcatagagactttcaagaaaatcatggaatgtaagaagaaacctcagggacagggaaatgatgatattagccatgtcctacgcggagatcaataggataagaccccatcgtcttggatggacttgtgtttgagtatgttctaaaaataaccacctttgttaaattatcaacaaccaaaaaccttcgtttttaaaaatctaaaataaataaaacgtagagagtgttgtattg

SEQ ID NO: 128301 - DNA, 720 bp, Arabidopsis thaliana
gttgaaaaaaaaaacagagtagagattgataaaaaaaaaatgagtagctccgattctcctcagcttcacaatatcttcgtctatggtagctttcaagagcctgacatcatccatgtcatgcttaatcgtattcctgagattgtctctgcaacacttcctggcttgtacgttacctctctctctcgatcttgatcttgatctcgaatgataattctctctgttttttagatctaaggtttaatgccgattttgggttgttttcagtaagagatttaggcttaaaggacgtttgtatccatgtattatcccctctgagaatggagaagttcatggaaaggtactaatgggattgactaatgatgaacttgagaatgtagattgggttgaaggaaacgaatatgaaagagtgtttgttgaagtcttaagataagacatttttccaattatgcgcactctaaacatttatttagtacagcacgtgtgatcactttttttgctggtggacaactattttatcttttacaaacgttttcttttttcaacgtagtttgattccttattggttagcttattatatgagattgtacttaatcaaatttttttacatttatcattcttttttattcaatgtttattttgttaggtaataatttttttttttcactttattttattattctaattaatattttttttttttattctgaatttctttctctt

SEQ ID NO: 128302 - DNA, 481 bp, Arabidopsis thaliana
gagagtggaaacatatccatggatcaacaagaatgatcctgatattggtggagaatgggatttcgaggaatggaaacgattacacatgaagacattcatagaggcgttcacggagatcatggaaaggaagaggaatccacaaggaaagggtagagatgatttcagcaatgtactcaaagaagaagatcccgcgaatgctccatcgtcttgaatggatttgtgtcgagtatgttctatatatcacctttgtgtctaaactccatattaaataaaaaaagctggagagtctagctaggttattgtggagactaatgacaagaatgtttttgtcatgttgtattgtaagatttgagttatatatcatgtggattgtattattgtgttatacaagagtctttaagagattttggcatcttgaaaaaaaaaataaaaaaacccaaagggcggacgctctagaggatccaagcttacgtacgcgtgc

SEQ ID NO: 128303 - DNA, 426 bp, Arabidopsis thaliana
gaaaatgaatttcagattcaaacttgttcatcgaaattttgcgtgaagattcgaatcgagaagtccgtggaagaggaagaagaagaagatgtctgtgcaagagtatttagacaagcatatgctttctcggaaaatcgaagacgccgttaatgccgccgtaagggctaaaacctcagatcccgttctcttcatcgctaatcatctgaagaaagctgtatcatctgtgataacgaaggttaaagcacgacagatccttgacagcagaggaattccaacagttgaagttgatctgcacacgaacaaaggcgtttttcgtgcttctgttcccagtggtgattcttctggaacgtatgaagctattgagctacgtgatggagaacaaggaatgtatcttggaaacagtgtggctaaagctgttaagaacat

SEQ ID NO: 128304 - DNA, 572 bp, Arabidopsis thaliana
cgcctgcaggtaccggtccggaattcccggctcgacccacgcggccagacccgcgtaccacagcttgacaatcatcggaatcagcttattcaggtacgtgaatgtcgaaagcccaaagtttttttaatatgtcatcttcttttgttgatcatcttcaaaatcctgcagttggagctagtgttaagttctggaacagtttgcttatcgatgtactctcttgtcgctggaattttcgggatgaacattccatacacatggaacgacggtcatggatacatgttcaaatacgtggtgggcttgacggggacactttgtgtagtcgtgtttgtgatcataatgtcgtacgctaggtacaaaggacttgtgggatcttgatggctgaatttgggttagatggagagattgtgaaggggcattgggcagatcttgttttcgattattatacttgtggtcgttctgagttttgaacgagcttcacaattattttagctgtcgcatcataaaatttaatcgtacatattggaataaaaaacccagggcaaccgctctagaggatcccagcttacgtacgc

SEQ ID NO: 128305 - DNA, 499 bp, Arabidopsis thaliana
ggggaagaacgtacgcctgcaggtaccggtccggaattcccgggtcgacccacgcgtccggtttttcacagtagaagtagaagatggagcagctagtgagcatgggtttctccagcgatttggccgccgaggctttaacggccaccggcggagattccatccagaaagccaccgactggattctctcccaccgttcttcccctcaatccacggccacgttacagcccaaactcgaccgcttcctccgtctccatcccaaagccctagcccccgccatgggtgacgattccagcaagcgccccaatcccaaaacccaaatccacgtcgcggctgatgattccaacaagcgtcacaagctctcatcatccagccaccgccaacaccagccattgtcggagcgtatgcgtcctcgcactctagatgacgttgtaggtcaagaccatctcctctctcccagctctctcctccggtccggccggggaatacaatcgcctccctt

SEQ ID NO: 128306 - DNA, 503 bp, Arabidopsis thaliana
cgcctgcaggtaccggtccggaattcccgggtctgacccacgcgtccgaaaccctaactattaaaaagaatcgaaaaaatcaaagttctgaacttctgatcaatttcgatatgttatcgttaatcatcagaaggtctcgaagcagattcatcatccatggaatcaaaatttcttgtaactctctgtcggctgtagattcaagttcttcagttttggtttctagaagaaccttcagttcaacacctgcgttaagctattttggattcaattatggaaaaatctctaatttgaatcagagatttggtaattacgcttattctgggagtagtttcgcttccagtactcgatcattgagctcagaagctgtagctgtggcagcgacttgtgatggacttactgtggaacgaattatagctaatcagtggccgattgtagatgagaatgaaggtgattggaagagtcacgctgcagcaattgcgcagtctattcaagtcatcaagaga

SEQ ID NO: 128307 - DNA, 468 bp, Arabidopsis thaliana
gaaaaaataaaaaaaataatgggtcatcgaacaagaatgatccttgtcctaaccctagttgtaatgtccatatggggttcggacgcatcagcaatgcaaaagacgaaattcgacgccccacttttgactgaaaaaatcgcgacaaatagatcgataattgtagatatcgaaggcaaaggagactacacttcggttcagaaagccatcgatgctgtccctgttggtaactctaattggattattgtccatgtccgtaaaggaatctacaaggagagagtgcacattccggagaacaagccgttcatattcatgaggggtaatggaaaaggaaaaacggtgatcgaatcttcgcaaagttcggtcgacaatgttgcttcagctactttcaaagtcgaggctaatcactatgtcgcttttggtatcagcatccgaaatgatgcacctgtcggaatggcattcacatctgag

SEQ ID NO: 128308 - DNA, 503 bp, Arabidopsis thaliana
  unsure (1)..(503): unsure at all n locations
aacggtccccngggattgccccgtgatcccntccaggaatgagtgngcaccgctttggatgggnncatatgtccgtattggacccgatcccttcagagatatgccncgatncgtctaaagaagccatgactctgattgagaagcagactcaggcgctctttggacgaccggatataaggatactcgaggatggaaagctcgatacttctaacgacgaggttctgtctctgagtgtctctggacttgcgatgttggttttggaagctgtggcttttgggtctttcttatgggattcagagagttacgttgaatccaaataccatttcctcaaggcttgagtttagtcctccttgacatttgtacctttttgagagtagtgaatgtaaatgttaaatctctcatgtgaaattggtagcaactcctattcgtaaaatgtaataaacttcacttcaatactttaggctttaatcnnnnnnnnnnnnnnnnnnnnnnnnnnnnnnnnn

SEQ ID NO: 128309 - DNA, 475 bp, Arabidopsis thaliana
ccacgcgtccgctctatctctgtccaaataagaacaaaaaaagacaagattcagaaaaaaatggaggtttcgatgagaaagccttatttcatagaagaagaagacgatggttttgtttctttatctgagatggaagctggagtttcaagtccttcttgttacaactatcctcagagttattattataaccatcatcatcatcagtactctgtttcatctcccagatctggaaaatttcatgattttagattcgacaatagctattacggttatggacagcctcatttcttggactcttgcttcctctgcaagaaacgtcttggtgataacagagacatcttcatgtacagaggagacacaccgttctgtagtgaagagtgtagagaagaacagatagaaagagacgaagcaaaagagaagaaacagaggctgtctacatctgtgaaagctatgagaagaaatgaaaagcgaagct

SEQ ID NO: 128310 - DNA, 396 bp, Arabidopsis thaliana
gaatccttctaattgcgaaaaaacaagagaatcgagtaatgcaacaacaaggtgaaccatcggttttgagtttgagacccggcggtggcggcggcaaaagcaggcttttcgtccctcgctttagctcctcttcctcttttgatcttaccaatggcggctccgaagaaaccccttttcccgtcaagagagaaaattctggtgaacgtgtgaggttttcccgagaagagatacttcagcacagagagtctgttcaagtctctgatgaaattcttagacgctgtaaggaaatcgcagttgagctttttggcgaagagcagagttgggggaatcatgcagccgagagtaaaataacaaatcatactcagcatcgtcataccgagactgataaccgtgact

SEQ ID NO: 128311 - DNA, 519 bp, Arabidopsis thaliana
  unsure (1)..(519): unsure at all n locations
gatcgagcctctcatcaaatacgtcatttaccaggacgagagagcaaagcagtggagagttcaagcagtggcggtcgcaccagacaggtttgagaaccgaaagcctctccctccgccctcgagaggccttagggatgaggaactctcgaaagctgctgagattcccggttgtgtctttgtccacatgagtggctttatcggcggaaaccaatcctatgacggcgctctatccatggctcaaaccgcactcactctctgagcatcaaaagaatcatttacccattactcatagagagagaccgagagttttgatattgccattatcttctgcaatttctgtttcattgagtcttctcgtgacaaaaaatttaagaactagatttgtagtctcaagctgattagatcatattatatgtttgcttcctaaaaaaaaaaaaaaccaaagnnnnnnnnnnnnnnnnnnnnnnnnnnnnnnnnnnnnnnnnnnnnnnnnnnnnnnnnnnnnnnnnnnnnnnnnnn

SEQ ID NO: 128312 - DNA, 633 bp, Arabidopsis thaliana
  unsure (1)..(633): unsure at all n locations
cgcctgcaggtaccggtccggaattcccggttcgacccacgcgtccgcggacgcgtgggcctagttctcgtttcaccaacttaaatctgaatgcatctcatcccggaggcatcaaacaagaagttagaagacgacagtcacagcatggatggcttcacagactggatcctaatgaaccggtaatgctattcccaaaaccccttggttcccgataaactggcagctgcagggattgttcctccaacaccggattcatcaccaggtcaacctccaagtcggtttcaggggaggattgggcgtggtggccgaattattttcgatagatggaatccgttgatgcaatctcacattaattgtggaaactcttattacattgctccaaatcaccggtctaccaacttcgattgagatattttcacaatcttgctttgtaaagaattttccatcaccaatggtgtatgcaataacgattctcagctaaataagttttagcactttggaactacctgggtagtgtgtggatttctgtttatttgcggttaagaaaaaaaaaacaaaaagtccnnnnnnnnnnnnnnnnnnnnnnnnnnnnnnnnnnnnnnnnnnnnnnnnnnnnnnnnnnnnnnnnnnnnn

SEQ ID NO: 128313 - DNA, 533 bp, Arabidopsis thaliana
  unsure (1)..(533): unsure at all n locations
nnnnnnnnnnnnnnnnnnnnnnnnnnnnnnnnnnnnnnnnnnnnnnnnnnnnnnnnnnnnnnnnnnnnnnnnnnnnnnnnnnnccacgcgtccgcccacgcgtccgcccacgcgtccgcccacgcgtccgaaccaaaatccgatttccccatacttagaggtcaagagaaataaaatatttttccggcgacgcaatggcttcttactccggttgtttcttcgtcgttactttggcagttctgtcacaatttctcttagccccagcttcagccttggtcaacagggaatacatcgattccaattgccaaagagtcaaaaacaaagccttctgcatccaaactttgaccacctatcctcctgccgctgctgccaccggcctgttaccattggctgaggccgtggttggccttgcaatatcccactgcgagaagacagctggtttcgcagcagagacagccaaaaaggacgcaacattgaagactcagttcaacgagtgccacgacgcctatgttggtattttggcgtctctaaag

SEQ ID NO: 128314 - DNA, 497 bp, Arabidopsis thaliana
caggtaccgggccggaattcccgggtttacccacgcgggccgaggtcgatcctgaggatgagaacattgatttcctgaggatgtgccaaagcataaaggagaaagaccctaactttaagttcgagtttactttggatgcaaatgataagttagaaaatattgcctggtcgtatgcttcttccattcagtcatatgaactctttggagatgctgttgttttcgatacaacacatcgcttaagtgctgttgagatgccacttggaatatgggttggagttaataactatggtgtcccttgcttcttcggttgtgtgcttctacgggatgaaaatttgagatcgtggtcatgggcactacaggcattcacagggttcatgaatgggaaggcacctcaaacgatattaacagaccataatattgggtctcaaagaagccatagctggggagatgccagcccttaagcatgccctctgctatggagggggggtaggaaaggt

SEQ ID NO: 128315 - DNA, 494 bp, Arabidopsis thaliana
ctccaggtaccgggccggaattccctggtttacccacgggggcggggccctttctaactccaataaaaacacaataatggatcttcttgttatgctcctctctcttctcgtctcttatctcatcttcaagatctggaaacgcatagactccaagagagaccaaaactgctacatcttggactaccaatgtcacaaaccttccgacgatcgtatggtgaacactcaattcagcggtgatatcatccttcgaaacaaacaccttcggctcaacgagtacaagttcctcctcaaagccatcgttagttccggtatcggagagcaaacttacgcaccaaggctcttctttgagggccgcgaacagcgtcctacgctacaggatgggctctcggagatggaagagttttacatagacaccatcgagaaagtccttaagagaaacaaaattttcacctttcgagattgacatcctcgtagtcaacgtctcaatgctcaat

SEQ ID NO: 128316 - DNA, 798 bp, Arabidopsis thaliana
  unsure (1)..(798): unsure at all n locations
ccgnnnnnnnnnnnnnnnnnnnnnnnnnnnnnnnnnnnnnnnnnnnnnnnnnnnnnnnnnnnnnnnnnnnnnnnccacgcgtccgtattattccaaaatttggtgaaagcaacgcctaaagcaaaaatgtctcttctctaaccttttttttttttttttttttttgctctccaactttcccttcattttctggggaaaagcgagccaaaaaacgcaaaagcaatccacaagaagcaattgttcgatatcaatggggaagaacaataagatcggaagcgttgttcggatccgtcagatgcttaaacaatggcagaaaaaagctcacatcggatctagcaacaacgatcctgtttccgatgtacctcctggtcacgttgctgtttccgtcggtgagaatcgtcggagatacgttgtccgtgctaagcatttgaaccatccgattttccgacggcttctagctgaggctgaggaagagtatggattcgctaacgttggtccgttagcgattccttgtgatgaatcgttgttggaggatattattgccattgtgactcggggtgagtcggcttatcatctggacaggtaatcctccgcggcgaccttgagatctccggagtgtagcatgttggatggcaaaacaacgtgaatcctgtcgtacttctggattgctgaaatctggtctaagaattgcaacggaatggataaacttggtagaattatcttaaagttatttatttctcgtatttttaaggatttgccttttttggaagaaagcaattaggttgattgttttgttgc

SEQ ID NO: 128317 - DNA, 385 bp, Arabidopsis thaliana
  unsure (1)..(385): unsure at all n locations
gtccgcaaacgcatgggggggagtgctaatctatctggagaactggtgccacagcttgctcagcttccaaacttgcagtacttggaactttttatcaataatattactggggagatacctgaggagcttggcgacttgatggaactagtaagcttggacctttttgcaaacaacataagcggtcccatcccttcctctcttggcaaactangaaaactccgcttcttgcgtctttataacaacagcttatctggagaaattccaaggtctttgactgctctgccgctggatgttcttgatatctcaaacaatcggctcagtggagatattcctgttaatggttccttttcgcagttcacttctatgagttttgccaataataaat

SEQ ID NO: 128318 - DNA, 574 bp, Arabidopsis thaliana
  unsure (1)..(574): unsure at all n locations
actcacttagggaaagctcgtacgcctgcaggtaccggtccggaattcccgggtcgacccacgcgtgcgcccacgcgtacgcccacgcgtccgctaacctttctttgaaatcttgacctttcccttccttctccgctaaattcgttttaatttcatcttcttcttcttcttcaattcgatgcaataatagtcacttcaatctcaatctagggttttcaattttcttcatgtgaattttttttccccttcttctcaatttcaattcaatctgggattcgtaaattctcggaagatgaaacgcgatttcgacgaaatctccgaggaagagtggtctcaacactcgtttaacgcttcgcgagttcttaaacgaccacggactccgaagaagactcgcgcggcgacgaatccaacgccgtcgattgagtcttttgcgtttaggagaccttcgacggcgatgacgattgagagtaatagcagcgatggtgattgggttgagattgaggatttgggaaattcngtttcggatgtgaagattgggaatggggaggatttgttggttagaggatgaaaaaaa

SEQ ID NO: 128319 - DNA, 418 bp, Arabidopsis thaliana
gtccgaaaaaagaagagaaaaggagttatatatggattgtattttacttattctgactactcttgttgccattttcatcgtcaagattgttctcctagtcactaaacctaacaaaaaccttccaccgtcgccaaatatatgttttccgatcatcggacaccttcacctcctcaaaaagccactgctacaccggactctcagccatctctcccactccctcggccccgtcttttctctacgcctcggctctcgccttgccgttatcatctcatctccaacggcagccgaagaatgcttcttgacgaaaaacgacatcgttttagcaaatcggcctcgtttcatcatgggcaagtatgtggcttatgactacacctccatggttacggctccttacggtgaccactggcgaaacctccgt

SEQ ID NO: 128320 - DNA, 640 bp, Arabidopsis thaliana
  unsure (1)..(640): unsure at all n locations
nnnnnnnnnnnnnnnnnnnnnnnnnnnnnnnnnnnnnnnnnnnnnnnnnnnnnnnnnnnnnnnnnnnnnccacgcgtccgtgcggctgcgagaacgacagaagggggtcgtcgcgtctcttttctggaaaaaacgagaaactgtgatcttggcccttttattacccctatcctcttcttcttcaatctctccgatcaaaatccttttaagctctgtagacccaggttacgcagagaagaagaacagaacaaggaattatataatcattggcttgatcaatctgaattgcagttcatggcgctaaaccctcaattactacccaatgggatgcctgttccctttgttaatgaaatgttcgtcctagtccgagatggtgttgagtttgaagtcgacaagatccctggagggcatggaggtcatgttaaggccaagggggtgatttacttgtctaatatacggatggtctttgtttcaagcaagcctgttgacaactttgttgcttttgacatgcccctgctttacatccatgccgagaaatttaatcagccaatatttcactgcaacaatatttgctggacaagtggagcctgtggtgccagaaaatgagcatagagctctatattcaacacacagtttcaag

SEQ ID NO: 128321 - DNA, 337 bp, Arabidopsis thaliana
cggacgcgtggggtttctgattcaacaaatggctgcatccctctttaggttgattgcttctgtgtgcagaaccatgatgattgctaatactggtggtgctctcactctacttcttgtgttcttgctcggaggcttccttcttccgaaaggcaagattcctgactggtggggttgggcttactgggtatctcctctcacctatgctttcaacggtctagtagtcaatgaaatgtttgctcccagatggatgaacaaaatggcttcttctaacagcacaataaagcttggaactatggtgcttaatacttgggatgtctaccatcaaaagaactggtac

SEQ ID NO: 128322 - DNA, 1111 bp, Arabidopsis thaliana
  unsure (1)..(1111): unsure at all n locations
nnnnnnnnnnnnnnnnnnnnnnnnnnnnnnnnnnnnnnnnnnnnnnnnnnnnnnnnnnnnnnnnnnnnnnnnnnnnnnccacgcgtccgcggacgcgtgggaaagattgtttatccgatgagaacgatattaagaaaaaacctaaggtggattggacgccggagttacaccggaaatttgtacaagcggtggagcaattaggggtagacaaggcggtgccgtctcgaatcttggaaattatgaacgttaaatctctcactcgtcacaacgttgctagccatcttcagaaatataggtcacatcggaaacatctactagcgcgtgaagcagaagctgccagctggaatctccggagacatgccacggtggcagtgcccggagtaggaggaggagggaagaagccgtggacagctcctgccttaggctatcctccacacgtggcaccaatgcatcatggtcacttcaggcctttgcacgtatggggtcatcctacgtggccaaaacacaagcctaatactccggcgtctgctcatcggacgtatccaatgccggccattgcggcggctccggcatcttggccaggtcatccaccgtactggcatcagcaaccactctatccacagggatatggtatggcatcatcgaatcattcaagcatcggtgttcccacaagacaattaggacccactaatcctcccatcgacattcatccctcgaatgagagcatagatgcagctattggggacgttatatcaaagccgtggctgccgcttcctttgggactgaaaccgccgtcggttgacggtgttatgacggagttacaacgtcaaggagtttctaatgttcctcctcttccttgagaaagatctccaaaatttgtcgaaatctcaaacttttaacttcatttttttggtatcttctatgtatttttgcaagggaaagacgataaatccttgttgcttgatcatatgtatttctctatatgagtgcatgtatcgaagttaagcccctttaaaaaaaaaaaaaaaaaaaaaaaaaaaaagggcggccgctctagaggatccaagcttacgtacgcgtgcatgcggcgtcatagtctagctatagtgtc

SEQ ID NO: 128323 - DNA, 825 bp, Arabidopsis thaliana
  unsure (1)..(825): unsure at all n locations
nnnnnnnnnnnnnnnnnnnnnnnnnnnnnnnnnnnnnnnnnnnnnnnnnnnnnnnnnnnnnnnnnnnnccacgcgtccgaacagaacaacaaacagaagtggcgtgtacaagctcgagatccctcacgtagatggcatcgattgtgtcgacggaatcgctatatcatcacaatgcagtgccaagatactcaaaacctcctctgacgacaacggaggctgcagcatccctgttttccaaactgcaaccaacgaagtatccatcaaatcaaagcaagatcgtgtctgtatctacagcttaagcgcactaagctataaacctcctcacaaaaacacatcattgtgtggaaacggagggaagaaacatcaccgaaaggacgagaaggtggagaagaagtttagagattcgaaattcttctggccttatttggcacccgattgggttcccttggccatatccggatctacctccattgccaactctaccggcttttccgtcttcccctttccttctttacctgtgggaaacccgaatctggccttgccggctttcgattggaaaaatcccggcacttggattccctattctccacgttttccttcagggagacactatcctcagggacactcactattgggatgcctcgggttttatttcccttgggatcacccctgtaagggttaatgatgcgcctggaatcaatacctataatggggaatattcttccttcaaaaataaaaattggttaaagagacggtttggcgggacaatactcccccgcgcagatatacggtcgcccgcgttctcttccgaaaacacattatggg

SEQ ID NO: 128324 - DNA, 992 bp, Arabidopsis thaliana
  unsure (1)..(992): unsure at all n locations
agtttagagattcgaaattcttctggccttatttggcaccgtattggttcccttggccatatccggatctacctccattgccaactctaccgccttttccgtctttccctttcccttctttacctttcggaaacccgaatctggcattgccggctttcgattggaaaaatccggtcacttggataccttatcttccacgttttcctccaggagatcataatccttagggacactccatatttggattcctctgttttttattttcttggtgatcacctctgtttagggttgattgtatgtgtttgtgatatgattacttattaatgtgtaattattcttcacttacagaagattaagaattggtttaaggaggacagttttgatggacaactttatattacagttgaagccgtttaaattaggcctccgcatccactaggaagcatatatcgcaagagaccccaagagtgaaaacaaaaaaaaaaaagtgaagaagaaaagacatagggcctgatacgggtaaacttgtcgactactgcacaaccaaaaaaaggttttttttcttctgattcttgatcaattaacatcgacgaccggctctgcagttaagagcacccgagtaagaggtcatggtgccgacgagtgaggatgatttggctgataaactcgaagctctggcatagttggctccagctccagctccagaacgtgtgaaaaatgctccgtttaaggaaaagatctccttctgatctcccatttccagtggctcccattttcgattccccctggggtactcccctccttaggcacctcctttagcaaatggggttgactgggagcaagaaatcggntgcccngactggttgangggttgggccagcccttcccccaattggatacatttcccaatgggggagccattggtaccnctcggaataccaagccaaattnggatcccgggtaaccctcccaanggggaacattgaactgnc

SEQ ID NO: 128325 - DNA, 554 bp, Arabidopsis thaliana
  unsure (1)..(554): unsure at all n locations
cggggcgtctccacgcgtcgcgcgctattttaacaaaatcactgtctactcccttttttaacactaaaaaacgttatcactattcgtcgtgacgaatctctcttcgtgtaaatcgacgatccttctctatctctgcaactatgtcttcatctactaagaaggttttgattcccgttgctcatggtacggagccgtttgaagcggtggttatgatcgatgtgctacggcgaggcggagcggatgttacggtggcttccgttgagaatcaggtcggcgttgatgcttgccatggaatcaaaatggtcgctgatactcttctctctgatatcaccgactcggttttcgaccttattatgctccctggaggacttcctggtggtgagactcttaagaattgtaaacctttagagaggatggtgaagaagcaagacactgatggacgacttaacgctgctatctgttttccggcggcgttggcggtttggnaccttggggcctcctagagggnaaaaaagctncatgttacccggttttattggngaacctnncggttt

SEQ ID NO: 128326 - DNA, 614 bp, Arabidopsis thaliana
  unsure (1)..(614): unsure at all n locations
cctgcaggtaccggnccggaattcccgggttgacccacgcgtgcgagacaggccacaaagaagaggataaaacagaagactaagacacacaagagagatagcgtctgtgaatggcaacaaaggcagttcttctcccgtggcttatcccatcgccgagacacgtatcgctgttcccagtggttcaattgccggcgttggagaccgccgggtggtgtgtaagaaagaggagggcagaagacgtagcagtctccgtcgccttcaatccttctggcaatttcgacatctctgccttcgagaatgaccaagattcagataaagtggaacctccgatgcctccaacgaccggccggtacgaagtagtgatcgacaacgactcaattgggcggcttgacctatccccgtttcagagagccatcggcataacctcgcctgatgattttggtgtagctgaaccaaaacgggtattttggatcggaaccatcggattcaccatcaattncaagggngaagaccccggggntccccgggaggttntnnaagtancccggacgnaaaactttngnttctnaagggttangggntttnncctttggtngcctttgttnttgantttg

SEQ ID NO: 128327 - DNA, 460 bp, Arabidopsis thaliana
atccgcccaagcgtccgcggacgcgtggggaaaattaaatggaggaaaaagctaaactttcttaatcacagatgcagattgattctccatttttctcgggagaaaagttcctcgccggagatggagcatatgatgaaagaaggaaggtctcttgcagagacgccgacttactctgttgcttcggttgttactgttttggtctttgtttgctttctcgttgaacgcgccatttacagatttggaaagtggttaaagaagactagaagaaaggcactttttacttcacttgagaaaatgaaagaggagttgatgttgctgggacttatatcacttctgttgtcacaaagcgcgagatggatttcagaaatctgtgttaactcttcccttttcaatagtaaattctacatttgcttctgaagaggactatggaatccataagaaagttcttctggaacacacc

SEQ ID NO: 128328 - DNA, 849 bp, Arabidopsis thaliana
  unsure (1)..(849): unsure at all n locations
cccggcccctttgattgcgctggccgcttgcagtaccggtccggaattcccgggtcgacccacgcgtccggagccagcgttcatcttccttatgatcataagttgttggttcagaatctaaccatgttgagacttaacaatgcatccatcccaacgtctcttcaagcaacattcccatacatctttgcagtcagccagtacttgcagcctggagcatttgatctggtgggttatatcatatacgatgtggaaggaaagccataccagagtgtcttctacaatggaaccatagaggtagttgaatctggaggtcttctcagcggcgaatctgttttccttttaacactcggaatcggtctcctcctcctcctcggtctatgggcatacagccaagttcagcgtctcaccaagaaaaccaaaaaggtttccaaggtggaagtaggaactaggtctaccgaggcatcactcgatgaatggctcgagggaactactttggccaagacatcgtctgggaaaacaaagaacaagaagaactaaagtagagctgttttgctccttccagttgttatagactcagcttcggcgttttgaaagagtttccaagtttaaagttcagtcttgaggaaatttagggttttaaacgacactttttttgttccagcattgtactctttagacaatctttacttcttgtcataaatattctcctcatgaaacaagttaacttataaatggtttagatctgtttttcgttgctnnnnnnnnnnnnnnnnnnnnnnnnnnnnnnnnnnnnnnnnnnnnnnnnnnnnnnnnnnnnnnnnnnnnnnnnnnnnnnnnnnnnnnnnnnnn

SEQ ID NO: 128329 - DNA, 892 bp, Arabidopsis thaliana
  unsure (1)..(892): unsure at all n locations
acccaagcgtccgcccacgcgtcggcccacgcgtccgatatttgatagaatcaagcgatgatgaatcttagggttttgttcctcgctctccttctccttgcatctcctctgcttcaagttgctagatgtcaatcggatgccgaggatcattcaagtcttgttgacgatgttgtgggagaaaacactgatgatgcggttgaggaagatgaccatgatttggatatgaacttgtcctcatttccaggagttgagactgtttgtgttttccccaaaaacagtgccaaattggttccagctggagaagagactgagctccttgttggtcttaaaaatgaagggaaaactagagtaggtgtgatgggaattagggccagcgttcatcttccttatgatcataagttgttggttcagaatctaaccatgttgagacttaacaatgcatccatcccaacgtctcttcaagcaacattcccatacatctttgcagtcagccagtacttgcagcctggagcatttgatctggtgggttatatcatatacgatgtggaaggaaagccataccagagtgtcttctacaatggaaccatagaggtagttgaatctggaggtcttctcagcggcgaatctgttttccttttaacactcggaatcggtcttcctcctcctcctcggtcttaggggcatccagccaagttcagcgtctaccccagggaaacccaaaagggtttcccaagggggggaaggttgggccctagggtctaccgcgggaatcaacttcgntgaatggcttcgagggacctncttttgggccaagaaatnggcntggggaaacaaagggccaaggaggcnttaaggtngggcttgtttttnnccttnccngtttntannnggc

SEQ ID NO: 128330 - DNA, 911 bp, Arabidopsis thaliana
  unsure (1)..(911): unsure at all n locations
nnnnnnnnnnnnnnnnnnnnnnnnnnnnnnnnnnnnnnnnnnnnnnnnnnnnnnnnnnnnnnnnnnnnnccacgcgtccgtttgaattactatttgcagtggaagtctcttccgtctactacagaagagcacgtcaaaactggattggaggcggcgtatccatatggccttggacattgctcgcggtatgaattatcttcaccattgtagtccacccattatccatcgtgatctgaagtcatcaaatctgctggtagacaagaactggaccgttaaggtagctgactttggtctctcgcgtatcaagcatgaaacatacctaaccagcaagtctgggaagggaacgcctcaatggatggcaccagaagttcttcgaaatgagtctgctgatgagaaatctgacatttacagctttggagtagtattatgggagcttgccaccgagaagatcccatgggaaactctcaactctatgcaggtgattggagctgtggggttcatggaccagaggctggaaatcccaaaagacattgatcctcgttggatctcattaatggagagctgttggcacagtgatacaaagctgagacccacattccaagaactgatggataaattaagagacctgcaaagaaagtatatgatacagttccaagcgactcgtgctgcgttatctgacaattctcttctcaaggacaactaattaaaataaaagttgagccctttttaccttttttgtcctcaatgccatgcttcaagactcanagacggtcatgagaacagagaaagatagagaatgggtctgtttgagcagtagtaccagtgggttgatgtgtattacagcgtggaggagacctatagcagagactgccactgaattatgggagtgggtgtgaggatttgggcataca

SEQ ID NO: 128331 - DNA, 457 bp, Arabidopsis thaliana
attagtcctgaggcagatgcagttggggaaacaataagcactttgaagtttgcagagagagtagctacggttgagcttggggctgcacgagtgaacaatgatacttcagatgttaaggaactcaaagaacagattgctactcttaaagcagcactcgcgagaaaagaagcagagtcacagcagaacaacatcttgaaaactcctggtggctctgagaaacacaaagccaaaactggtgaagtagagattcataacaataacatcatgacaaagaaatctgagagttgtgaagtggaggagattacagtgaactcaccaccttggccaccagtagcaagtccaggacaagcctacagagaggatgaccgaagtttcgggtccagcgagtgggttgacaaggtgatggtgaataacagacaagacgagatgagaagagtggagagtctttggggaggag

SEQ ID NO: 128332 - DNA, 493 bp, Arabidopsis thaliana
cgcctgcaggtaccggtccggaattcccggcttgacccacgcgtccgatcacctctcgctaagtgtgcgttagccgttagggttccgatctaatcatggcggactctgttttgaaggaggttaactgtggccggcctgaaaagatcccgaagttggacaaagcttgcgaaggatcgaaatcgtcctggaaacatctcaagctaggaaacgtggaagatgatgagtatcttcgacagtattgtttgtttcactacgaattccataaatccgagggtttcacggttgattgggagaaatatgactacatgttccatataaggccgttggaaaattcaccacctatcagcgatatacgaaccaatgctgatgtgatccgtgatgtgacactctttgccattgagaaacacaatgaagcctcttggccctaaactttggggtggtcaaacatgtctcagcttatttaatattggcccatgggctcccctgatggtaa

SEQ ID NO: 128333 - DNA, 500 bp, Arabidopsis thaliana
acgcctgcaggtaccggtccggaattcccgggttcgacccacgcgtccgcccacttggagagagaaatggcgacggcatcggaaaattcaagaggaatcagcggcggtgatcgaacggcgaaagctgtcgtcgccgatcagatttcacaagccgtaaattccactgctaaccttcttcatctgatgcggctatcctccttctgcgcaggctcagttggcaaagctcccgaagaatctgttggcgaaagcttcactgactaaggccactggacaggcgttggcgcagcttcctcaagtgatttcatctctagatgctcatatagaaagcggattgcacagcggtgttcatctaaacacagtaaccccagttacttgaaaacctggaaagcccaccgcttcgtgctcttcgacaatttaatatttcccctggggtgtaaactctgatctcttattagcaataaagatgttttttcttctggacattttttctagcagccatt

SEQ ID NO: 128334 - DNA, 846 bp, Arabidopsis thaliana
  unsure (1)..(846): unsure at all n locations
gatactccnnnnnnnnnnnnnnnnnnnnnnnnnnnnnnnnnnnnnnnnnnnnnnnnnnnnnnnnnnnnnnnnnnnnnnnccacgcgtccgcggacgcgtgggcggggatgcaagtgacgatagcgtttaatcatttcggacaagggcttgttcagaggatgcctaggtgtcggagaggttacattcatgtagtgaataatgagtgcactgagtggaaaatgtatgctattggtggtagtggtaatcccaccattaacagtcaaggaaatcgttactctgctccttctgatcctagcgccaaagaggtgacgaagcgagtggactcgaaggacgatggtgaatggtcgaattggaattggagaacagaaggggatttgatggagaatggagctttctttgtggcctctggtgaaggaatgagctcaatgtactctaaagcttctagtgttgaccctaaagctgcttctctcgtagaccagctcactcgaaacgctggcgtttttggcggtcccagggatgatcaaggtcagagtggcaattcttactctccttatggaggcgacggcggtggcggtgggagcagcggtgggagcagcggtggagggatggacgttatgggaggtacgacgagaggaagcagcagcagcagcggcgatgacagcaatgtcttccagatgatatttggaagcgatgcaccgtctcggccgcgtttaacgttattgttttctttgttaatgatttcggttttgtcgttatcaactctattattgtgacgaatggataacaaataggatttggacaaatcaattgattggtttttggtgtaaaaaaaaaaaaaaaaacaaa

SEQ ID NO: 128335 - DNA, 871 bp, Arabidopsis thaliana
  unsure (1)..(871): unsure at all n locations
cgcctgcaggtaccggtccggaattcccgggttgacccacgcgtccgaggacgcgtgggcggggatgcaagtgacgatagcgtttaatcatttcggacaaaggcttgttcagaggatgcctatgtgtcggagaggttacattcatgtagtgaataatgatttcactgagtggaaaatgtatgctattggtttgctctttaaggggaccattaacaggcaaggaaatcgntactctgctccttctgatcctagcgccaaagaggtgaccaagcgagtggactcaaaagaccaatggtgaatgggccaaattgggatttggaaaaacagaaggggatttgatgggaaaatgggtctttctttgtggcctctggtgaaggaatgagctcaatgtactctaaagcttctagtgttgaccctaaagctgcttctctcgtagaccagctcactcgaaacgctggcgtttttggcggtcccagggatgatcaaggtcagagtggcaattcttactctccttatggaggcgacggcggtggcggtgggagcagcggtgggagcaccggtggagggatggacgttatgggaggtacgacgagaggaagcagcagcagcagcgcccctgacagcaatgtcttccagatgatatttggaagcgatgcaccgtctcggccgcgtttaacgttattgttttctttgttaatgatttcggttttgtcgttatcaactctattattgtgacgaatggataacaaataggatttggaccgttcaattggaatataaaaaccaagggcagccgctctagaggatccaagcttacgtacgcnnnnnnnnnnnnnnnnnnnnnnnnnnnnnnnnnnnnnnnnataaatcg

SEQ ID NO: 128336 - DNA, 563 bp, Arabidopsis thaliana
atacgactcaccttagggaaagctggtacgcctgcaggtaccggtccggaattcccgggtcgacccacgcgtccgattttgaaactcctgctccatctgttgcaattcaagcaccactatcgaccacatctcagcctgctccacagccaacaacttcatctaatgataactgggcatctttcgatgctgcacccagtgcccctagtttaaatgtatcgcaaccaccacccagtggaaacacactggattcacttctctcccagttggcagtgacttcttctgtgccaggtcaggcgtctacaccatctaacggacctgtgaatcttggtcattccacgtcacaaatctttgcaccctttcagaatgagcattcgagtgaacagccatggaacacagcacttgcatctaatgtacagaggtcaatgagtgcaccgtcattgcaacctcttcaaggagtcccttctggtggcctgcagtcttctgaagttaaaccttcgggaagatcagaattacctgcggatttattcgctgtaaactacccatcataccatgcaccagtgcct

SEQ ID NO: 128337 - DNA, 437 bp, Arabidopsis thaliana
ttgttctctttctcatcgcctcttgattcacgcgaacgagaaagcgacgatcgtaaccaccggcgctgaccaaaaagtaatcgattctcttcccgagctgatctctcaggtgtcttgaatctgaatctgtggctatatttggtgctcggtggtgagcaggaagggagggggatattgtcagggttttaatgtacgtcagatgaatagagcaactaatgttactggcagtagaaggagggggtttattctcagcgtccgcgtctgggtatagtaagggattgacccttcttttctctggtgataaagacgtagataggcccatgagagttgtcccgtggaatcactaccaggtggttgaccaagagcctgaggctgaccctgttcttcagctggattctattaagaaccgagtttcccgcggttgcgctgcttccttc

SEQ ID NO: 128338 - DNA, 600 bp, Arabidopsis thaliana
  unsure (1)..(600): unsure at all n locations
gccgggacgcctgcaggnaccggncctttttcccggggcgacacacgcgttatacgagaacttctttatggggtctgtgcatttcaaggatgtggctttagctcatattcttgtatacgaggatccatattcgaaaggaaggcacttgtgcgttgaggctatctctcactacggtgattttgtagccaaagttgctgagctctatcccaattacaatgtccccaagttaccgagagagactcaaccgggtttacttcgagataagaatgcatcaaagaagctcatagatttggggttaaagttcatttccatggaggaaatcatcaaggaaggtgtggagagtcttaaaagcaaaggatttatctcttaatacctacctctgtaactctgtttgattgagcaattaacacaatctctaggcagcagaaacatttcatatgatatacgattttgcacttttgtaataaataagctggcctatggtatggtatgaacatccaaaaaaaaaaaacccaaaaaagtaaagatccaacttannnnnnnnnnnnnnnnnnnnnnnnnnnnnnnnnnnnnnnnnnnnnnnnnnnnnnnnnnnnccaa

SEQ ID NO: 128339 - DNA, 741 bp, Arabidopsis thaliana
ggcccgataagcgcgaagctcattgacacataccgtacaaagcacaatatcactgcatctactgggtccaccgatccagctgttgttgctactgggatctcggacttaatctatgagtccactcagcctgcccccgctgcctcaaactccagtggtctggatgatgatttggtgaatgcttgggctgcaaaccttggtgatgatggtcttcttggaaacaatgccccagcaatgagtagggtcaatgaattcattgctggagtcggaacagatgcaccggatgttgaggaggagaatgtcttctctagaccttcggttgggtatgatgacatgtgggctaaaactcttttagaaacttcagaattggaggaagaagatgcgagatcaggttcatcgtctccagattctgctggatcagtggaaagctcaatatcctctcactttggtggaatgaactacccatcattgttcagttcaaagccttcctcacaagcaacggcaaaatcaggtggaagtaaataccagtccacatatgaaggctatggttccccaattagagaagagcctcctccgccttattcgtattctgagccacaaagtcgtgaatcgtttgagaaccctgtagcagggtctggttctcgaagttatgaatcagatgatgaagaacctaggaaatctactggtacaagatttggaacagcgctctatgacttcacagcaggaggagatgatgagctaaac

SEQ ID NO: 128340 - DNA, 539 bp, Arabidopsis thaliana
aggtaccgggccggaattccctggttgacccacgggtccggggccagtttcagaaaacagagcaagaagaaacagctttctctcaaatgcagacgagtcgggtactctccttctcctctaactctccgagttttggcagcttctcctccgccgttgacctcgctgcaatcgccgctcgagtcgtcgaagaattcagagatcacgaccaaacacaatccgattcttctccccaccgcgacgacgataatgattccgacttcgctttcgactgtccaagcaacacgtgttctcagcctctcgctaccgccgacgagattttctgtaacggtcagatccgtccgttgaatccgtacggtggaaatgctccggtggaatctcaaccgacgagtaagattactactcttcctcctcgtcgtcgtagacggcgttgaggaaactgatgagcgaggatcgagatccgggttcgaattcttccgtcggaagctgaaggaggatcttactgggtgttccctccggagacgtactgttgtattgggaaa

SEQ ID NO: 128341 - DNA, 480 bp, Arabidopsis thaliana
cgcgtccgccaacgcgtccgagctacttcaccacccgcagattctgccatgtggcttctctctcttctacagctcacttcttctctctctgtctctctctaactacattgaaaccaaaccagagtgcttcaatgtcattgctgtgattctctttaagtccagacataactcccatatcttcttcttctgtctttttttatttctttgaaccggagaagaagaagaagaaggagaaggatatatgggaggctgtacttccaaaccttcctcctccgtcaaacctaatccttacgcacccaaagacgcggttctccaaaatgacgattctacccctgctcatcccgggaaatcaccggttcgttcatctcccgccgtaaaggcctctccttttttccctttttacacgcctagtcccgcccggcaccgccgtaacaagagccgcgacggcggaggaggagagagtaagagcgttaccagcac

SEQ ID NO: 128342 - DNA, 494 bp, Arabidopsis thaliana
  unsure (1)..(494): unsure at all n locations
tctnnnnnnnnnnnnnnnnnnnnnnnnnnnnnnnnnnnnnnnnnnnnnnnnnnnnnnnnnnnnnnnnccacgcgtccgagcgagtctaagcgagagagcaaaagagaaggcactggaagttatcggaatttgcatctttttgattccgccgttttgcgtctgacgtgttcacggcggcaacctccatggacgacggtgacctcggtaacaaccaccataacttcctcggtggagctggtaatcgtttatcagccgaatctttgccgttaatcgatacgcgtcttttgtcccagtcagaacttcgcgctctctctcagtgttcttctctatctccatcttcttcagcgtctctcgccgcttccgccggtggagacgacgatttgacaccaaagatcgatcgctccgttttcaatgagtccgctggtagccggaaacagacatttctccgtctccgccttgcgcgccaccctcaaccaccggaggaacctccttcg

SEQ ID NO: 128343 - DNA, 489 bp, Arabidopsis thaliana
  unsure (1)..(489): unsure at all n locations
cctgcaggtaccggnccggaattcccgggttgacccacgcgtgcgaatcctaagaatttaccaggtgttaagagtgatgggacggtgtctcacttcttccataaagcaatcaaagcttatagcacaggaactcgaaagcgtagaaagattcacgacgatgattttggcgatgtgcgctggcataagacaggaagtacgaattccgggggtgtgggatggtgttcaaagaggttgcaagaagataatggctctctatggcggaaaagctgtgaaaaccaactgggtgatgcaccaataccatttgggaatagaagaagacgagaaggaaggtgattatgttgtttctaagattttctaccagcagccacaacagctagtagtcaagcgaggtgataaagctgaacaggaagtctctgaggatatctttgctgcagtgactccaacagcggatcctgtcactccaaaattagctacacctgagcctcgaaa

SEQ ID NO: 128344 - DNA, 810 bp, Arabidopsis thaliana
  unsure (1)..(810): unsure at all n locations
atgggctctaccctgaagcgattaccgttggtgaagttgttagtggtatgccaacattctgtattcctgtccaagatggtggcgttggatttgactaccgtttacacatggccatagctgataagtggatagaaatgctcaagaagagagatgaagactggcaaatgggcgacatcatttacacacttaccaacagaaggtggtcagagaagtgtatctcttatgctgaaagtcacgatcaagctcttgttggtgataaaacaattgccttctggttaatggacaaggatatgtatgatttcatggcagtagacagaccatcaactcctcttatcgatagaggaatagctttgcacaaaatgattaggcttataactatgggattaggcggtgaaggttacttaaattttatgggaaacgagttcggacatccagaatggcttgattttcccagacgcgagcagcgtctttctgatggtagcgtgattcctggcaacaatttcagttatgacaaatgccgccgcagatttgatcttggggatgcagattatctcagataccgcggactacaagaatttgatcaggcaatgcaacatcttgaagagaattacggttttatgacttcggagcaccaattcatatcacaaaaagacggagcagatagagtaatcgtattcgaaagaggtgatctcgncctttgcctttacttttcnncnggcccagcaagctnctttnattnccgcattgggttnnnccaagnctgggaaanttaaggcnggtttggnctgggcggnncnntttttggggggt

SEQ ID NO: 128345 - DNA, 400 bp, Arabidopsis thaliana
tcgattctttttgctgctatttttcaagcagtttcttcacgatattttgctcgattttttggcactgaacgggcttcttcagggatgaaattctctcagtccactggtaaatcaaattctgttgaaaaggacattgatgaagtgaaagtgaaaccaaatatggatatccgtctgagtgatatgaaacttgttttaggaccagagctgaggataatgtaccctttaattcttaattttgctgttagtggtgagcttgaacttgatggcatggctcatccaaaatttatcaaaccaaagggtgtcctaacattcgaaaacggagatgtcaatcttgtggctactcaggtacgtctgaagagggagcatctcaacgttgcaaagtttgagcctgaacatggac

SEQ ID NO: 128346 - DNA, 764 bp, Arabidopsis thaliana
  unsure (1)..(764): unsure at all n locations
tcttaggnnaaagtggncnccccggtgncccttnaactggggccccgggttcaggattcngccgaacccttgncgggattgccgttactcnggtttggncccgttgtncncgttaggaacccccttaccnccgttncaagcgcgccgggaaactgtcaccgccgctcgtcgatccggcgccgatatcgagaccgtcagaaaattcaatgctggaaccaacaaggcggcatcaagcggcacatctctgaacacaaaaatgcttgatgatgacactgagaaccttactcatgaacgtgtgcctactgagctaaagaaagccattatgcaagccaggacagacaagaagctaacccagtcccaacttgctcaaatcatcaatgagaagccacaagtgattcaagagtatgagtctggcaaagctatacccaaccagcaaatcctttctaagctggagagagcgcttggagctaagcttcgtggaaagaagtgagccaagttctactgatgtagcaagtaacaagaatcaatgctttcgtctaatgccgtaactttgccaagaagaatattttctgattgtaagaaagcaaaaccgtttgaatgtttgtttcgttgatggaatctctatctcataaactcatatcaatataataacttgggtcttttcctcaaaaaaccaaaacaaaaaaaaaagggggccccctttggccggtttggccgggtgggggnnncttttgggccaattntcnggngngtttngcgggggc

SEQ ID NO: 128347 - DNA, 870 bp, Arabidopsis thaliana
  unsure (1)..(870): unsure at all n locations
taggacaactatagaagagttatgacgtcgcatgcacgcgtacgtaagctcggaattcggctcgagcagagaaagaaagaagccctagattttgtcaaaaggcggttgcagaacaaaaaaccatggccggaattggaccgataactcaggattgggagccggtggtgatccgtaagaaacccgctaacgccgctgccaagcgcgacgagaaaactgtcaacgccgctcgtcgatccggcgccgatatcgagaccgtcagaaaattcaatgctggaaccaacaaggcggcatcaagcggcacatctctgaacacaaaaatgcttgatgatgacactgagaaccttactcatgaacgtgtgcctactgagctaaagaaagccattatgcaagccaggacagacaagaagctaacccagtcccaacttgctcaaatcatcaatgagaagccacaagtgattcaagagtatgagtctggcaaagctatacccaaccagcaaatcctttctaagctggagagagcgcttggagctaagcttcgtggaaagaagtgacccaagttctcctgatgtagcaagtaacaagaatcaatgctatcgtttaatgccgtaacttttccaagaacaatattttctgattgtaagaaagcaaacccgtttgaatgtttgtttcgttgaaggaatctccatctcataaactcagagcaatataataacgagggtcttttcctccacagaaacaatgaaaaaaaaaaaaaaaaaaaaggnnnnnnnnnnnnnnnnnnnnnnnnnnnnnnnnnnnnnnnnnnnnnnnnnnnnnnnnnnnnnnnnnnnnnnnnnnnnnnnnnnnnnnnnnnnnnnnnnnnnnnntcat

SEQ ID NO: 128348 - DNA, 598 bp, Arabidopsis thaliana
  unsure (1)..(598): unsure at all n locations
nnnnnnnnnnnnnnnnnnnnnnnnnnnnnnnnnnnnnnnnnnnnnnnnnnnnnnnnnnnnnnnnnnnnnccacgcgtccgatcgtcatcaataccgcctccccaggctacttccaacaccagcaccaatgccaatgcaggctcgagtgtttctgctacctcatctgaaaacagtgctgttaataatagccagaggaaaccttttagacggaataacaacacatcatcttccagtaccagtagtaacgtctccaatgctgcgcctttaaacaccagagatcagaatcacagccaaaggggtggtggctcttttggttcagggaatttccgtaattctcagaggaatcgcaacagcagctcttaccctcgtggggaaggtcttcaccatggaaacaggcgcaattatgagcatggcaaccaaagcggcttttctcaccgtaactatagtgggagagacatgcacttgcaaccgcagaggggtgctgggatgattagaccccattatctacccagattatgcacagcatgtctttttgccacatccatcttccagatccgatgggtttagntggacccttccccttcaaccatgtattttc

SEQ ID NO: 128349 - DNA, 555 bp, Arabidopsis thaliana
  unsure (1)..(555): unsure at all n locations
tttcggtggtcgagagctagctagaagcaattctaatatgcgtgattatggtgttagtgaaggcaacattctccacttggttcttaagctctctgatcttcaggttcttgatgttaagactacctgtgggaaacactgcaggtttcatgtcgagagagggagaaacattgggtatgtgaagaagcagatttcgaaaaagcgtggagactttgttgatcctgatgaacaggagattctttacgaaggtgagaagttggaagaccagagtcttattaatgacatttgtagaaacgatgactcggttttgcatctgcttgtgcggagatctgctaaagttcgagttaagccggtggagaagaactttgagttgtctattgttgcccacaagcaaaagattaagaagggtccgtgaagctaagagcattgtgccacccaaaaaagcttttttttggagccggnaggttttaaacnccaaggctaaaggancccntnggngggtaaaaganatgatncaggcntnttcctgatnggcttaaaagggnatnnccggcagta

SEQ ID NO: 128350 - DNA, 522 bp, Arabidopsis thaliana
ctcacttaggggaagcactacgcctgcaggtaccggtccggaattcccgggtcgacccacgcgtccgtgcagttacttgtttcagttcccgatgatcaattcttagtttttttggcttgttttcttcgtctctctttcatcaggcctttggagttttgtgttaccattttcgctcgcgtcattactggtgttagggttttcttcaaaagcttcttaatccggcgaaattgctcttttctctccctcattgtcgacagagataaatggcttcaaagattattgctggcaagccggatgataccgagtatgaaatcattgaaggtgagtctgagagcgctttagcagcggggacaagcccttggatgaattcatcaacgttgaagcttcgacatcgaattggaagaggtcccttcggtgatgtttggctggctactcatcatcagtcaactgaggactatgatggagcttcatgaaggggccatcaaaatgccttatcccatcaaggaagatcaaagaggggtt

SEQ ID NO: 128351 - DNA, 747 bp, Arabidopsis thaliana
  unsure (1)..(747): unsure at all n locations
cgcctgcaggtaccggtccggaattcccgggtcgacccacgcgtccagacagacgacatcgaaccttctatcttcaaggctatgcttagcttcatttacaccgatgtacttcctaatgtgcatgaaattaccgggtcaacttctgccagttcgtttacaaacatgatacaacatctcttggcagctgctgacctccatgaccgggcaaggttaaagatattatgtgaaggtttgctatgcgaaaaacttgatgttgataatgtggcaacaacacttgcgttggctgaacagcaccaatttttacagctcaaagcgttctgcttagaatttggtgcatctccagcaaacttgggagctgtaatgaagtcccaagggttcaagcacttgaaacagagctgtcccactttgttatctgagttgctgaacactgttgcagcagcagataagagctcgacgagtggacattcaaacaagaaaagaagtgcgagcagtgtattagggtgtgacactacaaatgtgaggcaattgaggaggagaacacgaaaagaagtgcgagcagtgtcttaggatcattacataccgtatgcaaaattctagctntatgccttgtgccccacanagatagaattcccagtcatcccggacttttttccatgagaataaagctgacttaccactgtggcactttcattgcaaaagctccccaaacgtagagccgataaccggcacgttaagacagcttcgcgc

SEQ ID NO: 128352 - DNA, 357 bp, Arabidopsis thaliana
tcgcccacttttccggggagattgttaagctgcctgtaaactatgacaaggctcttgaaatgattgacaaacacttgttgtactggcccaagttgttgcagcataaggttaaacaaagactgactaaaatgactcagatgcgtattcgtatgaggaaacttgctctgaaaacaagggaggtagtagtcactacgcctaggaggcaaataaagagggggtcgagaagagaggaaaaggctataaaagcacctcagttggataaggctattgaaaccgagttgatggaacgtttgaagaaaggcatttaccctactgaaatatacaatttatctgacagtgtgtttaacaaactgcttg

SEQ ID NO: 128353 - DNA, 492 bp, Arabidopsis thaliana
gcctgcaggtaccggtccggaattcccggtttgacccacgcgtgcgagcgcgcgtccgatttatttgtgctgaggtcatgaaattcgaggatctcaaggaacttggcaatgaacctgcagtcaaggccgcaggaaaatacagacaggagggtaaaacatatgttgttcaggatggagatatcattttcttcaagttcaatgtttccggtggtgggaagaaatgagatccatccgtctgtccacctatccgcggtgtcctctctggatcttgaagctctatccatttccgagaaaggaaccaagctgtattttccgtttttgagtggctttaccaaacaagtatttgtaactctttacattttgcagttagctaagacatgtctttgcctttagacagagcattaagcctgctgtatcgtttagaactctttcaataagtttttctctactatttggcaattataacaattgtgtggggggtaaaaaaaaaaa

SEQ ID NO: 128354 - DNA, 623 bp, Arabidopsis thaliana
  unsure (1)..(623): unsure at all n locations
cggnnnnnnnnnnnnnnnnnnnnnnnnnnnnnnnnnnnnnnnnnnnnnnnnnnnnnnnnnnnnnnnnnnnnnnccacgcgtgcgcagacggtggcaagacatcaagaacccaggaagtgtgaaccaagacccttaggtaagctgtattgccccacgcgtccgcccacgcgtccgcaacatttttttttttcttctccattgccaccatcaagaagtaacaatggctgaagctttcacaagtttcaccttcacaaatcttcatattccttcttcctacaatcactcgccgaagcagaattcaggaccgaatcatggatattggctatctaagaatgttaatgagaagagggaaaggaatttgatgagaggaagcttatgtgtaagaaaggcattgccacatgatttgccattaatggctgtgatggttcaacaaatagaaggaatgcgtgatatcattacagagaaacacgtgtggcatctaagtgataaagctatcaagaatgtttatatgttctacatcatgttcacttgttggggatgtttgtacttcggttcagcaaaagatccattctacgactcanaggagtaccnnngagatggtggggatggaactngatattggg

SEQ ID NO: 128355 - DNA, 508 bp, Arabidopsis thaliana
accacgcgtccgattatcaccggagccgcttcaacatttcccatcgtcgctcgagttttgaacgctatgaatcgccgtatgtatgctgctactactctatcatctgccaaatcaatctctgcagaatccctaaatcttcgttccgattccaattcagaggcagcgcatggtgcttctgagtctgagactcgagtctctttaaggaagaagaggataaagcaggatgatttggagcctgtaaagaaatgttccgccagagaaaccaaggcccgcaaggacatgtgtggattacctgatatagaagactctccttataagaagactaatggaactgcttcatctaggacgagaaaactaaactcatacataaaatcaacagaagctagcccttctgcatcgtcgatcaaaacagcaggaaaggcgattttatgtgctcataggaacacttctttcaagtcagactaaagagcacataactggtgcggcagtagaacgacttcatcaaaat

SEQ ID NO: 128356 - DNA, 993 bp, Arabidopsis thaliana
  unsure (1)..(993): unsure at all n locations
tgctattatctcaagtgagtacatactggaaaaacaatgtacaaatgacggcggtggcaattgataggatgatgggttatagactagtatctaatcaggcaatcctcgcgtccgcccacgcgtccgaaaatgttgatcagtttcatgtgtctgatcagccatgggagatacttggcaatgctcttaacaagacttataaccgtatctctgatttgaggaaagatatatcaaacattacgaaaaatgttttggttgctgagaaagcttcagccaatgcacgagtagagttggaggctgctgagagcaaactttccctagtggaaggtgaacccgttcttggtgagaatccagcgaagatgaagcgtttaaaatcaacagtggagaagacaggggaagcggagttatctcttcgggagtccctagaggcaaaagaggctcttcttaacagagctctctctgagaccgaggttttactgctcttgctgttccaaagtttcttaggtgtactgaaggaacggctcccagatccaactaaagtgagatcagtgcaggatctaaaatctataggtgctgaagatgacaagccatctccgatggacgtggacagcgagaatggaaacccaaagaagagttgcgaagtcggtgagagagaacagtggtgcttatcaacacttggctatctcccggcatttccaaggcaatatgcgagcgagatatggcctcacatggagaagttggagtcaagagtgttctcgggtgaagatgtgcatcctctctttctccaagccatattttttgcacttcaattcccattacattaatcttcctctttcaatctcaatcaaacctgtctcttttgttttttgttatgagattctgattctgacatcaagtttttaggaatttgtaaagggtcaaaaaacaagagttttacctttaaaccccccaaaaaaaaaaaaatntttntgaataatggaggaagaagaaggacga

SEQ ID NO: 128357 - DNA, 434 bp, Arabidopsis thaliana
aaccgtggaccgtggttgtctcaacagggatgaacttggaggttccatctctggttggattcaggtgttttgagctaatcttcttctgggtttacttctctaccatactttctaccgatttgaagatttgtcttctgtacctttgatgatgattctcagttttgcagcaatgactcagtttttcgccttctagtcattaaactactttcccacaatgagatacttagtgtttttgtaggttctttcacacttgttagcaagggtatatgtatgttgccgttctcagaatttggtaggtatgaatcacagatgtcattgtttattattgataacataagtgattcttgctggtagtgtgacctcttgagggcaggctcatagaagatgaagagcctcttggttttgatgataatgctccctacttctgagttctg

SEQ ID NO: 128358 - DNA, 497 bp, Arabidopsis thaliana
gtccttccattaaaaacggaataaacagaatgaacggtggtgatgtcaccgtcgccggatccgacgatctgaaatctccgctcttaccggtcgtccataatgatgaaccattcgaacgacaaacggtgggacaacaacttcggacaatattcacgcccaaaaactgttacatcgctcttggtcctcttctttgcgccgtcgtgtgtctatgcgtagatctcgggggagatgaaacgacgacggcgaggaacatgctcggtgttttggtgtggatgttcgcgtggtggttgacggaggccgttccgatgccgatcacctccatgacgccgctcttcctcttccctctctttggtatatcggctgcggatgacgtagcaaattcttacatggatgacgtcatctcccttgtactcggcagcttcatacttgctctcgccgtcgaacactacaacatccatcgccggcttgcccttaacgttagtctttcctttatctct

SEQ ID NO: 128359 - DNA, 543 bp, Arabidopsis thaliana
  unsure (1)..(543): unsure at all n locations
aagntcaacgaggtaggaaactnttttggaagtgtgaggngcttattgacaagattaaaggtggtttggctgaagcaactnctgccaaattnatattaatgttttnncaagagatcgaatcagactctgcgaagagctttgaaaatggagaaggtggacgtttgatggcacctcaggatgcatgcaaccgaattgctgaagttgtacaagagactttgaggaaaatggagatagtggctgaggagaagatgagaatgttcaagaaggcacgcatggctcttgagacatgcgatagagagctcgaagacaaagccaaggaagtttcagaacctgaaagcagagaggcaagaagcaagaaacttcagatagatgagcctagagaggatcgtgaaggctgaagcaagccggaggcagacatgttccagctttaaagcaattgaggcaaagcgggaggctgattaggttgcagagggttgtccttccgaaattggatgagtcttaggaggattcggagaaccttnttaaccanaggcttgttagccc

SEQ ID NO: 128360 - DNA, 659 bp, Arabidopsis thaliana
  unsure (1)..(659): unsure at all n locations
ggcagaagaagaaacttcagatagatgagctagagagaatcgtgaggctgaagcaagcggaggcagacatgttccagcttaaagcaaatgaagcaaaccgggaggctgataggttccagaggattgtcctaccgaaaatggataagtctgaggaggaatacgcaagtaactatctgaaacagaggctgagtgaggccgaggcagagaagcagtatctgtttgagaagattaagctgcaggaaaactcaagggtggcatcacaaagcagtggtgggggaggagacccgtcacaggtgatgatgtactcaaagatccgcgatctgcttcaaggatacaatctctctcccaaggttgatcctcaattaaacgagcgtaatcctttcagatccaatccctaatgcttcttcctcccttatatatatatgtagttttcatatcctaaatttcatcactgtgttttgtaaaacgagtgtttgttgccgtgtaggatctatctatattactgatgttttgtaatttgtgtgttctcactttgttgatatgacgttgtttatctccgttatggtttcttggttggttgnnnnnnnnnnnnnnnnnnnnnnnnnnnnnnnnnnnnnnnnnnnnnnnnnnnnnnnnnnnnnnnnnnnnnnnnnnnnnng

SEQ ID NO: 128361 - DNA, 380 bp, Arabidopsis thaliana
aaaaacaatgaagaaaacaccgtaacgaatcataaaatttctcaaaatccaaactctgttttttgttcttcctcttccagatttggtttctttttttgaaaaactctctagcttcagtttttttttttctctctctctctctctctaggaatgtttttgttcgtggatactggaatcatgagaataagattttgaaggagaaagcaagatccatgttctttgtcggagaatttagggctaatatgtggatttgagcttctttgattcccaatttgtgaaagttttgaaatttttgggaaagagagaatgtttaagcagtttctgagtaaacttccgaggaagtcttcaaaatctgattcaagagagctgaatcgttcgag

SEQ ID NO: 128362 - DNA, 739 bp, Arabidopsis thaliana
  unsure (1)..(739): unsure at all n locations
gggaaggtgggacgcctggcgggacccggcccgaatttccggggtcgacccaggcgtccggggggaggggttattcttccattcaatagccaggggaccagattttgggcccccattatcagatttagcaaagaggggactaaccttgaggacccccctgagagcgagtggaagagatggaatgggagatcttccggagattggtggctaaacggggcgttttttactccgtctgggggggcagcctcgtctagctatgcaaaggcttcgagccttggggctaaaccgtcttctctagttggaccattgacgtctacttctggtgcactgaattgccgtaaaggttcccgttgctgattgtggcttagtggtcacacttaagtttttcccccattattatataggaaaaggcaattaaagccaccaattaagggggattaagtagtgtagtaagactttcttaatcccttgattcactcttttttttttgtttgtttactcgggtaaaattgaaggagaatcccccctctggctagctgctctctagggcccttcttaaggattctctgttttaaggaatctttaaattaggttaaagtgtgggaccaagtgcagatgtgttgatcttgatattaatataaatatgattttgtgtcttaagaaaaaaaaaaagaaaaagaaaaacccatagggcgaacgctctagaggatccaagcttacgtacgcgtgcagnnnnnnn

SEQ ID NO: 128363 - DNA, 642 bp, Arabidopsis thaliana
agctgctacgcctgcaggtaccggtccggaattcccgggtctacccacgcgtccgagaaaacgtaatccaagccaatggaggagacgacatggggacagagaatacaagcggtgacacatatcctcacaaacccaacaacgaaaccatcactttactctcaattcttcatcggagccataattccaaactacgtatcgtgggattaccctccggtctattcgccgacgcatctccgtcaatggtgggtttctcagttcttcaaaagggtatcgagatttgggctgcctgatacatcgtggaggtcgaatagcccgtattatcagccaccggcggcggttatggctgtcggagttgaggaagggaaatgggggaaagaggagaggagagagtatgcgaggaacaggctgaggaggaagagattggtgaatgaagcgcatccatatattcctctctttagttccgaatttgcttttgtttactctcttgttatgggatcctcttcctgagtaaatttatggtggtgaatctgttacagattatctgtaagttattgaatttgttgtaaacaagatctgtgtgttttgtaaaaaaacaaaaccaagggcgaacgctctagaggatccaagcttacgtacgcgtgc

SEQ ID NO: 128364 - DNA, 425 bp, Arabidopsis thaliana
  unsure (1)..(425): unsure at all n locations
nnnnnnnnnnnnnnnnnnnnnnnnnnnnnnnnnnnnnnnnnnnnnnnnnnnnnnnnnnnnnnnnnnnnnccacgcgtccggttcctctcttctctctcgatttcgaagtttccagcaatttagggttctttctcgattggagaattcgtatgttgttatcatgttctcgtcattgttgtgctttctttgttaaattctagatttggaatcgaaattctagactaatgtttaggaaacggaacttagttctagaatcatttcgtcgattcgatagcggtaacgtagaaaccctaatttcatgggtcttgtgtagtcgcacctcaaagccctctctgttctgtactagtgttaaacctgctagattaaactggggaagtttcttctcaagtaattctcaagaagaagctagaaacagctcttaaaga

SEQ ID NO: 128365 - DNA, 948 bp, Arabidopsis thaliana
  unsure (1)..(948): unsure at all n locations
taatacgactcatatagggaaagctggtacgcctgcaggtaccggtccggaattcccgtgtcgacccacgcgtncgtacggctgcgagaagacgacagaagggtacggctgcgagaagacgacagaagggtacggctgcgagaagacgaccagaagggtactggcttgcgagaagacgacagaagggtacggctgcgagaagacgacagaagggtacggctgcgagaagacgacagaagggtacggcgcgagaagacgacagaaggggacgcacactcgcacatgggaacaaaagaatctgtcttcttctctgttctattatttatacttacttggtaaaatatctttcttgtgcagaacagaagaaaaagaaacacccatggctctgttttctagcgtctcagtttccgcgtttctcttgatcgttgtatcggttcaatggactctggtttgcagtgaatccacaatcttagcttctcctgctgttttaccgtatatcaatgcaccagatatgtcttcatttttcccttctccgaccaaagactggccaatagagacagcgacatctcctgttccggaaccagaagcgcctggtccaagctcaggccagcttaatgggaagatttcaggcagatcaatgcggctccatcctgatatttccttggttctagccattgttgggatctgtacctttctatgttttaatgaaccaatacttgttaggtttctacactattgatgttgtaatcttttgtggttcgcttttagagcctcattgttccttcttggagtctgttttactcttcatcacatgaacttcaacatatactacgttgttactgttaaaaaaaaaaaaaaaagaaatnaccnnnannnnnnnnnnnnnnnnnnnnnnnnnnnnnnnnnnnnnnnnnnnnnnnnnnnnnnnnnnnnnnnnnnnnnnnnnnn

SEQ ID NO: 128366 - DNA, 525 bp, Arabidopsis thaliana
  unsure (1)..(525): unsure at all n locations
ggnatttttgacgcattgtggatggaactcgttattagaaggggtggcagcgggcctgccaatggtgacatggcccgtgggagccgagcagttctacaacgagaaattggtgacacaagtgttgaaaacaggagtgagtgtgggagtgaagaagatgatgcaagtagttggagacttcattagcagagagaaagtggagggagcggtgagggaagtgatggttggagaagagaggaggaaacgggccaaggagttagcagaaatggcgaaaaatgcggtgaaagaaggaggatcttcagatctagaggtagataggttgatggaagagcttacgttagttaaactgcaaaaagagaaggtataaagaagttgaatgtattgcaagttatggaacaataatgtttttgtaattctgatggtttgagttacaacagtaaaagattgtatttgttcattcaaatttacaatggatgagggcggccgctctagaggatccaagcttacgtacgggtgcatgcgacgtca

SEQ ID NO: 128367 - DNA, 519 bp, Arabidopsis thaliana
  unsure (1)..(519): unsure at all n locations
gcaagtgattgagaaatacactaagagtactaggtttgcgctcattggaaaccatgtcaataagatcatcccagctttgcagtcgagatgtactcgatttagatttgcccctcttgatggagttcatatgagtcaacgtcttaaacatgtaatagaagctgaaaggcttgttgtaagtgactgtggtttggcagctcttgtacggctgagcaatggggacatgagaaaagcattgaacattttgcaggttctgtaatatttccttttggttctgtcacataatctacaattgtaaatctaaaaaagataatacatttcaatcactatgaatggatctgtaaaaatttctaacggatttattggtgtggacagtcaacgcatatggcgtcaaaggaaattacagaggaagagtcaaagcaaattacagaggaagacgtttacctctgcaccgganacccattgcccaaggacattgagcagatatctcactggcttctgaataaaccatntgatgagtgc

SEQ ID NO: 128368 - DNA, 443 bp, Arabidopsis thaliana
cacgcgtccgagataaccgccgtgagttgagcatgggatggaactcaatactcgtgccatctgcagagagacgtataacagaagcggttgcagacgcacggtgttaccaagttttacgagcgaacgaggtcgagtttgagattgtgtcgacagagagaaccaacattgtggatatacggacacgggattgctcatgccgtcgttggcagatttacggattgccgtgtgctcacgcggctgcagcactgatctcgtgtggtcggaatgtgcatctgtttgcagaaccgtgtttcacagtgtccagctatcagcagacgtattcgcagatgattggagagattcctgatagaagcttgtggaaggatgaaggagaagaggctggaggaggagttgagagcttgaggatacgaccaccaaaaacgaggagaccaccaggtagaccg

SEQ ID NO: 128369 - DNA, 538 bp, Arabidopsis thaliana
gctgctccccctgcaggtcccggcccggaattcccgggtctacccacgcgtccgcccaggcgtccgtaatcagcaacaacaatggctgcttcgctcgtcaggagttgttgctctcgtgcttcgagagccatcaccaccgtccggtttatgagcaacgtaccggaggacacggtttacggaggaccgaaaccgcagaactcgaatcagagagtgactttgacgcaattgagacagaagcatcggaaaggtgagccgataactatggtcaccgcctacgattacccttctgccgttcacatcgatacagctggaatcgatgtttgtctcgtcggagattcagctgccatggttgtccatggctatgacaccactcttcctatctccttagaggagatgcttgttcactgtcgcgcccgtgctcgcggagccaaaagaccacttcttgtcggcgatttgccgtttggtacttatgaatctagcaccaatcacgcggttgatactgcagttagggtgttgaaggaaggaggaatggatgcta

SEQ ID NO: 128370 - DNA, 813 bp, Arabidopsis thaliana
  unsure (1)..(813): unsure at all n locations
ggctgacaatgacgagcagattgtnactcttgctgagcatctttcaactgactactgctacacatttccagtcaaaaagcctgcagcggtacctccagtaagagagcttaggaagctgctgagaatccaggctttacgttgccatgtcgtttatagtcagaatggcacccgaataaacgtcataccggtgctggcttctcgtatacaagctctgaggtatttgttcgtccggtggggaattgacatggcgaaaatggcggtatttgtgggggaatcaggtgatactgattacgaaggattgcttggtgggcttcacaagagcgttgttctaaagggagtgtcgtgcagtgcatgcttgcacgctaaccggagctatcctctcaccgacgtgatctcctttgagagcaacaacgtggttcacgcatcaccagattcggatgttcgtgatgccctgaagaaattagagcttctcaaggactgaaacctaaaataaaacgatcacatctccagtcatcaatgggttggtaccaaatgcgaactatctttttcatattgaccacatggtttggtttgttttattacttcgtcgtacataagctgccggaaatacctaactcttcatatggttgtctctttgacacctaccggattttacttcatttatgcaaagtattgtaataataaaaagaaaaagaggatattcccggtattttaattaacagaacaacattcatataaaaaaaaaaaaaaaaaaaaaagggcggccgctctagaggatccaagcttacggacgcgtgcatgcgaagtcatagc

SEQ ID NO: 128371 - DNA, 388 bp, Arabidopsis thaliana
cccacgcgtccgcttcgcttaaaaaaatatcgcttctctcgagaggggaaggaaagttcatttctttttgtccaattctttcaacttctcgttccaatcccctcaattctccgtttcaccgaacgcacttcgaacccttaattgctttttgcgggtcaagtttcgattcgagcgttttagggtttcgtatctgaatcggtcgacaagataaacccttttgtgggggtttcctctagatttcgaaaacagagggatagctttcgtttggatggaaattctctgaaactaaactacatagtgatatggagacacaaattcatcaacttgagcaggaagcatataccgctgttttaagggcttttaaagcgcagtctgatgcgatttcttg

SEQ ID NO: 128372 - DNA, 533 bp, Arabidopsis thaliana
gtccgaaaaagagctttagacagacgctcctccccttttgtaatttttttgatatcacgtgtgctctacgcgaatctatcaatatctaaatcctctctttctctgtctctctcctccttcttcttcttcttcctgtcgctgccttgtggttgagtgagcaaaaaactcaaaaccctccatggaaatgggagagagaatcaattcgagttgttgttagggggtttgcgatatttcaggcttctgtcggtgatctcgaccaaaaaaaataaacaaaggagctagtagggttctgttttctctatcactcggaaggaagctggtttatgtcaaaactttgttcttcggaaaatgcgaaaatcgttcaaggattcactcaaggctcttgaagctgatatccagttcgccaacactctggcgtcagagtacccagaggagtatgatggtggctacgctcagatgagattatcttacagcccggcggctcatctctttctcttccttcttcagtggactgattgtcatttcgctggcgc

SEQ ID NO: 128373 - DNA, 480 bp, Arabidopsis thaliana
  unsure (1)..(480): unsure at all n locations
atcaatccaactgaggaaaaaaaaagaacagtccaaattagctagagttgtctttattatcatgcggaggaaaaaagaatggcagatcatgacaagagaaggaaggtgatacagaggagaaggagatcagaaggtaaacatgagtacaagagccatggtgaagaagatgtggagaggcttcaagagaatgaacgatgttagagattctagttgctttacctacaagatctaggccttgtggcagcttttcctcctcaacacagccaaagctgcttagtgtttttacttttattacaagatgttgtaggtttgtggagcttttcttccccacacagcaaaagctgctgcttaagtgtttaaggaatccaaaagccttttcattattagatccccactgagtttatggttcctgtagaacctgcagatcaccagaatcctttagctggnaaccattttaagttatncggggtggttttcntt

SEQ ID NO: 128374 - DNA, 520 bp, Arabidopsis thaliana
aatacgactcactttagggaaagctgctacgcctgcaggtaccggtccggaattcccgggtcgccccccgcgtccgcgcgaaatagatacggtagacctttctcgttggctctggccaggtgatcaaaggacttgatgaaggaatcttgagtatgaaagctggtggcaaacgtagactctacatcccagggcctttggcgtttccaaagggtctagtttcagctccagggaggccgagagttgcgccaaacagcccggtgatatttgacgtgagcttagagttcataccaggtctcgattcagaggaagagtgaaactctgttttttcaagtgcaaattgtaatcttccatacccacatttacaagattctatgtatgatatttatctcattgtactcattcattgaagaacatccccttgattaaaaaaaaaaaaaaatcacgcaacccccaagggcggccgctctagaggatccaagcttacgtacgcgtgcatgccacgttatagctcttttatagt

SEQ ID NO: 128375 - DNA, 804 bp, Arabidopsis thaliana
  unsure (1)..(804): unsure at all n locations
cgacccacgcgnccgctccttctaccactaggttcaccacccacgcgtccgctaaccaccaagaatccaaattcagcagagatatatagctgcaggaggcatagcttcagaaacaagagagcaaagctgtaaaatcagtaatctctctagcccgagagaagcaatgcttttggtactcggcgtctcaggaggattatcaatgagctcacttgccggcgtatgcagctggtttacctccagaggataaaccaagactctgggaagcagaatgcgagaaagagcttgaaaatgttccaatggtaactacagagtcagggcttcagtataaggatattaaagttggtagaggcccgagtccaccggttggttttcaggttgctgctaattatgtggctatggttccatcagggcaaatattcgacagttctctggagaaaggtctaccgtatctatttcgcgttggctctggccaggtgatcaaaggacttgatgaaggaatcttgagtatgaaagctggtggcaaacgtagactctacatcccagggcctttggcgtttccaaagggtctagtttcagctccagggaggccgagagttgcgccaaacagcccggtgatatttgacgtgagcttagaagttcataccaggtctcgattcagaggaagagtgaaactctgttttttcaagtgcaaattggaatcttccatacaccattttacaagattctatgtatgatatttatctcattgtactcattcattgaagaacatcacattgattaaaaacgtcagtatttttcaattct

SEQ ID NO: 128376 - DNA, 367 bp, Arabidopsis thaliana
ggcagtgcgtaccaccagttgagtccggtggaagctcgaagttatagatgggtccgagtgaaccatatggtctacgattattgcactgacaaatctcgttttcctgttccacctccagaatgctcggctggaatctgatccaaacattattgtcttaaaagcaaaacaagtgcgaagtggttccataagcaacgttgcaatgtatgtgaagtgattaatgagtcttgtggtatgtggtgaattgctcataatcgatctgattgtggtcaaatgttcatatatatatgtatatctttgaattttactttgttttcatgatgtcttatgttttgttgatctattgaagagaaccatgtttgtttgttgg

SEQ ID NO: 128377 - DNA, 482 bp, Arabidopsis thaliana
ctttacctgtctctgcccttaacctcacacagatatcgagtctcggcgattgaagtgaactctcatccttataatttcatccgaaagattttggataaagttttgatttttttggttcgcaatgacgctgctcgaagctatctccaacgccgtagcgaatcaggacaaggtcgactcgcaatccgattatccaatccctcttagccacgatggtatctttgcgaatctgaaaccaaagctagaaaaccctaatcttggtacccttgtcaatccaatttccgggtggggaatctctgaaagtgatgttgaagtcatcgatttgggtaaaaagttttcatctaagctgaaaaggaagcttaaggatactaacgggtttgtcaaagatgagtttgtcaagatgttaaagcagcttcttgagaaaattggtgagaaagtcgggatgtcagaggctgagtctgaaacaggtttgggagatcaagctg

SEQ ID NO: 128378 - DNA, 489 bp, Arabidopsis thaliana
ccccctgcaggtcccggtccggatttcccgggttgacccacgcgtccggcacactgttcgattgtcgccggcgactcaacttcacggcgctatctctagcaatctgtcaccacccaatcgaaaacctaataattccatcgtccgatacggatgcggatcttcgaagcgtttccgtatcgtaacggtcttggcgtcactccgggaaaacgatgcaaacggaagggataactccgtgagagctatggaagtgaagaagatctttgaagactcgcctctgcttcctaagccgttatcatcgaaccagctcacggaatctgtctctaatggctcccgcgttcgtgttgcgtatcagggagtccgaggtgcatacagcgaatcagctgctgagaaggcttatccaaactgtgaagctgttccatgccaagagtttgacactgcttttgaggcggttgaaccgtggcttgttgacagagcttgtttaccgattga

SEQ ID NO: 128379 - DNA, 618 bp, Arabidopsis thaliana
  unsure (1)..(618): unsure at all n locations
tttcgtccgcggacttttgggcggacgcgtgggcggacgcgtggggggcaattttacctctaagcttcgaagctccgacttcttcggtctgtttcttattaaacacacaaacaagaaaacgcaaaactaatcctctctcgaattagggtttcgtcaagatcctggagttgatgtattgagagaagccattgagataagagatgagctctacgcaggctaatctatgcagaccatccttgttctgtgcaaggacaacgcaaacaagacatgtctctagtgcaccttttatgtcgtcattacgctttgattatcgaccactccccaaattagctattcgggcatctgcatcatcatcgatgtcttctcagttttcgcctctacagaatcatcgctgccggaatcagaggcaaggtcctgttgtgtgtttacttggtgggaaggataagtctaacgggtagtaatgagctatcatcaacatggggaagctatttnngnaagcaaattggggnaggaatccagttttaaggnnattttttccgggggcngggttncanaaggaaaggccccttggggggntttccnccccgggggcccngnnntgaanggggnttacccggg

SEQ ID NO: 128380 - DNA, 520 bp, Arabidopsis thaliana
  unsure (1)..(520): unsure at all n locations
cccacgcgtccgaaagagagaaaaaagacgatgagagctctaacatggacggcaatgtcgccgccggtgatgtcacggacggcgacttctacggttaacttacgacgtatcagcctacggagagatcgcgtctgtgttagagccacggcttcgtctagcgccacggtttccggcggaggagtagtagaggcggtagaattggcagagataggagaaagaagcaagaaatggaagtggaaaggagaatattctgttaactactttgtcaaagattcgccggaggaagttactccggcgagtcaaactgttcttttggttcatggctttggtgcttctattcctcactggcgaaggaacataaatgctttgtctaaaaaccatacagtgtatgcaattgatcttctcgggtttggtgcttcggataagccccctggttttagctataccatggggtcatgggctgagttgatacctcaacttctttggggaannngttnanaacccgctttttttnnttgna

SEQ ID NO: 128381 - DNA, 457 bp, Arabidopsis thaliana
agctactacgcctgcaggtaccggtccggaattcccgggtctacccacgcgtgcgctcttaataaagaaaatgatgaaaatgagtatcggaacaccaccttccggcgacggtgaaatggagctccgacctggaggaatggttgtacagaaaaggacggatcatagctcaagcgtgccacgtggcattcgggttcgggtcaaattcgggtcggtccatcacgagatcagtatcaactctcaatctactttcggtaaacgacacaaaacattccgagttatacagtatttcctttatactattagtatgctctggttttggaatttgattggtggtggtggtggatttaacaaccggggaattaaagaagatattggctggtgcgaccggagttcatcatccagacctgccgattatattccaagaccaagaaagagactctaagatggttcttgatct

SEQ ID NO: 128382 - DNA, 584 bp, Arabidopsis thaliana
  unsure (1)..(584): unsure at all n locations
tacgcgcaannnnnnnnnnnnnnnnnnnnnnnnnnnnnnnnnnnnnnnnnnnnnnnnnnnnnnnnnnnnnnnnnnnnnccacgcgtccgcttttctcacaattccgattttctcaaaaaccaaaatcacaatcgaagaaatcttttgaaagcaaaatggaagagatttcgacggatccggttgttccagcggtgaaacctgacccgagaacatcttcagttggtgaaggtgctaatcgtcatgaaaatgacgacggaggaagcggcggttctgagattggagcaccggatctggataaagacttgctttgtccgatttgtatgcagattattaaagatgctttcctcacggcttgtggtcatagtttctgctatatgtgtatcatcacacatcttaggaacaagagtgattgtccctgttgtagccaacacctcaccaataatcagctttaccctaatttcttgctcgataagctattgaagaaaacttcagctcggcatgtgtcaaaaactgcatcggccttggatcagtttcgggaacactacaaaggggtgggatgtgtcaattaagagggtgataatctt

SEQ ID NO: 128383 - DNA, 637 bp, Arabidopsis thaliana
cgcagtaccggtccggaattcccgggtcgacccacgcgtccgtgctattttatcctatgagattgcagtggtggatctgagaggggctgttactcgtggtgttggggctcaaggaattgaactcagtgaaacagtgcgtaggatggaagagtctattccccaagttgttgttcttcttgaagctgcagttgaaaggtgtattggctttactggagggtcagaggcagacgagctgatacttgcattagatgacataatgttgcagtatatctctatgcttcaagaaacactcaaatctttgagagttgtgtgtggagtggatggtacaggtgatggagttggctcaaagaaagatgcaaatgcagagaaaagggagagctctcgcaagatggatttgacttcaaatgaagaatggtccattgttcaaggagcacttcaaattcttactgtagctgattgtctcacgagcaggtcttctgtctttgaagcctctttgagagcaactctagctagactaaactccagcttgtctatttcatttattggcccagatttggatcacaacctatcacatttgaaaagtgaacaaactgctggagaattgtctatggctggacaaactttcatggatgtggca

SEQ ID NO: 128384 - DNA, 408 bp, Arabidopsis thaliana
cccacgcgtccggtggagatatgatgacattacttatgaggaatgacacacttactgaagatgaggcaagattttatgttggggaaactgtcttagctatcgagtccatgtcataagcacaattagatccacagagatatcaagcctgataatctgctactcgacagaagcggtcacatgaagttatccgattttggattatgtcagccattagattgtagtattctccaggaaaaagatttcgtagttgcacacaaccttagtggggctctacaaagtgatggccgccctgtggcaccgagacgtacccgctctcaaatggaacaattacaaaactggcagagaaatagaacgatgcttgcttattctacagttggaactcctgactatattgctccagaagttttg

SEQ ID NO: 128385 - DNA, 533 bp, Arabidopsis thaliana
tacgactcactctatggaaagctggtacgcctgcaagtaccggtccggaattcccgggtcgacccacgcgttcgcccacgcgttcgcgtttcaccagtggtggttggactttgatttttcctttgtagcatacttacaacagatgacatcggtggtctcaatgttggagatgggtttgtacagagtaaagcgatgttcaacatcctcattgcttctttctttcgaaaaccttgtaccgagatctggatccccgagttctagaagactcccttggtcttgcaagacatatgcccaagtcaagaagggtaataaaactccttcttttggtctgtaatttagtgttgcttctctccgcttacaatctcttaaccagactaccaccgaagctataaacatctggctttgtctggtaaagtaccttttattggatacctcgggagccctggtacccttttgcttaaatgaaattataaagtcggaaagtggtaaccccttcctcaaataatgctctactccatcacttcctgtactca

SEQ ID NO: 128386 - DNA, 551 bp, Arabidopsis thaliana
cggacgcgtgggcggacgcgtgggcggacgcgtgggaaacgataatgggaagcgcaccagctcagattccgactagcttcggccatgagcttagggcttgtcttcgttgccgactcgtcaagacctatgaccagtttagagacgctggttgcgagaattgtcctttcttcaagatggaagaggatcatgagcgtatcgtggaggtcactacccctaatttcaatggtataatctctgtgatggatccaagtagaagctgggcggctaggtggttaagaatcgggaagtttgctcctggttgctacacacttgctgtctcagagccactccctgaggaaatgcagcacttatgccaagaggagcgtgtacaatatgttctgccgaaacgcatgtgaagaaatctatcacgatgaaggctagtagggaagaccaagtattccactttttcattaaaagcttcttgaaacattattaggtgctttatttgaatcttcaatcttgtggaatggtcgatgttaatgaagtcagagactccttaacacttttctatg

SEQ ID NO: 128387 - DNA, 427 bp, Arabidopsis thaliana
attattagttcaaaataacaaaaacagaagaaaattaaaatctaaacacctgaaaaaaaaaatgaaatatctgtcagtgtttctatttttttatggcctatgcataattggtaatgtatatggacgagcaaacaagctccatatctggaacgatcttgatcccaatcagaagcactcagacctctttgtgcagtgtaaatctggaaaggccgacatgggaaaacattatgtcaagtatggaaaaatatatcaatttgatattagggataatttttggaagacgacacttttttggtgtacctttagacatgggcctgattataggactggccaacaatttgatgtgtatgaatataaaccgggtgtggctcaaggaggcacatatgaatggacagctagagaagatggaatatattttacgttaaat

SEQ ID NO: 128388 - DNA, 370 bp, Arabidopsis thaliana
gcttcttttctcccttctcttcccgccgtgaatctggtgtctgtgtctgcatctccttccgacgaaaacagatacactcgagtgaagaaagtatgaaatttaactttaacgagacagaggatgcacccagattcacgacgatctccgacgcccaaagagccggttaggtgggttcctctccagagccacccggttttcgcttctcttccttcctcccaagatgaacccgccgtgtcgcagctgtttccgagaaatttcatggcttgggacggagactcgcgcgtatactactgggattcgagacgatatctccttcaccgattatctctgcgcttgggtgaacctgaaccatcctccgtcctcgccgcag

SEQ ID NO: 128389 - DNA, 832 bp, Arabidopsis thaliana
  unsure (1)..(832): unsure at all n locations
gaccgtgacatcagtgagaaagttgctcttggaatggcatctactggaggaaaaggtggtggtgaagttatgtatgatcaacgtctgtttaacccagacaaaggaatggactctggtttcgctgctgatgaccaatacaacttatacggcaaaggcttgttcactgcacaaccaactctttcgacttttgtacaagccaaagaaggataccgatgaaggaatgtatgggaacgctggtgagcagctcgataagatcaagaatactgagaggtttaagcctgacaaagctttcacaggggcttcagagagggtgggtagtaagagagaccgacctgttgagtttgagaaggaagaggaacaagatcctttcggtcttgagaagtgggtttctgatttaaagaagggtaagaaacctttggacaagatcgggtctggtggaactatgagagcaagtggcggtggtggtagctcttcaagggacgatgaccacggcggttctggtcgaaccaagatcaatttcgaacgcagtgaccggcgttaaaagtcaagacaaagaaaaagctcagtaactgatctttgatttcaatatataacttgttattttggatctgttaaaacagtttgctttggattatcagtatttatgttgttgtgagtctcttaaactactcgaatacaatctttcagcttcataatatcagatcttttgagcttaaaaaaaaaaacaaaaagaaaaaagnnnnnnnnnnnnnnnnnnnnnnnnnnnnnnnnnnnnnnnnnnnnnnnnnnnnnnnnnnnnnnnnnnnaacgaaagcatacaaccggccggggg

SEQ ID NO: 128390 - DNA, 649 bp, Arabidopsis thaliana
  unsure (1)..(649): unsure at all n locations
aagtcccatcactttcggcaagctttcnttcnaaccacttttcgcttttnccaccccaaggaggttncgatgaagaattttntggaacccctnatgaccancncgataagatcaaggattcctgagaggtttacccctgacaaagctttcacaggggcttcagagagggtgggtagtaagagagaccgacctgttgagtttgacaaggaaggaggaaccaagatcctttcggtcctgagaagtgggtttctgatttaaagaaagggtaagaaacctttggaccagatcgggtctggtggaactatgagagcaagtggcggtggtggtagctcttcaagggacgatgaccccggcgggtctggtccaaccaaggtccatttcgaaacgcagtggccggcggttaaagtccagacaaagaaaaagctcaggaactggtctttggtttccatatataacctggtattttggatctggtaaaaccagttggctttggattatccggatttatggtggtgtgagtctctttaacgtactcggaatcaatctttcaagtttcaaaaaaaaaaaaaaaaaaaaggcggcccgctctagaggatccaagcttacgtacgcgtgcatgcgacgtcataatctttctatagtgtcacct

SEQ ID NO: 128391 - DNA, 586 bp, Arabidopsis thaliana
cccacgcgtccggagaaatccaaaatgagaattcttttgttctttcttcatttgatttaatacctttcttcatctacttgtcaatatcactgactctttcacttttacgggtcccagggtcttcaaagagaggaacaaaaagaaaatcagatttcagtttttttttttcatttctaacataacattccttggtccgatttattctttttttcaagatcatgaagactaacagagaagaacaaatgataaaactgtttggaattcctctttctgataaacccagatggcaacaatttctcatctgttcttctggtttcttctttggttacctcgttaatggcatctgtgaggaatatgtgtacaaccggcttaaattcagttatggatggtatttcacgtttgcgcaaggattggtgtacattgccttgatttacatgtatggcttcaggacgaagcaaatggtgaatccatggaagacttacgtgaaactctcaggtgttcttatgggttctcatggcctcaccaaaggctccttggcttatctcaattattctgctcaaataatgttcataatcactaaggtttt

SEQ ID NO: 128392 - DNA, 443 bp, Arabidopsis thaliana
cccacgcgtccgctgaagagtttagactcaagtctgatgtcagtgttcatgtttgtgtatgtatattggttttgtcggaaaataattaaattggtgatataattcatatgtatgataattttaaagattgcaagcataagaagtcggattagagatgaggagagattattagggagcgatctatcgctagcaatgatgacgacgactgtcagatcggaaaagcagcaatcggacggtggaggaaatcgagtggtgggaatggcagcatcatcaggattctctcctcaaccttccccttaccgcattcctcgcaccttccacttctctcgtccctgattcatcatcatcatcatcaactatcattacaatcatcatctgagctagtgttaaccaagttatgctttaatgaatttgagttattctcgagctatttttgggctctg

SEQ ID NO: 128393 - DNA, 734 bp, Arabidopsis thaliana
ctctagggtaagttgggccgcctgcaggtcccggtccggaattcccgggtcgacccacgcgtccgcctctttaagagtcacttgactttaatatttctctttttgtttctttctccttttctctgttttttcttttcttttctctttgcgattcgctgagagcatgcctgaatgtcaagagaaagggagagatttgaagagatagggaagaagatcaaaagagaagcagatgcttggcctcatcaaatggctggaattagaagaccaatgtcgggtcctcccggaaccctcaataccattacgccttgtgctgcctgcaagcttttgcgccgtagatgtgctcaagaatgtcccttttcgccatatttctccccacacgagcctcataagttcgcttccgtccacaaagtctttggagctagtaacgtctccaagatgctaatggaagtacctgagagccagagagcagatgccgcgaatagccttgtgtatgaagcaaacgtgaggctaagagatccggtgtacggatgcatgggagccatctcagctctacaacaacaagtccaagctttaccagccgagctcacggccgtaagatccgagattcttaagtacaagcaacgagaagctgtcgccactttgatcgtaccttccaactcccaagtgccggatttcacaactccgggtgtttcgtgatgcacaccacacaagaccacactcacacaactacacgg

SEQ ID NO: 128394 - DNA, 588 bp, Arabidopsis thaliana
cccacgcgtccgaaaatggttcatgtgtcatcatctcatggagccaaagatggctctgaagaagcctatgattacagaggaaacccaccagataagtctaaaaccggtggatggttaggcgccggtttaattttagggagcgagctatcagagagaatatgcgtgatgggcatatcaatgaatctagtgacgtaccttgttggagatttacacatctcatcagctaaatcagcgaccatagtcaccaacttcatgggaactcttaaccttctagggcttctcggtggttttttggctgacgctaaactcggtcgctacaagatggttgcaatctcagcttctgtcacagctctgggagtgttgcttttgacggtggctacaactatctcaagcatgagaccaccaatatgtgacgatttcaggagacttcatcatcagtgcatagaagcaaacggacaccaggtggctcttctctatgtggctctctataccatagctctaggcggaggaggaatcaaatccaacgtctctggttttgggtctgaccagttcgatactagtgatcctaaagaagagaaccagatgatt

SEQ ID NO: 128395 - DNA, 730 bp, Arabidopsis thaliana
  unsure (1)..(730): unsure at all n locations
nnnnnnnnnnnnnnnnnnnnnnnnnnnnnnnnnnnnnntgcaggtaccgggccggaattccctgtttaccccccggccccgggcgcgtgggcaaaaacaaaacaaaacttaagttcatacatcatggccttaatagctaccaaaataagttcacgttcttgttttgtttctgcttatccaaacaattctccaacgtttctgatatccaaatttcccaagtacggtcgattctttgtcgcctgcaaatactgctaaaagatcgatcttgagaaacgtccatgcttcagtttctaacccttcgaagcagtttcataataagacatccttagtatatatattctgcttactttttggtgctcatgctgttttcagaactaagaatgtgtttgttcttgtacgtaggaatatttacacgagttgaatatcaagaagatcaagaatatactaagtgcaaacgtagatgttccatccgaagaacctggagatgatcgatgtcattcaaagtttaggctttgatctccattttcgacaagagatcgagcaaacccttcacatgatttacaaagaaggcctccaattcaacggtgatctccatgagatagcgcttcgctttcgattgctgagacaagagggtcactatgttcaagaaacttctgagctccgtgtagaaggtgaagaaacactcgacggtgcgagagaattcacatatagccgccttaatgaactttgc

SEQ ID NO: 128396 - DNA, 658 bp, Arabidopsis thaliana
  unsure (1)..(658): unsure at all n locations
ancntgggcccnagcggggttttttcccgggctcacctngttcccntnggcaattcccccgccntcaatttccccggggntnctaaaccttgccatngtcttaggaggtacccctggaatgccaatcccaaatgcccttacaagataaagtggccatggagcaaacttagctttcttcttcccagcaggccatcttagggttggatttccccattcaaaccattctgcggacaaatcggtcccaccgtgcttgcttcgaggtttccccatcttgattggtataattatgggtatagtcaattactccaaggttcaacaaccctggaagtctctgaggaccccctagaaagtgtttgtcatatttggaggaagatacttcacgagcggcagggtgtcccgtcatgagtggtactaaatgtctgggtacaatttgcaaagaatatgtagattgtaagttgaaaaagaacgcagacatccattttgaggtgttatcattgtatctttatgaaatccattaattccctgtgtatattgtcattaaacgataatagtgggtgcaataggattgccctgaaaaaaaaaaaaaaaaaagggcgaccgctctagagggatccaagcttacgtacgcgtgcatgtgacgtcatagtcttctatagtg

SEQ ID NO: 128397 - DNA, 521 bp, Arabidopsis thaliana
atacgactcacttagggaaagctgcgtacgcctgcaggtaccggtccggaattcccgggtctacccacgcgtccgacgtgactttgctcgcattgatggatggtatttggctcccaattcaaatttatcatcacctgtaagtgaaacgcttggaggaaccaagtcaggagatattatattcacagacatcagcctggttagcctagtgcaatttcaccggccttcaaatttacccggagctactaatactttgcattgttcttagaagtaacacttgaatgcatatctcaaatgctcttaccgataagtggcatggagcaaactagctttctcttccagcaggcatctaagggttggattttctcattcaaacattctgcgaacaatcgtccaccgtgcttgctcgagggttcccctcttgaatggtataattatgggtatagtcaattactccaaggttcaaccacccttgaagtctctgaggacccccagaaagtgtttgtcatatttggaggagatac

SEQ ID NO: 128398 - DNA, 728 bp, Arabidopsis thaliana
gtgaagaagacgacctccaagaagaaagatacaaaaacagagcaacgccacccacccacggcggttcttccgccacaccaaaccaccagcaccaccgccgtaccaacagcgacaacaagcaccagcacactctaacacctctccaccacaacggcaaaccccaaaccagaaaacgacatgacgacaacgacgaagacgatggtggtgccgtatcctgcaacaagtgtcgacctcaccactctcaccgtgacaaattctccgtcgtacctctcgaaagccacaacaacccttctttcatctctagccccaatctcataatcaaatccatcttccaatctctcacacggagaagccccaaaccttcctctgcaacggcgggcgcttccaccgcgctctgcctcatcctccgccgcagatgcttctagagaagaacagtggcggttagctgtggcggagctttctcataaactgattcaagccacgaagaagaaagaagacgcggttatagaagcttctaggttgaaatcatccatggcagagctagagaagaaactcaataaactcgagatttactgtcacaatctcaaatcaggtctcgacgaatgcagcaacaaaaaacagagtgttctcgattcgaaaagacggtttcatcgacaggatcattcagcagtttctcgtctctgtgtcggaatctcgttcttcgatcagagctttaagtagatctctcg

SEQ ID NO: 128399 - DNA, 449 bp, Arabidopsis thaliana
ccgggggggtcccacccgtccgataattttgacaaaccccccttttcaaaaaaaaaaaaaagagttcaaaatgaaaaacgtgagaaatggatttgtcatcattcttctcaccgtccttagtctctgaaaataaattctgattttgatttcgaattttagggattttgagagagagtcagttatgagtagttcggagagagtaccgtgcgatttctgcggcgagcgtacggcggttttgttttgtagagccgatacggcgaagctgtgtttgccttgtgatcagcaagttcacacggcgaatctgttgtcgaggaagcacgtgcgatctcagatctgcgataattgcggtaacgagccagtctctgttcggtgtttcaccgataatctgattttgtgtcaggagtgtgattgggatgttcacggaagttgttcagtttccgatgctcatg

SEQ ID NO: 128400 - DNA, 392 bp, Arabidopsis thaliana
  unsure (1)..(392): unsure at all n locations
cggacccctccgcccacgcgtccgaaaactcttgagagctaacaaaacagagaaccaacgaataaaacaaaaatgccttctttagagaaatctgtaacaataatctcaagaaacagagtcttcccagaccaaaagtcaaccctcgttgacctcaagctctccgtctccgatcttcccatgctctcttgccactacatccaaaaaggttgtcttttcacgtgccctaaccttcctctccccgcgcttatctcacacctcaaacactctctctcaatcactctcacccacttccctcctctcgctggccgtctctcaacctcctcctccggccacgttttcctcanctgcaatgacggcggcggcgntttttgttttcggccaagcaaaatcca

SEQ ID NO: 128401 - DNA, 886 bp, Arabidopsis thaliana
ctatacgacttatatagggaacgctggtgcccctgcaggtaccggtcctgaattccgggtcggcccagggcgtgcgagtaaacttcccaaaagagaagtctcggcttcagcttctaaagttgtagagaagaaatggttagtgaaagatgaaaagaaaatatgctacaagatgaaataaaccgggttaattcggagaacaagatctaaccgggggtgggcaagatctgggaaaatactataatcttaataatcttatgggggagttgcaagtcgaagatcctgaaaggttaactttcaaacaaacgctaacggggaaccaaacaaaactgttagtttgtagctcccattggacttaggtcgggccattcggaacttaccacgttaagggagggttcaaccgttacttggttgtgggaatcttgcccaacgttggaaggaaattctcttcagtatcgtctttggggtttgattggaaccattgtgtgtggtttccgtcctgggaacttgaaaagaggattcaaggggagaattcgggccaaaattccgagaattattcctttcttaggctttctaagggtctgtttcaccggttgttaaaaaaaaaagggcacggaggccaaaatctttttttggggccccttcaagggacttacccacgggccatgggggggccaggagggaatgttttatgagggggcttgacctggggaacaaaaggagggcattcaagtgttgggcaaaagggtttttttgaaaagaccaagtaccggtttgccggttttcgggggtgtaactcaaacctgggtttaacgtgttgtgttgtttttggcccccaagaagggatttgtgttttgggctttgtttgtgggtttttccactaggcggg

SEQ ID NO: 128402 - DNA, 629 bp, Arabidopsis thaliana
  unsure (1)..(629): unsure at all n locations
aaccttcggttgttcctgtccctggaggaactatacatccattgacaaggtatgtaatgaattacctcaacttgatctctgactatagggaaacgttgattganctcatcatgacgaaaccatgtcggggtttgaaatgtaccaatgatcgaaacgntccggatatggatatctctnagcttgaaggaatatctccgttagctttgcatattatatggacaatggtgatgctacaattcaatctagaagagaagtctttgcattacagggacgaacctttatctcacatcttcgtcatgaacaatgtccattacatagttcagaaggtcaaaagctctccggagctaatggagttgataggagacaagtatttaaggaagcttaccgggatatttagacaagcagctaccaagtatcagagagctacatgggtcagggtgttgaatagcttgagagatgaaggattacatgtgagcggaagcttctcttccggtgtatcgaagagtgctttaagagagaggtttaaagctttcaatacaatgtttgaagaggttcacaggattcaatcgacatggtcggttccggatactcagcttagagaagaactcaggatatctctatcggagcat

SEQ ID NO: 128403 - DNA, 514 bp, Arabidopsis thaliana
agcggacacgtgggttcgtctctctttctacggttcaaacattaaaaagatagatggagaagaggagctctattaaaaacagaggagtacttagattaccaccagggttccgatttcacccgaccgatgaagagctagtggttcaatatttacgtcgaaaagtaaccggtttacccttaccagcttctgtaataccggaaaccgatgtttgtaaatccgatccatgggatttaccaggtgattgtgaatcagagatgtatttttttagcacgagggaagctaaatacccgaacggaaaccggtcgaaccggtctaccggttcgggttattggaaagcgactggtctcgataagcagatcggtaagaagaagcttgtcgtggggatgaagaaaactcttgttttctacaaaggtaaaccaccaaacggaacaagaactaactgggttcttcatgaatatcgtcttgttgattcacaacaagattcattatatggacagaacatgaattgggtttt

SEQ ID NO: 128404 - DNA, 608 bp, Arabidopsis thaliana
  unsure (1)..(608): unsure at all n locations
tgtgtgcgttggtttgttcgtcgaggagaatgttgcttgctgtgagattctcatggatcatgttctcgttgctgtgaaggtgagctaaaccacgactgattccttttgctatcttcattcttgtttcccacggaattagggtttctggtcctcgagcgtgaagaaatgcagagaggcttcctttagacatgtaatcanagacgagaagcttctctcctttaggtcctaagtagtaagctcttagtgcaagaagattctgatgacgaatcttgcctaaagctgtgacttctccttcgaattctttgactccttttgttgttttctctctcagacgcttcacagcgacttcattgccgtcttctaatgtggccttgtatgctgtgccatatgtacttttccccatgatctcagctgtggcacagagcagatcatcggcggtgaacacgaacggaccatcgaaatggactagcttgcctcccatttcacctcctgctgatgctgttcctgcgacacctgctgatactgtcttctctgaggtcttgtcctttccatctttttgtttcaaggcggcgcgtttcttgatcaggcagcagaggagtatgcagcat

SEQ ID NO: 128405 - DNA, 818 bp, Arabidopsis thaliana
  unsure (1)..(818): unsure at all n locations
acaatacgactcaccttanggaaagctgctacgcctgcaggtaccggtccggaattcccgggtcgacccacgcgtccgccagttgccacgattaactagaatgtggactcatcttgagcgtcaatctggtggccaagttaagggtatgggagaaaaacaaattgaagttgataagcgaatcttgcgtactcaaattggagttctcaaaaaggagttggaatctgtaagatagcatcggaagcagtatagaagcaggcgtgttgctatacctgtacctgttgtatccttggtcggttacacaaacgctggaaagagtacactattgaaccaattgactggtgctaatgttctcgctgaaaatcgtttgtttgcaactcttgatccaactacgagaagggttcagatgcaaaacgggaaggaatttcttctcacagatactgttggttttatccaaaagttaccaaccactctggttgctgctttcagagcaacacttgaagaaatagcagagtcaagccttttggtgcatgttgttgacatcagccacccactggcagagcaacaaatagaagctgtggagaaggttatgtctgaactcgacgtttcatcaattccaaaattggtcgtgtggaataaggttgatagagtggatgatcctcaaaacgtcaagctggaagcagaggaaactggggatacaatttgtatatctgctctgactggagaagggcttgacggcttctgcaaaactggttcatgagagccccagggttcaatggnttgggttaagnccctttnccncttntaaaggggcctntagg

SEQ ID NO: 128406 - DNA, 541 bp, Arabidopsis thaliana
  unsure (1)..(541): unsure at all n locations
nnnnnnnnnnnnnnnnnnnnnnnnnnnnnnnnnnnnnnnnnnnnnnnnnnnnnnnnnnnnnnnnnnnnccacgcgtccggaaaatcatcaccaccgtcaacttttctcttgcggacaagacgattctccgattatccccaagaggagaatcctcataatcattttctccgattcgattcgtcttccttggtcctggattgcttcatgaatttctaggacaacaatggaggctcgtccagttcatagatcaggttcgagagacctcacacgcacttcttcaatcccatctacacaaaaaccttcaccagtagaagatagtttcatgagatcagataacaacagtcagttaatgtctagaccattaggacaaacctaccatttactttcatctagtaacggtggagctgttggacatatatgttcttcttcatcatctggttttgcaaccaatctccattactcaactatgggatctcatgagaaacaacaccactacacaggaagcacgcgtattaatgctgtgcagacaccaagcaacaac

SEQ ID NO: 128407 - DNA, 371 bp, Arabidopsis thaliana
gggcttttaaaatccgcacaagcaaatcggagttactgtgtggaccgtgaaaccggcggcgatgccgaatcaatttcttatgagacccaccgtagcaacttctgtcggctattcacagccaccaccaccgcataatgttatgatcgagaattcttctgaaattttctgagctcaatttcttaatttgtgaattgatttgtggcaagagcgactccatgggacttggagccatctcgtctctgctacatatatgtgggcaagagcagtgctacttatgcaacaggtaactccagtgtttttctttgggttttagctaagatttttaggctatatgaattgcatttggtttggactatatgttatctgtgtgg

SEQ ID NO: 128408 - DNA, 532 bp, Arabidopsis thaliana
  unsure (1)..(532): unsure at all n locations
nnnnnnnnnnnnnnnnnnnnnnnnnnnnnnnnnnnnnnnnnnnnnnnnnnnnnnnnnnnnnnnnnnnnnnnnnccacgcgtccggatttcttgcgactaaaattgtgggaagccgcaaaaaggaggagagcgaggaatcaatgaagctaacagcagaacaacaaaaagaaatcaaagaagggatcttaagatgggaaacaatcattactcggatcacaaacacaatggtatcgagcacaaccaactctgcttcttccaatgaagagtctagtgttgggaaagaagcttccagcgaaaacagcaaaagctctggtaaagaaagtgagagttccgctaaaggtgaaagtgagacatccgctaaaggtgaaagtaagacttccgctaaaggtgaaagtgagacttcctcttcaaaaagtgctggtggaagctctacaagcgctactaaagaagaaagttccgctagtcacagcagtggtgtaacagtgacacaagtcgaggaagagacgtccaaagatgtttcgacattcataat

SEQ ID NO: 128409 - DNA, 363 bp, Arabidopsis thaliana
aaaaaaagaggagaatgaagaaaccatgacactaacagctgaacaacaaaaggaaatcaaagaaggaatcttgaaatgggaaaccattattactcggatcacaaacacaatggtatcgagcacagcaacctctgcttcttccagtgaagagtctagtgttgggaaagaaagtgagacttccgctaaaggtgaaagtgagacttccgctaagaatgaaagtaagacttccgctaaaggcgaaagtgagacttccgctaaaggtgagagtaagacttccgctaaaggagaaagtgagacttacgctaaaggtgaaagtgagacttccggtaaaggtgaaagtgagacttctttttcaaaaactgc

SEQ ID NO: 128410 - DNA, 512 bp, Arabidopsis thaliana
cgcctgcaggtaccggtccggaattcccggttcgacccacgcgtacagcgcaatcatacgtttttccacaaatggatcaagaagaggaagagatcgagattcctaattactttatctgcccaatctcactagagatcatgaaagatccagtcacgaccgttgctggcatcacttacgaccgacaaaacatcgctaaatggctcgaaaagggtcccttcttggcccgtcacgaagcaacctcttcccttagactccgatcttacacctaaccacatgcttcgccgtcttatccaacactggtgcgtcgagaacgagacacgtggcgttgtcagaatctctacacctcgagttcctcctggaaaacttaacgtcggcgaagagatcaagaatctcaaaaagttcggccaagaagccttaggaagagaagaaacgttgcagaaccttgaagttgtggcaatgggccgcaataacagaagattgatgtgtgaatgtggcgtacataagtctttgat

SEQ ID NO: 128411 - DNA, 408 bp, Arabidopsis thaliana
gagagcttatcagagaagaagaagatatttctgtaagcgagaaaaatggcgagagaacatgcgatcggagaagccaccggaaaacgaaagaaacgcggcagagttgaagaagcagaagaatactgtaacgatggaatcgaagaacaagtagaggatgagaagcttccgttagaggttgggatgttctattacccaatgactccgccttcgttcattgtttccgatgctctggagccagattttcctttgatctatgtcaacagagtcttcgaagtcttcactggctatcgtgccgatgaagttcttggtcgtaactgtcgattcctacagtacagagatcctcgagctcaaaggcgtcacccattggttgatcctgtggttgtatctgagattaggagatgtcttgaa

SEQ ID NO: 128412 - DNA, 592 bp, Arabidopsis thaliana
  unsure (1)..(592): unsure at all n locations
tacgactcactatanggagagctgacacgcctgcaggtaccggtccggaattcccgggtcgacccacgcgtccgctggaattgagtttccgcctcgaacggaaagcagtctatcgttctttactccaccgcagactcagccagatgaagatgctgctattcaggcttcgttgcaaggagatgatgcttctagcctcagcctggaagagattcaaagcgctgagggatcagttgatgttttgatggacatgcttggagcacatgatcccgggaatcccgagagtttaaaagaagaagttatagtagacttggttgagcaatgtcgtacttatcaaagacgtgtaatgactcttgtgaacactacaacagatgaggaacttctgtgtcagggattggcattaaacgataatttgcagcatgttcttcagcgtcacgatgatatcgcaaatgtcggctctgttccttcaaatggaaggaatactagagctcctcctccagttcagattgttgacatcaatcatgatgatgaagatgacggtccagatgatgagtttccccggcttgctcacagggtttaaaccccaaaggggccc

SEQ ID NO: 128413 - DNA, 788 bp, Arabidopsis thaliana
  unsure (1)..(788): unsure at all n locations
acgcgcaannnnnnnnnnnnnnnnnnnnnnnnnnnnnnnnnnnnnnnnnnnnnnnnnnnnnnnnnnnnnnnnnnnngccaggcgtgcgagaaaagtcagcagttgattctaggacggcgacttgacttgacacctgaaaaatccttaccgtgtttgatagtttttcgaaaacccttcaaattgtttcattttttttaagtcttgagactttaaaaaatcctcgcttgctcttgttttaggtctcctgacaaggaaaaatttggaaacttgtgggagttgattgataagagttgttaagatggcaaatgatgcggctgcatgtgcagaaagggctacaaatgatatgctgattggtccagattgggctattaacattgaattgtgtgatcttatcaacatggatcctagtcaagcaaaagaagctgtgaaggtgctcaagaagcggttaggaagtaaaaactctaaaggccagattcttgcactttatgcattggaacctttaagtaagaattggggcgaaaacgtgtaccaccttatcattgaccgtggtctattgaatgacatggtcaaaatagtgaagaaaaagccggaactgaatgtgagggaaaagatactaactttgttagacacatggcaagaagcctttggtggacgtggaggtcgatacccacaatactacaatgcctataacgatctcaggtctgctggaattgagtttccgcctcgaacggaaagcagtctatcgttctttactccaccgcagactcagccagatgaagatgctgcta

SEQ ID NO: 128414 - DNA, 727 bp, Arabidopsis thaliana
ccccacccgcccggaaaaaccaaccaacgtcacataatcgtcttcttcaactaacaaaatccaactaatcatcatctgtctctctggctctggcttgtgtctgagctcgaacttaaagaaaaagaatctcaccatgtctttagctccgagcagttatccatctctgtattcttcgccttcactgccaagaacccagcaaaccaagcaaaaccctagtttgatcactcaatccagtttcatttccgccaaaagtctcttcctttcgagcaattcggcttctttatgcaatacccatgttgccaaacgccggaatttagctttgaaggcgttcggagacagagtcttcagctaaagctgaagcaggaggagacggggaagaagaagagaagtatgaaacatatgaaattgcagtggagcagccttatggtttgaaattcacgaaaggaacagatggtggcacttacattgatgctatcttaccaggtggatcagctgacaaaaccggaaagttcactgttggcgatagagttattgccacaagtgcaatatttggaacacagatttggcctgcagctgagtacggtaggacaatgtacacaattccgcagagaattggccccttgctttagccaaattggagaacagaaaatggtccgggctgaagaaactgggtgagttacaccgaaaaagggagatccttaccagcctgagaagaaatgcccggatc

SEQ ID NO: 128415 - DNA, 585 bp, Arabidopsis thaliana
  unsure (1)..(585): unsure at all n locations
ccacgcgaccggaaactcaacagcgagagaaccacaaagcgtaacaaagagagtaataactatgagtgatttttcaatcaaacccgatgataaaaaggaagaggagaagccagcaacagccatgttaccaccacccaaaccaaacgcttcttccatggaaacgcaatctgctaacaccggaaccgctaaaaaactgcggcggaaacgcaactgcaaaatctgtatctgtttcactatccttctcattctcctaatcgccatagttatcgtcatcttagctttcactctcttcaaaccaaaacgcccaactactacaatcgattccgtcaccgttgatcgtctccaagcttccgtcaatcctctccttctcaaagtcctcctaaacctaacgctcaacgtcgatctctctctcaaaaaccctaaccgcatcgggtttaggtacgattcgtcggcgggcggttttttgtatttcaagngggccaagtgttcnggtgaaggtnctttttccgggtanncggattngggggnggggaaaacgggtgcccgttgnannttaccgttncggnaatgggggtncggtccttt

SEQ ID NO: 128416 - DNA, 484 bp, Arabidopsis thaliana
gaaagtagacaatgaatgattagggatagcgaatgaagaaggtggaagatgatgttaacttcggattggcgcgaaataagataaaaaagcttgttcttcagagaagaaagtgtttatgattggacaaagaaagaaagaagcaaagcctatccacttctcatcttctctattaccaacaaaccttccccttctctgtcggttcctccttttctattatttttaattccagataataaaaagaaaatctttttttgcttaaagagctcaaaccgaaacccatttcaagatttcatcctccggagtgtttcaacgaagcttgggtacataagtctgatatgagaggtttcgtcataacttgtcttctaaggtaagtttcctcacctgtggcgtagattgcatcatcaatccatggacgttgaagaaaagagggtttcatctggttatgccaagcctccatggatattcaaaggaagtgcgttgtacc

SEQ ID NO: 128417 - DNA, 414 bp, Arabidopsis thaliana
atataaagctaaaaaaaaaacacatcacacaaaagattctctacactatggatactaagaaatcgttagtgatcctattgactaacgtcgtcgtcttcttgcttctctccacgactgtccattcttgcttaccgtccgaccgagcggcgcttctagagttccgagcaaagctcaacgagccctacattggagttttcaacacatggaaaggtctagactgttgcaaaggctggtatggtgtgagctgcgatcccaacacccgtcgagtcgccggcattacactccgaggtgaatccgaagacccgcttttccaaaaggcgaaacggagcggactaatgaccggctccatttcgccctctatatgtaagctcactcgtctctccggtatcatcatcgctgattggaagggatctc

SEQ ID NO: 128418 - DNA, 520 bp, Arabidopsis thaliana
acgactcacttctgggaaagctggtacgcctgcaggtaccggtccggaattcccgggtctgcccacgcgtccgatgcaatgcaacgaatgttgatgaaagcaagccagatccaaaacttgagtgcttcaaaaactgttccataagttgtggcaaacaaaaccaaccttgttacgaagtttggttgacgaaatgtggtctcccaaaacgtccttctacatcaacaccatcatcttcctccaccacggcgtaataagtttccatttgtgtgaaattgtgtgtcttttggtttataccaagttttaatcttaatattgatgtgccaacaatgccgtgcccaggcttataagggcttaagacgaagttgaattttggagtccttccataataattcttatttgaattaaaaaaaaaaaataaggggcgggccgttcttaaaagatccaaggtttacctacgccttgctttccgacaataatatctttttttatatataaaccttaatttaaatgtactggccgt

SEQ ID NO: 128419 - DNA, 473 bp, Arabidopsis thaliana
tttcgtccgcttcattctctcttcagttcctgaccaacacctttatctccaaacctcagggtttctgcaacggaattgtgtcagcaccaagacccagaagcaatttattaagagacagacaaaatggtgtacgacccatcaaagttgcgtctattgagacacaacctttccctctgtttcaatctcctgcttccgaagaatcttcctcgtccgagctggagacagcagatccggatttctacaaaattggctatgttcgaagtgtgagagcttatggagttgagtttaaagaaggtccagatggttttggtgtctatgcttctaaggatatcgaacctcgccgtcgagctagagtgattatggagattcctcttgaactgatgataaccattagacagaagcacccttggatgtttttccctgatattgtaccaattggtcatcctattttcgatatcattaactcgactgat

SEQ ID NO: 128420 - DNA, 421 bp, Arabidopsis thaliana
agcatacacgactccttgaaaggctccctgaacttgtctgcagacgtggctcgtattttcagaaaaatccatctacagacaagctaacaatcatccctgagcttgattggaaatatttctgcgacgagtggggagggctcatggagaatggaatatctgcttttattgaggttggcaatacagaccaaagttcatccccagacgtcattgaccttgagaaggattcttctccggatgataatatggacgttgatgctcaacagcttattctcagggcatccccagagatttgcgaggaatgcataggagagagagaaagctgtgagttgatgcagaaacttagttactctgagggagatgtatttgtctgttttgtgcgtggaaaggaagctccaaaagcaatgttagaggcatctgactc

SEQ ID NO: 128421 - DNA, 812 bp, Arabidopsis thaliana
caacaaatttcatagagaagcagaaatggcgaaatcactcctttgttcatcaaccttaaaccctttcttctccaccactctctcctcttcgaagaagaaccaaattgcatactcgggaaacagcaagaaccagacatcgtcgtctctgttatggaaaagaagggaactgtcgcttggatttatgagcagcttagttgcgattggtctcgtgagtaatgacagaagaagacacgacgcgaatgcagcgattcttgaagctgatgacgatgaagagcttctcgagaaagtgaagcaagatcggaaaaagaggattgagagacaagctgttcttaattctgctgtcaaggaaaaggggtatttgcaggatcttgtttacaagttgagcaaggtaggacaagccattgagaacaatgatctaccagctgcaggattggttttggggaaaggcattgataccgaatgggtcaaaaccgttaatctggctttcacaaagttgagtacaagcccagaagagaatacagaggtggaagcattcaattcatcattggcttctcttatcacatcagtgaacaagaacgatatagagtcatcgaagctcgctttcgtttcatcagctggtgcatttgagaaatggactactttgacaggtcttttggaacagcttaagggactgtgataggctggctacaaattctttactctttttttgtattttccaacagatttgtcaaagagggtcttttttttctccaaataatcctttgaataatcatcattcactttcttaacttctttggttattatttaccttt

SEQ ID NO: 128422 - DNA, 354 bp, Arabidopsis thaliana
  unsure (1)..(354): unsure at all n locations
ttccttatcncttattcgagaacacaatgtctgtcaccaagttcaatgcgatggtgtccggattattccaattgggtagctcttacgagtggattgtcacaaagaaagctggaagatcatcagagtcagatcttttatctatcaccgagaaagagacaccaaccaagaaaagtcaattgcttaggggagtttccgacagcgaacttttggagctgagccaacttgaagaacagaaacaagcggtttcaaagaaacctgtcaagaaaaccaacaagatataccacaaagagctcgcattggcctttcttttgctcactgcagcgcttaggagtctcttggcagcacaaggagtgc

SEQ ID NO: 128423 - DNA, 523 bp, Arabidopsis thaliana
  unsure (1)..(523): unsure at all n locations
gnnnnnnnnnnnnnnnnnnnnnnnnnnnnnnnnnnnnnnnnnnnnnnnnnnnnnnnnnnnnnnnnnnnnccacgcgtccggtctacaatggcgacatggacaccaagctctctccagctcagaattgccctaaatcacggtatcttcaaagctccggagagagcgaagatgaccaagctcagtcgtcgtctccgtagatcatgcgtcgcgcagaacgcagagccaggtcgcgattcgggtgagagtaacgggtcggatcgttttcgtgggtgggctgattcgggagacgatgagaacaattctcgcggtggcgattggtttaaaggaaccttgttatctggagttgctggaatggttttgttcgttgggctaacttacgcagctttatcttccaaacgcaatgtcttaagaccaaaagtagaagtgatggtgaccacagttactaaaagtgcaattgatcaaatcagcacggatgagaatgaaggaaatattgtgactagtcaagaataccaggaaagctata

SEQ ID NO: 128424 - DNA, 486 bp, Arabidopsis thaliana
  unsure (1)..(486): unsure at all n locations
tctttctgacacattaactacttatccttcttgcattcttctctctctctacacccaaacaaacacacttataatatatcaagaaagaagatgtctagcagaagatcatcacgttcaagacagtcaggaagctcaagaatctctgacgatcagatttccgatcttgtttctaagctccaacacctaatccctgaacttcgccgccgccgttctgacaaggtgtcagcttctaaggtactacaagagacttgcaactacatcaggaacttacacagtgaggttgttgacctcagtgaccgtttgtcggaactcttggcttcgacggacgacaacagcgccgaagcagccatcattaggagctggcttaattattaaatccgcattacttaatctgagagctattaatcatccgtttccggccaccaaatttatcttattatgggtatcgnctgtttacttctacatcatatattatgagatatagct

SEQ ID NO: 128425 - DNA, 1074 bp, Arabidopsis thaliana
  unsure (1)..(1074): unsure at all n locations
nnnnnnnnnnnnnnnnnnnnnnnnnnnnnnnnnnnnnnnnnnnnnnnnnnnnnnnnnnnnnnnnnnnnnnnnnnnnnnnnnnnccacgcgtccggcaaaatggaaatgattgataatctcttcaaacccgtcaatggcaaagacgaaggaatgttcagggaactcttgttagacttttactacagttcagagaataggaaaccagagcacatcattattttcagggatggtgtaagcgagtctcagttcaatcaagttcttaatattgaattggatcagatgatgcaggcatgcaagtttcttgatgatacgtggcatccgaagtttacagtgatagttgcccagaagaaccaccacacaaagttcttccagtctcgaggccctgataatgttcctccaggaacaatcattgacagccagatctgtcacccacgcaactttgatttctatctctgcgcccatgctggcatgattggaactacaaggccaacacattaccatgttctgtatgacgagattgggtttgccacagacgacctccaagaacttgtgcattctctgtcctatgtctaccagaggagcaccactgcgatctcagtcgttgcacctgtatgttacgctcatttggcagctgcacagatgggaactgtgatgaagtatgaagagttgtctgagacttcttcgagccatggaggaatcaccacacctggagcagtccctgtgccacctatgccgcagctgcacaataatgtttcaacctccttgttcttctgttgatggaacatggtccagtccacacgatagctgagtttatatgcttttgatggagaaccaacgaacttttgtttactcttctctgggtttggttcctcttttgtttttcgtcgaccctttaacattgaggagatactctttatattctgtcggtttttgtggcccctgttggttgatactcccctatgcttaatcagatttggtaaaaaaaaaaaaaaaaaaaagnnnnnnnnnnnnnnnnnnnnnnnnnnnnnnnnnnnnnnnnnnnnnnnnnnnnnnnnnnnnnnnnnnnnnnnnnnn

SEQ ID NO: 128426 - DNA, 616 bp, Arabidopsis thaliana
  unsure (1)..(616): unsure at all n locations
nnnnnnnnnnnnnnnnnnnnnnnnnnnnnnnnnnnnnnnnnnnnnnnnnnnnnnnnnnnnnnnnnnnnnccacgcgtccgcccacgcgtccggaaaatcaaagagttagctcagctccgatcactctctccgattatctttcgctctttagattcatggtgaatcgtttaccgtcactctctcctcgtaaaccctagctctctccgaaaccctaacgcgctgcgttggaaactaatcgagctcgtccctctcctttcggaagcatttctttaatcggtgttgcagaggcgttttggtttctgatcggtttagctttctgagttagaacagtctaaggctgcaatgagtattcctcagtcgaaatcttcatcaaatggatttccactcaaaagaggtgaaacagaggaagttttacataagacaaatacatcaaatacaggattcaatggggaagctggaagcttgaagaggctttcacttgatcggttagtgtacttcacaacatgtaagatcgggcatcatgtggaagtgcttctaaggaatgggtcagtgtataccggtttatttcatgctggcatgtagagaaggattttggaatcattctaaagatggcatg

SEQ ID NO: 128427 - DNA, 354 bp, Arabidopsis thaliana
ggctcttgctacctaaacttttctcaatctctagaacacaggttccagctgcatcattgttcaataatctgtacagacgtcacaaacgtgggtgttcaggtggacgagtaagatgtcaacagatagtgttagatcatccacaactggtggttctgcttctggagctagaacattttgctccctcgcagatttatcaaccaaaaagtgtgtgccatgcaatgcgaaggatctgcgcgccatgaccgaacaaagtgcccaagacctacttcaaaaggttgctggatgggatttggccaatgacaatgatacattaaagctgcatcggtcatggagggtgaaaaagtttacaaaggg

SEQ ID NO: 128428 - DNA, 448 bp, Arabidopsis thaliana
gagtgttatctatgaatcttccatcgtcaacgacggcgacgtcaacctccgcgacttccgatgcagcggcgaattccaccgaaagatgcgatgattgcggaagctcagacgcctgggtgatacacacagtacgtctccgtgcatctctccgcttcttctgcactcattgtctcctccgcaaccatccggcgtcgttttgtcccggttgcttcgccttgtacgattcatctccgccgtcttttcgccgcgtctcttgttccattaaagggtgccactccttgactcacattcactgtgccggcgatgaaagtcacctttcttatctctgtcctccttgccgagaccctaattccttctccttcttccgccctatcgtcgacgaaaacggctctcgcttcgtcgataaagcactctccgaagctttcttatgcgctgctaagatcgctgc

SEQ ID NO: 128429 - DNA, 744 bp, Arabidopsis thaliana
  unsure (1)..(744): unsure at all n locations
cannnnnnnnnnnnnnnnnnnnnnnnnnnnnnnnnnnnnnnnnnnnnnnnnnnngcagattcgtccacaccacgcgtccggctgatttggttggctccccaagcagaatcgagcttcttaggtctaactcggtacccccaagacttgctcaccacttcatgactcgctcttctctcccttctttttcaactaaaggtgttaacttgcagcaaaacgatgttcaaagagctgctgctgctttgatgataggagatgaattgcagaagcttggaagatggagacctgaaaggattgatctttctgctatggcttgtccagcttcaagacagatctatctgacattccctgccgacagtaggttcagggaggaagatgtgtccaattacttcagtacttttggaccagttcaagatgtgaggataccatatcagcaaaagagaatgtttggttttgtgacatttgtgtaccctgagactgttaagagcattctcgccaaagggaatcctcactttgtgtgtgattccagagttcttgtcaagccttacaaggagaaaggcaaagtccctgacaaattccgaacttaccaaaccacagagcgagaactgtccccaacaggccttgattctagccctagggacgttctagggagggagagggtttttataaccaacactcaaggatgtgttgtgggagggagtaaagttttgaaggaaggagntttctttgaacctttcagagccagaa

SEQ ID NO: 128430 - DNA, 520 bp, Arabidopsis thaliana
  unsure (1)..(520): unsure at all n locations
nnnnnnnnnnnnnnnnnnnnnnnnnnnnnnnnnnnnnnnnnnnnnnnnnnnnnnnnnnnnnnnnnnnnnccacgcgtccgcccacgcgtccgcccacgcgtccggcacatttgaggcacaactacataacggtgttcacaatgacagcgatggagatgttgagacgatttcaatgggtatttttcagagtagagaatgagtggaacaagatcactaaatcacatccaatgggtgagatttcacttgaagaagataaactacttggttctactacacctcatgatgtttagcatccaactatttttgtttatttcctctaatcctatgcaaaattctggttttcctaaaaaaaaaaaaattttaaaaaaaaaaaaaaaaaaaaaaaaaaaaaaaaaanggggggaaaggtgtagaggttttaagggatccaactttaggttcgcatgcattaaacgttatatgttgtttattgggttacataaattgagttacttggccgaagttttacaatggaaaaacg

SEQ ID NO: 128431 - DNA, 517 bp, Arabidopsis thaliana
ccggcactaatacgactctaatagggaaagctggtacgcctgcaggtaccggtccggaattcccgggtcgacccacgcgtccgaaacttttgactccgtcgtaacaaagaacaaaacttccgtatcctggagagtaaattcctttatggctacgaatgggttaatggcgtcgtccagtgtgtttcttcatcgcccgcgtatcgcatttgcttctagaacgaatcagactgtaggaaaatacggtaaaggccgtgttagtttcatgggcattgggacacgtcgtcttccggtggttttatccatgacggcgatggcggattccggtgaggaggccgtgaaatctgttttgcctggaaatggcatatccatcatggtgaatggatgtagtggcaaaatggggaaagctgtattaaagcagcagactctgcaggagtacatattgttcccatatcgtttggatctgctggtgaggatggtcagagagttgaggtctgtggaaaggagattactgtgcacg

SEQ ID NO: 128432 - DNA, 721 bp, Arabidopsis thaliana
ctgacttcgcaaagaagaacactttcttcctgaaatctcaaattcatctcttctcttccgatttcgctgaatcatgtcagacgacgagcatcacttcgaatccagcgacgccggagcttctaagacttatcctcaacaagccggtaacattcgtaaaggtggtcacatcgtcatcaagggacgtccctgcaaggtggttgaggtatcgacttcgaagactgggaagcatggtcacgccaagtgtcactttgttgccattgatatctttacttctaagaagcttgaagatatcgttccttcttcccacaattgtgatgttccacatgtgaatcgtgttgattatcagttgattgatatctctgaagatggctttgttagtcttcttactgataatggtagcactaaggatgatctgaagctgccaacagatgaagctttactcacacagctcaagaatggatttgaggagggtaaggatattgttgtgtctgtcatgtctgcaatgggagaggagcagatgtgtgctctcaaggaggttgggcccaagtaataataataagtaagcattctctcttttacagaggctatgtattatcaagtttgacagagtcaaatgttataagaacaaagtttggtccttttttttggtcttcttagtataatttaagcccacatgtgtttcccatgcaagacactcttagatttactagtatatcttact

SEQ ID NO: 128433 - DNA, 481 bp, Arabidopsis thaliana
gatggcgatagagaagacaatggaaaaagacgttgatgaagttggaagtattgcccgtttcataaaggggaaactcgaggagttggacagagagaacttggcaaatagacaaaaacctggatgtgcaaaaggatctggtgtggatcgatcaagaacagcaacaacactttccttaaagaagaagttgaaagacaagatggccgagtttcaggttctacgagagaacattcaacaagagtatcgcgatgttgttgataggcgagtttatacagtaactggggagcgggcggatgaagatactattgatgaattgattgaaactggaaacagcgaacagatcttccagaaagcgattcaggagcaaggaagaggacaggtaatggacaccttggcggaaatccaagaacgtcatgatgctgtcagagacttggaaaagaaacttcttgacttacaacaaatattcttggatatggcagttttg

SEQ ID NO: 128434 - DNA, 580 bp, Arabidopsis thaliana
  unsure (1)..(580): unsure at all n locations
nnnnnnnnnnnnnnnnnnnnnnnnnnnnnnnnnnnnnnnnnnnnnnnnnnnnnnnnnnnnnnnnnnnnnnnccacgcgtccgcttttttagattttgagctctggaatggagaaaagtatcaatggatcatgcagactcatcaagagactcgtgattatactttcttgtctttcatattcctttgttcgatcagactttacagagagaacaaatatcaattatgtatcagctgtgggagatcccgggatgagaaacgataacttaagggtggctatagaagcttggaaccaatgcaacgaggtcggtgaagaagctacaaacatgggaagccctcgaatggcagattgcttcgatatcgataactctagctttcccgtgaagataatccacaaagtcgacgaaagagacaacaggcttggggtaggaaatggaacctacggaggaataagcgctggagacaacgcagatatctacgcagcgcaaaagggggtatacttaggaaacaaatgtcaagttgtggacaagccaaatccatggcagttttggatgataatgctaaagaacggtaatacggatact

SEQ ID NO: 128435 - DNA, 578 bp, Arabidopsis thaliana
  unsure (1)..(578): unsure at all n locations
nnnnnnnnnnnnnnnnnnnnnnnnnnnnnnnnnnnnnnnnnnnnnnnnnnnnnnnnnnnnnnnnnnnnnnccacgcgtgcgcaaaaacaaagtttcatttcttcttcttcttgaaatggcgacgagcaagtgctactatccacggccaagccaccgtttcttcaccactgaccaacacgtcaccgccacttccgatttcgagctagacgaatgggatcttttcaataccgggttcagattcctcttcaagtttcagctttagtgaccttacaatcacatccggtcgaaccggaactaaccggcaaattcacggtggttctgactccggtaaagctgcgtcttctctaccggttaacgtaccggactggtctaagattcttggagacgagagtcgacgacagaggaagatttcgaatgaggaagaagttgaccggagatgaaattttatgcggcgaaggtacacggcgaaggtccaccgcatgaattgctttgcgaaccggaggatggcttcgttttcggttcatgaaggtgctgggaggactttgaaaggaagagatctgagtagggtgcgaatacta

SEQ ID NO: 128436 - DNA, 843 bp, Arabidopsis thaliana
  unsure (1)..(843): unsure at all n locations
nnnnnnnnnnnnnnnnnnnnnnnnnnnnnnnnnnnnnnnnnnnnnnnnnnnnnnnnnnnnnnnnnnnnnggaatccacgcgtccgccccacgcgtccgagatggatcatctgatatttcttttgttagttacaactatgtattttgggataaatgaagcttgcaaaaaaaatcatgtagtaattcataacgaaatcggtcctggtattgatctcaacattgcatgccggcaattcagcccaaaacgcacaccttcaatgtttcacaccctaaagtacaaagatcctttttacatcattgagttcgcggacaacaatcagctacctcacggtgagaaatggtattgtctgattagtcacggaacaagaccaaaatattggtttgatattgaagtatatcgtcaaggctattatcctcgatgtggtcagctacgctcatggattgctagaaaggatgggatttggtttacaagaaaatatcatagtccaccagggcacgtacttgattggaaaatccagtaatgttctcttgcttttattctccctataattaactaatgtttatgtaagtggtttttgttttgtgtcataataagtaatacgccgtaaaagctaattaagtcatcaacataaattggtggtagactatatggcaacatgttgtatcaaaatatgagtccatttgatgtctatgtattttgcatcaacgttaaataataaaacaatatactttatacctaaaaaaaaaaaaaaaagaagnnnnnnnnnnnnnnnnnnnnnnnnnnnnnnnnnnnnnnnnnnnnnnnnnnnnnnnnnnnnnnnnntgtcctannnnnnnnnnnnnc

SEQ ID NO: 128437 - DNA, 554 bp, Arabidopsis thaliana
  unsure (1)..(554): unsure at all n locations
nnnnnnnnnnnnnnnnnnnnnnnnnnnnnnnnnnnnnnnnnnnnnnnnnnnnnnnnnnnnnnnnnnnnnnccacgcgtccgctccaaagccgtcgtttttgcaaggcagatggcgaagcagattcgtgttacgacgccgtcgatgtccgcaacacgctttctctcaacgggcgacaatggtcaagtagacgagcagcagaaccctccagagcccttacccaacagacccttgcgaggggagagatcttccaactctcacagagaaccacccgctagacaagcccacaaccttggaaagagtgatactactctgtctgacgatggcttcctcgaacagttcaagcttggagtcaatcaggattcacgggaaacccccaaaccggaacaatacccgcaggagcccttaccgccgcctgaggattccgatgagatcttcaagaagatgaaggaaggaggtctcatccctaacgccgtcgccatgcttgacggcctctgcaaagatgggcttgtacaagaggccatgaagcttttcggattgatgcgtgacaagggta

SEQ ID NO: 128438 - DNA, 667 bp, Arabidopsis thaliana
aacttcgacttggaattctttcagccgccgtcccaattgctttgccgccaccgaagcaaagagtagagagataatggctgaggaagaagctaagggtttggattacataccggagatagtactgaagaagaggaagaacagagatgagcttgcctttatcaggaagaagcaacttgagttgggtaattccggcaagaagaagaagaaagtctctgatatcaaacgtcctgaagattttgttcatgagttcagggctaaggaagtagatatgatccggatgaagcaaagagtaaagaggccaaagtcatctcctccaccagttaaatctgacctggttttcatcatacgcattcaaggcaagaatgatatgcacccaaagaccaagaggattcttaacaatttgcaactaaagagcgtctttactggtgtactgctaaagcaactgacagtttgttccaaaagcttctcaaagtgcagccttatgtcacttatggatacccgaatgataagagtgttaaggaccttatatacaaaaagggatgcacaatcattgagggaaatcctgttcctcttaccgacaacaatattatcgaacaggctctatgagaacacaaaatcttgggcatagaagaccttgtgaatgagatagcaagagtcggcgatcatt

SEQ ID NO: 128439 - DNA, 436 bp, Arabidopsis thaliana
tcttaacactctctacaatgttgtctatgctctggttccttctatctcttctctctcttcttctacttccttgtctccgaccttgctttcctgctaaaggatctctgaaaaacaaaaagaagattgacaagggaacttatgtggtcggagaggaggagacacctaaagagcttcagagagagctgatgccgagacacgtggcagtgataatggacggaaaccggagatgggctaaacagaccggattgttgacgtcacaaggctacgaggctggagctaaacggcttctcgagttcgctgacctctgcttcaaactagggataaatactgtctcagcttttgctttctccactgagaattggggaagacacaagattgaagtcaaatgcttgatgtatttgttccaacgttacctcaagtcaaagatccaattttt

SEQ ID NO: 128440 - DNA, 629 bp, Arabidopsis thaliana
  unsure (1)..(629): unsure at all n locations
gccggccctatacgactttattagggaaagctggtacgcctgcaggtaccggtccggaattcccgggtcgacccacgcgtccgcccacgcgtccggctgacgccaatcctggtttctttggttagcaaggactcttccatgttggatggtcttgataatgccagcattgaaatggaagcggccaaggctagattgaatgagattgtaacgtctggcacaaagatgatagacgacgaccaagtctcctctgaagatttcccttggatgactgatggagctggacttcctcccaacgctcatgaactcctacgtgaactggtgaaattaactaagaatgtgactgaacaagtaagactacttgcaatggatgaagacgagaacctcactgagccatacgatataattcctccatatgatcaagcaaaagcccttggcaagacaaacattgacagtgatcggattgcttctgggttaccatgtggtagtgaaggattccttctgatgtttgctcggtggataaaacttgctagggatctctacaatgaaggaaaagaccgntttnncatcacacagattccggttgttncgntncattgnagtacgcctgtacataattccntctcgtctaa

SEQ ID NO: 128441 - DNA, 690 bp, Arabidopsis thaliana
  unsure (1)..(690): unsure at all n locations
nnnnnnnnnnnnnnnnnnnnnnnnnnnnnnnnnnnnnnnnnnnnnnnnnnnnnnnnnnnnnnnnnnnnnnccacgcgtccgattagaaaaggctccggctttatcattctcagaccatcatcactaagcagtaagtaagcactataatcgcagaagatagataaaatggaagtagggtttctgggtttgggaatcatgggaaaagccatgtcaatgaatctattgaagaatggattcaaagtcactgtatggaacagaacactctccaagtgtgatgagcttgtggagcatggtgcatcagtatgtgagagtccagctgaagtaatcaagaaatgcaaatacactattgctatgctctctgatccttgtgctgctctttcggttgttttcgataaaggcggtgttttggagcagatatgtgaaggaaaaggttatatcgatatgtcgactgttgatgcagagacttctttgaagatccaatgaggcaatcaccgggaagggtggtcggttcgtagaaggtccggtttcaggtagcaaaaagccacctgaagatggccacctcattttcccttccttcttggtgacaaggcccttttttggggatcaaatcccagctttttaannccttggggaaggncccntttnctttggccaanttggaacggggctnaatnnggctttttgtgccnt

SEQ ID NO: 128442 - DNA, 576 bp, Arabidopsis thaliana
actaatacgactcctatagggaaagctggtacgcctgcaggtaccggtccggaattcccgtgtcgacccacgcgtccggtttgtttctcaaggaaaaatttcaactttctttcttatttcagtaaacgagagatatgttttcaatctcaatctgattctttctcgcagcggctaattctagtgtcgctaatagggtctctgtttcttcaaatttagttctttaaattcactacgaagatttttgttatggcgagtagaaagctggttcgagatttactgatcacaaagcagcctcttctccagcaattggtgcaccaacggagagtgggcgcaagactaggtcttcttcagggaaatgggtttgcgagtcatcgacggtttagtgttttcagtgagttctcgaagaagattagaggagaagctgatagcaatcctgaatttcaaaagacagtgaaggagttcaaggaaagagcagaggagttgcaaggtgttaaagaggacttgaaagttagaacgaaacaaactactgagaagttgtataaacaaggtcaaggcgtctggacggaggctgaatct

SEQ ID NO: 128443 - DNA, 524 bp, Arabidopsis thaliana
  unsure (1)..(524): unsure at all n locations
atacgactcaccttagggaaagctcgtacgcctgcaggtaccggtccggaattcccgggtctgacccacgcgtccgacaacatcccacatgatagcatctccgatccatctcctaccgacgatttcttcgagcagatcctcgggctttccaacttctccggttcttcaggttctggtctctctggaatcggcggcgtgggtccacctccgatgatgcttcagcttggttcacgcaacgaacgggaatcataatcatatgggtgccattggaggaggtggacctgtagggtttcataatcagatgtttccgttgggattaagtctcgatcaagggaaaggacatggctttcttaaacctgatgaaactggtaaacgtttccaagacgatgttcttgataatcgatgttcctctatgaaaacctatttccatggcgcagccatgtcacagccagctccaccaatgcccgatcaacagtctactattcngcctannagtagggctaggcgaggtcaagctaccgatc

SEQ ID NO: 128444 - DNA, 526 bp, Arabidopsis thaliana
  unsure (1)..(526): unsure at all n locations
cagaattccgggtcgaccatgcgtattctctcacctaacaactccacacaagattcttcgcatggaaagttgttcttcgacttctcttctctaactcgctatcttttaactcacccagctccactgagtcgaaaatttcaaacctttactcgtttccttcatggctaataacaacaacatcccacatgatagcatctccgatccatctcctaccgacgatttcttcgagcagatcctcgggctttccaacttctccggttcttcaggttctggtctctctggaatcggcggcgtgggtccacctccgatgatgcttcagcttggttcaggcaacgaatgggaatcataatcatatgggtgccattggaggaggtggaccctgtagggtttcataatcagatgtttccgttggggattaaagtctcggtcaaggggaagggcatggtttttcttaaaacctgattgaaccttgggaaacgtttccaagccgcatgttctttgataaatgcaggntccnntttgaacc

SEQ ID NO: 128445 - DNA, 978 bp, Arabidopsis thaliana
  unsure (1)..(978): unsure at all n locations
taatgtaaatccacttactaattcttggggtgacacggttggccagacaactgcccctggaaggacaaatgctggacttggtggtcttggtgggcttggaggccttggtggactcggtatgctgggagcggactcacctcttggtgcgactccagatgcttctcaattgagccaaatactgcaaaaccccgctatgtcgcagatgatgcaaagcgtactttccaatccacagtacatgaatcagcttatgagtcttaacccacaactccgaagcatgctagatatgaatcctcagttgagggaaatgatgcagaaccctgatttccttcgccagtttagctctcccgagatgatgcagcaaatgatgtctctacaacaatcacttttctctcagaataggaacacggctggccaggatcctacgcaaactggtgctgcgacagggacagccaataacggaggactagatttattgatgaatatgtttggcagccttggtgctggcggcctaagtggcacaaaccaacccaatgttcctcctgaagagcgatttgcgactcagttgcaacagttgcaagaaatgggattctacgacagagcagagaacataagggctttgcttgcaaccaatggtaacgttaacgctgctgtagaacgactcttggggagtattggccagtaacatacaggatcgcgaacttgtggatagaaaagccgctcatcgatacactatttgttttcaatggtcatcttctttcctctttacccaatccccacaaccttttttacatactttgggtcgtctgttatctttcagattctatttgaagttgttacctcgtacatctgtagaagttgatttcgaaatgtggaatggttacatttacgtttaaaaaaaaaaaaaaaaaaaaaaaaaaaaaaaccccagggcgnccactctagaggatccaagcttacgtacgcgtgcatgcgacgtca

SEQ ID NO: 128446 - DNA, 651 bp, Arabidopsis thaliana
  unsure (1)..(651): unsure at all n locations
tggcggcaannttcnttccanaaccctttcctcnaaangggacccgntggccaggtccttcccaaactgntctccgccngggccnccaattacggggggnctgggtttnttgnnggaatatgttnggccanccttggtgctggcggccttaagtggcccaaacccaaccccaatgttcccccctgaagagcggattgcgactcagttgcaacagttgcaagaaatgggattctacgacagagcagagaacataaggctttgcttgcaaccaatggtaacgttaacgctgctgtagaacgactcttggggagtattggccagtaacatacaggatcgcgaacttgtggatagaaaagccgctcatcgatacactcatttgttttccaatggtcatcttctttcctctttacccaatccccacaaccttttttacatactttgggtcgtctgttatctttcagattctatttgaagttgttacctcgtacatctgtagaagttgatttcgaaatgctggaatggttacatttacgttttcttatctccattttacttattaaatatagctgtagtgacgttgataatttgtgattgagcgttaagtttttcattcgaataacaaagataaatacaataataattgaaaaaaac

SEQ ID NO: 128447 - DNA, 633 bp, Arabidopsis thaliana
  unsure (1)..(633): unsure at all n locations
ccnnnnnnnnnnnnnnnnnnnnnnnnnnnnnnnnnnnnnnnnnnnnnnnnnnnnnnnnnnnnnnnnnnnnnnnccacgcgtccggtcaactaaagccaaccgagcaggaaaactcacgccagcatctcaaaaagtagtggaggaaaaatctgcccaaaaccagagaaggcgcaactccgacccaataaaacagaggcttgcatagccctgtttaagtgtgtaacttgagaattgtcagcccaagtcactctcccatcgttctgtacatacacagcttttgatgagaggaaagagataagatcatgggagaaacagaacacaaagtggttttcagataaaagagttgcttggttcatcgatcaatcaagaagagaatgaagccatattggcgtctctctctgccttcattgttgttgttatttatgttagccatcctttttttgtccatgactctctggagttggattcttatatgtatcggtaagtagtgttattatttaagttatatgaactctctcgaggtgtacatttgtcaaaccttttcagtttttgctgggaaaatggccatgtctaaaaaaaaaaaaaaaaggcggccgctcagagatccaagctacgtacgcggcatgnacgtca

SEQ ID NO: 128448 - DNA, 457 bp, Arabidopsis thaliana
caacaatggtggtgtcactcttctcttccagaaatgttttctatacgttaagcttatgcttatttgcagcattataccagccggttatgagtagaccggctaagtttgaagatgactttaggatcgcatggtccgatactcatatcactcaaattgacggaggcagagccattcagctcaaattggaccctagctcaggatgtggatttgcttcgaagaagcaatacttgttcggccgtgtgagcatgaaaatcaaactgatccccggtgattctgccgggactgtcactgccttctacatgaattcagataccgattcggtacgagacgagcttgattttgagttcttaggaaatcgaagtggacaaccttacacagtgcaaaccaatgtgtttgctcatggtaaaggcgatagagagcaaagagttaacctttggttcgacccttctcgtgattt

SEQ ID NO: 128449 - DNA, 478 bp, Arabidopsis thaliana
aatacgactctaatagggaaagctggtacgcctgcaggtaccggtccggaatttccgggtcgacccacgcgtccgagtgaacacaggaatcatcaaaggtgctgataccgcatcagcttcaatccattttcctccattgtcgagtaacaatgctagattgaagatgggaaaggtagcaaaccgaggttgtgtccagagaagctatggttgctcaagagctcgggctcaggtaatgtctctatcacgactactttcttgcaacgcatcatcatcttcttctcctcccgatagcagctccagtgaatacctcaaagactccggcctctgggaaacaccggttggggacatgagcgtggttttgtcgctgcaaattcagacaaaatgttctgatttgtttgctgaaactcctgctgtgtcttgagtctctcttcttctggagcctttgtcgtcgagttcttatgcccttcagggcttcttt

SEQ ID NO: 128450 - DNA, 1321 bp, Arabidopsis thaliana
  unsure (1)..(1321): unsure at all n locations
aaaagacgacagaaggggacgcacaacaatagactcaaagcaaacgcaactcatatccaatcgcttttaaacgccaataatcgcgttacagtaacaactcgaaaaatggtaacactaatcgtggccaccaccgccgatccagcgtcgatcaaccctgcggcggcgcgtctcgccatgcccggttggaccgccggacctatcttaccgccggacataaagagttttagtaacaagcaaacgagagtgattcaacacgatagatctatagtaaaagaagacgatctcgatttacgttgggaagaagctaccggtgaagttgttgatgaagtcatcttcctcagccgtcacaccgccgtctcaaatcgtcctgctttaactgttcatccgattggagtgcttcatctaaaggatggagaatcaccgccgcaaggaggaaagcctggatgggcggcgttgccaagcactagaattggtccatggtttcgtcttttgaagaaaatggctgaagctcatggtttagttcctgagtttgagataacattggaagctactcatcatggaccaataactaacaagccaacgatgtttttggagattggtagtaccgaggaatactggaagaggcaagacgcagctcaagtcatggctcttttaatgtgggaaggtcttgggctaggaggcagtgaagaagtagggaagtggaaaagtgaaaccggaaagaggaaagttcttttaggcattggaggtggacattatgctcctcgtcacatggatatagctttgaaagatgatatttgggtaggccatttgctttctggatactcattaccgatggaagatccaactcaaaccaaaacaacgcctggagagaattacattggtggaaattggagacaatcaattaaggcagcatttgaagctactaaagcatcattccccggaggcgagatcttggctcatcttgaccacaagagcttcaaaggatggcaaaagaaggccattacagagtttttagcagaagagagcatcaatgttgggaagccaaacgatttcacatgaactgtgagagacccccttaaaacatatcttgagatctgagtttttggtttattggttcagaatctatcattgatgatgatgggtttagattattttcagctgttacaagtaagtagagattgaaattcatctgtaagctgccctttttaaagttcacattcagatttaagataaaaaaaaaaaaaaaaaaaaagnnnnnnnnnnnnnnnnnnnnnnnnnnnnnnnnnnnnnnnnnnnnnnnnnnnnnnnnnnnnnnnaagga

SEQ ID NO: 128451 - DNA, 711 bp, Arabidopsis thaliana
  unsure (1)..(711): unsure at all n locations
acgcgtccgcgaacgcgtgggtgcgcatatcgacaattttccgagcggccagtttacgtattttgtttgtagttaacgtgtttcaaggactttgacaatggctgaggaagcgcataaggtaacattgaatgtctatgatttaagccaaggcttggcacgccagctctcacaatcactcctgggaaaggttattgaaggtgtatggcatacaggaatagttgtctatgggaatgagtacttttttggaggagggatacaacatttaccagttggaagaactccatatggaacaccaattcgaacgatagagttgggtctatcacatgtgcctaaagatgtattcgagatgtacttggaagaaatcagtcctcgttacacngctgaatcctacaatttacttactcacaactgcaacaacttcagcaacgaggtcgctcagtttttggtgggtaaagggattcctgactacattctccagcttcctaatgatgttctaaacagtcccatgggtggtcttataatgcctatgttgcaaggcctcgaaacaactctaaaggctgggtgctgttcctcaagttccacagttttaggccacaggcacaaccttttgggngctttttagtaaagnttatgggccccaaaatngtgataggtcccaaagctcgnggaagcagaaacctaactggaactnggaagggncccngttttttt

SEQ ID NO: 128452 - DNA, 643 bp, Arabidopsis thaliana
  unsure (1)..(643): unsure at all n locations
acgcgtgcgaactaatctaaaccagcccattatttatatgattccgtatgccaaccagggaacgagcttatgagaaggggaggacagccaatccgaaacgtcacgaaatccccagcgcttcggggatgccctcagcgacgaggaacatgtactcgggtgtatactatcacccccaaaaaaccaaactctgctttacgtaaagttgccagagtacgattaacctcgggatttgaaatcactgcttatatacctggtattggccataatttacaagaacattctgtagtcttagtaagagggggaagggttaaggatttacccggtgtgagatatcacattgttcgaggaaccctagatgctgtcggagtaaaggatcgtcaacaagggcgttctaaatatgggggcaaaaagccaaaattaaagattgagcccttattaaaaggaaacagatcttgaacccctttaagntcatgtacgccgaggnntgcngaggaaaaactggaaatccgtccatttttcggaancggtnngttacaggtgggtaccggattctgaaanccgggaaaatcntngggttccaatttcttcgggcctgaaaggtcccnaaggggacaanccntcggttngcagannggggnccctc

SEQ ID NO: 128453 - DNA, 892 bp, Arabidopsis thaliana
ggtcagattctataggatcaaacttatgggacttaagaatgatggaagggaataaaatcaaaaaagaaatcaaataaagaaaagagagagaaaataaagaaaaaataagtaaatcaaaatgaagtagaagaacccagattccaaatgaacaaattcaaacttgaaaaagtctctttctgattctcgaagaatgaggggcaaagagattgattgagaaagatctcttgttcttattataagatcgtgtgattggacccgcagatgtttggtaaaaagaataatcttatcctttgagaataatcaaaaatagaaagtgttcagttggaacatgaaaacgtgaccgagtttgtcctagttactcttcgggacggagtggaagaagggaggagattcgcgaacgaggaaagggacccaatgacttcgaaagaattgaacgaggagccgtatgaggtgaaaatctcatgtacggttctgtagagtggcagtaagggtgacttatctgtcaacttttccactatcacccccaaaaaaccaaactctgctttacgtaaagttgccagagtacgattaacctcgggatttgaaatcactgcttatatacctggtattggccataatttacaagaacattctgtagtcttagtaagagggggaagggttaaggatttacccggtgtgagatatcacattgttcgaggaaccctagatgctgtcggagtaaaggatcgtcaacaagggcgttctagtgcgttgtagattcttatccaagacttgtatcatttgatgatgccatgtgaatcgctagaaacatgtgaagtgtatggctaacccaataacgaaagtttcgtaaggggactggagcaggctaccacgagacaaaagatcttctttc

SEQ ID NO: 128454 - DNA, 392 bp, Arabidopsis thaliana
catacaacagggccctgtgttctctgagtcaagtcaggggctgatgaataaccctgtaccgggtcagtcggtctctggtggcaattctggtggttatttgtttccttcttcctctggatactgcaatgtttcagctgtcttgcctcatggaaggaatttgcaaaaccagccacctgtttccaccgtgcctagagacagattggctatgcaggattgtcctttgatagctcaatcctcgttgattaatcatcaccctcaagagttcatagatccacttcatgagttctttgatttctctgatcatgttcctgttcagaatctacaagcagagagtagtggagtaagggtggactcatccgtggaacttcataagaaaagtgaatggcaagatt

SEQ ID NO: 128455 - DNA, 976 bp, Arabidopsis thaliana
ttggccccggctttcctttattttgggttgtttgttgtgattgtgagggatacaatttccccggaacagttatgcccttattcgccaagtttattaggcttcctataggaaagtggttcgccttcaggtccggttcggaattccggggtggacccaggcgtccgaaaaaaggctttaggtcaaacagaaataacgacctaaagctatgtttaaagcttagcagttctccacatatatttcaatatataaaaagattacccctttttaaaaaataaaatagatatttgttttccgtaaaagaaaggggtaatcaaataaaatggagacggctaggcttttcaaattagtgtgtgtgatatgtattgccagtttgattccgaccatacgagccaatgttgctgatgagaccgatgagtattgggtaaacaaggccaatgaagctcgtaaacatacccttatggcttatcatcccgacccttatgagatcgtcgaccacttccacgagcgtcattacgacaactcgactgacgtcgaggggaccgaggaagagaaggcggtcgcttccgaggaagaggacgtcattgagatgatttctagtccgacaaacagcacaaggggtatcctaaccggtaggggcaagggaaaagcacacgcaaaatggagcaagctaacgggaccttgcaccgcaagcaaccccatcgataaatgctggcgttgccagcctgattgggccagacgtcgcaagaagctcgttcactgtgtccgtgggtttggttacaggaccaccggaggcaaacgcgcccgctttagaggatccaagcttacgtacgcgtgcattatggtgaaccctagacctggaacactacgtcacgctgtgatccagaaagaacctctatggatcgtttttaagcacgatatgagcattcggttaagccaagagctgatgattactagtgacaagacaatcgatgctcgt

SEQ ID NO: 128456 - DNA, 611 bp, Arabidopsis thaliana
  unsure (1)..(611): unsure at all n locations
aaaaaaaaaaaatatatcctcttccttctctcttaaaaacaaaagcaccgcttcaattccgccggcgttgtgagccaccacggtcatgacgtcggtttggctttttggtttatgttcagttatgtctctttaagttgtggttaaggagatttctgggttggtttcgatttcgtttcctcctcaatttctcttattagatctatagtttcgattggtgattttgcaaattagcgtggttttcttctctgactaaatactccctggcctaatcacgatcgctctatgccactcactgtcggtgttgtggtgattcgggttgggtgacctaattttgggtttcctcacacagcttcaacaatacggatctagggcgaaatccgcccagattttgggttctttctaccgggttcaagtcgcataggcgataatctccggccacggggttctcgacggtctctgaatgnttagnctgaggttccancggctgccatccaaaggatcccaagggttttcttnctnaggcttttaatntnaaggnnggaaagaggcaaatttcttnaaggggggctnaaccccggcggancnccggtaaattcggcctgggnnnttgg

SEQ ID NO: 128457 - DNA, 712 bp, Arabidopsis thaliana
  unsure (1)..(712): unsure at all n locations
cggaccgcgtggccagtatttcgtaacggccaaagtttcccaattctttttttttttgcataataagatctgaaatcggagatagaaaaaaaaaatcacatttttatttccgccggaacaaaaagcgatggttcagtgtagcaacaatctcctcggaatcctcaatttcttcacattcctcctctcaatcccaattctctccgccgggatctggctcggcaaaaatgcagcaaccgaatgcgaacgtttcctcgacaaaccaatggtcgtactcggaatcttcctcatgttcgtctcaatcgccggactcgtcggtgcttgttgccgtgtctcttgcctcctctggctttacctcttcgctatgttcctcctcattctcctcggcttcttgtttcacaatcttcggctttcggagtcacaaaccgggggcgccggtgaggttatatcggatcgggggtttaaaaggggtttcatgtcgccggttaccttaattggttgcagaaacgtgtcaacaatgctaagnatttgggacggatcaggagttgtttnatgactctganggttnnncacttatngnanctcgtaatgcagattaacggtgangtttttcaaatcaaacntaaagcnttcagctggtttttnagcggccatggctnaanttacctttnaccggtantggnaggtcggcctnaaangggtaatttggnaaggc

SEQ ID NO: 128458 - DNA, 491 bp, Arabidopsis thaliana
aatacgactttattagggaaacctggtacgcctgcaggtaccggtccggaattcccgggtcgacccacgcgtccgccgcacaaactgcttaaattgaagagacgactatgtgcgtaaaacgaagagactcaaaacaattttgggattcgtgagagatattgattcgctgcaatggaagaatctgttcatcaatcgatacgattcggctcagttgcagatttaatcatgtggaagaatcgacgcggagggtttcttctacttggatcaacgacattgttatggttcctctttgagaaatgtggatacagtttcttcccctttgttgttaatactcagcttctctccgtcgttatactcttcctctgggccaaatctgctattctcttcaataggcctatgcctcaactacctaatcttgaaatcactgaggaatttgtgtttatggtggctgatgctatacgagtctggatttaatacgtgctcgctgttgc

SEQ ID NO: 128459 - DNA, 637 bp, Arabidopsis thaliana
  unsure (1)..(637): unsure at all n locations
anngaaantactntgacccgaaaacagatttaagttgaagaaccctccagggcccncaanagaagaaganttntttttcgaaagaaaaagaanttgcctattagnagattccaagngnttgnggattacaagtggacctccanaactgaanagatcaactgctctggaactgaccgacccttgaagaacctaatcttctacttgaggaagcgcgagaaagcagaatccgaggcaagagaagcttaaactcacaggcggtctcaaagaagaggaagaggaagaagagaaaccacaatctaatgaagtttttgtctcgatggaactcatagccaccgttggtctgaaaaaattacaagaactggtggaatctgttccatcttaactctgaaactgcttcaggttcaatcctagggactacaggaatgtcctgaatcatcaaggaaaagaaccgaatggttggttttgtaaatctatcaacaacattaagctccataacgcagtccacgtatatggtttttgtttggttgtttttgggatccatgtgttgatcgatttggttgttcaaagaaaagagagaaagcttattctantcaacatgttacgaggatagaaacnccaagacttttnggctnnnnnc

SEQ ID NO: 128460 - DNA, 890 bp, Arabidopsis thaliana
  unsure (1)..(890): unsure at all n locations
tatacgactccttaagggaaagctggtacgcctgcaggtaccggtccggaattcccgggtcgacccacgcgtncggatctttctaaaagtcgatcatccaacagaacattacatctttcatgggataaaattatgttcatagagaaaaggatgcccgagcttggagccggagaagaaagtggctgcatcaacagagaaattttaaagaagctggaagaatagctgcagaagccaagtctttaaatttagaaaaggataagacacagatggaaacaggaaaagctaacgctgagctcgaaaaagcagagcatgagattgaagaaaccatcaagaggctacaagagatagagaagttgattttgtcgaaagaaaaagaattggctattagtagattccagaggttgcggattgacagtggaactgcaaaagctgagagatcagctgctctggaactgagcgaccttgaagaagctaatcttctacttgaggaagcgcaagaaagcagaatccgaggcagagaagcttaaactcacaggcgggtctcaaagaagaggaagaggaagaagggaaagcaaaatcttatgaagtttttgtctcgatggaactcatagccaccgttggtttgaaaaaattacaagaactggtggaatctgttccatcttaactctgaaactgcttcaggttcaatcctagggacaaaaaggaatgtcttgaatcatcaaggaaaagaaccgaatggttggttttgtaaatctatcaacaacattaagctccataacgcagtccacgtatatggtttttgtttggttgttaaaaaaaaaaaaaaaaaaaaaaaagggcggccgctctagaggatccaagcttacgtacgcgtgcatgggacgtcatag

SEQ ID NO: 128461 - DNA, 404 bp, Arabidopsis thaliana
ctcgttgctaagaaaaaaaaacatcatcttctgagatttgaaccttttaatactcgaaatggacaagaagaagaagagaaaaagatgtattgtcttcaagttgcagcatatcacgtgttcttcaacgcatctcggatatgttatcttcttgctctgattatttttgtctttctcagattcttcgctattttccagaatatctcaccagataatcgagtcggcgagccaagaacggcatcgtttatgaggttcagtgatacacaacaagctcagggagattttaatctaactttctctggtgttttacttagaatctgtaatcaaagatgtcgctgaaattgttttttagttttattttgtagtattgtttaattatgtacttatcgctatattaattaccatgt

SEQ ID NO: 128462 - DNA, 901 bp, Arabidopsis thaliana
  unsure (1)..(901): unsure at all n locations
ccnnnnnnnnnnnnnnnnnnnnnnnnnnnnnnnnnnnnnnnnnnnnnnnnnnnnnnnnnnnnnnnnnnnnnnnccacgcgtccggtcttctccatcgtttctccctgaagatttgttctactactctttttgggttgcaggacacattgctaaagacgggaagcctggtcctctcgtagatgacaagggtcggttcttcaagccacttcagggcgattctcgtggtgaaatcgaggtaaagttctacgaatctttctcctcaaacacagaggttccagaacacatccatagatatttcccggtgtatcacggcactcaagcagttgaaggttctgatggagcagccatgatggtgttggaaaatcttcttgcagaatacacaaaaccatcagtaatggatgttaagatgggttcgagaacatggtatcctgatgcatctgaagaatacatccaaaaatgtttgaagaaagacacgggtaccacaaccgtgtcatcgggtttcaggatctctggtttcgaagtgtatgatcacaaagaatcgagtttctggaagcccgagaggaagcttcttcgcgggctcgatgtagatggagcgagattgactctgaggaagtttgtatcatctaactcactttcgggacacttggctcgaaacctgacctctgcttttgcctcgagtgtttacggctggttcccacgggattccttaaccgcagttgcctggaacctcaagacctggggtttcgagaacccaaaacggtctaccatttaaactcttgtccgntttaatggctatggnataatccattttaagggaatntnntgttnttgcccaagtaagctgnggntttnccagtcttntgaaagggnattccnantttgggggntttccttaaaantc

SEQ ID NO: 128463 - DNA, 720 bp, Arabidopsis thaliana
  unsure (1)..(720): unsure at all n locations
cacgggtaccacaaccgtgtcatcgggtttnaggatctctggtttcgaagtgtatgatcacaaagaatcgagtttntggaagcccgagaggaagcttcttcgcgggctcgatgtagatggagcgagattgactcttaggaagtttgtatcatctaactcactttcggacactggctcgaaacctgactctgcttttgcctcgagtgtttacggcggttcccacgggatcttaacgcagttgctggaactcaagacctggttcgagaaccaaacgctctaccatttcaactcttgttcgattttaatggtctatgagaatgaatccatcttaaagggaaatgatgatgatgctagaccacaagtcaagctggtggattttgctcatgttcttgatggtaatggtgtcattgaccataacttcttgggtggtctttgctctttcataaacttcattcgtgagattcttcagagcccagatgagtctgcagattcttagatttaagttaatttgtttgttatggctttggctgattccaatttttggatataaacttatgtttccttcacatatgtacttgattacctaaagagcagaatacattcgtactcttttctcaaagagtattccatttcaaaaaaaaaaaaaaaaaaaaaaaaaaaagggcggccgctctagaggatccaagcttacgtacgcgtgcatgcgacgtcatagctttt

SEQ ID NO: 128464 - DNA, 1166 bp, Arabidopsis thaliana
  unsure (1)..(1166): unsure at all n locations
nnnnnnnnnnnnnnnnnnnnnnnnnnnnnnnnnnnnnnnnnnnnnnnnnnnnnnnnnnnnnnnnnnnccacgcgtccggcctatatgcattggtagacatgcctttggtgaccagtatcgtgccactgatacagtaattaaagggccaggaaagttgaaaatggtttttgtcccagaagatggaaacgcacctgtggagctagatgtatatgatttcaagggcccaggtgtcgcacttgctatgtacaacgtagatgagtcaattagagcttttgctgagtcatctatggcgatggcattaactaagaaatggccattatacttgagcaccaagaacacaattctcaagaaatatgatggcagatttaaggacatatttcaagaagtttatgaggcgaattggaagcaaaagtttgaagagcactcaatctggtacgagcaccggttgattgatgacatggtggcttacgcagtcaaaagtgaaggtggctatgtctgggcttgcaaaaactacgacggtgatgttcaaagcgatcttcttgcccaagggtttggctcattaggcctcatgacctccgttttgctgtccgctgatgggaaaacactcgagtcggaagcggctcatggaacagtaactcggcatttccgactgcaccaaaagggacaagaaaccagtactaacagcatagcctcaatatttgcatggacacgcggcttagaacacagggcgaaactggataagaacgagaaattaatggatttcgtgaagaagctcgagtcgtcatgtgtaaacactgttgagacagggaaaatgaccaaggatcttgcccttttaatccatggtcccaaggtgagtagggatttgtttttgaacacggaagagttcattgatgcagtagcctccaagctcaaaacacagttcaaagagcttcctcttgtctgaccattcctgggaattgggaacaatacaaaaataatgctcgcaataattcataacccaacacaaaacaaaaataatattggcgggtttatatgaatattttggttggaaataaacgtttttgcttaatttttccaatttattttaaaaatttgagtgacaaaaaaaaaaaaaaaggcggcccgctctagaggatccaagcttacgtacgcgtgcatgcgacgtc

SEQ ID NO: 128465 - DNA, 1125 bp, Arabidopsis thaliana
  unsure (1)..(1125): unsure at all n locations
cccacgcgtccgcacaatgtcttcgaaagacaagaaaccgtcgttgccatcgagtagtcgtggtggaatccgagctcggtccgatcttaaccgggggtcgggtcctgactccgacagtgattccgatggtccacaagaatactacacaggtggtgagaaaagtggtatgttagttcaagatccatcgaaaaaagatgatgttgatgagatatttaatcaagctagacaactaggagctgtagaaggacctcttgagccacctccgagttccaggagtttcactggaactggtagattgctttctggtgaaaatgtgcctactggtaatcaacagcctgagcctgttgttcacaacattgttttctggtctaatggtttcactattgatgatggtcctttgaggaaattggatgatcctgagaatgcatcgtttctcgagagcattcgaaagtctgagtgcccgaaagagcttgagcctgccgatagaagagctccggttcatgtcaacttgatgcgaaaggaagagaaatgccctgaaagacagaaacgtagggtttcttttcagggtgttggaagaactctaggtggtagcaatgaaggtagcggaagtagctcacctgtggctccagactccgctcccattcccatccaaaccgaaccagcaccatctcaaagtcttgtaatagatgaaaccgttccaaccacatcgatacagcttagactagcggatgggacacgtctggtggctaagttcaatcaccatcacacggtcaacgacattcgcggtttcattgactcatctcgacctggagcctcgttgaactaccagcttcagacaatggggttcccacctaagcctttgactgatctccctcagaccattgaagaagctggtctcgccaactctgttgttcttcagaaattctagaaaattctacaaggtgtggttctttttgtctatctatatgcattataatgagattttcataactgttgtagtaaccaggttctttaaaatgtaagttacttcttcactctgtatactcagcataagccggcggggacttgtcgcacagtttttctaaatctctctccttttttttgtgtccnttaatgtttaattat

SEQ ID NO: 128466 - DNA, 1084 bp, Arabidopsis thaliana
  unsure (1)..(1084): unsure at all n locations
nnnnnnnnnctaatacgactcactatagggaacagctggtacgcctgcaggtaccggtccggatacccgggtcgacccacgcgtccgtacggctgcgagaagacgacagaagggtacggctgcgagaagacgacagaagggggtgctaggttgttcttgggtggtataggtgtggaaaacaccggaactgagattgcaactgctttgaacaatatggtcgtgagctgcgagtacattctcaaactaaagcatgaaatcgaggagcaatgtactgaggtatttcctgcaccagcagatcgagagaggataaaatcatgtctatccgagctaggcgagttaagcagcacgttcaagcagttactcaactcaggcatggaacagctagtagcaaccgtaacaccaagaatccgtccggttctagacaccgtggctaccataagctacgagttaacagaaaccgagtacgcagagaatgaggtgaacgacccttgggtccaaagacttctccactcagtcgaaacaaatgccgcgtggctccaaccactaatgacatccaacaactacgactcgtttctgcatctcataattgatttcatagttaagagactcgaagtcataatgatgcagaaacggtttagccagcttggtgggcttcagcttgatcgagacacaagggctttggttagccatttctcgggtatgactcaaagaacagtgagagataagtttgctcggttaacgcagatggcgacgatactgaacttggaaaaggtctcagagattttggacttttggggagaaaactcaggacccatgacttggagactcacaccagctgaggttagacgggttttgggtctccgggtcgagttcaaacccgaatcaattgctgctctcaagttgtgatgttacttcttttctttattatgtcatctacacaactcgaaccaattctttcgaaatctgattggttcctcaaaaaaaaaaaaaaaaaaaaaaaaaaaaaannnnnnnnnnnnnnnnnnnnnnnnnnnnnnnnnnnnnnnnnnnnnnnnnnnnnnnnnnnnnnnnnnnngttcaattc

SEQ ID NO: 128467 - DNA, 535 bp, Arabidopsis thaliana
ctttactcgagagagagaagttctaaagtcctgacgcgtgggaaagctttttcagcttctttgttgaattgcgagcagaggtagaaatcagcaggaaacaaaaatgttgttcttttcttacttcaaggatttggttggacaagaagtgacggttgagctgaagaatgatttagccataagaggaactcttcactcagttgatcagtatctgaatatcaagctcgagaacactagggttgttgaccaggacaagtaccctcacatgctttcagtgagaaactgtttcatcagaggatctgtggtaaggtacgtgcagttacctaaagatggagtcgatgttgatttgcttcacgacgcagctagaagagaagctaggggtggctgattctgaaatatctttgtatctccaaaacttgaatacttttcattcggcgtaatggctttataatgaatatttccctgatgtagagccaatggtatggccatgaatcttgttccattttattaacaatggataatttaatttcttttcctc

SEQ ID NO: 128468 - DNA, 518 bp, Arabidopsis thaliana
  unsure (1)..(518): unsure at all n locations
atgatctnnnnnnnnnnnnnnnnnnnnnnnnnnnnnnnnnnnnnnnnnnnnnnnnnnnnnnnnnnnnnnnnnnnnnnnnnnnccacgcgtccgcccacgcgtccgatgctgcaaaatgctcttggagtgcctctcagaggattctgtatgctcagttctccaagtggtttcgtctatctcatcatgtaaactcattgaggagatgtgcaagaggaagttctccatgcacttcgactattgtaccactgcaagtttggactttgtcttgttagatcagaccaccttcagtgatattcttgagtctgcagatctgacggtgacatctgaagaaaagattctgaatgctgttctcatgtggtgcatgaaagctgaggagtcgcacagttggggagtaatagatgagatgatgaactatgctgaccccaaaagtttgttcaaagaaaggcttcagtcacttgatgacctgttacctcatgtacgcttctctttgttgccatatgagttacttaaaaggttag

SEQ ID NO: 128469 - DNA, 382 bp, Arabidopsis thaliana
atcaaccggcgaatatagtgacataaaaatctacctcagtgaccatagtctcactttccaatcccacaaagtcattctaagtctttggagtgttgcatttgcaaagatgtttacaaatgggatgagtgaaagccattcatcaacgatttacctaaccgatgtatcaccagaagcattcaaggctatgatgaatttcatgtatagtggagagttgaacatggaagacactgtgaattttggcaccgagttgattcatcttctctttctagctgaccggtttggagttgttccacttcatcaagaatgctgcaaaatgctcttggagtgcctctcagaggattctgtatgctcagttctccaagtggtttcgtctatctcatca

SEQ ID NO: 128470 - DNA, 495 bp, Arabidopsis thaliana
  unsure (1)..(495): unsure at all n locations
aagtagtagaagctgtcagaagacaacgtgaaggatttgtcaagtgatttgcagaaactaattgatgtatacatgaagaagatagaggagctctacaaacagaaagaaaaggaattgatgaaggtgtgaccataatggttgttaggggaggagccgtaattcaccaatctggtaaaatcccgcaatttccaatgccttcgtttcttttactatttgccctgatgtttccttggggtacaagcatgtcttttgggaattgagagcaactttgtttaaattttcggttgcaaaatttttagaagaagcctctgatattttgtttcttttattaaaggatccctctttgtacagcaaaactcttgttaattttggttcatcaccccaattatcaaatcttatttttggcttaaaaaaaaaaacaaaagnnnnnnnnnnnnnnnnnnnnnnnnnnnnnnnnnnnnnnnnnnnnnnnnnnnnnnnnnnnnnnnnnncacc

SEQ ID NO: 128471 - DNA, 482 bp, Arabidopsis thaliana
gccggcactatacgactcttatagggaaagctggtacgcctgcaggtaccggtccggaattcccgggtcgacccacgcgtccggcagaactatgtaccggcaatgttcttttccaaaatgattctccggctactttacttgcaacggtcatcggtataatcggatcaattgaccaagaaatgcttgccaaaggacgtgaggcatgcaagtacttcaccaaaaatcatttaccatatgagaggaaccaggagagtaacaatttggagtacctaataccgataaagtcatcgctcacgcgtagactaccaacgggtgaccaaggcttcatagactttgtggcatacttgctccaagttgatccatagaaacgcccgtctgcatttgaagctcttaaacatccttggttgacttatccctacgaacccatatctgcctgattctgtaggtgcaacaaaagcagaatggatgagaagctagtcaag

SEQ ID NO: 128472 - DNA, 430 bp, Arabidopsis thaliana
ccaaactccaattttttttgtttctctcaataatatttgtgttcatactgtttcgctgtttccaatacatactaatggataacacaaaccgtcttcgccgccttcactgtcataaacaacccaagttcactcatagctctcaagaagtgagtagtatgaaatgggagtttatcaatatgaccgaacaagaagaagatctcatctttagaatgtacagacttgttggcgacaggtgggatttaatagcaagaagagtggtgggacgtgaggcaaaggagatagagagatactggattatgagaaattgtgactatttctcccacaaatgacgcaaaagtcactctctttaaaaaatctcgagaatctccctgtttttctatttctcatcctcattaaataatttctgtgattgtggacaagaaaagcttta

SEQ ID NO: 128473 - DNA, 502 bp, Arabidopsis thaliana
  unsure (1)..(502): unsure at all n locations
actcaatanagggaaagacggtacgcctgcaggtaccggtccggaattcccggtgtcgacccacncggtaacgctctcatcatacttcccaacatcaaagaagacctttacttctggttagaatagaccaagaacactgagtacgacaaagaaccatgatgaatctttcttctcgtcgcgcctcttccactctcacattgagcttcactgttctccttatagcttccacaggttcgtatggctcaacattcacattcgctaatcggtgcggctacaccgtatggcctggaatcctatcgaatgctggctcacctactctctccaccaccggatttgagctccctaaaggcacctctcgctctctccaagctcccaccggttggtccggtcgattctgggctcgtaccggttgcaagttcgacagttctggctccggaacatgcaaaaccggtgactgcggctcaacgctgtcaaatgccccgggcttggtgccgcaccgcct

SEQ ID NO: 128474 - DNA, 556 bp, Arabidopsis thaliana
  unsure (1)..(556): unsure at all n locations
cccacgcgtccgaaatcttatcacaaaccaaaaaaaactttctttcaaaatcgttctctgaggcattttaacgaacagatggcggacttaaacggtgcgtattacggaccatcgattccaccgccgaagaaagtctctcacagccacggcagacgcggcggtggatgcggttgtttaggtgactgtcttggctgctgcggctgctgtatcttaagcgtcatcttcaacatcctcataaccatagccgtcttattaggcatagctgctctaatcatctggctcattttcagacccaacgctatcaaattccacgtcaccgacgctaaactcaccgaattcacactcgacccaaccaacaacctccgatacaatctcgatctcaatttcacaatccgtaaccctaaccggccggatcggtgtttactatgatgaaatcgaagtcagagggtcctcggtgatcagggttcggatgggaacaacattttggaggttttccngggcatagncacggcggtngntngcctacttgtgggcagaattgggntttttcggngga

SEQ ID NO: 128475 - DNA, 761 bp, Arabidopsis thaliana
cggctacaatacgactcactttagggaaagctcgtacgcctgcaggtaccggtccggaattcccgggtcgacccacgcgtccggtgaattttcccgtgaattttcgcggagcttttctcgggaaaataatctaaagaagattcgagattaagacacgtcatctccggtttcgtagagagatctgaagaacgagtctcttctcttctccgatgggaacgctacagtcatggagaaaagcctatggagccctaaaagactccaccaaagtcggacttgtccgtgtcaacagcgaatacgccgatttagatgttgccatagtcaaagctaccaatcatgttgagtgtcctcccaaagatcgccatctcagaaaaatcttcgctgcaacatcagtgactcgtgctcgagcagatgttgcttattgtattcacgccctttcacggcgtttgcataaaaccaggaattggacggttgctttgaaaacactaattgtgatacatcggcttctaagggaaggagatccaactttcagagaggaactattgaatttttcgcagagagggcggattttgcaactttctaattttaaggatgattcaagtcctattgcttgggattgttcagcttgggtacgtacttatgcattgtttcttgaggaacggcttgaatgcttcagggttttaaaatatgatactgaggccgaacgtcttccgaaatctaacccagggcaggataaggggtatagtagaaccagggatttagat

SEQ ID NO: 128476 - DNA, 371 bp, Arabidopsis thaliana
ccgggtcatccacgcgtcccaagaaagctgaggcacaaggagctgagtttgtgtcatttgatccagtgaaaggcgaatggaagtttcgggtcgagcattttagtcccgtataagctgggcgacgaagatgaagaagatggagtttaggcatcccagggttactctcttggaactcatctgttttgtgtagtgaatgttggaattgtgcagtagcaaatagtgctctactcctttgttgtgtgtttctttctataccttttttctcatagtttttctcttgcttccttataattgtctccttttttgggggttcggtaatcacggtgtgtattgtgtaatggaacctaatggtatctgttaatctatttgaa

SEQ ID NO: 128477 - DNA, 479 bp, Arabidopsis thaliana
agggaaagcacggtacgcctgcaggtaccggtccggaattcccgggtcgacccacgggtacgccggcttcaaaccctactaagtttggcatcaccctacagccatatcttgaagagtcaggctgatagtagaacaggagcacagttactggagagtattattttcattatcgattctgtccgacccttgatccgcaagctgcctctttgtgtcacaggagatctggaacaggatctaaagcatatgattgttcggcattcgtttctaactggtgtgcatgcttgccttaggggtctttggtctgggagtaaattggccgggaaaggggttagcatagttgagcatcttcttcagttcttttttaagccgctggaggcccaagggtcccattacacacagattgctgggccggcccttttttggcttggcttgcttattcgccatggaaactttttttataataccttaaggtgggagaa

SEQ ID NO: 128478 - DNA, 886 bp, Arabidopsis thaliana
  unsure (1)..(886): unsure at all n locations
nnnnnnnnnnnnnnnnnnnnnnnnnnnnnnnnnnnnnnnnnnnnnnnnnnnnnnnnnnnnnnnnnnnnnnnnnccacgcgtccggaacggatgaggctagatgaagaggttctcatggatttctttagggagtatataagtgcatctaaagtggagagcagaatcagaataatgagcgatctgagagaacttgcatctgcagagagtctagatgcatttacactcgtgtactcgaatattctagagcaccagcctgactgcccggccgaggtcgtagagaagcttgttagtctgcgtgaaggcataccacggaaggacacaaaagaggtggtacaagagtgcaaagagatatatgagaacacactggtagatggtaatcctccaaagacaggatttgtattcccgagagtcaagtgcttaactgcttccaaaggatctatgtggcgaaaactcacttaatctgtaaaacagcgttcagcgtttgcgtccgtaactgcttttctagttgagatgatgttctttctccaaattatggcgtttgcgtccatgtcttctttttctttgcatggtatctttcctctgtaaattctgtgttttctcttgttttgttctttttcttacctttattcctggatttgaaagttgaaacgctcggtggccacttgcactaggatattatcccgttgtatttaggaggcgtatttttttgtcgcaaattttaattctactgtttcatttaattttgataaaatcttcttaaagttcgtctctctgtcataacaaaaaaaaaaaaaaaaaaaaaaaaagnnnnnnnnnnnnnnnnnnnnnnnnnnnnnnnnnnnnnnnnnnnnnnnnnnnnnnnnnnnnnnnnnnnnnnnnnnncatt

SEQ ID NO: 128479 - DNA, 681 bp, Arabidopsis thaliana
  unsure (1)..(681): unsure at all n locations
cgnnnnnnnnnnnnnnnnnnnnnnnnnnnnnnnnnnnnnnnnnnnnnnnnnnnnnnnnnnnnnnnnnnnnnnccacgcgtccgggcttttaggacctatcatagttacacgtatatctgggagcctagcaatggtcgtcttatcatgttacccactaatagcaaagttatctggtttagcccttaccgtgactgtaacttctgcatccgtagcaaagagtgttttaggtacttctgctataactggattattcatccttcaaaacaaggctgtgagacaagaccaaagaggagcagctaatggaattgccatgacagcgatgtctcttttcaaagccataggtccagcagcagcaggaatcattttttcgtggagcgagaaacgtcagggtgctgcttttctccctggcacccaaatggtattctttatactgaatgtggttttggcacttggagttgtattgacattcaaaccatttctagctgaaacacaacagtagaaaatgatgaagattttgatggtattcaaattacataatcagaatgtattgtataatatatagatttgtatgtctgatccaaagttagattagaaaaatggcaagagaaaagaaaaaaaaaaaagggcgaccgctctagaggatccaagcttacgtacgcgtgcgttcgacctcataatttt

SEQ ID NO: 128480 - DNA, 768 bp, Arabidopsis thaliana
actcaaatcgtctaattctctctctatctctctctctatctctacttattatttcttaagttgaagaaacagagattaaaaaataaaaagccttctcgggttgtttaaaaatactgtttcaccgcagtaattaatttaaaaattactgtcgatgacgtggcatgcacttaaaaagaaacagccatgaatacaaaaacgatgcgtcttcccccacgccgagttacctccggcgccgtcgccggcaaacaaacggaatccgccgtgataaatccaccaccgccgccgactaaatccatcgtcaagaaaacgccgatcatccctcgaccaactaccaccgccactgtagccttagccgagccggtttgttcgaatcagctcttagccggttacttggctcatgagtttctcaacaatggcacactcttcggagagctttggaatccaactaaagcccaagccggcccattaacgacccaatctattgaccctagaaagaataagccgagccatgatatagagccgagtgatcataaacggaggagatatgtggaggttgctaacatactccgggtagatgggacccatttgcccggtatcgttaacccgtcacagcttgcccgattccttaaattgtgatgcgtaaatccacgtggagtcgtattattggttcgtcgtttagaaaaacaaaacagctgtaacaccgaaacattcctcttctctatcttttattttttgtccattaatgttttttagaaaaaaaaaaaagaa

SEQ ID NO: 128481 - DNA, 518 bp, Arabidopsis thaliana
taatacgactcatatagggaaagccggtacgcctgcaggtaccggtccggaattcccttgtcgacccacgcgtccgagaaatctccgccggtttcttctctcgccggcgttttgacagtcgtcgtcactgttaccgtctcaaaagcttactatttcagttataaaaaaaacaatcaaagagctaagagatcttcttctttcatcctcgtctttcttcttcgattttcttattattattttaataatttcctagagatctccacaataaaaaaattgggggttatcgttgccatcataacgtgtattagtaaagcagtagtagtgctgatgtatttgctcacgactaagtcccattcctcgtctcttctttttcttctccttaattagtttgggcaacacgatcacagttgattccttcacaatcgatttgttaaattaagaaatcattttcttctctctctctctctctctgtctaaaatatctatcggttgaagaagatctgaagcttaactttgct

SEQ ID NO: 128482 - DNA, 400 bp, Arabidopsis thaliana
ctctctctcactatgtctctctcgcaaacgaatttcctcagttcttcattactctcatcgagccatgacctgcgaattccttattctagagcggtactttcgtatccccgtgtccaaacgcaccggattctctgtgctgcgaagcgagccgggaagcggagatatccttctgagaggaggaagctgaggacagagcagaaggaagctgtggctaaggttaagaacaagcttgaaggagtttggcgtctctctaagctcggagttcctgttggtgatgaccctggaaaggaccttctcgggatttcagaagggttgcttcaagcccatcgcttaagttatcgagtttccggttgcatcaatgctgccagaagaagcattttcagtgattaggaaatctttt

SEQ ID NO: 128483 - DNA, 497 bp, Arabidopsis thaliana
  unsure (1)..(497): unsure at all n locations
agaatactctccactccttcataatttctctggcaacgatggcgatgatatctcaccgtctccgacgagctttactcactgcgacttcctatgttagccgatcaattagctcttcgatcacaccagcgtctgagttcccttctgtgtcggcggcggtgttaaagagatccgttatagggcgttcgacggaagtagctactcgagcaccggcgagactgttttcaacgaggcagtacaggctttacaaagaaggtgatgagatcacggaagacactgtgttgttcgaaggatgtgattataatcactggcttatcactatggatttctccaaagagggaaactcctaagtctccagaagaaatggtcgctgcttatgaaggaactttcgcccaaggactttgcatcagcgtgggagaggtaagcaaagnatgattnttntagnccaacacttccagggttcagcatctgctacaggtagaagtcaggntccgggggtt

SEQ ID NO: 128484 - DNA, 469 bp, Arabidopsis thaliana
  unsure (1)..(469): unsure at all n locations
gcannnnnnnnnnnnnnnnnnnnnnnnnnnnnnnnnnnnnnnnnnnnnnnnnnnnnnnnnnnnnnnnnnnccacgcgtccgagagatactcattaggaagaaaatcagacaaaggagaaactattttttgtcatctcttgtttggtggtttatattttggttgtgagtcctgtgttgacctataagccgatcaatttcgacatgcctcttttgatctttgtttgacttctgatcaacttctcaactttgtacttgcaaggcttgaaaaatgaggcgtgagtctccatggctatggaaagtagaaagcagacggcttctatggctattaggactcacatttgctctcattgttacctttcaatacatcgagctaccgtacgctatctcatccatcttttcttccaccaagattcccatttcaagaaactcaacttcacttataggtaactcgacttccgctatagcgccg

SEQ ID NO: 128485 - DNA, 534 bp, Arabidopsis thaliana
taatacgactcatttatagggaaagctggtacgcctgcaggtaccggtccggaattcccgtgtcgacccacgcgtccggtcatgcatatggaacttttggttatgattcctggaaacttgggcgaggatggtatcccgttgatggttatagaaagaccagaagcttcaatcatgggcgtggttacagtgatgagaaagcagataggcttaatgagctatgtcgaggaccaaggagtagtgatttcaagaatccacaagttcttaactcttcaatgctagatgcaatgaagcaagacgtttcagcagtagatctccagcgctacaatggggagaatttccctgaatcatttgtgaaagcaaaattctttgtgatcaagtcatacagcgaagatgatgttcataactgtattaagtatggtgcatggtcgagcacaccaactggcaacaagaagttgaatgctgcatattatgaagccaaagaaaactcccaagaatgccctgtgtatcttctgttctcggtgaatgcaagtgggc

SEQ ID NO: 128486 - DNA, 934 bp, Arabidopsis thaliana
  unsure (1)..(934): unsure at all n locations
cgnnnnnnnnnnnnnnnnnnnnnnnnnnnggggtttgaaaacaccgatatggcgttacactatggtactatgtttagggactgcatccgtcatcagattgttgcaaaatatgttttggactcggagcacgtgaagaagtttttttactacatacagcttcccaatttcgacattgctgctgatgctgctgcaacttttaaggaacttctgacaaggcacaagtctacagttgctgatttctcattaagaatgaagactggttttttgcagactacaactcaaagcttcttgaatcaactaattatattacccgacggcaagctattaagttgttgggcgatatattattggataggtcaaattcggctgtgatgacgaagtatgtgagctcgatggataacttgaggattctgatgaatcttctcagagaatcaagcaagactattcagatagaagctttccatgttttcaagctgtttgtagcgaaccaaaacaagccttcagacatcgccaacattctggtggcaaacagaaacaagcttctgagattgttggctgatatcaagccggacaaagaggacgagaggtttgacgcagacaaagctcaggttgtgagagagattgcaaaccttaagctgcgagagcttgcttgagcatgcacatatacacagaagctcatgatttctgttaatctttgaaagacatttttggaccatcaaagattgttgttatttattaggtactgtttcttttctctctctcagcatctacgctgttgactactctggatttttttagatcatatgaattcacatgtacactcctttagtgttgatcaaataaaaatggcattataaatcctaaaaaaaaaaaaaaaaaaaaaagggcggccgctctagaggatccaagcttacgtacgcgtgcatgcgacgtc

SEQ ID NO: 128487 - DNA, 453 bp, Arabidopsis thaliana
gataacggagatctgcatcgtagaaatagccggggggggatcgacagtgcatagtcgtgcttgtcgatggcgatcaaagcgggaaaggtgttgagaacggcgactgctgctgcgaggaagttccaacagaaacagttctcagcctcatcttcggcgtttccagagccaccaccggtgtctccatcttccggtgtaggagcatttctgggtattcccaagattattcgctcggaatccgatttattagtctccaagtacatcagaattgcccagggtcgattgacgaagaatggtgattacacagaggagaagctaaagaaaatgttgtctggtgaagacagggtatggatcggtgagaccatgaagttactcgagggtcgcaacactggactagtatcctctaaaataccaaactccggtcgattcaaaaagtgattcctctgtttccatcat

SEQ ID NO: 128488 - DNA, 555 bp, Arabidopsis thaliana
  unsure (1)..(555): unsure at all n locations
caaagtacgctgctgaaatcgtcaattatgctcggcgacgagggatccatgtcttggctgagattgatgttccaggacatgctctctcatggggaaagggatatcctgccttgtggccctccaagaattgtcaagaaccacttgacgtgagcagtgacttcacattcaaagtcattgatggcattctctctgatttcagcaagatctttaagtttaaatttgtccacttgggtggtgatgaagtaaatacaacttgttggtctgcaacaccgcgaatagcccaatggcttaaaaaacatcggatgagtgaaaaagaagcctatcaatatttcgtgttgcgggcgcaaaaaatcgccttgtctcacggatatgaaattatcaactgggaagagaccttcatcaattttgggaagcaaattaaaccggaaaacccgtggttcacaactggctttacacaggctttttgagatttgcctccggtccggttttcagggtgtatagttagtaccccaggattttggatttggcaatggcggcctgaaggntttcggaagc

SEQ ID NO: 128489 - DNA, 805 bp, Arabidopsis thaliana
  unsure (1)..(805): unsure at all n locations
nnnnnnnnnnnnnnnnnnnnnnnnnnnnnnnnnnnnnnnnnnnnnnnnnnnnnnnnnnnnnnnnnnnnnnnnnnnccacgcgtccggtggtagcggacaacatgttgaatatgatcaacgtcctgatatgtttagagggacagttagatacgcaagtgcacatgctcatttagggagaactgctagcagaagggatgatctggaatcattagcatatacactgatctttcttcaccgaggtagattgccatggcaaggatatcagggagataacaagtcattccttgtttgcaaaaagaagatggcaacatcgccggatatgctttgttgtttttgtccccctcctttcaaacaatttcttgagatcgtggtaaatatgaaatttgatgaagaacccaactatggaaagttagtatctctgtttcaagacctcttgggcgaaaatccggcaattaggcctataaacacagagggtgctcaaaagatcatattccaagttggccagaagcgaggtaggttgagcattggggaggaagaagaagatgcccctaggaaaaaggtccgtctaggagtccctgcaacgcaatggatatcgatttacaatgccaggcaaccaatgaagcagaggtatcattataatgtggctgatataagactggcacagccatattgtagagagggtattgcagatgggtttgttgataaagctcgtgtatcaatcattgttccgaatctcttggggcattggttaatgggatgcttggaacttggcttcacgggacccaagtctttgaactctctccct

SEQ ID NO: 128490 - DNA, 799 bp, Arabidopsis thaliana
  unsure (1)..(799): unsure at all n locations
nnnnnnnnnnnnnnnnnnnnnnnnnnnnnnnnnnnnnnnnnnnnnnnnnnnnnnnnnnnnnnnnnnnnccacgcgtccggaaaaagcttgaagtcggggtgctacaccggcgttggggttcttgatcttcatctacctgggttttgtctcaaacaaacaaatctccgaagacttattttgtccttccagaatccggagatttactgaaatggcttcacgcaataatctaaaccctcatctgggtaaggaaatgagatgctacatgacggttctcctcaggtctctctctagtgatgccactcaccatagattccaccaggcagactcaccctcgcgtgcggccagaatactatattggtagctgggaagctccgagtgatccgaaagatgcagagagaaagcttgctcagcttaggagagattatgctaagaaagttcgagtgtatcgtaaagagtacattcatgagattgagatgcttcgtgttgagaaacaccgtaaggatgaggctagattgttggctgaacgagctgctaatgaagagaggcgactcttgaaggctgaggctgctaaggttagagctgaggaacgtaagattgctgacgaagagttcaggcaaactctgataaaagaaagagcagaaaagctagagatgtggaagatgatgggccaaaagagggaagagaagatcaaagagagagagaagctactgcgtgaacagagttcactatggatcgagcaaaaagaactggagaggaagattacagaagccttggttgacaacgttgttctctaaaccaa

SEQ ID NO: 128491 - DNA, 416 bp, Arabidopsis thaliana
  unsure (1)..(416): unsure at all n locations
ctcagccctaaaaaagcttcacgccggtttgtttcaccgccgttgtgcttctccttcttcttctacctgggttctctctcaaacaaacaaatctccgacgactcattcgttcctcccagaatcagaagatttagtgaaatggctttttgcaataagctaagccgtttcgtgaggaggcagagtgagaatgcttccatgattggctctctcaggtctttctctgctgatgccactcaccatagattccaccaggagactcacaattttcttgagccagaatactatattggtagctgggaagctccgagtgatccgaaagatgcagggagaaagcttgctcagcttaggagagattatgcttaggaaagttcgggtgttcggaaagggtcctttcagggnttnnnatnctccgnttt

SEQ ID NO: 128492 - DNA, 532 bp, Arabidopsis thaliana
  unsure (1)..(532): unsure at all n locations
nnnnnnnnnnnnnnnnnnnnnnnnnnnnnnnnnnnnnnnnnnnnnnnnnnnnnnnnnnnnnnnnnnnnnnccacgcgtccgcccacgcgtccgcggacgcgtgggcggacgcgtgggcttttcttttgatttcgtctttttcattttcctctcttctttgttcttccctctctaaaatccttctcccaagaatcaaggagttgagagagggaagaactttaacaaaagaatttaagaactgaagaaggaggaataaacatcgaaatgtcgggctcgaggcttttcttcggagtttctacaattgtatcgataattttcgccattttgttgccgatggcacatgctcaatccgcagctcctgctccggctccaacaagcgacggaacaacgatagaccaaggcatagcatatgtccttatgttggtggctttggtcctcacatatctcatccattgatcctcttgttaatttaattttggtctctatttagtttaattatatttttgcatcttgattataactaaatagagac

SEQ ID NO: 128493 - DNA, 727 bp, Arabidopsis thaliana
  unsure (1)..(727): unsure at all n locations
gaaagaaaggtgctattattaatatgggttctggtgctgctgctcttattccttcttatcctttttactctgtttatgctggtgctaaaacgtacgtggatcagttcacaaagtgtctacatgttgagtataagaagagtgggattgatgttcaatgccaggttcccttgtatgttgcaacaaagatgacaaaaataagaagagcatccttcttagttgcatcaccagagggttacgcaaaggcagcactgcgttttgtaggctatgaagcacaatgcacaccgtactggcctcacgctctcatgggtgcagttgtctctgcattgcccgaaagcgtttttgaatcatttaacatcaagagatgcctccagatccggaagaagggtctccaaaaagactccatgaagaaagaatgaatcttccaggtttaagttactaccaagaatttccttcttctgaagttgttggtttcttgaaaagcttctgttctgaatcttttgtaagacttgtactctttagttttctaagttttttatattttaaggttaaaaaccctaacgtacacgaataatttacttcctctgtttctatttattaatttaagcagtgttgtattgaatgtgtttttgctaaaaaaaaaaaaaaaaaaaagnnnnnnnnnnnnnnnnnnnnnnnnnnnnnnnnnnnnnnnnnnnnnnnnnnnnnnnnnnnnnnnnnnnaacggaat

SEQ ID NO: 128494 - DNA, 812 bp, Arabidopsis thaliana
ggcacttatcatatatatggtcgtcaatttattccatggaagcatggtaactaatcccgagacagttgagggaatgcttggaagcctaggtgatttacttatgcttttgaatgtttcatctgctgagggtgttttgttaacaacgtatggcaagttgcaaccacctcttggaaaacacagattaaagattgtagagtttatttcagtcttgctcactgtcggtagtgaagcagcagagaaggaagtaattcgacttggagcggtgaaaagagtgttggacttgttctttgagtatccctacaacaattttttgcatcaccatgtggagaatgtaattctctcatgtatggagagcaaaaactctcaacttgttgaccatcttctcagtgagtgcaatcttattgggagtatactagaggcggaaaaggactccacattaactgctggtgattctgataagcttcagcctacagtccctgcagagggtaaaaagccactcaggattggaaacatcggtcatttgactcgtatctccaacaaacttcttcagctagctaatagcaatgtcgaaattcagtcacatttgcaggaaaatagcaaatgggtggactggcagacagatgtcttgtcgaagcgtaatacattggaaaatgtctacctcttgggcctgcgggaggcctacttcactccatgatcgtagtagagatagtgatgatgatgattaccacgatagagattatgatgtggcagccctagcaaacaatttgagccaggcttttcgatatggaatttacagcaatgatgacatggat

SEQ ID NO: 128495 - DNA, 768 bp, Arabidopsis thaliana
  unsure (1)..(768): unsure at all n locations
taatacgacttttatagggaaagctggtacgcctgcaggtaccggtccggaatttccgggtcgacccacgcgtccgaacggacccaaatgtagctgtccgaagaggttctgcacttgcactaggtgtcttgccatatgaactattgactgcaaaatggaaggatatagttttgaagctctgcagtgcgtgtaagatagaggtgaaccctgaagacagagatgcagaggcacgtgtgaatgctgtaaaaggactcacatccgtgtgtgagactcttactcagaaaagggctagcgatcctggaaatgatgacctgtctctttttcttcttatcaagactgaagtgatggatactttactgaaagctcttgatgactattcagttgataaccgaggtgatgtaggttcttgggttcgtgaagctgcagtccatggtcttgagaagtgtacatatatcctctgtaagaaaatggaaacatattcagagggtgattataacgatgatacgtcctcacttttcgattcgaatcttgcgacccgtctaattggaggtatgctgaagcaaggagtggagaaaatggntaaattaaggggaacagctgcaaaggttcttcaaaggnttttgtatcacaaatctgtttccgtccctcatgtaccntattggggaaaactggaaggaattnttnccaacaaggcaaacttncaatngggcggttccggntttctctttccccnggttttgnaagttttnaaaccccttnttaaacaaa

SEQ ID NO: 128496 - DNA, 482 bp, Arabidopsis thaliana
cccacgcgtccgttccgagtctccgagcattctctctctctttctctttctccatcgccgcgactcggctcagctctgagaacggcgcaagcttagattgccggagaaaactttatgcaattttttttgtacttgggagcagcttcaacattggagcatcggcgatccaagtcggaagttcacttaccttcggatatcgcgactctgacctatcggaaatattgcatggacctcatatggagtgtgtctaattgctagtggttgtgtggcttattgaagtcttgggaatagtatattgaggatgctattgtagtaaagaaagtatggaagatcttcggctatcaccgctgaaattaggtagctttaagtcttcattgtcagggaggtctactccaaggggttcacctacacttcggaaagtgcattcaggcaggactccacgtagagagggtaaaggtagcggtggagctgctcaatggttc

SEQ ID NO: 128497 - DNA, 564 bp, Arabidopsis thaliana
  unsure (1)..(564): unsure at all n locations
nnnnnnnnnnnnnnnnnnnnnnnnnnnnnnnnnnnnnnnnnnnnnnnnnnnnnnnnnnnnnnnnnnnccacgcgtccgcccacgcgtccgcggacgcgtgggctcgtggagaggatcctcttcgtcgccgtcgctcggaaaacacacgccttcaatttttctccgcggaatgcgatcgagtgccttggtaaactagattaatctctgctatgtcgaattggagacataaactatggagaaaattgagctcatttcagagagctagttactcaactacatcttcaagaaacaacaaattaaagcttgatgaccttagaaaactccggccaatgattctaaagagaatcgaaaatcgagctaaagattacccggttaaagagattgttcctgtagctgaagaaatccttatagctagaaagaatctaatcagtaacatcgccgctcttcttaaggtgtttcctgtcttgacatgcaaattctgttcagaagtgtttgttggcaaagaaggacatttgattgagacatgtcgtagttatatacggcgtggtaacaataggctacacg

SEQ ID NO: 128498 - DNA, 460 bp, Arabidopsis thaliana
atacgactttattagggaaagctggtacgcctgcaggtaccggtccggaattcccgggtcgacccacgcgtccgactgatggttatggtggttgtagcagttgtagctgcggctcaaggccaagaagagactactggattcgtgacatggggtaacaattactaccagacatggggacatcaagctttggttattaataaaacctctgagctccagctcaccctcgataaaaactctgggtccgggtttgaatcccaattgatttacggatcaggatacttcaacgtaagaatcaaggcacctcaaactacgtctacgggagtcattacttccttctatttaatctcccgttcaagccgccatgatgagctctgtttccagatcttgggaaagaatgggccaccgtatttgctgaatacgaatatgtatctgtacggtgaaggaggcaaagatcagaggt

SEQ ID NO: 128499 - DNA, 568 bp, Arabidopsis thaliana
  unsure (1)..(568): unsure at all n locations
agacggacggcgccccgcgggcgcgctgggnaaagaaatcccgcctcacatccacatctattagggaagagctggtccgcctgcaggtcccggcccggaattcccggttcgaccacacgcgtccgcggacgcgtggggcaaagcggatattccagactaacgcgatgaagaaattgagtctttcgacgaggctcggaatccctctgctttacgctgttgacgcggttcatggccacaatacttttattgatgcaaccattttcccccacaatgtcggacttggtgccactagggatcctcaacttgttaaaaagattggggctataaccgcgcaggaagtaagggcaacaggagtcgctcaagcttttgcaccttgtgttgcggtttgcagagatcctagatggggaaggtgttaccagagctatagtgaacaccctgcagttgtgaatatgatgaccgaaagtatcatccatggatcacaaggaaacgctcctttacctcgctgatcccaagattaatgtggctcggtgccccaaacattttgttggggacggaggcacaataaatg

SEQ ID NO: 128500 - DNA, 526 bp, Arabidopsis thaliana
  unsure (1)..(526): unsure at all n locations
nnnnnnnnnnnnnnnnnnnnnnnnnnnnnnnnnnnnnnnnnnnnnnnnnnnnnnnnnnnnnnnnnnnnnccacgcgtccgcccacgcgtccgctttttaatcaatattctgaattctccctggttaaggaggagggtctccgttaatggcggcggcaatgttcggcgtcaggagctttttcttctcggcggtgattgtgatactgttcgccggccgttatggagaagccaccgcagctgacagaggatacattaagtacaaagatcctaaagtagcggtcgaagaaagagtagaagacttgctgatacgtatgacgttaccggagaaacttggtcaaatgtgtcaaattgatcggttcaacttctcacaagttaccggtggtgtggccactgttgtgccagaaatcttcacaaagtacatgatcggaagtgttttgagcaatccgtatgataccgggaaagacatagcaaagcggatattccagactaacgcgatgaagaaattgagtctttcgacgaggctcgga

SEQ ID NO: 128501 - DNA, 583 bp, Arabidopsis thaliana
acgcgtcgctttctgctgcgagggggagggtagtatcgccggctactatacgactcatatagggaaagctggtacgcctgcaggtaccggtccggaattcctttttcgacccacgcgtcacgcggacgcgtgggcggacgcgtgggattggaaatgagagacgaaatgaagaacaaaggtgtcaaactcgatattccagcctatggtgctctttatcgatgggttctgcagtaggagtaacatggaaagcgcatctgctctgttctctgaactccttggagaaggattgaattccacgccaacctattttccacagctttgatttcttggatttcgcaatctggagaaacatggcgagcagccctttgattctggtcaagaaaattgtgtgaaaggacggcctacgaatgggtatcttgggtacatatacaaccactggattggttggattcgtttgaaaggatggaagatttggatccttggccttctgcggcttgaacacacgcaaatgcaaggcggaggggtgtttggtcccttgatggaagtctttttcacacagttctttggttacgtgggtctttag

SEQ ID NO: 128502 - DNA, 945 bp, Arabidopsis thaliana
ttggtcgcgtgggcggacgcgtgggattggaaatgagagacgaaatgaagaacaaaggtgtcaaactcgatattccagcctatggtgctcttatcgatgggttctgcaaaaggagtaacatggaaagcgcatctgctctgttctctgaactccttgaagaaggattgaatccaagccaacctatatacaacagcttgatttctggatttcgtaatctgggaaacatggtagcagcccttgatttgtacaagaaaatcgttgaaagacggtctacgatgtgatctgggtacatatacaacactgattgatggattgttgaaagatggaaatttgatcctggcctctgagttgtacacagaaatgcaggcggtgggtcttgtccctgatgaaatcatttacacagtaattgtaaacggtcttagcaagaaggggcagtttgtaaaagtggttaagatgtttgaggagatgaagaagaataatgtcactccgaatgtccttatctacaacgcggtgattgccggacattatagagaaggaaatctcgatgaggcttttagacttcacgatgagatgcttgccaagggctttttttcccgattggtgctacattggatattctaggttagtggccaagtcggaaacctccaaacctgtacgtgcaagcaagtttgtagtctcccaaatccagaccccaattattgactgatggcttagctttggcttttcgtgagaccccgataaatatgactgcttaaggtgtgcacttttcattttgcacggttgtagtataaatgttgttattcatgaaagagggagactctatagactttctgtaaagaaactaagaagggccttctgtttttgtcacttttataaaaaaaaagaaaaacaaagggcggacactctagaggatccaagcttacgtacgcgtgcatgttacgtcat

SEQ ID NO: 128503 - DNA, 507 bp, Arabidopsis thaliana
aatactgactcaattagggaaagacggtacgcctgcaggtaccggtccggaattcccgggtcgacccacgcgtacgcccacgcgtacgcggacgcgtgggctgcttccgtgaattctgaataaaaagatcatgaagctcacaagcttgagcaagaatgctaattccacagcaacagcagtaactgtatcttcaatacagaaactcccgtttctgtcgctgtctgaaactgtgccttgtccgaagagttcgagaaaacccacgtttcttcctttaagatgtagacggagaccaaagttggatttgctctggggaaaatttagagttcgtgcatcagatgctggtgttggatctgggagttatagtggtggacaagaggatggatctcagagtagttctcttgatcagtctcctgccacttcatcagaaagcttaaaacctcgagggccatttccttattctttgtcaatagcgcttgtactactgagttggggtttggtattttctct

SEQ ID NO: 128504 - DNA, 449 bp, Arabidopsis thaliana
ggctttgtctatggagtctgcgatgagaaatcagcttggccttacaggaaagagagggaaaattcagaagaagtctacttcggtctgaaaaccggacaaggtcttttggagttcaagtgcaagagcaagattcacaagcagagatgggttgatggggttcagtctcttctccgccaagtaaattgctttgaggctgccaaatgctcgctgggatctctgaatctcactggtcacacgtgatgcaggatcctgtatatatttgattatattcatatatataatatccaaatttttgctgttgtgaggtatttgcaaaacctggcaatgtaacctcagaagacttttggataaaacaaagcaggttgttcaaatgatcacaacaagtgttaggaacattgctatgtacagaaagacatcagaagaatgatgaatctcaattgaacttttta

SEQ ID NO: 128505 - DNA, 1120 bp, Arabidopsis thaliana
gacgtcgcatgcacgcctacgtaagctcggaattcggctcgagatcctgattgaaaacatgcgaagagaaggatatgaatttatggttggccccccgaaagttatcaacaaaagggttaacgataaattgctggagccatatgagatagcaactgttgaagtaccagaggctcacatggggcctgttgttgaacttcttggcaaaaggcgtggacagatgtttgatatgcagggtgttgggtcggaaggaacaacctttctgcggtacaaaatcccaacacgtggacttcttggattgaggaacgcaattttaacagcttctcgcgggacagctatccttaacactgtatttgacagttatggaccttgggccggtgatattagcacccgcgatctaggttcgctggttgcctttgaagatggaacatcaacatcatatgccctggcgagtgcgcaggagagagggcaaatgtttgtaggttctggagtggatgtatacaaaggtcagatagttgggatccaccagagacccggcgacttgggtcttaatatctgcaagaagaaggcagcgacaaacataagatccaacaaagatgtaacagtgattcttgacactcccttaacatatagtctggacgactgcatcgaatacattgaagaggatgagttggtggaggttacaccttctagtattaggatgtgcaagaatcagaaaatggcaaagaaaggcaggcagtaaaacccatttttgcaagctgggtttggaggaaattgaagaaaagcttctactaaaaaaaaatgaaagctagtttctagtgttatttataggcttgtttgattgttatacatagtcttattcttatagcaaagggtgagtcctgatgttatccaattaatgtttttttggaatatctccatgccctttgatcatctgatacttaaagctgtacaacttctgaagttgcgcactagcagatattaaagtgtgaatccttgagcatatactggaaaatataggcttgtttggttaaaaaaaaaaaaaaaaaaaaaacaaaaaagcggccgctctagaggatccaagcttacgtacgcgtgcatgcgacgtcatagtcttctatag

SEQ ID NO: 128506 - DNA, 780 bp, Arabidopsis thaliana
  unsure (1)..(780): unsure at all n locations
ctctatacgactcatatatggaagctggtcgntgcagtccgtcccgattccggtcgacacgcgtcgtcggctggagagacacagagggggaccttgggccggtgatattagcacccgcgatctaggttcgctggttgcctttgaagatggaacatcaacatcatatgccctggcgagtgcgcaggagagagggcaaatgtttgtaggttctggagtggatgtatacaaaggtcagatagttgggatccaccagagacccggcgacttgggtcttaatatctgcaagaagaaggcagcgacaaacataagatccaacaaagatgtaacagtgattcttgacactcccttaacatatagtctggacgactgcatcgaatacattgaagaggatgagttggtggaggttacaccttctagtattaggatgtgcaagaatcagaaaatggcaaagaaaggcaggcagtaaaacccatttttgcaagctgggtttggaggaaattgaagaaaagcttctactaaaaaaaaatgaaagctagtttctagtgttatttataggcttgtttgattgttatacatagtcttattcttatagcaaagggtgagtcctgatgttatccaattaatgtttttttggaatatctccatgccctttgatcatctgatacttaaagctgtacaacttctgaagcggccgcgaattcctgcagcccgggggatccactagttctagaacggccgcccccgcggtggaggttccggttaaggtaaacttgggtgggt

SEQ ID NO: 128507 - DNA, 525 bp, Arabidopsis thaliana
  unsure (1)..(525): unsure at all n locations
ctattgctgataaagtacatgggaagcctctacctacaatcaaagtagaagagccaactgtgaaaatgtccttctctgtaaacacctctccattttctggtcgtgaggggaagtatgtaacaagcaggaacttacgagatcgtttaaaccgtgaacttgaaagaaatctagctatgaaagtggaagatggtgagacagcagacacattcattgttagtgggcgtggtacattacacattaccatcctgatagaaaacatgcgaagagaaggatatgaatttatggttggccccccgaaaggtatcaacaaaagggttaacgataaattgctggagccatatgagatagcaactggtgaagtaccagaggctcacatggggcctgttcgttgaacttcttggcaaaaggcgtggccagattttttnaaattccagggtttttgggtcggaangaannaaccttttttggggncaaaaaattccccncccggggggccttttttggnttttngggcccgatttttaa

SEQ ID NO: 128508 - DNA, 444 bp, Arabidopsis thaliana
gtcaaaaagaggagctaataataatatggcggctttgaagatgactatctcttgtttcttgtttcttcaagtaatatattgcttgctctcttcatttgctccaacaaatgtgcaaggattgaaagttggattctacgacaaggcatgccccaaagccgagcttattgtcaaaaagtctgtcttcgaggctgtgaagaatgatcggacaattgcagctcctttgctcaggatgttcttccacgattgcttcgttaggggatgcgaagggtcggtattgctagagctaaagaacaaaaaagatgagaaaaactcaattcctaacctcacccttcgaggatttgacgatcatagacaatgtcaagggcagcctctagaaaaggagtgtcccgggcattcgtttccttgcttctcgatggtattggctcttgtcgctagagacgcaat

SEQ ID NO: 128509 - DNA, 505 bp, Arabidopsis thaliana
taatacgacttacttagggaaagctggtacgcctgcaggtaccggtccggaattcccgggtccgcccacgcgtccgaaaaaaaaaaaaaaaaacgctcgcctacttctcttctctctcaccatagagatagtttcaagctccaaaagttcttcaatcagattctggaaactaggttgttggtagaagttatggtgagaaatgaagcttagattgagatttaagttatgggttgtgtatttggccgagaggcggcgacaacaacaacagctgaagctaaacaagctaagagctctaaagctagtagtggagtagtagtagtaggagagagtagtgtgactaagagtaatggagttattgctgatgatgtagagaagaagaagaatgaggaggcaaatggtgataaagaaaggaaatcatccaaaggagatcgaagaaggtcgacagagccgaatccgcggttgagtaatccttccaagcattggcgtggtgaacaggttgctgctg

SEQ ID NO: 128510 - DNA, 491 bp, Arabidopsis thaliana
gtcaaaaccaaactcgtagacaaaataatagaccactagcctgcacgatctgcttgattaactttgtaaatttattttgatttatcaatgcgataatagacgcagattttttccggccaatcttctcctacgagtagctaaaccctagcgacggcggcaacaatggtctagattcaacgtatcgcttcgtggtttatcgggtgacactttggtgagagggagagtatttgtgaaagaaatcaatggatttagattttgatgatcaaccctcggatcatgctgcaccagcagttagggctggtgcaaggtttaaaccaaaaggcagaccacaacccatgaagaagcaagtctctctttccacaacccaaacaacactctcccctgatgttgcccaggaaaaactctcaacacaaagtgaagatctcgtccctctagacggatcatcggagattcccagcaatgctttaccttctgagactaatgtgccggat

SEQ ID NO: 128511 - DNA, 1016 bp, Arabidopsis thaliana
  unsure (1)..(1016): unsure at all n locations
cgnnnnnnnnnnnnnnnnnnnnnnnnnnnnnnnnnnnnnnnnnnnnnnnnnnnnnnnnnnnnnnnnnnnnnccacgcgtccgcccacgcgtccgcaagatcttagtgacggatcctgattcagtgttgggtcctctcacccgtgagatcaaagaagttgggcctgatgggcaagaggtgactaaggttgtacctgctgttacggaagaagtgaaagatgcacttgtgaagaacattaggaggagaatgacaccacaaccaatgaaaatccgggctgatatcgaattgaagtgttttcagtttgatggagttgttcacattaaggaggctatgaaaaatgctgaagccgctggaaatgaagactgtcctgttaagattaaattggttgctccacctctgtatgtccttactactcagacacttgacaaggaacaagggattgaaattctaaacaaagccatagcagcatgcactgagacaattgagacacacaaaggcaagcttgtcgttaaggagggggctagagctgtgagtgaacgtgatgaaaagatgctgacagaacacatggctaagctacgtcttgacaatgaagaaatgagcggcgatgaagatagcggagacgaagaagaggacactggtatgggcgaagtggatctcgatgcaggtgccggaatcatcgagtaagattgccggatttttctttctattaaatctacccaatctcaacagtcccagtattttggtttaagctttgacaaggcagtagaaaaacctccgagaggatttatgtgctttttgatgactctgaggcattttattttacccatagggggtggttacatatcaatcatacattcatggttttataaaagatttgattctttgcaaaaaaaaaaaaacaaaaagggcggccgctctagaggatccaagcttacgtacgcgtgcatgcgacgtcaaagctcttctatagnnnnnnnnnnnnnnnnnnnnnnnnnnnnnnnnnnnnnnnnnnnnnnn

SEQ ID NO: 128512 - DNA, 637 bp, Arabidopsis thaliana
  unsure (1)..(637): unsure at all n locations
nnnnnnnnnnnnnnnnnnnnnnnnnnnnnnnnnnnnnnnnnnnnnnnnnnnnnnnnatcaacactcgctctgcgctgcgttcgcctccagaactctctgaccatcccaaagcaaaagcttcaccgatcttcctcgtttggtctcgaatattaagtgaaatatgggtttcataatggaattcgcggagaatttggtgttaaggttaatggagaatccagaggaacgagacaggaaagcgagggaacacatatatgagatgcatgagaggtgcaagaagattaaggagatgtgggcattgcctattcgtccttatggattctggacatttgagcgtcacaatgctcagcttcgttgggatcctcagatcagtcaggttgctggtcgaagggatccttatgatgatcttctcgaggacaactacactcctccttcttcctcttcctcatcttcagactaatcaaacaatgaaagaagatgtgttatgctgtctggatggatgcatgtttgttttcaagctatttttctccggagtttgtccgcctgtttctatttgtccttaaggtgcttggggtttggtcaaaacncaaataatanctnaaaacttnttncgggcgngaannaaattcctatgggttac

SEQ ID NO: 128513 - DNA, 607 bp, Arabidopsis thaliana
cgggccgtcggggtaaatagccgactctatacgactcacttagggaaagctggtacgcctgcaggtaccggtccggaattcccgggtcgacccacgcgtccggatcttcagaataagaaccaagagttgatgaaacaaatagaaatctgtcaggaagaaaacaaaattctagaccgaatgcacaggcaaaaggttgcggaggtggaaaagcttactcagactgtacgggaactggaagaggccgttcttgctggtggtgctgctgcaaatgccgtgagggattaccagcggaagtttcaagagatgaacgaagaacgaaaaactcttgaccgggaacttgcgcgtgcaaaggttacagcaaacagagttgcgacagtggttgcaaatgaatggaaagatggtaatgataaagtgatgcctgtgaagcaatggcttgaagaaagaaggtttctacagggagaaatgcagcaactccgcgataagcttgccatatcagatcgagctgcgaaatctggagcacagcttaaagacaagtttcaactacgacttagagtgcttgaagagacactgagaggcacatcaagcatcagcataaggaacacacctg

SEQ ID NO: 128514 - DNA, 489 bp, Arabidopsis thaliana
gccggcactatacgactcttatagggaaagctggtacgcctgcaggtaccggtccggaattcccgggtcgacccacgcgtccgcaagcagcaatggaggaaaaaagcagcggcggcggcgttaggcttcacgtcggcggattaggagaaagcgtcgggagagatgatcttctcaagatattctctccgatgggtaccgtcgatgccgtcgaattcgtcaggaccaaaggtcgttcctttgcctacatcgatttctctccatcttccaccaattcactcaccaagctcttctctacatataatggatgtgtctggaaaggagggaggctgagactggagaaagcaaaagagcattatctagctcgcttaaagcgagagtgggaggcagcgtcttctacctctgataacaccattaaagctccctccgattcaccacctgccactcaccttaacatcttctttcccagactcagaagggtgaaacctatgc

SEQ ID NO: 128515 - DNA, 472 bp, Arabidopsis thaliana
gccggccctatacgactctcttagggaaagctggtacgcctgcaggtaccggtccggaattcccgggtcgacccacgcgtccgcggacgcgtgggctgttttcttcatctccacaaagataactaaatccgatctcgtcttcgcaatcatcaaccatcaatggaagttgaagaagaagttaaacaaatcatagatgaggtcaaagagcttcatgactccgccgcttctttcatctcatcttcttctcaacaagagctctctctccgtcaaaaagcctccgccgttgattcctctatccgtcgtctccactctactatcgtctccaacaaaaatctcgatcctaagctcgtcgaaaagcttgaggaagatctgcatcgtgctagatgcatgcttgttgacggagaaacatcttcatttctcccatccaaaccacaaggacgctttgtgagaatgttttgtggacctgtgaatg

SEQ ID NO: 128516 - DNA, 765 bp, Arabidopsis thaliana
  unsure (1)..(765): unsure at all n locations
cttttccccactgatagagaagcttatcttgaacaactcgcatcgtgttaccatagagatgcagcctgatcctgaaaaagctactcaagaggaagtggaagagaaaaatatcctggaaaaagttccacccgcccggacagaagaagatcttgcagagctagcacgtgctacagaggagctgaaattgaaacaagaaactcctgaccctcctgaagcattgagatgtgtcccaagtttgaacttgggtgacattccaaaagaacctacttatgttcccaccgaggttggagatattaatggtgtgaaggttttgcggcatgaccttttcaccaatgatattatctatactgaagtagtctttgatattggttcgctgaaacatgagcttcttccactagtaccacttttctgtcaatcattactggagatgggcacaaaagatttgacttttgttcaacttaatcagttgattggaaggaaaacgggagggatatcagtttatccccttacatcatcagtgaggggtaaggatgaaccatgcagcaaaattatcgtacgcggaaaatccatggttgggcgtnctgacgaccttttnaacctgatgaactgcttgtngcaagaggttcaatttacagatcagcagaggtttaaacagtttgtttctcaaagcagagcacggntggagagccgattgaggggaagtggtcatggaattcctgcggcgaggatggatgcaatnttgancattnctggatggatntttta

SEQ ID NO: 128517 - DNA, 486 bp, Arabidopsis thaliana
gatgatgtatcatcctcaagcctattatcatccaaatggacaacctcagtacccacagcagcaaatgatacctggtcagcagcagcagcaaatgatacctggtcagcagcatcctaggccagtttattacatgcatcctcctccttacccgcaggacatgccatatcataataaaggacgagagtaataactactactacccgatggtgatgatgttttttttttttgtgaaggaagtgtacgaacccctctctggttttatccactctcccttacccaatcactgaaaccattttcttctcttttttagattcgcctactgattttggtatttcgtgttgaaaccaaaaagaaagaaaaaaagaaagaaaaaaaacgatctatctgaagtctgtaaaaaaaaaaaaaaaagggcggccgctctagaggatccaagcttacgtacgcgtgcatgcgacgtcaagactcttctatagttgacctaaa

SEQ ID NO: 128518 - DNA, 499 bp, Arabidopsis thaliana
  unsure (1)..(499): unsure at all n locations
gacnnnnnnnnnnnnnnnnnnnnnnnnnnnnnnnnnnnnnnnnnnnnnnnnnnnnnnnnnnnnnnnnnnnccacgcgtccgaaaaaaacaaaactagctcacataaaggaaatcatattttgatttaatttgtagtgtctctaatggcacggtttgagccatataactataataatggtcatgatcctttctttgcacacattaaccaaaatccagagctaataaatctggacttaccagcttctaccccttccagtttcatgcttttctccaatggagctttagttgatgccaatcacaataattctcacttcttcccaaatttattgcacggtaatacgacaagaaaaggcaataaagaagagagtgggtcgaagagaagaagaaagaggtcggaagaggaagaagccatgaatggagatgagactcagaagccaaaagatgttgttcatgtccgagctaagagaggtcaagctactgatagccataagtttggctg

SEQ ID NO: 128519 - DNA, 399 bp, Arabidopsis thaliana
acgaatacagagatcggagacatggcggagagtcacggtggtggtggtggttgctgtccgccgatggatctgatgcggtcagaaccgatgcaactcgttcaagtcattgttcccatggaatctgctcatcttaccgtctcttatctcggcgatctcggtctcgtccagttcaaagatcttaattctgagaagagcccatttcaaaggacttatgctgctcagataaaaagatgtggggaaatggcacgaaaaatacgtttctttaaagagcaaatgtcaaaggctggagttactcccaaagagaccctagatagagaaaatgatattgatttggatgatgtagaggtaaagcttgaagagcttgaagctgaacttgttgaaatcaatgctaataacgac

SEQ ID NO: 128520 - DNA, 519 bp, Arabidopsis thaliana
  unsure (1)..(519): unsure at all n locations
nnnnnnnnnnnnnnnnnnnnnnnnnnnnnnnnnnnnnnnnnnnnnnnnnnnnnnnnnnnnnnnnnnnnnccacgcgtccgcggacgcgtgggttttctcattagtttctttctactccatttcttgattttgtggtgtttcgtttagaaatagaaagacgaaaacagaaattagggtcaaacaaacttggaccaagagtaactttttttgtggaaatttttgtactcagattatttatcatgccgttatgagatttctctgaaactgagctatttttcaggaatctgagtttcgatttcactgagatgttcgactcctactctctttatcccaccggaaaactatctccggtggttgattcgtacgtcaccgccgagctcgacggcgaagatatgagagacgactacgcgttttttgagtccggtttcaaagacaacaaatctcagtttatctcttacccacaacgcatcttagtcggtgaggacgctgtttcttagagaatcggagattttaagtttt

SEQ ID NO: 128521 - DNA, 756 bp, Arabidopsis thaliana
  unsure (1)..(756): unsure at all n locations
taggtacaactatagaagagttatgacgtcgcacgcacgcgtcgtaagctcggaattcggctcgagtttgaaggagagcgacccagggccttgtatttgaatctaaagtcatcggacacatgggtcgctgaatatagaaagtggatggacaaagttggtcatgggatgccttaccatttcgggcataggaccatatctctccccaaagtccctcctgtcgtggaacatgccccggcagggctcattgcagctctctctgcttcttaccctgcaaaaggcggaattgggactatgcatcctcccaatttggctaaccggtacttcagacatattattcattgtagaagctgcagcaatgtgatcaaatcttttgagctctggaaaaatatcctctctgccacggcagtggctttgacggctttggccattctggtggttagtagacagtggaaggctgtcctgttaggttcagcagcattgtgctcagccgcagcttatacctgcttaagagctataaatctaaacaccaataacttcattagaacacacagaagactatgaaaatgtatagtgtcatgtttcctcttcttccaacaatatgtatttcatgaaataaatttttgcttgtaaacgcaattacataattcagaaggttccaatgtttgccatantatnnnnnnnnnnnnnnnnnnnnnnnnnnnnnnnnnnnnnnnnnnnnnnnnnnnnnnnnnnnnnnnnnnnnnnnnnnnnnnnnnn

SEQ ID NO: 128522 - DNA, 539 bp, Arabidopsis thaliana
  unsure (1)..(539): unsure at all n locations
nnnnnnnnnnnnnnnnnnnnnnnnnnnnnnnnnnnnnnnnnnnnnnnnnnnnnnnnnnnnnnnnnnnnnccacgcgtccggtctatgcttattgttaggtttggggtcacaaaaagatcgcctttggtttcggtgttacctcaatggttctggcatcagaatgcctgcaaggtttttgaacaagacatggggtttctatcgtctcaaaatgaggttctgatgaaggagaaagtaccaactaaggacttgtatttgaatctaaagtcatcggacacatgggtcgctgaatatagaaagtggatggacaaagttggtcatgggatgccttaccatttcgggcataggaccatatctctccccaaagtccctcctgtcgtggaacatgccccggcagggctcattgcagctctctctgcttcttaccctgcaaaaggcggaattgggactatgcatgctcccaatttggcttaccggtacttcagacatattattcattggagaagctgcagcaatgtgatcaaatcttttgagctctggaa

SEQ ID NO: 128523 - DNA, 500 bp, Arabidopsis thaliana
  unsure (1)..(500): unsure at all n locations
atacgactcatanaggggaagacggcacgcctgcaggtaccggtccggaattcccgtgtcgacccacgcctccgctaaaagagaagatgctcagcctttggttttcgaggtcacagagcgaagtaatcggggtttcgcagggacttggggccgagagaaagaaggtgggaaagggagtaatttacttcggtttgatgctccttgtgttctgcagttcattcgagagggcgaggggaaggatggagtgaagaactatttttcagggctgtttctttgtacacctacacggcaagggaagtctatgcttattgttagggttggggtcacaaaatgatcccctttggtttcggtgttacctcaatggttctggcatcaaattgcccgccagggttttgaacaagacattggggttcttatcgggatataatgagcgtcttaacaagtgaaaaagtaccatctatcggctttgtctttgaatccaaaggtattcggacacatcg

SEQ ID NO: 128524 - DNA, 500 bp, Arabidopsis thaliana
  unsure (1)..(500): unsure at all n locations
cgnnnnnnnnnnnnnnnnnnnnnnnnnnnnnnnnnnnnnnnnnnnnnnnnnnnnnnnnnnnnnnnnnnnnnnnccacgcgtccgaaaataaatagatagtcataactagtgtattacaaaaaaaaaataaagtaaataaaagtaatcactagctagtgactaaactaaatcccaattatgggtcgtgtacattttggtgtatcagcattctttgttttttgtttgttaggtttatcagctaatgcaaagatcttcaatattaattctcctccaggttctgatatcactaacgcattgttgaaagcattcaatgaggcatgccaattcccgacaaagagcaccgttatgatcccaaaaggtgaatacaagcttggggagatcgtgatgatgggtccatgcaaagctcctataaggattgctcttctaggtaccgtgaaagctgacggtaacgctaatggaaaggagaaatgggtcgctttccgcaacattaatgggtttaa

SEQ ID NO: 128525 - DNA, 411 bp, Arabidopsis thaliana
gaaagataataaatgcgaggacgtaactggtaaaatcacgaaactgcctgattcaccttcactattcagagtgtttccttataaatatctatcacacggcgcaaaacgaaacgctcaagccctcaagtttatcttcctcagccgtgtagttcaaatcccggcacaaaactctgtcgtcgcttccccgagaaaaggggtcacacttaaacttgtcgaaaccaaacaacaatggaagatgacaaggatatatacacaaaagatggaactcctgacattcacaagataccagccaacatgaataaaactggaacctggaaagcttgcagattcattcttggaactgagtgctgtgaaagattagcttactatggaatgagtactaatctcatcaactatctcgagaaacaaatg

SEQ ID NO: 128526 - DNA, 757 bp, Arabidopsis thaliana
tggtcatcagacacaaaagactctcaaaccctaactagtctcgcttttgcgctctctcgaaccttcttcgatctctgtcctttctcgatcacttgctaaaatcaaaattttaggcgggaattcgatacccaagcccaagacccaaacacttcccccctcacgtttcgctgctttcgttagctagctttctcaaacgagatctgggcttgtcgaaagaaacgtgatatatatgcagtgagccagtgatcatgcaaaagaaattcagagtgcgatagagaagatggagcctgaacgtttaaaatttggaggtccaagagagttgtgcggtgctgcggatcttatatctcaattcaaactagtgcaacaccatgaattcttttgcaagaaatctcttcctgtttctttatcagattcccattatcttcataatgtggttggggacacagagatcagaaaaggagaaggaatgcaattagatcagcttattgagagcatatcacagagccgggagactaatattcgcatccagccttttgatatagatgagcttcaggagtctttccaactaaatgatatgactcctgttgaattacccccagcagagaagggagctcctacaattccgtctaaagtcaaaaagtgagtcgcaatgatagggccaggaaaccattaaggaacacaaggccaggggttaagacaaagatagagagcataagaagcacaagcacaaacataaagatagaagcaaagataaaga

SEQ ID NO: 128527 - DNA, 518 bp, Arabidopsis thaliana
  unsure (1)..(518): unsure at all n locations
tttaagtttcactcagagacagaagctagaacaaagaaaagagaagccttttgaaagcaatcaactttaatctttttcaaccaacactagtactctagctgttgctctttctcttcgttttcttccttccttcttctcttagatctctttcttttaacttgagtcttatcctttggatttttattcgatttgattcctccgtttggtttggtcagttttctttagactcttagtctttcctctgatctgggttttagctgtagaaactcgtgagttagatcgattgagaacccaactataaattagtaaaaagagaaaccctttataggttttttggggtttttgtctcagtctgaccaatgggttcacaggtttcttgtctagttgcttgaggtttttgggttttggtttgaatagngtatgagaagaggngnggnaaaggcaagaggcagaattctacctncngggaagnnnaggnaccgccgngaagaaaantcccancttttnggaaanaggng

SEQ ID NO: 128528 - DNA, 475 bp, Arabidopsis thaliana
  unsure (1)..(475): unsure at all n locations
nnnnnnnnnnnnnnnnnnnnnnnnnnnnnnnnnnnnnnnnnnnnnnnnnnnnnnnnnnnnnnnnnnnnnnnnnnnccacgcgtccgcccacgcgtccgctcgaatagaaacggatagttggggtagaatcgcttttacacttctgggatttgttggttctgctcttcttgtattcgcattttctttgtcatgtattctgtgatactccatggaagaaggttggtacagttgcagaaatggcgtcatttgagatttgttgtgcaaaatggatcagctttttctaattcctattcttctgctagtgctactgatttgagctcaagagatggtcgaaaagtgaagaactttactgtctcttacctcgttgattcattgggtttagctacaaaactcgctgaatcaatctcaaagaaagtcagtttcgtgaacaagggcaatcctgatttagttctgagtctttttagaagttatgggt

SEQ ID NO: 128529 - DNA, 519 bp, Arabidopsis thaliana
atacgactttcttagggaaagctggtacgcctgcaggtaccggtccggaattcccgggtcgacccacgcgtccgattacatagaaggagcaattaaatctctatatataaaaggaagcgtgtgtttcgccttctcttttcaccattttcagttactttctctctttcatcttttaccattctcttcttcttttttttctctcattctgatcatggcttcctctatttccactggagtgaaatttgttccagaagaagataatttcttgcagagacatgtcgcttttttcgataggaacaaagatggtatcgtttatccctcggagacatttcaaggatttagagcaattgggtgtggatatttgttgtcagcagtcgcttctgtgttcataaacataggtctcagcagcaaaactcgtccgggtaaaggattctctatctggtttcctatagaggttaagaatattcaccttgccaaacacggaagcgattcaggcgtttacgacaaagatggacggtt

SEQ ID NO: 128530 - DNA, 457 bp, Arabidopsis thaliana
aatcaaaaaaaaagtaacgactatgcaaatatactatatattacataggcttcaccagatcatctcgaatcttaatcacattattaatacaattacatagaaggagcaattaaatctctatatataaaaggaagcgtgtgtttcgccttctcttttcaccattttcagttactttctctctttcatcttttaccattctcttcttcttttttttctctcattctgatcatggcttcctctatttccactggagtgaaatttgttccagaagaagataatttcttgcagagacatgtcgcttttttcgataggaacaaagatggtatcgtttatccctcggagacatttcaaggatttagagcaattgggtgtggatatatgttgtcagcagtcgcttctgtgttcataaacataggtctcagcagcaaaactcgtccgggtaaaggattctctatct

SEQ ID NO: 128531 - DNA, 450 bp, Arabidopsis thaliana
catgattgtaccggagtggtccatggaatggaatccggtttaggggtgtaccggagatgcaaccatttcaatacatggttttcagtttcactacgagtaaagaggaagtgacttactcatttagaatcactaaaagcgacgtttactcgagattaagcataagctcctcacgagtgttacaaagattcacttggattgagacagcacagaattggaaccaattctggttcgcaccaaaagaccaatgtgatgagtacaaagagtgtggtgtttacggttattgcgactcgaacacttcacctgtttgtaattgtattaaagggtttaagccgaggaatcctcaagtgtggggattgagagacgggtcggatggttgcgtgaggaagacgctactgagctgtggtggcggagatgggtttgtgcggttgaagaaaatgaaattgccggata

SEQ ID NO: 128532 - DNA, 516 bp, Arabidopsis thaliana
atacgactcacttagggaaagccggtacgcctgcaggtaccggtccggaattcccggttcgacccacgcgtccgcacgcgccgccgtactcgccacgatccgtctttggagaccaatttatggagccgccgaagggagataccgtagtgaagactgaggtcccggtgaaggatccatcgctaagcgtcgtcgattcgaaaacgaagggagtcgaggatgcgaacactgagatagccttgtccgatgaggttgaaatcgagacgaagggaagcgattcgacaccggtgaaagctccgagtcgaacatcgtctggatcgaagaaatctgtacattggagccccgaattggtgtctggatctcaggaaccggatcagaaagctgcatcgtcttcttcggctggatctaatccgtatattgctcgttctccagctgagacttcagatgcttcgttgaaagatacgatggagactgtgaaaggagtgcttggtagatggggaaagagggttgcagaagcag

SEQ ID NO: 128533 - DNA, 481 bp, Arabidopsis thaliana
tatacgacttttttagggaaagctggtacgcctgcaggtaccggtccggaattcccgggtcgacccacgcgtccgcgaagaatgggtcacacagtttggcgagaaaccggagaaaggtcggtatcgctatgctggtcaatggaagcacagtcgaatgcatgggtgtggtgtctatgaagttaacgaacgcatcctatatggtagattctactttggggagctattggaggaggagcatggctgtaccgtagatatttgtgcgctgcattctggtttggcggaggtggctgcagctaaggctcgaatgtttgtaaacaaacccgacggaagtattgccccttttctttaccacttcttctgtttggttctgtgtattaagtataaaccaagacatattttagggatttgtttgattcctttagatcagtgcaggaccctctctagtaaccatcattctgtttcaaatatatatttcgctttt

SEQ ID NO: 128534 - DNA, 514 bp, Arabidopsis thaliana
aggctctatacgactcatttagggaaagctggtacgcctgcaggtaccggtccggaattcccgggtcgacccacgcgtccgggcaccatgaaatggagtttaaatctaaagtaacatacacaaggcataggataacagaggcatacttgtggtcacttggaacatatttcgagcctcaatattctcaagcacgagttataaccactatggcactaatcttattcacagcgctggatgatatgtatgatgcatatggcacaatggaggaacttgagcttttcactgatgcaatggatgagtatagcatttgtaacatataatttagggagtattataaagggtaaggttgattttttttttgatggttttgacttctctctaacgtaggtggcttcccgttgttcctgatgagataccgatacccgatagcatgaagttcatttacaatgtgacggtagaattctatgataaactcgacgaggaacttgagaaagaaggaaggtcagggtgcggt

SEQ ID NO: 128535 - DNA, 556 bp, Arabidopsis thaliana
cccacgcatccgcggacgcgtgggcggacgcgtgggcaacaaccacacgcttctcaaacatcaaaccaagcctctctttcacttcctcatggaatattccgacgacggcagattcgacgtgattgtcgttggagcaggagttatgggaagctccgccgcgtatcagctggcaaaaagaggccagaagactcttttgttagagcaattcgatttcctccatcaccgtggctcttctcacggcgagtcacgcaccatacgtgccacttacccggaggattactactactccatggtttccgagtcgactcggttatgggctgcggctcagtccgagattggatacaaagttcatttttccaactcaacaattcgacatggggtccggcagatcagcagagtcctcctctccggttgtgggccacggtgtcaaaaaaaacgggctagctcatcgggttttgggcttctcatgcagttttccgggcatttttcccggggggtttagtttccccgggaattggttcgggttttgacggaacttgggggggttttaaaaccc

SEQ ID NO: 128536 - DNA, 650 bp, Arabidopsis thaliana
  unsure (1)..(650): unsure at all n locations
nnnntaatacgactcatttagggaaagctggtacgcctgcaggtaccggtccggaattcccgggtcgacccacgcgtccggaaaaacacacaccaaacaaaacaaaacaaaaaacagagagatggaaaacggaaactcctccagcgacaacaaatcttcacataaaccgatccgatgcaaagcggcggttagtaggaaggctggagagccgttggtgatggaagaaatcatggtggcgccgccgcagcctttcgaggttcggattcgaatcatctgcaccgcgttatgtcacagtgacgtcactttctggaaactccaagttcctccagcctgctttccgaggatactaggccacgaggcaataggcgtagtggaaagtgttggtgaaaatgtgaaggaagtggtagaaggagacaccgtactaccaacggttcatgcctgactgtgggtgactgtgttgattgcaaaatctcacaaaagcaacttatgtagcaaatttcctttcaaggtatccccttggatgccaagattccggtatttccagcaggttcacccgacctcaattggnggaactttntttnaatttttttaacgnttccaggttttannggnttancggtttttaattncgntaacggtgtnagnttgtt

SEQ ID NO: 128537 - DNA, 620 bp, Arabidopsis thaliana
cctttatatttattttcttccttcgtctccttcaaattcaatctttctccgtcattcagatttcgaggagacagagacagtgaaaaggattcttgtaaggaaaagcttttaaacttctctttctatttatccctcctttcttctatctctctctctctcgatatcgatacaagagagatggagaaagaagaaggagaaacaacaacaacgatcggcgttgttccggcggcgccggcgaaattaccgactccgatatattctctgagcttttgggaggtcacggcagcttccggcgtcgttttagggtttattttgggtcttgtttgcgtttatctcacaatgcctcaatctgattacagctttctcaagctacctcgtaatctcgaagatcttcagattcttagagataatcttgagatatacacaagtgattacacagttcaagttcttgttggctactgtctggtgtacgtttttatgcagacgttcatgattcctggcactgtgttcatgtctttgcttgctggtgctctctttggcgttgtcaaaagaatggctcatgttgtctccactgcaatagctggcgcatcctcttgttatttcctctctaagctcattgg

SEQ ID NO: 128538 - DNA, 559 bp, Arabidopsis thaliana
ttcccgcccccacagccaatagtatcgccagctactatacgactcatatagggaaagctggtacgcctgcaggtaccggtccggaattcccgtgtcgacccacgcgtccggtttgatgagaatgatgagaatgagaagatcaagaaaagttctttcttcaactggttttacttctccattaatgttggagctctcattgctgcaactgttctcgtctggatacaaatgaatgttggttggggatggggtttcggtgttccaacagtcgcgatggttatcgcggtttgctttttcttcttcggaagccgtttttacagacttcagagacctggagggagtccacttactaggatctttcaggttatagtagcggcttttcggaagataagtgttaaggttccagaggacaagtctctgctctttgaaactgcagatgatgagagtaacatcaaaggtagccggaaacttgtgcacacagataacttaaagttttttgacaaggcagcggttgagagtcaatctgatagcatcaaagacggggaagtcaatccatggagac

SEQ ID NO: 128539 - DNA, 473 bp, Arabidopsis thaliana
gaaacgagcaggtcctgtcttcttatgaactcaatttcttcatttctgattctataaaacatcgttaggaacatgtctacgcgcatggttgagaacaattcagctaaaccagttctcacttctcggaactagcttgttaagaaggagaaggagtaacaacttctccgtgaggtcttgtggaagccaaacaacgacgacccatgaagctaaacagtcttctccaacaagggttgctccaaaaaaccacaaaagcaaccaacttgatgagattctgagagattacgaagctgtaattgggatagagactcatgttcagctctctacattgacaaaagccttttgtagttgctctaacaattacggttcttatccaaacacaagtatttgtcctgtttgtatgggtttgcctggtgctttgcctgttttgaattccaaagttgttgaatttggtgttagattgggtttagctttga

SEQ ID NO: 128540 - DNA, 500 bp, Arabidopsis thaliana
gccggaactatacgactttcttagggaaagctggtacgcctgcaggtaccggtccggaattcccgggtcgacccacgcgtccgcgacgacggtgatgacgatggacagagaaaaggagagagaacttgagctcgagagtgcaatgtacacaaactgtttgcttttaggtttggatccgaatgtgatcggactcggagcctccaatggcacgcctcgggtcgggttatttcgccattcgaatccaaagctcggtgaacaagcttctctacttcatcctctcttctcttcgtggccctgctcagtcttcaaaggattttgataagggttggccaattttcgattcggctcaatctcgcgattttcgtaaggttgttcaagcgattataagcgagcttgaatcacaaggggcattaccaaggagtaatttcgagggtttcatcactagccacttgctgtggaccaagatttgtggagctcttgtggcaactttcactgcatgc

SEQ ID NO: 128541 - DNA, 966 bp, Arabidopsis thaliana
  unsure (1)..(966): unsure at all n locations
nnnnnnnnnnnnnnnnnnnnnnnccggcactaatacgactcttatagggaaagctggtacgcctgcaggtaccggtccggaatccccgcgtccgcccacgcgtccgagaagttgagaaagaaaaaatagtaacgatgaaaatggccggaaggatctttctccttttcctctccgtctacgtcacggtggccatcgccggtaaagctccaccgccaacattcaccgagaaaggcaaagccctagcggagaaactctgcgagaaatccgaagacaaagcgttttgcgttgcaagcctaacgtcccgtcctgaggcagcaaccgcaaccgcaccaaaactaggcgtgatcgcgttaagcatcgcgtcctcaaatgcttcggacacatctttctacatcaaagccaaactaaagcaaaagaacctcgagccggctttagaagacaccctcgacgattgctctaagaattacttagatgcggtcgcgcagctcgacgattctctagccgctttgatgcagaactcgttcatcgacgtcgatatttggctcaacaccgcgataagcgacggtgaggcttgtgaaaacgctttgaacgatcgtgccggtaatgatgctgagcttgctcgtaggaacacaaacttgttgaagctttgcaaggatgctcttctcattaacactattttaactccctaaatttaaagttattgcccattaattattttatatttgttcacattgttataatttttttttaaatggctcgttgatttgtcccgggggtaaattgtaacgatatttgaaatacttgtttttgggaatttttgaatgagcttattaaattatatataaagtatatacaacccantatgcatattttcttgtttaaaaaaaaaaaaaaaaagggcggcacgctctagaggatccaagcttacgtacgcgtgcatgcgacgtcatagactcttctatagtg

SEQ ID NO: 128542 - DNA, 515 bp, Arabidopsis thaliana
atccgactcactttagggaaagctggtccgcctgcaggtcccggtccggaattcccgggtcgacccacgcgtccgactgagctctgtttttgtttttaccgtagatcgtttcgagtctctttaatctttggcgggttccgtaaaaaaaaaaatggcctcttctagattccaatctgggttttgtcctatctcttcgtgtccctctcttgagaatttcatcgaaaggattaaagacgcatgtcgtttcaccctctccgctgttctagggacaattctctcggcggtcttgactttcttcttcgctttagtgggcacattgcttggagcacttactggagctttgataggccaagaaaccgaaagtgggtttatccgaggagcggcggttggagccatttcgggagctgttttctctatcgaagtctttgagtcatctcttgttctttggaaatctaatgagtcacgttttggatgtctcctctacttgattgatgtcattgttagtctgataagtg

SEQ ID NO: 128543 - DNA, 518 bp, Arabidopsis thaliana
  unsure (1)..(518): unsure at all n locations
nnnnnnnnnnnnnnnnnnnnnnnnnnnnnnnnnnnnnnnnnnnnnnnnnnnnnnnnnnnnnnnnnnnnnnnccacgcgtccgcggacgcgtgggcagagaagttgtttcaacttaccatcatatacttgcataagagaaggaccagatcatgctccaagattcaaagcttctgttaacttcaatggtgagatatttgagagtcccacttactgttctactctcagacaagctgagcatgcagctgctgaagtttcccttaatgtcctttcgtctagagtcccttcaaagtctctaactgctaagattcttgatgagacagggatttacaagaacctgcttcaagagacagcacatagagctggtcttgatctaccaatgtacacaagtgtgagatcaggatcttgtcacttcccaggtttctcttgtactgttgaacttgctgggatgacgtttacaggagaatcagcanagacaaagaaacaagctgagaaaaacgcagccattgcagcttggtcct

SEQ ID NO: 128544 - DNA, 539 bp, Arabidopsis thaliana
  unsure (1)..(539): unsure at all n locations
atgatatgccnnnnnnnnnnnnnnnnnnnnnnnnnnnnnnnnnnnnnnnnnnnnnnnnnnnnnnnnnnnnnnnnnnnnnnnccacgcgtccgcccacgcgtccggctcacgcgatattgtctaacctggggaacctctacagacagaaaaagcagtacgaagtctcaaaggcaatgttctcaaaggcgttggaactcaaacctggttatgcacccgcatacaacaaccttggactcgtgtttgtggctgaacgcagatgggaagaagcgaagtcttgtttcgagaaatcccttgaagctgattcattgctagatgcagcacagtctaacttgcttaaagccacaaccatgtcaaggctctgtacttgcttctcttcttcaactgttgtccgagattcttgatgctctgtaatacttcttgtttcgttttgtggtttcacaactctcacattatgtgccttgaatagtattaagtacaaagaccataatatcgcgagaggcttgtgaaactaaannaaaaaaaaaaaaaaaacgagaaaa

SEQ ID NO: 128545 - DNA, 672 bp, Arabidopsis thaliana
  unsure (1)..(672): unsure at all n locations
nnnnnnnnnnnnnnnnnnnnnnnnnnnnnnnnnnnnnnnnnnnnnnnnnnnnnnnnnnnnnnnnnnnnnnnnnnnnnnnnnnnccacgcgtccgctgaacaaaccaaaaaaaactcttcttttttctatctttcacgcgttgaagattcttgattttctttcttctccttccttacacgaccactgatatgtgtcggtgactgaaaccatctgttctcttttgcctctgatttatcgatatgttttaaagaaaaacggtgtttgaaacttttgtaatttaaggttcatcaaatactcagatcttgtctgagaaattaagctgaaatctgataaatgggtttgtttaaattcatcttcttgttatctcttctatggagtttctacagtttaggctcatctcagctacaagcttcacaagcacaagttcttcttcagctgaaaaaacacttagaatatccacaacagctagaatcttggtatgatcacagaaccaatttctgctacttacaagcaacaccatcgatgaacatcacttgtttctctaattcagtctcagagctaaacatcttcggtgataagtcatcagaaaaagccaaaagctttgatggttttgctatctctaatgttactttatctgatggattctccattgaatcatttgtcactacactg

SEQ ID NO: 128546 - DNA, 533 bp, Arabidopsis thaliana
  unsure (1)..(533): unsure at all n locations
nnnnnnnnnnnnnnnnnnnnnnnnnnnnnnnnnnnnnnnnnnnnnnnnnnnnnnnnnnnnnnnnnnnnnnnnnnnnnnnnnnnccacgcgtccgactgattgttcaaaagagacttctgatgcaactttgggatctgaagaaaaccaacaagataaggatcatcaatgcctcgacaagaaaacagcagatgtacaagatacaatgatagaggaagatgacattactcatgaagctccaagtttcgacccaaaccaaaaggaaaatgcagaaatggaagaaaatcacaacaattttgtttatgctgatgatgaagctggttctgatgttaagaccaatggtgtgaaacgaaaggctgatgtcctgagtgaggattcaccaggagaaggtaggaagactgtttcattcgccaaggtgtcttttgccgaaaggccgtcctttaaaattggtgcatgcatagccagggctgcaagtcagatggcaggatctccttcagttttgaagggtagtaactttggtgatgaaactctttctg

SEQ ID NO: 128547 - DNA, 631 bp, Arabidopsis thaliana
  unsure (1)..(631): unsure at all n locations
nnnnnnnnnnnnnnnnnnnnnnnnnnnnnnnnnnnnnnnnnnnnnnnnnnnnnnnnnnnnnnnnnnnnnnnnnnnccacgcgtccgcccacgcgtccgcccacgcgtccggagctacagctgatgtccaaaccgcattgaagacaggattcagtcatgtcaacattaacacatggcttgttgtgctacctcaaatcattgctaggatacattctaataatcgtgctgtcagggaactgattcagtctcttctcatccgcataggcgaaaaccacccacaggctctgatgtatccccttctcgttgcatgtaaatcaataagcaatcttcggagagctgcggctcaagaggtggttgataaagttcgccagcacagtggtgcactcgtggatcaggcgcaacttgtatcacatgaacttatcagggttgccatactttggcatgaaatgtggcatgaagcactagaagaagctagtcgcttgtattttggtgaacataacattgaaggcatgctgaaagtacttgaacccttacatgacatgctcgacaaggtgtaaaaaaggacagtacgaccatacggaaagagcatttatagaggcataccgtcacgaactaaaagaggcacatgaatg

SEQ ID NO: 128548 - DNA, 527 bp, Arabidopsis thaliana
  unsure (1)..(527): unsure at all n locations
atacgactcacttaagggaaagctggtacgcctgcaggtaccggtccggaattcccgggtcgacccacgcgtccgcgattgatgactctgcaacagatcatcaagaggatgtagcaaatgggaacaaagatccagaggtaaaatatcaggctgccgattcttggtcagaccctacaacttcaactccattggtctgtacaaaatccaaacctccggtgagagatatggacaccaagatgatcgacgctcagtgatgtggtatgttacaacatttgaaaatcagcagagctttttagcttacaaagttacaatagtgatgtagatactattacacaatgacttctatggtaataaagggtgattatacgtnnnnnnnnnnnnnnnnnnnnnnnnnnnnnnnnnnnnnnnnnnnnnnnnnnnnnnnnnnnnnnnnnnnnnnnnnnnnnnnnnnnnnnnnnnnnnnnnnnnnnnnnnnnnnnnnnnnnnnnnnnnnnnnnnnnnnnnnnnnnnnnnnnnnnnnnnnnnnn

SEQ ID NO: 128549 - DNA, 579 bp, Arabidopsis thaliana
  unsure (1)..(579): unsure at all n locations
nnnnnnnnnnnnnnnnnnnnnnnnnnnnnnnnnnnnnnnnnnnnnnnnnnnnnnnnnnnnnngatccacgcgtctattttgttgttcttcgtcatcgacctacgctgcgattatctctccctctcaaaattccttatctcgtcgattaatttctctcagatcatgttgactgaaactccatttaggccacgagagaagcttctggagaaacagagattgttccagagcatccaaaggcacacttacttgaaaggaccaatggacaagatcacttctgttgctattcctattgccttggctgcaagttctctctacatgattggaacaggaatctacaacatgtcgaatggaatcggcaaaaaggaataagcagcttcttgatttttccttcttttttatatgcttttggtttctcaatgtatcagtcactgcccatatgcagtagcagactaaggttgcactggtctttttcttgaagctgtttattccgtcttgccaaataattgcttagttgcagacaatgtcgaaagctaaagatgtttgatgttataaagttccaatattttggggaaaaaaaaa

SEQ ID NO: 128550 - DNA, 596 bp, Arabidopsis thaliana
  unsure (1)..(596): unsure at all n locations
cnnnnnnnnnnnnnnnnnnnnnnnnnnnnnnnnnnnnnnnnnnnnnnnnnnnnnnnnnnnnnnnnnnnnnnnccacgcgtccgctcgagaaaagaagattcacttccatctgcaaattccttcactccctgtgagctcaatagagagagaagaagagatgccgctcggagagagaggaggatgggagaggaccgagtccagatactgcggcgttgagactgatttctccaacgatgttactcatcttctcaacttcaacatttccaccggcggttttgactatgttctcgctcctctggtggatccttcgtataggccgagcttggtggaaggaaatggtgtagatactcaggttcttccagtctgtggctctgacttagtcttgtcaccttctcaatggagcagtcatgttgttggaaaaattagttcgtggattgacttggattctgaagatgaggtcttacggatggattcagaaaccacattgaagcaagaaatagcttgggctactcatctctccttacaggcatgccttcttcccactcctaaagggaaatcgtgcgccaattatgccagatgtgtgaaccagatcttac

SEQ ID NO: 128551 - DNA, 806 bp, Arabidopsis thaliana
caaaatatcctctcaaaatatagaacaaaaatcggctgggtattgaaaaaagactatttgcaagttcttctcataaaaacatggcggcttctgatagtagaaacaacagagcagatgaacctggttttgttgtgcaacctaaaggagagcatagagtcattatagtatggctgcatgataaggatgagcgttcctctgattcacttcagtttgtggaacaattgaatcttaaaaatgtcaaatggatatgtccctctctcgtgttccccgattcattcataaaaggagtgggaggtttaggaatgggtgcagcagtagctctccactttgcaacaagttgtgctcttaaccattatactataaatccccgagttgttgttggaatcagcgggtggctttctaattcggggagcctaaaacgcagtatagaatctgcttcacatggggctccagctcgtgctgcatcgcagtcaatctttattacgcatggaatatgcgattctgttcctcacccctgtgactgtggagaagaagctgttttgtcccttagagaggctggatttagagacgtcaagttcacaccatttgcaaggtttggaccgactgctcatgagaacaatcgcaacgtaatggtcaaaagctggttggaagagaagctccagctcgatgttactataccatagagactttcctctttctagtgactagtagtttactaaatatcgtcgtttgttttctttgtcctgaataaattagcgtgactcatgttatgacttatccctaagtttttattttttacagccttt

SEQ ID NO: 128552 - DNA, 532 bp, Arabidopsis thaliana
gccggcactaatacgacttttttagggaaagctggtacgcctgcaggtaccggtccggaattcccgggtcgacccacgcgtccgggacgatcgaaaaatcgagacttgcgaattcaacacggaagcgagacagtaaccgacttaacaatggctgcttcatcgtctccgtgcatcttcttcgccactaccttactggtgctgcttctcactttctcatccgggaaattaccatttcaccctcgagacctgcttccgctttttccgaggcaagtctcgtggccggtagtcaattctctcaacactgccgtcgatctcctccctactttcatcggctccgcttctgttagaaacgacgccgtggagtggaaaggtgcttgcttttatgagaacaaagcttggttggagctcaataacaagtccggttccgaattcggcgggggcacactttcacattaaggtccgataaggcacatagttggacgtgcatggatatttatgtctttgtcacaccatatcgtgtgacatgggattg

SEQ ID NO: 128553 - DNA, 1028 bp, Arabidopsis thaliana
gaaacttgaaagagagaaagagtttgattttgattaaaatggggaagaagtgtgatttatgtaacggtgttgcaagaatgtattgcgagtcagatcaagctagtttatgttgggattgcgacggtaaagttcacggcgctaatttcttggtagctaaacacacgcgttgtcttctctgtagcgcttgtcagtctcttacgccgtggaaagctactgggcttcgtcttggcccaactttctccgtctgcgagtcatgcgtcgctcttaaaaacgccggcggtggccgtggaaacagagttttatcggagaatcgtggtcaggaggaggttaatagtttcgagtccgaagaagatcggattagagaagatcacggtgacggtgacgacgcggagtcttacgatgatgatgaggaagaagatgaggatgaagagtacagcgacgatgaggatgaggatgatgatgaggatggtgatgatgaggaagcggagaatcaagttgtgccgtggtctgcggcggcgcaagttcctccggtgatgagttcttcatcttctgacggaggaagcggaggttcagtgacgaagaggacgagggctagagagaattcagatcttctctgctccgatgatgagatcggaagctcttcagctcaagggtcaaactattctcggccgttgaagcgatcggcgtttaaatcaacggttgttgtttaactcacactctaccgtatcgtcagaatgaacggcgccgatacatcgtcttctccgatccttgcgatctccaaaactagaagcgatctcagtccgttggattcctttttttttcttgtttaagtaaatcaccaccgttcagttttctgacaatactttgttttagagatgaggtagtttctttctttctttgaatgtcgtacaaaatcaaatcttaactttttatttttctaaaaaaaaaaaaaaaaaaaaaaagggcggccgctctagaggatccaagcttacgtacgcgtgcatgcgacgacatagctgttgtatagt

SEQ ID NO: 128554 - DNA, 501 bp, Arabidopsis thaliana
aatacgactctttatagggaaagctggtacgcctgcaggtaccggtccggaattttcgggtcgacccacgcgtccgccggcttatacaaatcctactgccgtcaaaatcgattcaaagcgaaccagagattgaatggaagatgcagctgctccgaattcaggatccgaatttaatccaggagcaagacgcggcaaatctatcgatgaatgccaagacatgagttcgtaggagtttccgaaacccaatagtgaagtttctgatggagcaaatggagaaatctgggtgtagagttggtgattatttcgttaaggctgttggttgtactggacctgtagctggaggttacactaaagggaagagggataactgtctgcagtaactatctgaccattcaggatgaagtgaaccaaggagttatacatgagttgattcatgcttatgacgagtgcccagccaagaatttggattggactaattgtgctcatcatgcttgcagcgag

SEQ ID NO: 128555 - DNA, 451 bp, Arabidopsis thaliana
tctttttacttctcctctcgattcgaaaatttcacatctccggaattttcatttctggagaatattgtttcacatccctacaatggcgtctgagaatctgaatgacaagatctctgtttttaagaaactcaaagccaaatcagataataagatttgttttgattgcaatgcgaagaacccaacatgggcttccgttacttacgggatctttctctgcatcgattgctcagctgttcatcggagtcttggcgtccacattagcttcgtcaggtcaaccaatttagattcatggagctcagagcaattgaaaatgatgatatatggaggaaacaacagggcacaagtctttttcaaacagtacggatggagcgatggaggtaaaaccgaggctaagtataccccaagagctgctgatttgtataaacagatacttgctaaagaagttgctaaa

SEQ ID NO: 128556 - DNA, 875 bp, Arabidopsis thaliana
gagcactatacgactcacttagggaaagctggtacgcctgcaggtaccggtccggaattcccgggtcgacccacgcgtccgcggacgcgtgggcggacgcgtgggtctctcccctcaaacttaaattcacattttaagacttgttacttcaactataataataataataatctttcttcattatatattttcctctcctctcagatcttctctctcaccatcttctcttgagatcaagattgagtattcttgtctcaagaatcgatactcgagagctcttatggaccaaaatggtcataacgacgaagcagaaacagtttcatgcggcaacggcaactgcaaaagcaagatcgtgcctggagatgatcacggtggagatgagagtagtggtaccaagagaaggaagaagagaaaaacgcaacaaaagacaatgaaacgacgtgaattaatgtcgtattgtgagctaccggagtacatgaaagacaacgaatacatattgaattattacagagctgattggtccattagagatgctttcttcagcgtatttagtttccacaatgagtccctcaatgtttggacacatttgattggttttatcttctttgtggcactaaccgtcgccaatattattcatcacgacggattcttccccgtggatgcaaagagtccagggaatgtaacaagatggcccttcttcgttttcttaggagggtcaatgttctgcctactcgcaagcagcatttgtcacctcttctgttgccactcaaaagagcttaatgtcttccttctccgaataggctatgccggtatcacccccatgatcatcacttccttcttcccaccaatcttctacatcttccagtggcactcct

SEQ ID NO: 128557 - DNA, 522 bp, Arabidopsis thaliana
  unsure (1)..(522): unsure at all n locations
nnnnnnnnnnnnnnnnnnnnnnnnnnnnnnnnnnnnnnnnnnnnnnnnnnnnnnnnnnnnnnnnnnnnnccacgcgtccgcagtaatcaatacatagctctttcggcaacgcaatttgcagacacgtcagactcagagcttttccaatcagcgagactctctgcatcttctttaaggtattacggactggggctagaaaatggaggctatagtgtaacggttcagtttgctgagatacaaatacaaggttctaatacctggaaaagtcttggaaggcgaattttcgacatatatgtccagggaaaacttgttgagaaggattttgacatgcaaaaagctgctaacggttctagtatccgagttattcaaagagtctataaagcaaatgtatcagaaaattaccttgaagttcatcttttctgggctggaaaagggacctgctgtattcctgctcaaggcacttatgggccattagtctcagctatcagtgcaactccagatttcatacctactgtaaaaaat

SEQ ID NO: 128558 - DNA, 340 bp, Arabidopsis thaliana
cttgaagatgttgaaatagctaacagagatggtgttgcctgctctgctgtgaaacctcagagggaacaagatgctggaaatgaagccgtgaaaaggtttggaaaacctatcccaatggatattagcgaaagagcagccatcatcgagtagtatcaatcccaggtggggcagaaaacaatcattgtgtagtaggcaaggatgtgctgccaggtgcacatgagattcaggccaaaccaagcgacaccctcactgatattcatcatgatgtagatagcattgaaactgttcattcgactcagggaggtgatgttggcaattcgatagttttggcaaatggatt

SEQ ID NO: 128559 - DNA, 835 bp, Arabidopsis thaliana
  unsure (1)..(835): unsure at all n locations
ttttnnaacccacccnttccaaggggttntttncccccnattttaaaacaggttcnttcaaaccggnnnccttcnaaccgcccacccnattnaaattnttnttgngttgggccccaagggccggcaaaancnccaaanttccaggggttttnccnttccccggganttattcctcccttgaattnnattcccccgtnatncccgggggccaccctttcaccaggtattggaaccacccccaatcttgtgaaaccccaccaccattcaggagtggaaagttgaatcttggtgccctaccccaccagctcccaatggcacgcccactcaccacaaggtttaccaatggcatcagccatcagcagcggtggaagtggtggtggctcagattccccaagatcaggaaacagagccccagtcgatgatgtcattgacaaagtggttagcatggggttcccaagggaccaagtgagaggaacagtgagaacattgacagagaacggtcaagctgttgacctcaatgttgttttagataagctgatgaatggagatagaggagctatgatgcagcagcagcagcagcaaccgccaagaggttggtttggtggtcgttagctgtgttgtctctaattccggtttggctgacattgtatagtcttttatctctcatgtcagatttcctcgaacatatcttttggattaccttggtgtttcatttgtgacttcaatatttttaaaaaaaaaaaaaaagaaaaaaaccaaaaaaagnnnnnnnnnnnnnnnnnnnnnnnnnnnnnnnnnnnnnnnnnnnnnnnnnnnnnnnnnnnnnnnagtcacc

SEQ ID NO: 128560 - DNA, 946 bp, Arabidopsis thaliana
  unsure (1)..(946): unsure at all n locations
ccagtcaattgcatcaacccccttaccagccacctcctcaacagccacaatacccgcaacagccgcctcctcagctccaacacccgtcaggctacaacccggaggaaccaccttaccctcagcaatcttacccgccaaaccctcctcgtcaaccaccttctcatccacctccaggttctgccccatctcaacagtactacaacgctcctccaacgccaccatcaatgtatgatggaccaggcggcagatccaattcaggttttccttccggatattctcctgaatcatacccgtataccgggccaccttcacagtatggaaacaccccatctgtgaaacccacacatcagagtggaagtggatctggtgcctacccacagctcccaatggcacgcccactaccacaaggtttaccaatggcatcagccatcagcagcggtggaagtggtggtggctcagattccccaagatcaggaaacagagccccagtcgatgatgtcattgacaaagtggttagcatggggttcccaagggaccaagtgagaggaacagtgagaacattgacagagaacggtcaagctgttgacctcaatgttgttttagataagctgatgaatggagatagaggagctatgatgcagcagcagcagcagcaaccgccaagaggttggtttggtggtcgttagctgtgttgtctctaattccggtttggctgacattgtatagtcttttatctctcatgtcagatttcctcgaacatatcttttggattaccttggtgtttcatttgtgacttcaatattttttcaaagctttccatgtatgtttgaaacttgaagcttcgatcatttatttttttctgtgtttcattcatttgcctatttgactcttagaaaaacaaaaaccagtgagtgtaccaataatataaaaaaaaaaaaaaaanaaa

SEQ ID NO: 128561 - DNA, 563 bp, Arabidopsis thaliana
  unsure (1)..(563): unsure at all n locations
ggtgtttaccactttttgttacatctcttgcttttgcattttcttgaattagccatggtggcacattcactcgttcctctctcaccggctgctcacgccgccagactctcctctccatcgccgcggtcactgccgcaggctcctcccgtcgtccttgcagttccaccaattaatcgcaggacaattttggtggggctaggcggtgcgctatggagttggaacgctctggccgctaaggaggaggcaatggcggcagcaagacggccgcctccaccaccacctaaggagaagaaagacccgaccgtgaccggagttcaggccaaggtattggcgagtaagaagcgtaaagaagaaatgaaggcttccattgctaaacttagagagaaaggcaaacctgttgttgaagcaaaaccatcctcttcttcttcagaatagcatccgagcaacaatttaaaccctttccattaattcatctgtctaccaaattcatccctatgatgttaattcactactatttttcggggttnttcttangntggttttttggggggaaattnannggg

SEQ ID NO: 128562 - DNA, 749 bp, Arabidopsis thaliana
  unsure (1)..(749): unsure at all n locations
ccccaagaccagaaccccaagggggggagacttgggttgccgcctccctaaccccggcataaactggaggaagaagaaccgcttccatccccccctccttaaagatttgaatttttacccacccattttaggcgccaaaggaagataccaagcgggttcctcagggcttccttttttgtagcttatctagggatagtgcgaagaaaagaatggcctcacttcttcaggttccatgtagtgatgggtatgctgcttgaaatcgcactccaggttatagggaccgttagcaagtggatgcctcttggagtctattggggtaagtttgggatgcatttctggactgctgttgcgtttgcttatctgtttaccgcccttgaaagcatacggggggcccttgcgggtatgtacccacacatcccgtttgtctgtgatgctgcctatatccagattccgtgcgactaagaagaaacaccattggatcggtatgaccccccctttttttttttttttgttaattaggcccctgttttgttgttacaatgactcttcttgaatgccaattatgtttgtaatcaacgtttcatgaacccacccgtcaaagttacaaacttttgacccnnnnnnnnnnnnnnnnnnnnnnnnnnnnnnnnnnnnnnnnnnnnnnnnnnnnnnnnnnnnnnnnnnnnnnnnnnnnnnnnnnnnnnnnnnnnnnnnnnnnnnnnnnnnnnnnnnnnnnnnnnnnnnnnnnn

SEQ ID NO: 128563 - DNA, 481 bp, Arabidopsis thaliana
gccggccctatacgactttattagggaaagctggtacgcctgcaggtaccggtccggaattcccgggtcgacccacgcgtccgagatgtaccttctagcttccgatttcccccgatgaccaagaagccacaatggtggtggagaactttggcttgcctgccttacctaatgccactgcatgaaacttggatgtatgcagaaaccgcttaccatctccacccattcctagaagattttgaattcttaacctacccatttctaggcgccataggaagattaccaagctggttcctcatggcttacttttttgtagcttatctagggatagtgcgaagaaaagaatggcctcacttcttcaggttccatgtagtgatgggtatgctgcttgaaatcgcactccaggttatagggaccgttagcaagtggatgcctcttggagtctattggggtaagtttgggatgcatttctggactgctgttg

SEQ ID NO: 128564 - DNA, 466 bp, Arabidopsis thaliana
tacgactctctatagggaaacctggtacgcctgcaggtaccggtccggaatttccgggtcgacccacgcgtccggtgaattcaggtgggaatttgtgaagaataattgcgacaatggcatctggtgttttcgaggatgaagctgaaggaactataacgatcaatgaatatatcgataggcttgacgcacaagagctgggaatgttctctttctcctcgtgatcagttttaaagcttatgtatgtttctgatccttacgaaagtttaagacgcttccacattttcactccgtggttggtgataaatccgttagagttaagtgtagacaaacgtcttgaaaattggattcctgacctttaaattgactaccctttttctgaagctactgggtgggggctcggattgttatttgaacagtctctagaggtttcgggctaagctagtaaatgatagggggggggtctcct

SEQ ID NO: 128565 - DNA, 590 bp, Arabidopsis thaliana
  unsure (1)..(590): unsure at all n locations
aatcgactcatttagggaaagccggtacgcctgcaggtaccggtccggaattcccggttcgacccacgcgtccgctcacaataattctctcacattcccatggaaggtaaagccatcgcgacgtctctcggtggtgatcgtgtattgatattcccgtgttctcctcgctcttccttcgtttttacatcccggctctctagcctgcctctaaagcgtgcgtctatcggtggtgctgtctcttgttccggcgtcaatggcttgactcggtggaattccattgtttcgactcgcccactcgttcctgttcgttcaattaactcggaatcggactcggactccgacttccctcacgagaatcagcagggaaatccaggcttggggaaatttaaggaataccaagaatggggctcatggaccgccaagttctccgggggagcaaacattcccgtttcttatgccccaaattgcctcagagcaatcctcaatacccagaatttttttcggggggaaaaaaaccgntctttnggntnnccatggctgggaatttttcctggtttttaaggaacnttncgtgcttttnatttgcaagt

SEQ ID NO: 128566 - DNA, 431 bp, Arabidopsis thaliana
ctcacaacaatggcgtcttcgctgtgtgtatcaaattccacaatttgccctctgcctaatgtatcttcgcagccgctgctatcattctcccactctctcaggccattcatttccaagtcgaaacctatgtgtgcctcgatacagaagagagatggctctcaatttgtggtgaaatctcaggctcttgacttctctggaactttctttgaaggtggattcgggtcggatgatgacccgacttctccttccgggtcgggagtctcaactgcccttgaagacaaaccggaacctcagtgcccacctgggctcaggcagtacgaaacaatggcggttttgagaccagacatgtctgaagatgaacggcttggtcttacccagaaatacgaagagttgcttgtggcaggaggtggaatgtatgtggaagagtttaa

SEQ ID NO: 128567 - DNA, 572 bp, Arabidopsis thaliana
tatacgactcacttagggaaagctggtacgcctgcaggtaccggtccggaattcccgggtcgacccacgcgtccgaaacagtggaccacctgatcaacaatgctggagtacctcaaactgttatattcgaagatttcacacaaattcaagacgctaattctataatggtgagtttttaatgatattcttttacaagttcattaataatccatatatttacaaaaatgcttagctcttcttaaacatgatttgattgcttcaaacgcaagtattaatgaacttgtaaacttaggttttgaatggatgttgtggttagtgtggactaatccctcagcggtctagtctatactgtttttggggcggacaataaaccgctgcggagttagtttaaagacggtccacaattagcccgcaacggttttattttatttttttgggtctgcactgtagacggttttgttcgcttggaccgctgtaatcattcgaaaccttagaatttagacatgtacgctaaattttgattgcttcaaacgcatgtattaatgatgtagttaatgttaatctgatacatc

SEQ ID NO: 128568 - DNA, 414 bp, Arabidopsis thaliana
cccaagagtccgctctttccccatcaaaaaaaacaaaaacaaaacacaactctgtttctctcatcttaaaattcatgtaaaaaaaatctacaaatcaaagagagaaacagagtaaagagaaagagaagaagatggcgcggaaatactttcagagagaagttttgccggtaacggctttggtaataatggaatgtgcaaacgttggtttaaacactctgtttaaagcagcaactttgaaaggcatgagctttcatgtcttcatcgtttactcttatggtctcgctgctctgcttcttcttccttctctgttttgctctttcagattaagaactcttccaccgatgaatttctctattctctacaaaatcgtgctcttaaggattattggatgctgttcaaacataatgggataca

SEQ ID NO: 128569 - DNA, 554 bp, Arabidopsis thaliana
  unsure (1)..(554): unsure at all n locations
nnnnnnnnnnnnnnnnnnnnnnnnnnnnnnnnnnnnnnnnnnnnnnnnnnnnnnnnnnnnnnnnnnnnnnnnnnnnnnnnnnnccacgcgtccgggttcatcggtttctcttttccgatggcaaaagcttgcctcttgcagtctactctactcccagcttactctccacttcacaaacttcgtaatcaaaacatcaccctctctttctcaccgcttccgctgtcccgatgccgtcccggaatccactgctcagtttcggccggtgagactacaatacaatccatggaggaagctccgaagatatcatggggatgcgagattgattcacttgagaacgctacttctcttcagaactggctctctgattcaggtctccctccgcagaaaatggctattgatagagtcgacatccgtgagcgaggcctcgtcgcttcacagaatctcagaaaaggagagaaattgctcttcgttcctccttctctcgtcatcagtgctgattccatcaatgcaaggttaaagtatctggctttcatgaatgtgaatatctaatatcg

SEQ ID NO: 128570 - DNA, 573 bp, Arabidopsis thaliana
  unsure (1)..(573): unsure at all n locations
nnnnnnnnnnnnnnnnnnnnnnnnnnnnnnnnnnnnnnnnnnnnnnnnnnnnnnnnnnnnnnnnnccacgcgtccggctttcttcagcaccatgggatatttgatctctcctacaatagattgtctggccctataccagaagaacttggcgagtgtttggtattggtagagatttcactgagcaacaaccatctctctggagagattccagcttcactctctcgtttgaccaacctcacaatcctggatctatctggaaatgcactgactggatctattccaaaggagatgggcaactctcttaagttgcagggattaaacttggcgaataatcagctcaatggccatattccagaaagctttggcttgttaggtagcttggtgaagctaaacttgactaagaacaagcttgatggaccggttcctgcttctcttgggaacttgaaagagcttacacacatggacttgagctttaacaacctaagtggcgagctttcatcagaactgtctacaatggaaaaacttgtcggcctctacattgagcagaataagttcaccggngaaataccttca

SEQ ID NO: 128571 - DNA, 429 bp, Arabidopsis thaliana
tcaagggagatgcggcgtcatctaatgttgaaaagcatctgagtcaagcgaagctaaaggagataggaggaaacaacatatttgcagatgggaaagtagaagcaagagactatttaggcggtgtccgtaaacccccaggtggagagacaagcatcgcacttgtttaaaatcatctttttcggtaacaacttaactcttttataaaccgcggttgttcggtgtgtgttcttgtggtttcccatacacttcagctcaaagtgtgatttgtattttgcggtttcgtggttgttatttttattgagttggtttttaagccgttagggctttctaatgtaagttcgagcttaaactgttgggagattataagcattactacgggacagaggatgttgcttgtttcagaagttattgtttttcttttccgggtct

SEQ ID NO: 128572 - DNA, 535 bp, Arabidopsis thaliana
aatacgactcattatagggaaagctggtacgcctgcaggtaccggtccggaatttccgggtcgacccacgcgcccgcggacgcgtggggcgaagctaaaggagatgggaggaaccaacatatttgcccatgggaaggtagaagcaagagcctattttaggcggtgtccgtaaaccaccaggtggagagacaagcatcgcacttgtttaatatcatctttggcgggaccaacttacctcttttataaaccgcgggttgttcggtgtgtgttcttgtggtttcccatacacttcagctcaaagtgtgatttgtattttgccggtttcgtggttggtatttttattgagttggtttttaagccgttagggctttctaatgtaaggtcgagcttaaactgttgggaagattataagcatttctatcgggacagaggatgctgctcggttcagaaaagaagcacaaaaaaaaaaagggcggccgctctagaggatccaagcttacgtacgcgtgcatgcgacgtcatagtaatctatagt

SEQ ID NO: 128573 - DNA, 864 bp, Arabidopsis thaliana
tttcatttcatcttcaccaaactctcatggacttcgattccgcagtgagtttttatttcctctcctaaccaaatctttactctacttattaattttgatataaacaaaccctttgaattcatttgttttacaaatttggaccgtaatttttgaacattacaaaaggaaaccctattatctgttttgttttctttaggacaaacgagagagtgtggaggagacagtgatgatggaatacgatgaagaaaccaatcaattcgacgttgaattttgtccggttgagcatcctattgaaccggaggaagaagatcgtccggttaaatgtcccgtaccaatatcatcttctctcatccacaaaccaaaggagaaatcgaaaccggggtgggttaaacacagagccagcagctacgaaactccggtttatccaccgccacgtcatcatgtacgtaacgtacgaaagagacacaactcgtttgacgtggaagggaacaacaatttcttcacgagatctcatgatgatgacgaaaccacctctcgaagatccaacgtcacgttctaccgagttcttcaacaagttcaggagttcgagtcgtaacaaaatatcaaatctctttgagatgtttatgttggggtaatgtagtagttctatgtagtaccaaagtttcggtatacttgttatttatattgttattcggtgataaccggtccggtcagattcggttaacagcttaaaaaatgttataatttctacttttctagtttcttatgagtgcatgggcattttcagtataatcctacgttagaatgggccgtgttttatgaaagtcaatatatgggcttaactgggctatactttctaagttc

SEQ ID NO: 128574 - DNA, 539 bp, Arabidopsis thaliana
  unsure (1)..(539): unsure at all n locations
nnnnnnnnnnnnnnnnnnnnnnnnnnnnnnnnnnnnnnnnnnnnnnnnnnnnnnnnnnnnnnnnnnnnnnnccacgcgtccgggccaactgattctggtttcggtggatgaacaatgaacagaacgagagagatcctgataacatcaacaacaagaagaagaaaaaggaatctccattgttgatttactccgtctcgaaagcaaagaaacgaatcgtgtctaagttcagaaggagacccttatcgccgaatacgtctccttcttctgggttttggaaaagagtctgcttttgtggaattgaacctgaccctgaagatgacaactttaagcttagggttctgctacagaccaatgatttcttctccaaggattctaatccacatctctgtttgtaagttcagatatatatatatatatatatatatatagcgtagttttcatttagtataccaccaatatctgtatagatcttcttttaaacttcatcaatatcaaaagtgtgttcatcaatgttaccaaagatttttgcagaacagagt

SEQ ID NO: 128575 - DNA, 1028 bp, Arabidopsis thaliana
  unsure (1)..(1028): unsure at all n locations
gggtgaacttaaagataaagtggttcttgtgacaggtgcttcatctggtatagggagagagatctgtcttgatctatgcaaagctggttgtaagattgtagcagcagctcgtcgtgttgatcgtctcaactctctctgttctgaaatcaacagctttggtgcaatcggagtccaagccgcagctcttgagctagacgtttcatcagacgcagacactattcgaaaagcggttaaagaagcttgggaaatctttggaacgatcgatgttttgattaacaatgctggaatcagaggcaatgtcaagtctagtttggatttatcaaaagaagaatgggacaaagtctttagaaccaactggaccggatcttggttaatatccaaatacgtctgccttttgatgcgtgacgctaagcgtgggggctcggtgattaacgtctcgtcgatctctgggcttcatcgcggtttgttgcgcggtggactagcgtatgcttgttccaaaggtggtgttgacaccatgacgaggatgatggctattgagttagctgtttataagatcagagtgaactcgatcgcacctgggattttcaggtcagagatcacacaaggtcttttccagaaagagtggctcgagaaggtaacggaaaagattgtaccattaaagatgcaacagactgtggatccggggcttacatctctcgttcgctatctcattcacgattcttcccaatatgtcaccgggaatacatacatagtcgattccggagctacactccccggtgtgcccattttttcttctctttgaaaatcttagtcaaaatcttctgtgcttgtacatacaccgtgataagaatgatgtcttttccaataaatggcagtactggcattaacattgaatttactttctcagatatgtttttttgtttatgtgtccaacaaaaaaaaaaaaaaaaaaaagggcggaaannnnnnnnnnnnnnnnnnnnnnnnnnnnnnnnnnnnnnnnnnnnnnnnnnnnnnnnnnnnnnnnn

SEQ ID NO: 128576 - DNA, 999 bp, Arabidopsis thaliana
gaaaaaaggggccggccgacgcgaacgctctgggacaaaatacttcaaaggtttgtgttatactccgaagatgatactaaaaaagttggtgttcttattctcagtgttgggccttactgacatctacaaggtgtggttcaccgtgaccttaaacccgagaactttcttttctctaccaaggatgagacttctcctctgaaagcaattgattttggtctttctgactatgtcaagccagaccagaggttgaatgatattgtagggagtgcttactatgtggccccggaagttttacacccgacatatggaacagaagctgacatgtggagtataggagtgattgcttatattcttctctgtggcagtcgacccttttgggcccgtactgaatccggaatctttcgagctgtactaaaggcagaaccgaattttgaagaagctccttggccttctctatcacccgaagctgtagattttgtgaagagattgctaaacaaagattaccgtaaaagactaactgcggcccaggcttcgtgtcatccctggctggttggctcgcatgaactaaagattccatctgctctgatcatatacatgcttgtaaaagtgtacataatgtcaacttcattgagaaaatcggctttagcggctcttgccaaaacattaactgtaccgcagttagcgtatcttcgggagcaattcacattgttggggccaagcaaaaatggatatatctcgatgcagaattacaaaacagcaatcctaaagagttcaacagatgctatgaaggattctcgagtgtttgattttgttcacatgataagttgtcttcaatacaagaaactagactttgaagagttttgtgcttcagcattaagcgtttatcagctcgaagcaatggagacatgggagcaacatgcacggcgtgcttacgagttgtttgagaaagacgggaataggcccatcatgattgaagaacttgcatcggaactcggacta

SEQ ID NO: 128577 - DNA, 347 bp, Arabidopsis thaliana
ttctctaatggcttcctgtcaagcaagcttgatcggtaggtccaaagattcctgcaacgttcctggcttcagaactacaacggagcaggttgtgtttaagtccaagatatctaatctctgtgtctatgggtttactgctttaaatttcagacctttagagaagaatcttcatttgtgtggcaagtaatagagaacaaactgcaataatctaagtctttgtttgtttctactctaactttgtccttaagacaagaacaggatcactctgttctgtcttcttgtcctctgtattttatccttagacttttgttattttatttatatatgagttttagtttgttaaaaac

SEQ ID NO: 128578 - DNA, 544 bp, Arabidopsis thaliana
  unsure (1)..(544): unsure at all n locations
nnnnnnnnnnnnnnnnnnnnnnnnnnnnnnnnnnnnnnnnnnnnnnnnnnnnnnnnnnnnnnnnnnnnnnnnnnnnnnnnnnnccacgcgtccgctagttttgctttccttttttttttgtaggaaagggttaattatacgtaacacagaaacaaaaacaattctctttttcctctagaaaaagagattaaaaaaaaaatggaggggaggttattgacggtgttggtctgcctcgtctctacggtggcgatcgtgaacgccggtgatccttacttcttccatacatggaacgtgacttacggaactgcctcacctctcggtgttcctcaaaaggtgattctcatcaacggtcaattccctggtcctaaccttaactcaacctctaacaacaacgtcgtcatcaatgtcttcaaccacctagacgaacctttcctcttgacctggagtgggattcagcataggaagaactgctggcaagatggtgtggctggaacttcatgccccatcccagctggacagaactttacttaccatttccaaccta

SEQ ID NO: 128579 - DNA, 550 bp, Arabidopsis thaliana
atacgactcacttagagaaagaacgtacgcctgcaggtaccggtccggaattcccggttcgacccacgcgtccgctcaaatggcgctctcctctttcaatctctcttctctattattcctcctcttcttcactccttccgttttctcgtattcgtatcaaccttctctaaaccctcatgaaacttctgctacaagtttctgcaaaaacacaccatatccagatgcatgttttacctccttaaaactatccatctccatcaacataagccccaacattctctctttcctcctccaaaccctccaaacagctctttccgaggctgggaaactcaccgatctcctttctggcgctggggtctccaacaacctagttgagggacaacgtggctctcttcaagactgcaaagatcttcaccacatcacttcttctttcttgaaacgatcaatctccaagatccaagacggtgttaacgattcacggaaactagccgacgctagagcgtacctaagcgccgctctcaccaacaagatcacatgcttggaaggtctt

SEQ ID NO: 128580 - DNA, 612 bp, Arabidopsis thaliana
  unsure (1)..(612): unsure at all n locations
taaccaacggacataaataaaatctactttttcttctgatattttatctaaacaccaaagaaatgggcggcttttggtttttaaagactgttgtttttgtttctgtctgtaaaacataaaagaaaattttattgctcttgaagatattaaaaatcagacaagctgttcaagaaaaatattattctgttgaataaagtaaactgatggggaagagaaggtttcagaaagcaaaggaaacgtcgtcagtagcagaagcttcatctccgacggagtctcaggctacaaggagacgaagaggaaggccaaggaagaatcttgagaacccagaagatttcaagaaggaagaatctgaggaagacgaggattacgaagagtacgaggacgaagaagaagaagacgaagaagctgaggtggttattaacagagagaagctgaagaagaaagttaggagcagcagtggtagtatggaagaggagcaaaagatgaaacatgaagagttagaggaggaggagaagccggagatgacggtcaaggtagtggttccaccgccgtcntctngacggtcgaggaggaaaagcacgcccgtnaagagcttgtaaactttanttncnt

SEQ ID NO: 128581 - DNA, 577 bp, Arabidopsis thaliana
  unsure (1)..(577): unsure at all n locations
ttggctttagtgggaacaccatagctgaaggtcttgtggttagcacctgcttaggcggcntttattgggtctctgttcagtgggttggtagctgatngtgttgggcgccgtagagtttccagttgagcgctttaccaatgattgttggagcttctgtgagtgcatcaactgagagtcttatgggcatgctcctgggaaggtttttggtcggaattgggatgggcataggtccttctgttacagctctctatgtcactgaggtgtcacctgcttatgtgagaggtacatatgggagttctacccaaatcgcaacatgtattggactcttaggttcgctgtttgctggaatcccggcaaaagataacttgggctggtggcgcatatgtttttggatatccacagtcccagctgcaatgcttgctgtcttcatggaactctgcgtggaaagtcctcagtggctttttaagaggggaagggcagctgaagctgaagctgtgtttgagaagctattgggagggtcgtacgtcaaagctgctatggcagagttagtgaagtcggataggggagatgacgccga

SEQ ID NO: 128582 - DNA, 474 bp, Arabidopsis thaliana
ccgggccggcccacgcgtccgacaatcaatcatttctttgttgcgaaccaaacttgtgatatggcgacaccgaatcaggaagccgccgacactttcatcagcatcaccggcgcttctgacgccgtcgcccttcagaaactcgaggagcatcgtggtgatcttaatcaagcagtgaatgcatatttcagcgaaggagatcgaaatgtagtacgtgaagcgccggttaatgatgatgatgaaatggatatagatgatgtgattccggctccacaatctcctctctctatgttcaatgcagctagaacaattggccgtcctcccttttcgcttttggatttcggactttgctagacgtgtatttgatagcgatcctcttatgccacgccctccgtttgttagtcatcctagagaggttaggcagatacctatagaggttaaggatagcagtgggccatctggacgatctagtgatgc

SEQ ID NO: 128583 - DNA, 557 bp, Arabidopsis thaliana
gagcactaatacgactcacttagggaaagccggtacgcctgcaggtaccggtccggaattcccgtgtcgacccacgcgtccgcccacgcgtccgcgccactcttgactctctttctcttcttcttctcgagatcctgaaaatgtgactgacagattcttcaacttcactctcttcttcttccattcactgaactcaaaccaccccctgtgagctatgacccaccaaacccatcagcgtcgtcgccgtcgtcactccgccgtctgtcaccgtcatccttcttccaaacccaccactggtttctgtgccacctgtctccgtgaacgtctctctaccatcgaagctctatcttcctctgtctcagcttccactgagctccgccgtgttcgctcctactctgttcgtgacgcatccgcttctgttttggaccagccacgacgcagatcgtgtgatgttaggtctaatcacgacgacgatgatgatgatgagctgctaaagagctcgattcgattccccattgtaccggatttgatagaggatgaagaagaagaagatgatg

SEQ ID NO: 128584 - DNA, 555 bp, Arabidopsis thaliana
cttccttttgattctctctgccactctcatgtgacacaattataccattttttctttgatattttgtacaaaaaacataacattattttctctctattttcattaactcatttctgtatttttcattaactataagaaagtacagaaataaatataatacgcattaaaatgaagaaataataaaacgagagaaaaggtttaaggaaagggaaagggttagtgtagtgttgacaacgccactcttgactctctttctcttcttcttctcgagatcctgaaaatgtgactgacagattcttcaacttcactctcttcttcttccattcactgaactcaaaccaccccctgtgagctatgacccaccaaacccatcagcgtcgtcgccgtcgtcactccgccgtctgtcaccgtcatccttcttccaaacccaccactggtttctgtgccacctgtctccgtgaacgtctctctaccatcgaagctctatcttcctctgtctcagcttccactgagctccgccgtgttcgctcctactctgttcgtgacgcatccgct

SEQ ID NO: 128585 - DNA, 624 bp, Arabidopsis thaliana
aggacgcgtccgcccacgcgtccggatggaattgattgttgatttggatgatgaggtcatggagaactatttagaaggagttgagcctgacgaggccacggtaaagagagtgtgtttgaaaaggaaccatcacgggcaagtttgtgccaattctatgtggttcagcctttaagaacaaaggagtgcagccattgctcgacgctgtggtcgattatctgccttcgcccgttgaagtcccgccgatgaatggaacagatcctgagaacccggaaattaccattatacggaaaccagatgatgacgagccatttgctgggctagcattcaagatcatgagtgatccttttgtgggttctcttacatttgtgagggtttactcagggaaaatctcagctggttcttacgtgttgaatgctaacaaaggaaagaaggagagaatcggaagactcttggataatgctcgcaaacagcagagaagatgttaaagtggctttgacaggtgacattatcgctcttgcgggtctcaaagatacaatcactggtgaaaccttgagtgatccagaaaaccccgttgttcttgaacgaatggacttccctgatcccgtcatcaaggtagcgattgag

SEQ ID NO: 128586 - DNA, 448 bp, Arabidopsis thaliana
  unsure (1)..(448): unsure at all n locations
annnnnnaaaaaaaactctccatatatctattacttctacgctagctagagagggagattagggctcgtaagtgatggaggaaggaaagaagagggattgtatggagaaggcaaggccattcatttcaatggtagtgttgcaagtagggctagcaggaatggatattctctcaaaggctgttctaaacaaaggcatgagcaattacgtccttgttgtttaccgtcacgccgttgcaaccatcgttatggccccgttcgccttctatttcgacaagaaggtgagaccgaagatgacactgatgatattcttcaagatatcactccttggtttactcgagccagtgatcgaccagaacttatactatctcgggatgaaatatacgacagctacatttgcaaccgccatgtacaacgtcctacccgcaatcacnttcgtccttgcctatat

SEQ ID NO: 128587 - DNA, 871 bp, Arabidopsis thaliana
  unsure (1)..(871): unsure at all n locations
tattcgccaagctctaatcgactcactatagagaagctggtacgcctgcaggtccggtccggaattcccgggtcgacccacgcgtccgaagctctctctctgtttctgcattacaaaaagtgtttgttttcaaggtttctctctttcacttctctttgttttcttcatttcaatttctggattttgcttgtagctacatttggtctcactctattccatggctgacactggtgaggttcaatttatgaagcctttcatctcagaaaagtcatctaaatcattggaaatccccttgggattcaacgaatacttcccagcaccatttccaataactgtggacctcctggactatagtgggagatcttggacggttaggatgaagaaaagaggagagaaagtgtttcttacagttggttgggagaattttgtaaaagataacaatctcgaagatggcaagtatttgcagttcatctatgaccgcgacaggaccttttatgttatcatatatggtcataacatgtgtagcgaatatagagacttccctcaagtcgcagtagaggttgatgactatgaaaacggtgaagaagaagaagacggcgacgatcaagacaaacatcagtaactaaaatttgggtctactttaagttgctttaagtttaagtagtcagttttcatgttggatttatgtaaccagttgtttagtttaaatattacgaatactagtatttgctttctgctacattctttggaacatggtttaaaagatttactgtgtattgctatcaaaaaaaaaaaaaaggggcggcgctctnnnnnnnnnnnnnnnnnnnnnnnnnnnnnnnnnnnnnnnnnnnnnnnnnnnnnnnnnnnn

SEQ ID NO: 128588 - DNA, 596 bp, Arabidopsis thaliana
gaattgttttaggtgccactatagaagagctatgacgtcgcatgcacgcgtacgtaagctcggaattcggctcgagctcttcttcaaatccagtagagagattcaagacgagtctcatcgaaagttcgaatctttcgtcatctgattagctttctcttagggtttatttcgatttcgatttagtgttctccatcaatggcgacacccatggttagttccgctggaggattactagcaatgctcaacgagcctcatcctgttttgaagcttcatgcgctctctaacctcaacaatttggttgaccaattctggcctgagatctccactagtgtccccatcattgagagtttatatgaagatgaagaattcgatctgcatcaaagacagcttgctgctttgctggtctctaaggttttctattacttgggcgagcttaatgattcgctgtcttatgccctaggagccggtcccttatttgatgtttcagaggattctgattatgttcatacgcttctggccaaagcaatagacgaatatgccagtctcagatcaaaggcagttgagtcaaatgagatggtggacattgatcccaggct

SEQ ID NO: 128589 - DNA, 657 bp, Arabidopsis thaliana
  unsure (1)..(657): unsure at all n locations
nnnnnnnnnnnnnnnnnnnnnnnnnnnnnnnnnnnnnnnnnnnnnnnnnnnnnnnnnnnnnnnnnnnnnnnnnnnnccacgcgtccgagagcacaaagcagcaactcgtaccacggatgaaaaagctacccagcaagatgttcagatcctttgtccttgacaaagattttgacgtgtcacttgcttatgagtctgagggtattctaccaccaggaaccacctcccctgtgtttgcacagtattctgtctctggtttggcggatgcatctgagaaatattcttctcggaatctatcagcacctatcaaggcaaatctgcatttctctctaagtagaagtgggattctcagtctagatcgaggagatgctgtaattgaaatcacagaatgggtagacgttcctaagaagaacgtgactattgatagtaacacaactacatcaacaggcaatgccactgacgagaattcacaagaaaataaagaagacctgcaaaccgatgctgaaaacagcactgcttcaaatacaacagcagaagagccagctgttgcttctctgggcacagaaaaaaagctgaagaagcggacattcagatacctctgccaggtagttgagaaaactgttggnccctggngcaccnattttcggaaagagtctcttt

SEQ ID NO: 128590 - DNA, 561 bp, Arabidopsis thaliana
  unsure (1)..(561): unsure at all n locations
ttttcccagggtaaccacctatgcccaagattaccccaggctctaaaaccactccctataggaaaaactggtacgcctgcaggtaccggtccggaattcccgggtcgacccacgcgtccgggccaaggtcgatgaggaagaaggtgaagagtgctcgcaggagtggttccaactcgtggcatcattcagatttctctaactcggaagttgatcctattttcgcaatctaagatgcgtaaaagaatcgtgtatatatattgttgtatttggtgaagagagctagactatttagtgtataaagccccctgaccatcaaaaggcaaacactattgtcaaccattaaaggtttacactgctcaactcatctgtaaaacagttaacaattgtcttcttcggaaagcaaagaaaagcaaaggttcctttgttaggaaagaataaaccaacggcggaacgctctagaggatccaagcttacgtacgcgtgnnnnnnnnnnnnnnnnnnnnnnnnnnnnnnnnnnnnnnnnnnnnnnnnnnnnnnnnnnnnnnnnnnnnnnnnnnnnnn

SEQ ID NO: 128591 - DNA, 410 bp, Arabidopsis thaliana
gcctacgttgcatcacgataatgaagaataacttatagatccatccccttttgtctcctaattcttaattttttagaaagagatcattattgttctcggatggagatatttagaaaggcaacgattgtacgtctccgtagccacaacgacaaatacctaagtgccgatgaagatcaagaatccgttcatcaagatcgtcgcggcacaacaaaaaacactagatggacggttgagatcgtacctggatccaatgtgatccgtcttcaaagctgttacggcaaataccttaccgccactaatattcatttcctccttggagccaccggcgaaaaggtacttcaaactctacccgaaaagttggattcatctgcggagtgggagccgctatcagacgatggtgtacacgtacg

SEQ ID NO: 128592 - DNA, 460 bp, Arabidopsis thaliana
gtccgcatcattgtagcattctgaaggtacacgaagcgctaggcggcagactaaatccaacaaaaaggttactgagccaccgccaaagccgttgaacttcgattttctgaatgtgccggagaaggttacttggactgggataaacggtttcagaagaagcttggttgcctttcattggggactacaagattcaagaatctgtcagccaagattgggacagagtattcactcttgtcacctcccaaaacgctggaaaaacgatgttctagaagattgctgcagaaactcacaaattgtaataacacgcgctgctagattatcatatctacttagtatttactgatcgttggttggaatgcaggttaattttttagtagtgatagttttagtaacactttgatttgagttgtaatgtactttcttaacattttcttagataatttgaaggcaatgtatgtct

SEQ ID NO: 128593 - DNA, 368 bp, Arabidopsis thaliana
gttgctttgcctcaaactcaaattttgaagataatttttttggtttctctgctactgatttcgaatctttacgcttaatcaattattcatctggattttcaaatccaatccttttcctccctggtgaccaagtaattggggattaacaaagggactggggctttattaagctcgaaacaattgttcttcactctggccgcttctgcaaagtcgtgtgcttctcgcacctctgcgcaggtgtggggtggccttgaagtggtgacttcactctgtcttccaaggatttctctagcttctatcatttggaggctccgtcgtgtttctgagggtcttacccttgattacggctaacatttactacgcccact

SEQ ID NO: 128594 - DNA, 893 bp, Arabidopsis thaliana
  unsure (1)..(893): unsure at all n locations
tatacaactcatatagggaaagctggtccgcctgcaggtaccggtccggaattcccgggtcgacccaggcgtccgcacatacaaggccatgtgcagagacagccgtattgttcccggggctgcagcgactgaaatagagttggctcaaaggttgaaggaatacgccaatgcagaaatagggttggacaaatatgccatcaccaaatacgctgagagttttgagtttgtacccaagacccttgcagataatgctggcctcaatgcgatggaaatcatagccgctctgtacactggacatggatctggaaacacaaaactaggcattgacttagaggaaggtgcttgtaaagatgtttcagagacaaaagtatgggatctttttgcaaccaagttatttgcccttaaatatgcttcaaatgctgcatgccctgtacttcgtgtagaccagattataatggcgaaaccagcaggtggaccaaggagagatgcagctcaagctgcaggtcctggtccggggaagccttaagccggggaccaaatcccccgtggtgaaaccctcttctttggaacccttctgtccctgaaagtctgagaaaatttgggtatgtctcagtttaagatttgtgatctttgtaacgcccccccaacttaagtgttttgccttctttttctgttttcccctgttttggctcgtctcaacactcagattttccggtttagctagtgaaattattactaggatttttggcttaactctggattaaagcccaattggtttttaaaanaaaaaaaaaaaaaaaaaaaaaaaaaaaaaaaaannaagggcggccgctttaaaggatcccaggtaagggtgcgggtgcagtcaaagtcatagctgttctataggaaag

SEQ ID NO: 128595 - DNA, 484 bp, Arabidopsis thaliana
aggaaagaaccttctttctgagccagaaagtttagttcgccttgttctgtctgtgtttctgcctcttcccctgaaatcgaacgatttataaaatcgtcgtctggctttcgacgatctgctgacgaagaccatggcgccgattttcagatccacttcccttatcgctttttctctcttcttcttcttctttgcttccactcttccgatctcatctgggtctgaggatagttacacgatcacgggtagagtgagggttccagcaagcaccgtgattggtcatgcagctaaattctcaaatatcaaagttatactcaacggtggacagcatgttactttcctcaggccggatggatactttaccttccacaaagtgccagcggggactcatctgattgaagtttatgcactgggctacttcttctccccagtgcgagttgatgttagtgctcggcatcgtggcaaggttcaagcaacacttacagaa

SEQ ID NO: 128596 - DNA, 602 bp, Arabidopsis thaliana
taatacgactcacttagggaaagctcgtacgcctgcaggtaccggtccggaattcccgggtcgacccacgcgtccggatttcagggtctttctagatgaatggaaacctgtaataatggaactctcaaatagagaacctgagttacttttgactctactcaaggaagtccttgatatgatccaaaataatgaacggagaagacatgaaaccgaaaagccagtggaagaggtttctcaagttgagcaggtccctttcttgtttgcatggcttgtgagtcttctcaatggatcaaagcattttcagagaaacagttctctagaagtgaaacctccaagcattttccttatggaacttatacgtagatgtcttgtcttgggagccttaggatatgagctggttttgaaatcagcatttctactcgcagagattgtgggaggccgtgtcttaaaggagaagctcataaaacttcctcttatgcataaaagctctgcaattgttccattgaaacagagttctactcttgtaacagctagtacaacgctccttgagcaagagaagaatctcggtaatgcaggcaagagacttgagttcgtcaaacttc

SEQ ID NO: 128597 - DNA, 425 bp, Arabidopsis thaliana
cccaagcgtccggttgaagcaccagaaccaacacccgtcaatccatcatcagtaccatcatcttctccttccactgacacatctattccaccaccggaaaacaacgacgatgatgatgatggggatttcgtcctaccaccacacattggattccaatatgcatcgccaccaccaccaatgttccaaggatattaaaaccaatgtagtagtgacagtgttacccatttttaacatttctgtccattttttccatgtgaattatttgtatcaaacgacaaagatattacaaagatgaaaaacaacgacgatgatgatgatggggatttcgtcctaccaccacacattggattccaatatgcatcgccaccaccaccaatgttccaaggatattaaaaccaatgtagtagtgacagtgttacccattt

SEQ ID NO: 128598 - DNA, 629 bp, Arabidopsis thaliana
  unsure (1)..(629): unsure at all n locations
gacgaatttaaacaagttgtgacttctgaccttcagcgactgttgggggttgaaggtgaacccgtgtctgtcaaccattactattggaggaaagcattcccgttgtatgacagcagctatgactcagtcatggaagcaattgacaagatggagaatgatctacctgggttcttctatgcaggtaatcatcgaggggggctctctgttgggaaatcaatagcatcaggttgcaaagcagctgaccttgtgatctcatacctggagtcttgctcaaatgacaagaaaccaaatgacagcttataacattgtcaaggttcgtccctttttatcacttactttgtaaacttgtaaaatgcaacaagccgccgtgcgattagccaacaactcagccaaacccagattctcataaggctcactaattccagaataaactatttatgtattgtttggtctgttttcttgttgcatcactggtatggtctgtctaggtagaagaatatgatagggtgagggattttaggattgaagaatctttaaaacaaaaaaaaaaaaaaaagnnnnnnnnnnnnnnnnnnnnnnnnnnnnnnnnnnnnnnnnnnnnnnnnnnnnnnnnnnnnnnnnnnnnnnnn

SEQ ID NO: 128599 - DNA, 765 bp, Arabidopsis thaliana
acaatgatctttgatgaatgcaacgaccaaactgatatcggtcgggttatacgcgatggaagggaagtcattctccaagcatataattgggaatctcataaatatgattggtggagaaacttggatggtaaagttcctgacatcgcgaaatccggctttacttctgcatggttgccaccaccatctcagtctcttgcaccggaaggttatcttccacaggacctttattcactaaactcagcatatggctctgagcatctattgaaatccttactgcgcaagatgaaacaatacaaagttagagctatggctgatatagtcatcaatcatcgtgttgggacaactagaggacatggtggaatgtataaccgttatgatggaatttcattaccgtgggatgaacacgccgtgacttcttgtaccggaggactgggtaaccgaagcacaggggataatttcaatggagttccaaatgttgatcacactcagcattttgttaggaaagatataattggatggcttcgttggttacgcaacaccgtcgggtttcaagatttccgttttgactttgctaggggttactcagcagactatgcgaaggaatacattggcgcagcgaaaccattattctcggttggagaatgttgggattcttgcaattacaatggccatggtctagactataatcacgatagccatagacagcgtataatcagttggatcgatgcgacgggacagatctctgctgcatttgacttcacaact

SEQ ID NO: 128600 - DNA, 474 bp, Arabidopsis thaliana
cagttttatgttttgcctctctcccacttctgtaaataatcttctcacatccccgcacgattatgctcgagccgatcaacgagacacagagacgctaatgtatttgactcgattcgaatcattagtcctctaatcacaccgattgatttccacccacagatttcttgtctgaaatttagggttagcgaaggtttggatcaatgatgcaaggtgaagtacaattgcagccaccggattcacagaaactaagtgattccgctcctttgttaggagatcacaccaattcttcttcggcgtctccttctgctgcgtctgtggtggcaggaaatagcgatgagataaaggctgaagaagatttagagaacgatgcttcttcagctccttgttgtcgtatttgtttggaggacgatagtgaattgttaggcgatgaattgatttcaccttgtatgtgtaaaggcactcaacaattcgtgc

SEQ ID NO: 128601 - DNA, 913 bp, Arabidopsis thaliana
  unsure (1)..(913): unsure at all n locations
gaaagacgtctgctgttactgtttctagaatggcttctttggatgcggagatacagaaacaactggatgaaaaaatgcgaatcaagactaggctgggaaatatatcaagagagcgaggtagaaaagaaatctttgcagatatgaaggcattaatttcttcgttccccgaggaaatgagttccatgcgtagtcaattaaacaattataaagagactgctggaggtattcattctctgcgggctgatgtccagtccctctctggggttctatgtaggaagacaaaagcctcgcgtccgttgcaattgagatcagctgattatgcttctcagttaggtgacctgaatgctacggtttgtgatttgaagaacagtcatgaggagttaaagttgtttctggacatgtataaacgtgagtccactgatgcgagggacatagctgaagccaaggaacaggagtacagggcttgggctcatgttcagagtttgaaatcatcccttgatgagcaaaatctggagttgcgcgttaaggcagcaaatgaagctgaagccgtttcccaacaaatgttggctgctgcggaagcagagattgctgatttaaggcagaaaatggatgattgtaaaagggatgtcgccaagcattctgatatcttgaaatctaaacatgaagaacatggaacatatctttctgaaatacagacaattggaagtgcctatgaggacattgtaccgcaaaaccaacagcttttgcttcaagttccagagaggggtgactataccatcaagcttttctttnganggcatacttctaggcagntcaagtacnctgntttcgtaatncacatggttagggttccgcaggcggcntntncanttcctttcaggatctcagnttagnngttgggntncngcnnttc

SEQ ID NO: 128602 - DNA, 573 bp, Arabidopsis thaliana
gtgtaatagacgctgaagcatctgttgcagtgcttgatactgctgccggtgtatggttggatagaaatgggcaagttacttctgcacgtggaagtaagggacaaatcgatcaagatccgtcttttgaacttatgcgacgctgtcgccatggcgcggcatcagttggtatccggatctatgtgcatggtggtctaagaagagatgtgttacttgacgattttctagttgctgaaaattcaacattccagtcagacatcagttctccttggctagcatcagatagaacccagcaaagttctactcccaggttttcttatgccgcacgacctccttcaggctctgaaccaagcttctccatgtctgagggactgagcttggatgaaaattcgttggagaaattgacggaggcttctgcagctgaagcagaggtagctagttctgtttggcgagctgcacaactaggagctggtactctggatgaagaaccctctacctctgatgccagctcgccaattgtagaatctactactgatggtaccgcaaatgaaggagatgtcaggctttatccgagag

SEQ ID NO: 128603 - DNA, 830 bp, Arabidopsis thaliana
  unsure (1)..(830): unsure at all n locations
cacgaggagatctggtcaaaggtcttgttctattgaattgtgctggcggtatgaacaacaaagctgcatttgatgactggagaatcaagctactgatgcctgtactcttacttatcgacttattactcaagcaaagaggaattgcttctgcactcttcaaccgtgttaaagacagggaaaatctggagaacatcttgacaaatgtttacgggaacaaggacaatgtagatgacacccttgtagagatcattgctggaccagcaaataccgaaggtgcactagatgcttttgtttcaatcttaacgggtcctcctggaccaaatccgattaagctgataccggaaataaccaaaccggttcttgtcttatggggagatcaagatggactaacccctcttgatggtccagtaggtaagtacttcacttcccttccggatcagttacctaacttcaacctctatgttctacaaggcgttggacattgcccgcaagatgatcgtccggatcttgtccatgagcgtctccttccatggctggctcaactttcttccacctagtttcgatttgtttagccgtgtacacttgtttataaatgtaaaacaaatctatctaattggaaaaagacagattcaaaatgatatttctggacccattttgtggtgtctgaatgtaagttgtaaagaagtcatggtggtagtaacttggtaaaggagtttgtttttggnnnnnnnnnnnnnnnnnnnnnnnnnnnnnnnnnnnnnnnnnnnnnnnnnnnnnnnnnnnnnnnnnnnnnnnnnnnnnnnnnnnnnnnnnnnnnnnnnnnnnnnnnn

SEQ ID NO: 128604 - DNA, 502 bp, Arabidopsis thaliana
caatttccttatttagacaaaatctgttacttccctctcttgaatcgtcgtcattctcgagtgtctagatctagccaaaacttttgccatctctaaaatgtatctccattgacattttgagatctatctagctctgtttttctttttagaacaaaatggtggcgaaaccaaggtcaagatgttgttgttgtagtgtgttcatcggcgttatcatcttaatcgctataatcatcgctgtcattttcacaatcagacatagatcaaaccactccgatgatgatggctccaatgttaaaaactacgctaatgctctcaagatcgctatgcaattcttcgatatccagaaatctggtaagcttgaaaacaacgagatatcatggagaggagattcaggtcttaaagatggaagcgaagcaagtatcgatctttcgaaaggtttgtacgatgctggagatcacatgaagtttggtttcccaatggctttcactgctacagttctctc

SEQ ID NO: 128605 - DNA, 452 bp, Arabidopsis thaliana
ataaaacaatctcaatactaatggctactaccaagctcgtctacattctcctcatcctattcaccttcaccgtatctccggcgatctcaacggccccggaacattgtgatagcggctttgataacccgtgcatcaacaaagctaaggctttaccactcaaaatcgtagccattgttgccatacttacaacaagcttgataggcgtgacctctcctcttttcagccgttacatttcgttcctccgtcccgatggcaatggtttcatgatcgtcaaatgtttttcttctggaatcatccttggaaccggtttcatgcacgtcttgcctgactctttcgagatgttgtcatcgaaatgtcttagtgataatccgtggcataagttcccttttgcgggttttgtcgctatgatgtccggtctagtcaactctagccattgactccattaccaccag

SEQ ID NO: 128606 - DNA, 513 bp, Arabidopsis thaliana
cgactcatctgggaggctgaccgcctgcggtaccggtccggaattcccgggttgacccacgcgtgcgatgctcaacccccatacgaatcagacaagacactccttccaatataccatacttcatcctttgattcaaataccaaaaaaatttaaaccctaaaattcatttgagtctcttcctagtcatcaatctcttgaaaccctgattccattggtttctagattggccattgatcttgtttttaaataatgggaagctttcatcgccggactttttcttatgataaacttccgaacgaacccattaggctctccgttctcaaactagatggctcttcctttgatgtttacgtattgacctcggccaccgttggggatctcaaggttgctatagaaactgccttcagccatgtccccaagaagggaccctccaagatctcatggtcacacgtatgggggcatttttgtttgtgtttcggaggtcagaagttaattaccgatacggattgcatc

SEQ ID NO: 128607 - DNA, 624 bp, Arabidopsis thaliana
  unsure (1)..(624): unsure at all n locations
cccaagcgtccgcatcccttcgctcaatgtctctgctggtcttttgggtttcttctttgtcaagacatggactaagatgctccataggtctggtctcttgaaacagccatttactcgccaggagaatactgttattcagacctgtgttgttgcctcttctggcattgccttcagcggaggttttgggacatacctctttggcatgagtgaacgaattgcgacccaatcaggagatgtatcccgtggcgtcaaggacccttctttgggttggattatcggtttcctctttgtcgtcagctttcttggcctcttctcagttgtccccctgcgaaagataatggtaatagacttcaaactaacatacccaagtggtactgcaacagctcatcttatcaacagctttcacacccctcaaggcgccaagctagccaagaaacaaagtgaggggtgtgggggaaatttttcntctttaagctncttcctggngtttcttccaattggnttcttttaancggaaggaggaaaaanttgtggggttctccaactttccaacattttgggacttaaaagncttaccaggtcnaagttctaacttttgnattnttncaagcaaccantattgtt

SEQ ID NO: 128608 - DNA, 711 bp, Arabidopsis thaliana
cgcctgcaggtaccggtccggaattcccggttcgacccacgcgtccagcccacgcgtccgtggagaacattcttgttattggacacagctgttgtggtggaataaagggactcatggccattagaagataatacagctcccactaagacgtattaatctcaaaggctaatttaatcaaccatgagtgtcttgcctcctgttctcgctaacttgatggaaatgcttgaaaagggtagcgagttcatagaaaactggatccagatctgtgcaccggccaagaacaggatcaagcaggattgtaaagacctaagctttgaagatcagtgcaccaactgtgagaaggaagccgtgaacgtgtccttggggaatcctttgtcttacccattcgggagagaaagagtggtgaagaacaagcttgccataagaggagctcgctatgatttcgtaaaaggaacgtttgatctttgggaacttgacttcaagactacccctgcctttgccttctcttaaaaaattactactactccaatattttctctatgttgtttcaaattatgttcttataatcttcttctgttgcttctgtaatgtcatctttgctacttctattccaatagaaatgaataaagctttccagagccaaaaataatatcaaagaaagagttttacacaccagggcagccgctctagaggatccaagcttacgtacgc

SEQ ID NO: 128609 - DNA, 301 bp, Arabidopsis thaliana
gatcaaaaatggtctcataattctctctatatcttttatcactttcgaagattcctcttctcgcccacaaatcaaaatcatttcttttgccgactaattgaatttcttagaattcaacatacgcaatgaaaatgttctcgtcacaaagattagactaatccgactgtgtttttaatcaatcatcattttatttaggggagagaagttgtaaagttttgatttttttttctgggttttttctgtgagacccagaagaagaacagagagaggaagaatgagaagagaaaaatatctctttctc

SEQ ID NO: 128610 - DNA, 453 bp, Arabidopsis thaliana
cggaagcgtggggcaaaagcagaagcgagactattcgccgagagctctcactaactattgaattcatcgaagaagctcgtctcgttgtcgcagaatctcgtcttctccgttctagaacaatggggaatgctcttgtcaaaaaagaaccaccgcctccggtggtactcgttcctccgctctttgattaccctcctctctccgcccgcactaggatgttggaatcatcatataatttgttgtttgggaagcttgcattgagatgtctatttgaggattactttgaagaagctaatcgattcacgggcaagtttttgttgaagcctactgatgatcctcatgtggatttggttgcatctgtttcgggtgctgtagatggtagagtggaaaggggattttgttgggaattgcggagtttcgctggcaaagtgatgttgatgatcctcatacttttgt

SEQ ID NO: 128611 - DNA, 527 bp, Arabidopsis thaliana
  unsure (1)..(527): unsure at all n locations
cgnnnnnnnnnnnnnnnnnnnnnnnnnnnnnnnnnnnnnnnnnnnnnnnnnnnnnnnnnnnnnnnnnnnnnnnccacgcgtccgcggacgcgtggggaagattctgcggtgttcttggtcactttgtggtttgtataatggcgtctgggacagtgggagggttgtctgaggtatatagtagtgcaaaaaggattctactaagagcgcggaatggtatcgagaagttggagaggttcgactctgatcctaccgacctcgcctcctccgtgaaacgagacattaccgaggttcaatctctttgttccaatatggacggtctctggcgttcgatccctgtcaaatcccagcgtgatctttggagaaggaagagtgaacaagtaggagaagaggctgagtatttgaaccaaagtctagagaagtacatgtggaggaatcagaggaagatgttggaagctaaagagagagcggttttgtaggtagagggagtggagaaggagctcacattttgcaaatatttgatgaggagg

SEQ ID NO: 128612 - DNA, 543 bp, Arabidopsis thaliana
  unsure (1)..(543): unsure at all n locations
nnnnnnnnnnnnnnnnnnnnnnnnnnnnnnnnnnnnnnnnnnnnnnnnnnnnnnnnnnnnnnnnnnnnnnnnnnnnnnnnnnnccacgcgtccgcccacgcgtccgctaacacaactctcgccgttgttttctctgctccaccgtcaaaacctggtggttggatcgcttgggctattaaccctaaatccaccggcatggctggatctcaagccctcgttgcctctaaggaccctagcaccggcgttgcttccgtgacgacccttaacatcgtctcttacagctctctggttccctcgaaactgtcctttgacgtgtgggatgttaaggcggaggaggcggctaatgacggtggagctttacgaatctttgcgaaagtgaaggttccggcggatttagcggcgagtgggaaggttaaccaggtttggcaggttggtccgggagtgtctaatgggaggatacaggctcatgatttcagcggtcccaatcttaactcagtgggatcactcgatttaaccgggaccacccccggagtccctgtctcc

SEQ ID NO: 128613 - DNA, 435 bp, Arabidopsis thaliana
cccacgcgtccgctctcttcttactctcaccatatctgctctctctctctctctgtttcaagcttttgctcccatttttcatttccttcgtattctcgctcgagcttagcggttgatgtaccaatgaccaaatcgatatttgaatcgccgcggctacctctctttgtcttctgatttctctatctctcgcttgatgctaccacttttagggtttctattattcccagggactttgggtttctttaagaagttcgattcgtctccggtttctttttagggttaacgaagtctggggtgttggatttcgatctttttttttttggtatcttccccattgactgttgcggtgataagagagtgacgcaatggtgtctaagaatgatcatatcgagactttattcaattcaatccaactagttaaagatgttgttcttc

SEQ ID NO: 128614 - DNA, 530 bp, Arabidopsis thaliana
  unsure (1)..(530): unsure at all n locations
caaaacacaaaaatcgacatggcttccaagtcactctttcttgttgccttacttgtcggctcttttgctttcacttcatttgccagtgtcgctaacaggaagctgaagagtggtctcgaggaccaaaagacattcttccaccatccaggcggaggtctcggtggaggaggcggtattggtggaggcagtggtcttggtggaggaggcggctttggtggaggaggcggtcttggcggaggagctggaggcggtggcggtttaggaggaggagctggtggtggagctggaggaggttttggtggaggagccggtgccggaggtggtttcggtggtggacatcattgatgagaagctataagatcttgacgttaaaccatggaatggaatgcatggcaatgggttttacgtaccaaagtcttatgaaaaaagattaatatattattcatctaaagtgattcggtccatgattttntgttattatcggcctttgaggaaataaatgaatgaattagaaaaaataatcgagctct

SEQ ID NO: 128615 - DNA, 538 bp, Arabidopsis thaliana
atgatttgccagctctatacgactcatatagggaaagctggtccgcctgcaggtaccggtccggaattcccgggtcgacccacgcgtccgctctttcatatacaccatataaaacgaaccagttaattatgggtttaatttccgggaaggtgtgtgtgtttatctttgtattcgctctagtcgctgaattttcgttcggaaatgttgaggttaacgacgacaaacactttttccacaaacctcgtccatttttacacaaacctcgtccattcctccacaagcatggcatttacaagaaaggtttcggtaagggtttgggcggtggaggcggtccggtgccggaggtggtttcggtggtggacatcattgatgagaagctataagatcttgacgttaaaccatggaatggaatgcatggcaatgggttttacgtaccaaagtcttatgaaaaaagattaatattatttttcatctaaagtgattcggtccatgattttgtgttattatcggcctttgaggaaataaatgaatgaattag

SEQ ID NO: 128616 - DNA, 743 bp, Arabidopsis thaliana
gccagcactatacgactcatatagggaaagccggtacgcctgcaggtaccggtccggaattcccttgtcgacccacgcgtccggatcaccctgtccacaagaatatgaacatgccatccacttcattatctcctgcgggtacctcaaaaagaaatgtcggacccgaaacctcaaattctggatatgggagtgggaatagaactggttggacttcgtcattcatgtctccagagaaatgatgcaaagaaaatgtagctttttcctgaaatggtgagtgagatgatgcgctgttaatgtgactccgtgcccttaattcacctctgaaactacagcagaaatcagaacttggtgtcactaacacctttgtatctcctccacctttggctggaagaaagatgcaatggtttctatgtaaattctctgaagtgtgtgtggacaagaaggcgttggttgaagcatttgtgtttacacacacaagacatgaaagtgtatgtgtgcttttcattcaaagatttcccccaacctttgtataattcttacacccggatgtttaatcctggtatgtgattcatacatatcatttttagctactctctgctatgtgatcaatgaccttttgctgcagcttgatatatgtatacatgttaatggaaaaaaaaaaaaaaaaaaccaaagggcggcaactctagaggatccaagcttacgtacgcgtgcatgtgacgtcatagatcttctatagtgtc

SEQ ID NO: 128617 - DNA, 557 bp, Arabidopsis thaliana
  unsure (1)..(557): unsure at all n locations
aaaactagaagtcagtctcaggccgttcctgggtctagtaatgctcgtgcaataccaatggacacaagcaatcatcgaggaggaactaagatttcacatgaagcccaagtctctgaccgtgtcagaccggctaatgccagtggtccaagcccacagattaataccgctgtagggaggagtctgggttttgatcaagtccacaagaatatgaacatgccatcatccacttcattatctcctgcgggtacctcaaaaagaaatgtcagacccgaaacctcaaattctgggtttgggagcggggataaaaccggcggttggacttcacccattcatgtcancggggnaatgatgcaaaaaaaagttggagtatatcattcatctgattttctgagcaaggttatgtgtgcctttggggcctaactgtggtttctccagttaaaggctctggccttgggtttagggtcttaatggggtttttccatgacagcttactttttcaaaaaggtntaggtttnttnttcctaagttnccaatnctgntanctttnaatttnaccg

SEQ ID NO: 128618 - DNA, 975 bp, Arabidopsis thaliana
gctaaatagttagaagatttaggccatatatcagcttgttataggtgcgagtgaaggggacttcatgactatacggtaaaatagcgcctgaattttggacttaattaacaaacgtcattacgagagtttgtaggaagatttattagaaattgtgactcacggtatgatacacataggtgcagtaccgtttaccagtgtgtacttcatcgatattgtggtgagacgaggtgagcgagcgatcaatttatggcttttcagtgaaataatatgagcggatatgtcacgtggaggtaccgcggagccacatcatttagagatgtaaataaaaatacgacagttcttgtctattataagacgagatgatagtgagctcggcaagttactaacttgaaatgccgggcatacgtcaatgggtgttgtccccatactggggtgggggaataaccgatgaaggcagtacattaattttaggagattatatgaagtatgcaattttttgacgcattgatagataggattgcatctctagtgagagggagccctatctggtggaggatttttaggcagaattagcatttattagagaggagtatctagaagtacaaatgcaaagatcgaaatgaaataaaacttggtagcattatataagaatctcattacaatttcaagtaatacgaaggtgaatgtgaagcttagtactcagtttttggagaaggtgagtatgatggtggtggtggagaactgtagacatatggtggtggaggagatttgtagtcaaccttaggggaaggtgagtagtatggtggtggaggagatttgtagtcaaccttaggggaaggtgagtagtatggtggtggtggtgaactatagacgtatggtggtggtggagatttgtaatctaccttaggggcaggtgagtagtatggtcggacgcgtgggtcgacccgggaattccggaccggtacctgcagacgg

SEQ ID NO: 128619 - DNA, 440 bp, Arabidopsis thaliana
aggaggatttggtggaggagctgggagcggtggtggtcttggtgggggtggtggtgctggtggaggatttggcggtggggctggtggtggttcaggtggagggtttggaggaggagctggtgctgggggtggactcggaggaggaggtggagctggtggcggtggtgggtttggaggtccgggcggaagcggtattggtggtggtttcggtgggggagccggtgccggaggtggtttcggtggtggacatcattgatgagaagctataagatcttgacgttaaaccatggaatggaatgcatggcaatgggttttacgtaccaaagtcttatgaaaaaagattaatatattattcatctaaagtgattcggtccatgattttgtgttattatcggcctttgaggaaataaatgaatgaattagaaaaaataatcgagctc

SEQ ID NO: 128620 - DNA, 601 bp, Arabidopsis thaliana
  unsure (1)..(601): unsure at all n locations
ttaatgtgtgcctttgggctaaactgtgatttctgcagtgaaaagctctagactgaggttgaagatctgaatggagtttttccatgaacagcttactgtttgacaaaaggcatgaagattatgtttgctttccttcaaaaaaaattttnntaggcagaattaaaatttattagatatgaatatcatgaagaacaaaagcaaagatgaaatgaaataaaccttggtagcttatataagaatctcattacaatttcaagtaatacgaaggtgaatgtgaagcttagtactcagtttttgaaaaaggtgagtatgatccggtggtggatttggagaactaaaggcattggtggtggaggaggtcttggaggaggttatgttggtggtggccatcactgatgagtggtgaggctcatgctcatgcattcgtaacgttgttatattatttaattaaatggaaaatgataaattaattattgcaataaaatgatacattagcaattgtgtatgtcgttatttttattttgagtcgcattgtatgctgattccatatgttcggctttggtcggtttcaagtgtggttaataaaatggttattttacta

SEQ ID NO: 128621 - DNA, 536 bp, Arabidopsis thaliana
aggcagaattaaaatttattagatatgaatatcatgaagaacaaaagcaaagatgaaatgaaataaaacttggtagcttatataagaatctcattacaatttcaagtaatacgaaggtgaatgtgaagcttagtactcagtttttggagaaggtgagtatgatggtggtggtggagaactgtagacatatggtggtggaggagatttgtagtcaaccttagcgggaaggtgagtagtatggtggtggaggagatttgtagtcaaccttaggggaaggtgagtagtatggtggtggtggtgaactatagacgtatggtggtggtggagatttgtaatctaccttaggcgccaggtgagtagtatggtggtccgggtgagctgtagacatacggtggtgggggagatttgtagtctaccttcggggaaggtgagtagtatggtggtggtggtgagctatagacgtacggtggtggaggagatttgtagtctactttaggggaaggtgagtagtatggtggtggtggtgagctgtagac

SEQ ID NO: 128622 - DNA, 547 bp, Arabidopsis thaliana
  unsure (1)..(547): unsure at all n locations
gccnnnnnnnnnnnnnnnnnnnnnnnnnnnnnnnnnnnnnnnnnnnnnnnnnnnnnnnnnnnngtactctgcaccacgcgtactaaacacagaccaagaagaagaagaagacgagacgacgaatccagaaacagagagagagggagagagctttgaatatcttattgtacacaatcttcttcgcatggaagatttctgtttctcgtcactctgatatccaaaaatgtctggatctgattttgatttcgcggcgtttcgagttcaatgctaaaacatcgaagcggtttcgaatctctgagaatcgaaggaaaacgaagcgtgtaggttagggaacttaagattacgttgaagagaagcaagttctcttaaatcgcaactttggagaagtttcgttgttggtttttggtaaagcgatggagtcacgaatggatcagtacgagcttatggaacagatcgggagaggagcgtttggtgctgctattttagttcatcataaagctgagagaaagaagtatgttttgaagaagatcagattagctagacaaac

SEQ ID NO: 128623 - DNA, 537 bp, Arabidopsis thaliana
  unsure (1)..(537): unsure at all n locations
nnnnnnnnnnnnnnnnnnnnnnnnnnnnnnnnnnnnnnnnnnnnnnnnnnnnnnnnnnnnnnnnnnnnnnnnnnnnccacgcgtccgcgagaccgagacgaagaaacacagagatcggtgatggcttcacagagatattcaacagagagattggtttctctcatccaatcaccatctctcgtcgaatctccgcttctgaggggagagtgaagaaactagatctttacgggaagttaaatggtcatgagggatgtgtgaatgcagtggagttcaattcgactggcgatgttcttgtttccgggtccgatgatcgacaaatcatgctctggaactggttgagtggaagcaggaagttgtcgtatccctctggccattgtgaaaatgtgtttcagactaagttcataccttttacggatgacaggacaatcataacatctggtgctgatggacaagtaagacttggtcagatcctagaaaatggttaagtggagacgaaaagactagggaggcatcacggtcgcgtgtacaagcttgctg

SEQ ID NO: 128624 - DNA, 560 bp, Arabidopsis thaliana
ccagctctatacgactcactataggaaagctggtacgcctgcaggtaccggtccggaattcccggggtcgcccacgcgtccgagaaggggtatgttcagtttcgtagcaaagaacagataagagaagctttgaagcttctcgatctggaatctgttcactctttgttcgatgatttcattcaaagagcttctaattgcattgcttctccttcctctaacggctctgtttcgtctcgtcctccgctgcctccggcgactacgacggctgctcgttctgattctcagtcaagtttgaatttttctgagagagctcccgttcgccccaaggatatggtttcgcgagacgatagcttcgtcacaaagtctaagccttcttctctctacagtgatggttttgcagctcctcctcgaagaccacagattctcgattcaacacttaccaccggcaatgatggagagaagctgagtttgataaaacttgctagtttgattgaggtatcagctaagaaagctacacaagagataaatctacagaacaagttaacggaacaactcgagtg

SEQ ID NO: 128625 - DNA, 561 bp, Arabidopsis thaliana
  unsure (1)..(561): unsure at all n locations
cgtaaaagatgatcgtctgattagatacgcactaaaacatcaaagagtcactctaaactcatctctctcgccgaattctccccaacaatttccgccggaaacaaattctcagattccggtaactctaaaactatgtcatcggatattccgtgctgcggaaccacgttctcgctctacgtcgtgataatcatagctcttgtagcgttcgctggcttgatggctggtttaactcttggtctcatgtctctcggtttagtcgacctcgaagttctcatcaaatctggccgtcctcaagatcgaatcaacgccggtaagatatttccagtagtgaagaatcagcatctgttgctatgtacactatttgatcggaaactctatggctatggagggctctacccaatattttttgggataaaatttgtgccntcctttgggtaagcttagttcttccttttaagtnnnctcntnatacttngtgtttngaggggtaaatnccccangcaagttttncctcggtncggggctttanggnttggngcggtaantnggctccnttttgtt

SEQ ID NO: 128626 - DNA, 528 bp, Arabidopsis thaliana
  unsure (1)..(528): unsure at all n locations
nnnnnnnnnnnnnnnnnnnnnnnnnnnnnnnnnnnnnnnnnnnnnnnnnnnnnnnnnnnnnnnnnnnnnnnccacgcgtccggtggctaactaaggcagagagttcaccattagaagatccaacattgctccctgaagaaagaaagctaattgcagacaactgtgctagcaaagagccagtgaagtcgatcccgtggaggctgatattgtcgaaaccaccggtttgggctctcatcagttgccacttttgtcacaactggggaacattcattctcttaacatggatgccaacttattaccatcaagtgctgaagttcaaccttatggagtcaggacttctctctgtatttccatggatgacaatggcaatatctgcaaatgccggtggatggattgccgatacacttgtcagccgaggtttctctgtcacgaatgtccgcaagataatgcaaacaatagggtttcttggaccagcgttcttcctaacacagctgaaacacatagattctcctacaatggctgttttgt

SEQ ID NO: 128627 - DNA, 453 bp, Arabidopsis thaliana
  unsure (1)..(453): unsure at all n locations
gagagaaagatgcaattgaacatncatcaagagaaagcgtggtgaaccaaatggaagaagggaaagctctactcacagcatcaagcagcgcaantcacatnaggcctttncgttgatcattgacgggaagtcgctaacctatgctcttgaagatgatttcaagaagaagtttcttgatttagctacaggatgttcctctgttatttgctgcagatcatcacctaaacaaaaggcattggctacgcggttggtcaaatctggtaccgggaagacaactttagcggattggagatggagcaaataatgttggaatncttcaagangcgggatattgggtgtttggaatcaccggttttgaaggattccaaagcggttatgttttagcggtntngccctttcncaattcccggttncttaggggggttttttntcgcccatnggcancnggtcnta

SEQ ID NO: 128628 - DNA, 546 bp, Arabidopsis thaliana
  unsure (1)..(546): unsure at all n locations
gatactccgacactatacgaactcatttagggaaagctggtacgcctgcaggtaccggtccggaattcccgggtcgacccacgcgtccgattcgtatgacgaagattctcccaagaaaagcagtactcgtgcagcttcgagatccacttctaatgtttcatctgggcatgatctgctttcacgaagagcatcacaggcacaacaccatgaagaatggcataccgacttactagcttgttgctcggaaccttctctttgcttcaagacattctttttcccgtgtggtactttggcaaagattgccactgcagcatccaacaggcacatctcttcagctgaagcatgtaatgagctaatggcgtattctttgatactttcttgttgctgctatacttgttgcgtgaggaggaaactccggaagacactgaacatcacgggaggattcattgacgattttctatctcatggtaatgtggtttgcttgcctgtgccccttgtacaaggaccctgaggaggaaggtttagtatgcgtgggggcaatnttgg

SEQ ID NO: 128629 - DNA, 662 bp, Arabidopsis thaliana
  unsure (1)..(662): unsure at all n locations
cccgccccccngngatgccccncttctgttntccggncctncttgctcagcatntttccccgngggtccttggcaaggtccccctgcngcanccacngcnatctttccgctgagcctgtaatgggctatggcgtatccttggnactttcttggtgctgctatacttgttgcgtgaggaggaacctccggaagccactgaacatcacgggaggattccattgacgattttctatctccatgtaatgtgttgttgctgtgccccttgtacaagaactgagagaagttgagattcgtggggcatatggtacggagaagacgaaaataagccccgccttcgtcgcagttcatggaacattgaaatcttctattatacaaaaggtgaacaaaaacaacgatttgttgtaactctggatacgagacgagattcttcttcgtactactcacttaatattattgtgttaaatcgtggagtcgtatgtaaattagtttgggattctcatcttaatttcagcaatttgtgttgtgtgtatcacatatagactaactaattcttatttcaaccttttatcaaaaaaaaaaaaaaagnnnnnnnnnnnnnnnnnnnnnnnnnnnnnnnnnnnnnnnnnnnnnnnnnnnnnnnnnnnnnnnnnnnnnnnnnnnnn

SEQ ID NO: 128630 - DNA, 946 bp, Arabidopsis thaliana
  unsure (1)..(946): unsure at all n locations
acgcgcagcnnnnnnnnnnnnnnnnnnnnnnnnnnnnnnnnnnnnnnnnnnnnnnnnnnnnnnnnnnnnnnnnnnnnnccacgcgtccgcggacgcgtgggttgggtttaagaagcaggagaagaacactaaaagaaaacatttttatggtctggaattgaatccaatcctcctctgtttctctaacaaaaatggcttctctatgtcaagcttgctcttcgtcttcagctacaccattgctcctggcgaaaagggtgttctccttagcatcatctccgtttatcttcatgagggaacacaaaatccctcgccattgtaacagctttagagcatttaatgccgtttctgcgtcttcgtcagcgtctacctcagtttgtgtcgattttaaggatctgagaagcaatgatttggtggaattggagtatgcagaacttaacctcaatcataagatatctgaagaagtgggtcatgtaagaatcagacagcatgtgtattcctctcagttcctctttctctaaaccagctccagttcctgtttggaatgaagtttataaggntccatcacttcctctnatggtggatattggaagtggtagtggcagatttntcctatggcaagccaataagaatgttgaatcaagaaattacttggggctggaaatacgtcagaaactggtcaagcgcgccaacttttgggtgaatgagctcggactttcaaacgtacacttcatatttccaaacggcatggtttcttttgaacatcttatatcgggctatcctgggccattggngattgnntcaatcttngtgtcccggttcctcattttcaaggaacggcatcaaaaagaggcgngttgttcaaaaaggcntttngggggatttccattcttcaaaanccttaaancccgggtggggaaaatnttttgtngaaaccggtgtcntngnt

SEQ ID NO: 128631 - DNA, 731 bp, Arabidopsis thaliana
  unsure (1)..(731): unsure at all n locations
nnnnnnnnnnnnnnnnnnnnnnnnnnnnnnnnnnnnnnnnnnnnnnnnnnnnnnnnnnnnnnnnnnnnnnnnnnnnccacgcgtccggatcaaatgagtttgctggtggaagttctgaagttcattatgcattacgtggaatatttgagggattgcttcagcagcttctctctttgaaatggaatgaaccagaacttatgaaagtgcatgtccactatctggatgcaatgggtccctttctcaagtattttccagatgcagttggaagtctcatcaataaattatttgagcttctcacctctcttccacacgttgtgaaggatccagctactagtacatctagagctgcaagattgcagatttgcacatctttcataagaatagccaaagctgcagaaaaaagtgttctgcctcacatgaagggtattgctgatacaatggggtacttggcaaaagaaggaactttactccgtggggagcataacattctgggtgaagcatttcttgttatggcttcctcagcaggagctccacagcagcaagaagttctggcttggttattggaaccattgagtcaacagtggatccaaccagagtggcagaacaattatctatcagacccgatgggtcttgttcgtttatgctccacacatccttcatgtgggccatataccacactgttactttctttgagaaagcactcagcaaagggatacagaaaaagcatttga

SEQ ID NO: 128632 - DNA, 1000 bp, Arabidopsis thaliana
  unsure (1)..(1000): unsure at all n locations
cagctcnnnnnnnnnnnnnnnnnnnnnnnnnnnnnnnnnnnnnnnnnnnnnnnnnnnnnnnnnnnnnnnnnnnccacgcgtccggtaaagatggaacttcaccggttcttaaccaagcacccttggttaacttttctggtcacaaagatgaaggctatgctatagactggagtcctgcaaccgctggaagacttctttccggggactgcaagagtatgattcacctgtgggagccagcttctggttcatgggctgttgatcctattccgttcgctggacacactgcaagtgttgaagatttacaatggagtccagccgaagaaaacgtgtttgcctcatgttctgtggatgggagtgttgcagtctgggatattcgacttgggaagtcccctgcactatctttcaaggcacataacgcagatgtgaatgtcatctcatggaacaggctggctagttgcatgttggcctcaggaagtgatgacgggacattctccatccgtgatcttagactgatcaaaggtggagatgctgtggtagcacattttgagtaccataagcatcctattacgtcaattgaatggagcgctcatgaagcttcgacacttgcagtcacttccggtgataaccagctcacgatatgggatctatccttagagaaggatgaagaagaagaggcagagttcaatgcacagaccaaggaactagtcaacacacctcaagacttgcctcctcagcttctctttgttcaccaaggacaaaaagatctgaaggaacttcactggcacaaccagattccggggatgatcatctcaactgctggtgatggtttcaacatcttaatgccttacaacattcagaacacgcttccgtctgagctaccagcctgaaagacaaggtcttactctgaaaactcttgaggtattactcatggttttgggtgccccccttgcccttttcttgaccttngtggaagttcaggntttccctttncagttaggtc

SEQ ID NO: 128633 - DNA, 530 bp, Arabidopsis thaliana
  unsure (1)..(530): unsure at all n locations
tttcgntcccttccgggtttacccggctcccgatttgggatcttcccttggggaaggttggaggaggaaggggcagggttcaatgcccaggcccaagggacttgtccaccacacctcaagacttgcctcctcagcttctctttgttccaccaaggacaaaaagatctgaaggaacttcactggcacaaccagattccggggatgatcatctcaactgctggtgatggtttcaacatcttaatgccttacaacattcagaacacgcttccgtctgagctaccagcctgaaagacaaggtcttactctgaaaactcttgaagtattactcatagttttgtgttgtcctctctctgttctctttccttgtatcattgatggcaagttgcaagaattatacactctttcacaagtttcaagttttcatcaaaaaaaaaaaaaacacaaagnnnnnnnnnnnnnnnnnnnnnnnnnnnnnnnnnnnnnnnnnnnnnnnnnnnnnnnnnnnnnnnnnnnnnnnnnnnnnnnnnnng

SEQ ID NO: 128634 - DNA, 791 bp, Arabidopsis thaliana
  unsure (1)..(791): unsure at all n locations
cctttgcagtaccggtccggaattcccgggtcgacccacgcgtccgtgcattgttacttatgctttcggaaagatcaagatgaggacgtggaagtcgtgggaggaagagacaaagacaatagagtatcagtattccaacgatcctgagaggttcaggtttgcgagggacacatcttttgggagaagacatctcaatttctggagcaagacgagagtcacactatggattgtttgtttttttagacagttctttggatctgtcaccaaagttgattacttagcactaagacatggtttcatcatggcgcattttgctcccggtaacgaatcaagattcgatttccgcaagtatattcagagatcattagagaaagacttcaaaaccgttgttgaaatcagtccggttatctggtttgtcgctgtgctattcctcttgaccaattcatatggattacgttcttacctctggttaccattcattccactagtcgtaattctaatagttggaacaaagcttgaagtcataataacaaaattgggtctaagaatccaagagaaaggtgatgtggtgagaggcgccccagtggttcagcctggtgatgacctcttctggtttgggaagccacgcttcattcttttccttattcacttgggcctttttacgggtgcatttcaacttgcattctttgcctggaggtcggatgaattcaatccaaaaattttcccctgaagnctncaagtttgggcataggctttnggtgggnttttcagantttnagtttggcttnccc

SEQ ID NO: 128635 - DNA, 843 bp, Arabidopsis thaliana
tctaatacgattcacttagggcaagctggtacgcctgcaggtaccggtccggtaattcccgggtcgacccacgcgtccgcccacgcgttcgcttgagaatggtgaagacggtctactatttgttggcgaatcagtagactctgatattctgcagaaactttttgctgtttcttcagctgctgaaattcctaaccagtttgtgctgcagcagtatgataatcagttatcaaagaaattcaatgatgcggtgaatgaaataaggaggcaaagatgttcttacctaagaataaaattgtgcaagaagggagaaccatcaggaatgttgtttctctcgtatatggtagaggacaggacagcaagcggcccgtcgtatgtggagtttctcgtgcaagtccatcgccaaatccagctaaaaatgaactgatcctctgttttctaggagtccttacagaagtttcctcccatctgcatctgtgtcatgttcggaatttgcggtagaaaagcatagcagaaggggaaagggcgtcggttttatggctgcttgagaagttttcttcttgtttgtaaggcaaacagggcctagactacttcggggtgagaagcttcccgccattttatggttgtgcttgcccccctgtatacaccgaagaatttgtctttttttttttttttgctataaagggttatacaaaagagtccttagctaatcatttttgtatggttatttttttgtgttatttgagtttcgagctaagaatttcctttccgttttcaccaatatcaaaaaaaaaggagttcccacgcatagggcaaccgctctagaggatccaagcttacgtcacg

SEQ ID NO: 128636 - DNA, 336 bp, Arabidopsis thaliana
cccatgcgtccgtgatcaaacgcatacatacataactccgtcatcttcgtctttactccaaaattccagacatttgaagcttttaagcatctgggtatttgatcttctatccacagatcatagaaacccaagaggcaaaatgtctatttccctaaaaatttcccacatttcaagtttctccaacgatgggttcaatagtgtaaagcaatgcagagtgagtcaaaggtttgaaattagatcggtttgtttccgtagaagccctggtgttgaatctagacggatccatttaaattcggacttgtcttctcggaatttgagaaaccgatgtgtaggatc

SEQ ID NO: 128637 - DNA, 977 bp, Arabidopsis thaliana
  unsure (1)..(977): unsure at all n locations
nnnnnnnnnnnnnnnnnnnnnnnnnnnnnnnnnnnnnnnnncgcctgcaggtaccggtccggaattcccgggttgacccacgcgtccgcccacgcgtccgtgaaaatattccagagttcattgagggtgtgaagaacaggaagaggaagatgtctggttttggacaccgtgtgtacaaaaactatgaccctcgagctaaagtcatcaagaacctggctgatgaagtattttccattgttggaaaggatcctctaattgaggttgctgttgcacttgagaaggcagctctctctgacgattactttgttaagagaaagctgtatccaaatgttgacttctactctggattaatatacagggcaatgggatttccaccggagttcttcacggtcttattcgcgattcctcgcatggctggatacttgtcacattggaaagagtcactggatgatcctgacaccaagatcatgagaccacaacaggtgtacacaggcgtgtggctgaggcattacacaccagtgagagagagaatagtgacggatgactcgaaagagtcagacaaattgggtcaagtcgcgacttcaaatgcatcaagaagacgtttggctggatcttcagtttagacgtaggcccttttagggtccatactatacatcaaaccacaccgcaaagaataaaagagattggtttctctagcctaaagctaagatacttgatcatactcgaaacttagatttctcattttgtaggcacaatatagacttgatctatatttgcttcaatccatcttctaagggtgtttgtccgccttgtttgtcttcttatcagaacgtgtttattgtataaaatgatttatggttatggattaaaaaaaaaaaaaaaaaaaagaaaaaaaaaaaaaaagnnnnnnnnnnnnnnnnnnnnnnnnnnnnnnnnnnnnnnnnnnnnnnnnnnnnnnnnnnnnnnnnnnnnnnnnn

SEQ ID NO: 128638 - DNA, 650 bp, Arabidopsis thaliana
  unsure (1)..(650): unsure at all n locations
nnnnnnnnnnnnnnnnnnnnnnnnnnnnnnnnnnnnnnnnnnnnnnnnnnnnnnnnnnnnnnnccacgcgtccgcccacgcgtccgtacggctgcgagaagacagaagggtacggctgcgagaagacgacagaagggtacggctgcgagaagacgacagaaggatacggctgcgagaagacgacagaaggggacaacgaaggcatcttcttcatcaattgatctactctgctctgctcaagatcagaaatcgtcggtttagttctccggttaaaagtttcgtctctgcgggaattggaacttcaatggagggattaaagctctcagaagcggaattgatgatttttattcatccttcccagagcagaaacgtttttcaaggaatttgtcgcgagctcagttctcttctattccagtataatgaaacctttgatggagttctattggcttatgatgctactgtgaaaagcaaacaagctaaaatccttacaggacttcatccttactttggcgtcagagttaacactagactactcttatttgatcctaagcccaagagttttgtagaagggaaaattgtgaagatttctccagagtcaatccatgttattggtcttggtttctctgctgctgtcattacagacgttgatt

SEQ ID NO: 128639 - DNA, 541 bp, Arabidopsis thaliana
  unsure (1)..(541): unsure at all n locations
cnnnnnnnnnnnnnnnnnnnnnnnnnnnnnnnnnnnnnnnnnnnnnnnnnnnnnnnnnnnnnnnnnggtcgaccacaggtccggttccctcttcgaccaccaccgtcaaatccggcgacccatcaaccttcagatgactaaaggtggacttggaatagccgcgatgtcatacgtggtaatcgattacatgcgttacgtgtcaccggtgtggcattctcgtcttatgccagttctttggtctgttcttgctatcgccgtcgtcactcgtgttctgttctataaacactggtctaaagagctacgagcagctattcctttccttggttctatcgtattccttctctgtgctcttctctttgaagctctttgtgttcgctctgttactgctgttcttggcttagattggcaccgggaaacacctccacttcctgatacaggccaatggttcttacttgcactaaacgagagccttcccgggacacttgtggaaatcctaagagcacatatcattggattgcatcattttcttatgttggttata

SEQ ID NO: 128640 - DNA, 427 bp, Arabidopsis thaliana
ttttcgtccgcacgattcggtggggcccatcacgacgaggagaaaagggggtaagatactgggtaacatgggtctccgtggcttggttatctccacggaaagacaaaaagaatcaaaaaccccagaaaccgaagaggaaatggtcgtttgggaaacaaaagactagagaatcttttgatttccctctggaggagactccaccggttgacccttcaccttcttctggtcatcgtccatatccaccgcctcccccgttgccggattttgctcctcagccgttgttaccaccaccgtctccacctcctcctcctccggcatataccatcaatacaagaatctatggtgagtctaaagaatcaaagaatagacaagctttagctcttgcatcggctgttgcagccgaagcagctgtggtagctgcacatgc

SEQ ID NO: 128641 - DNA, 428 bp, Arabidopsis thaliana
tctctctctctctatctctatctctcgatttgggggagttccgtcacggtggactagtacgtctcgttgccgttggtggcgtagtcggaattaatttcctcggcgttgagattcacatggtctagagttctagctaagtggttgttgttgttgttacgatttccgatttctcgagtttttctttttatatttagcttctgtttcgtttatccctcccggagacactccttggtcgaatctctcatgctgaggtgttttggacacttgttgtcaagaagaaaccagttttggttctgattaaatcgtttggttggaaaatatactcaattcccaggccatgccttcacttcaactattgcagttaactgagcggggtcggggtcttgtagcgtcaagacggaaatctatactgcttgcggctgggattg

SEQ ID NO: 128642 - DNA, 755 bp, Arabidopsis thaliana
  unsure (1)..(755): unsure at all n locations
acgggactctaatcgacttatatagggaaagctggtacgcctgcaggtaccggtccggaattcccgggtcgacccacgcgtgcgcccacgcgtgcgcccacgcgtgcgcttgttgaggcacctttgataccaactgataaaaagtatcagggaaccaacagtacctttgttttcacaaataaatcaggacaacccacaatataccgtcccacaggcgcaaatcggttctacactttatgctccaaggaattcctagctctgggcggtggtggacggtttgctctctatctagacagtgagctgctaagcggatcgagcgcttactcagagacgtatgggaactcttgtctcgcagactctcaggactttgatgttaaggaagtggagctatggggatttgtgtatggctcaaagtatgatgagattctagctcacagcaaaacaatggagcctggtctttgcagatggtcatgatcattataaagaaaacccaaatgaattcaactgagattcgtctttttgttgttgttgttgttgttgttgtataaatctgtagtaaaagaaatcttgttgtcttgtaacttggctaaaatcacatatatgttactctctctcacttgtaatgatgattttgaaataacaaaaaaaaaaaaaaaaacaggctcaaaaaaaaaaaaaaaaaaagnnnnnnnnnnnnnnnnnnnnnnnnnnnnnnnnnnnnnnnnnnnnnnnnnnnnnnnnnnnnnnnnntcccc

SEQ ID NO: 128643 - DNA, 516 bp, Arabidopsis thaliana
actcacttagggaaagctcgtacgcctgcaggtaccggtccggaattcccgggtcgacccacgcgtccgtttacctagcaggccaggttcctagtgtgccaactactgctactattccagggatgttctcaaacatgtttccaatggtccctggtcagcaactaggtgcgcttcctggactgccagttcaggcaatgactcaacaggtacgatctatcaatctatcttattcttaggttcttcaccttttgtcacgattcccttcctaaaatatgtagtcgcaggcaactaggcatgctcggcgaagtctatgttggtggccttccaccaactgctaatgaacaggtttgttacttttgttttggttaaggttttgtgactttttgtttattattggctatttaaaccacatttcaatatccattgtatgcctactgagaatgggttttcatgtcctagtcggtgtcaacgttctttagcccagtgatgtcggccattgggggaaacactgctggg

SEQ ID NO: 128644 - DNA, 465 bp, Arabidopsis thaliana
  unsure (1)..(465): unsure at all n locations
tgcaggtaccgggccggaattccctggtttacccacgggggcggggcgattgaggctaaaaattcgatacctcatgagaaaaccaagttccctgaggtgtacgtgaaagcaatgctcggaaaccagactctgtgaacacgtatttctcagaccgggaacattgaatccgatgtggaaggaagaaccgatgctcgttgggcgtgggccnnanaggagctcgattctcaaagaggaaacagggccacccataaagataaacttttggcgggtgcatcccgtgcaaacgccaaggagggtgacctaggccgttaactcgagggggcaacctggaaaaactttttggggggggggagcaaaagagataatttccaagcgaatcctctaggatctttttggaggggggccctgtcttgataataacccattcagcgggacctaggccaccccaaacggtttggacccggt

SEQ ID NO: 128645 - DNA, 965 bp, Arabidopsis thaliana
  unsure (1)..(965): unsure at all n locations
acgcctgcaggtaccggtccggaattcccgggtctacccacgcgtcggagattacggcgatagtgtttgatcagtcatctatggaagcggtagaaaaacccgaagaaacaatcccagggaattcttcaagattagctggaaatcccaactggggaacagcaacttgttgttggagtatttgcaggattgctatatggagggagcaaagaagcttctgcttctgtgagcaaagatgcagaagtgatgttgaagatgggtagtacacaggataagcgtgaacaacacaggttgatgcgagatgcaatggagaaaaggttcatccgagtaactcgtggctccctcattggagggatgcgtcttggaatgttcactgcttccttctttagtctacaaaactttttagctgagacccgaggagtgcatgatgttttcaatgtggttggagctggttcagctactgctgccagtttttggcctaatcatgccggggtctcttgcttggcgtgcgcggaatgtgttgcttggttcagttcttggacccacagtgtgcttccctcttgggtgggcccaactgaagctcatgaagaaagcaaacgaaggcaataacgttgattcgaccggccacccacggtgaggtcacgagtggtgttggtgcagcccttgagaggctcgagctacaccccccaaaatagggaagggtccgcgcacagttttgtatgctaaattcgcttctctgaagcaaatgagaataagataccaaacagaaccagtgtgttcttgtgtaattgcaacaattttcgaatcacgcaaaaatatcaaaccattgatggttaaaaaaaaaacaaaagggcgaacgagctaaaggatcccagcttacgtacgcggcgggtctcncnctaaaacttcgagggcggtnacaaaaaagcccctcccccccaccctcctttatggccacgctttggtta

SEQ ID NO: 128646 - DNA, 584 bp, Arabidopsis thaliana
tcgaatcctcctcactgtctctctatactccactcttcatcaagcgttgggtcatcgccgtcttgttccctttccttccctctctagcgtaaggcgggtacgatgggcttttctgatgaagaggctgagatcagcgagtcagagattgaggactattctgaaacaccctaccgccttttacgcggcgggacttactacaaggtgaaggtgaatggacagctcagatgcccgttttgtgcaggcaagaagaagcaagattacaagtacaaggagttgtatgcacatgctactggggtttccaaaggttctgccaccagaagtgctttacagaaggctaatcatcttgctttagctatgtttttagagaatgagcttgctggttatgcagaacctgttccacgccctccagttgttcctcctcagttagacgagactgaaccaaaccctcataacgtctatgtctggccatggatggggattgttgttaaccctttgaaagaagcggatgacaaggaacttctacttgattcagcatattggctgcagaccctttccaaattcaagcctattgaggtgaatgcctt

SEQ ID NO: 128647 - DNA, 503 bp, Arabidopsis thaliana
aagaacgtacgcctgcaggtaccggtccggaattcccgggttgacccacgcgtccgcggacgcgtgggatatcttctccgtcgccgccgcctcttttattcacaatgtcgtgcttcaaatccaaattcgccgatgagctcatcgccaatgccgcttacataggaacaccagggaaaggtattctcgctgctgatgaatcctctggaacaagcggaaaacgtttcgtaagcattaacgttgagaacgttgaatcaaacagacgtgctcttcgtgagctcttgttcaccactcctggagctctccaatacatcagtggtatcattctcttcgaagaaacactctaccagaaaactgcttcagggaaactatttgtggatgtaatgaaggaagctggagtgcttccaggtattaaagtcgataaaggaaccgttgagctcgctgggacaaatggggaaaccacaaccactggtctcgacggacttggtgaccgttgcaagaagtac

SEQ ID NO: 128648 - DNA, 468 bp, Arabidopsis thaliana
  unsure (1)..(468): unsure at all n locations
ccggnccggaattccctggttcgacccacgcggtcagacgtgaaggcttgaattgcttagttccacctcctaaaggttaccgtcagccgattccatggcctaaaagccgtgacgaggtatggtttagcaatgttcctcatactcggcttgttgaagacaaaggaggtcagaactggatttcacgagacaggagcggggtcaagtttcctggagggggtacacagtttattcacggggctgatcagtacttggaccacatgtctaagatggtttctgatattacgtttggcaagcatattagggttgctatggatgttgggttggggggtggccagttttggggctctatctattgtctcgggatgtcatgacaatgtgctgtggccccaaaagatgtccatgagaacccaattcacatttgctcttgagcgggggggggcctgctattggcggcaacatttgcgacag

SEQ ID NO: 128649 - DNA, 652 bp, Arabidopsis thaliana
  unsure (1)..(652): unsure at all n locations
ctccgccttgtgcaactctctctgcttcgatccaaaagggacgatggaagacgctcgccgccggattctccgttactcctcttcccgccgttaacttcagtctccggcgatcgattcctcggattcttgcttccgctagttcctcctcctctcctgcgtcttcgtctctcgaagctggtgagaacaatgagctaaatgctgtttcagcttttagtgagattgttcctgatactgtcgttttcgatgactttgagaggtttccgccgactgcagctactgttagctctgctcttcttctgggtatctgtggtctacctgataccattttccgcaatgctgtggacatggctttggcggattcttcttgtgcagggcttgaaaccacagaatctcgactctcttgctttttcaataaggctattgtcaacgtaggtggcgatcttgtcaaactcgttccaggtcgagtttctactgaagtggatgcacgtcttgcttatgacacaaatggcattatccgcaaggttcatgatctgctgagactatacaatgaaatcgatgtaccacacgaccggctcctattcaaaatccctgcaacttggcaaggtattgaagtcaagttgttggaaangggntccaacgatatnccttnttt

SEQ ID NO: 128650 - DNA, 413 bp, Arabidopsis thaliana
acattctgtttttaattcccctaaaaacccattttaaaatattttatctctcttctcttaaaaaaaactcttccctgtttttgtttgtgtgttactaaatggaatcgtcgtcgtcgggaacaacttcgtcgacgattcaaacgtcgtcaggatcggaggagagtctcatggagcagaggaaacgtaaacggatgctctcaaaccgtgaatctgcaaggagatcaagaatgaagaaacaaaagctcctagacgatctaacggctcaggttaatcatctgaaaaaagagaacacggaggtcgtgacaagtgtcagcatcacaacgctacactacctaaccgttgaagcagagaactctgttctcagagctcagcttgatgaacttaaccacaggctccaatctctcaacgacatc

SEQ ID NO: 128651 - DNA, 508 bp, Arabidopsis thaliana
gctactacgcctgcaggtaccggtccggaattaccgggtctacccacgcgtgcgcccacgcgtccgcggacgcgtgggctctttaagtatgcaggattggacaccgagaatcttcagaactttgagtgttgtctctttgtacctttcccgtatttttcatacatgcttgcagaaggtggtggtctctcccgcattgtttctatactctgcacaggaattgtcctcgccgagttcattgtagcttttacatcttagttgatggtaatatcttggaaagacatatctaaggctgcctaatataagtgctacctgtagggtatggaagcgctacactttcctcaaatctctcacaaagcttcacagagttttcggatcttctttttttcacttggtatcttcgcttgccgaaagctttcacgttcatttacatgggatttgatattgccatgggccagcatagctggtcccacggtggggtttatccctttctctattggaccccattact

SEQ ID NO: 128652 - DNA, 543 bp, Arabidopsis thaliana
  unsure (1)..(543): unsure at all n locations
nnnnnnnnnnnnnnnnnnnnnnnnnnnnnnnnnnnnnnnnnnnnnnnnnnnnnnnnnnnnnnnnccacgcgtccgggcggcgataaaaaatgcctcgagtcatccctccggagaatctcggttgcccaccattccgtgctttaacttttgactctctcggcttaataaaagtgactgaagctcgtggtcaagagagagggattccgactgtagtgaacacatggggagagatgaatgcatctagaagtgttcttgctgcttccattgatgaccggttaaggaatccgcttttggctgttgcaagaaaagatggcaatgttgaggttattaacccttgtaatggtgatcttcacttctcatactctgtatttggtgatgatggttgttcccctgaggataacgaaatttctgccctgcacttattcaggaaaaagatagatgatcagacagaaagatcttgcacattgcttacatgtacgaaaaagggagatgtgagtctcagatcagttaaatntccagatgcacatggtaattccacggatg

SEQ ID NO: 128653 - DNA, 424 bp, Arabidopsis thaliana
acgagagagacagagcaagtacagatttcaactagctcaagatgatcatccctgttcgttgctttacttgtggaaaggtgattggaaacaaatgggatcagtatcttgatcgtctccagctcgactacactgaaggggacgcacttgatgcactccagctagtcagatactgctgcaggcgtatgctaatgactcatgttgatctgattgagaagcttctcaactacaacactctggagaaatcagacaacagttagaagaggatgcaaatctgctgaaaaagttttcctctttagaggcttaaatattagtatgtatgaaaacatttggtgtatgtggtgtagacccttcaactccatctaaaattatatatgtgtgtcagttactttctcgtgtgattcaatctcatgatttcctgaccttg

SEQ ID NO: 128654 - DNA, 579 bp, Arabidopsis thaliana
  unsure (1)..(579): unsure at all n locations
gcannnnnnnnnnnnnnnnnnnnnnnnnnnnnnnnnnnnnnnnnnnnnnnnnnnnnnnnnnnnnnnnnnnccacgcgtccgcccacgcgtccgtcccgtcttcgatcttctcttctctctctcttcatcgcacgctgtgcccagccagctcaaaacactgcacttccgctttttatcaagatcaatctctaccaatacttagaaaagttctttcctttttgtcaaattctttcaatttctctcttcaattccctacgaattactcacttcggatccaatcagctctttatagcctctgcgtttgggagtcaatctttctctcttcgacaattaagggtttcgtataaagattgctgttttacgacaggattctgaataaggagaagaagggttggtttcatttggatggaaagtatatggtaggtctacacattaatatggaagcgcagattcatatacttgagcaggaagcttattctgctgtattaagagcttttcaagcacaggctgatgaattttcttgggataaagcaaccgtgatgacaaacctacgtaaagaattgaggatatctgatgatg

SEQ ID NO: 128655 - DNA, 531 bp, Arabidopsis thaliana
  unsure (1)..(531): unsure at all n locations
atgaactccaggtccnnnnnnnnnnnnnnnnnnnnnnnnnnnnnnnnnnnnnnnnnnnnnnnnnnnnnnnnnnnnnnnnccacgcgtgcgcggacgcgtgggttttgcctttaacacttcagtctacatcgatccctgagtccgccggccggtacggggacattgccgggaatgagtcacaggtgacgagagggttatcggaaggagggcgaaaccattctacccgaggaatctactacggctgcggtggtggcttgtttttgagggatccgccgggttaatgaatggtttcacgacgttgacaaacaccaagaaacacgcctatggtcaagccttcaatgacgagccattccctttcaagaattcggtcaacggtaacatgacttcgttttcatttaccttcttctttgctatcgtccctgagcatatagacaaaggttctcacggtatagcctttgtgatctctcccacgagaggcattcctggtgcatccgctgatcagtaccttggtatcttcaacgatacaaatga

SEQ ID NO: 128656 - DNA, 838 bp, Arabidopsis thaliana
cggacgcgtgggtttgagcgcatcgcaaactcgaaggcgcgactgtgagagagaagaatggcgtcgtcatcatcgagaggagagatggagaagatgggaatcgatcagctaggagcgttgaaggagcaagcagatctggaagtgaatcttcttcaagatagtctcaacaacatccgtacagctaccgttcgtctcgatgccgccgccgcagctctcaacgatctctctcttcgacctcaaggtaagaagatgcttgtaccactgactgcttctctatacgtgcctgggacacttgatgaagctgataaggttttagttgatattggcactggttacttcattgagaaaacaatggatgatggaaaagattattgtcagaggaagatcaacttgctcaaatccaactttgatcagactttttgaggtcccagcgaaaaagaaaagcgtggcagatgaagctggaatggtcttgcaggccaaagttaaacagttaacagctgcacccccgtcgtgaaaattatcccttctctagggctttttgctattgagactattttgagattgcaaatgattttgtctgctcagttatgttttgactcttttgatctcaatcggcttgtgtttagtgtgctcccccaaaatgagcggtcctttttagtaatcagtagtgactatgagaaagaaaagacgtgttaactagttatttctcataaaacgtgagaaaagagccaaaagcgatgatgtttttggaggcccaaaaaaaaaaaaaaaaaaaaaaaaaaaaaaccaaaaacccaaagggcggccgctctagaggatccaagcttacgtacgcgtg

SEQ ID NO: 128657 - DNA, 335 bp, Arabidopsis thaliana
aatagttctagatcgcgattagggttttgagcaaaaaggagtgatgagagctaagtggaagaagaagcgtatgaggagattgaagaggaagagacgaaagatgagacagcgatctaagtagaccaaatctactccacaagtctttcgcttttcccctctgcattttgtgtttcatttgcttcagtttgttcccagaatttgtcttagtttccagatattgctgttgttggattaatggattttcagtttgatcttcctttgtctattaagttacgatttaatatttgtctctaagcttatattatctcatcgtagctactagttgatcttaacgc

SEQ ID NO: 128658 - DNA, 672 bp, Arabidopsis thaliana
  unsure (1)..(672): unsure at all n locations
nnnnnnnnnnnnnnnnnnnnnnnnnnnnnnnnnnnnnnnnnnnnnnnnnnnnnnnnnnnnnnnnnnnnnnnccacgcgtccggaaagcagactctcagattcttttcaagctgggggtaattactcacagtgtcgatctgctgcactaacaatcttgcaagatggaaatgagaaatgctcgtatcagcattgttctattggatcaactttcacgcctaagcttcgaggaagatttttagcgacagaaaacttcttttacacctctaagttctttgggttgggagaaaaagcgtggctatctaatatgatttcagccggagagagattctgtggagaagattggtcaaagttgagagtaaaagacccatcactccatgaagaggatcttcttcggtattgtttctcatctgcatatattgtgtcattgcttcacgatacccttggcattcctcttgatgatgaaagaatcggatatgcgaatcaagcaggagacataccgctcgattgggctttaggtgcattcattcaacagactgcaacagagacctctcaacatgcagcctctggtaatctccattggttccatgctcttttcagtaatcacccgaagacgcttcactatctcatcgggataccgatccttatgacagttttggtatatttggtaactaa

SEQ ID NO: 128659 - DNA, 625 bp, Arabidopsis thaliana
  unsure (1)..(625): unsure at all n locations
aaaaaagaaaatcaaagaagatagttttgggattgttttctataaaaagtgcagatattttctttgtcctagagaaagaggtgataggaaaaatgggtctccaagagcttgacccgttagcccaattgagcttaccgccgggttttcggttttatccgactgacgaagagctgatggttgaatatctctgtagaaaagccgccggtcacgacttctctctccagctcatagctgaaatcgatctctacaagtttgatccatgggttttaccaagtaaggcgttattcggtgaaaaagaatggtattttttcagcccgagggataggaagtatccaaacgggtcaagacctaatcgggttgccgggtcgggttattggaaagccaccggtacggataaagttatctcgacggagggaagaagagttggtatcaagaaagctttngtgttttacattgganaagctccaaaaggaccaaaaccaattggattatncatgagtaccgtctcatcgaaccctntcggncgaaatgggagcaccaagcttnatgattgggttttaatntcggattttcaaaaagnaaacaagcggacaaaaacaaagctttccaantaatctaaatgccg

SEQ ID NO: 128660 - DNA, 552 bp, Arabidopsis thaliana
  unsure (1)..(552): unsure at all n locations
nnnnnnnnnnnnnnnnnnnnnnnnnnnnnnnnnnnnnnnnnnnnnnnnnnnnnnnnnnnnnnnnnnnnnnccacgcgtccgcggacgcgtgggctcttcttcctcgatcccacccagcttctacttcgttttccaattctgggtttcgattcttccaatctaaccatctcttctcttcacagtctggttcactcatggaagtgtttaaagcagctttttcagaagcgtctaattcttgtgataggattgcgattaaagccgatggaaagagttactcttatggccagctaacatcgtctgctttgaggatatctaaattgttctttaaagatgatacgacaaatggaggtcaagaaactaagaagtatgaagggtttggtagtctaaaaggagctagaatcggaattgtggcaaaaccttcacctgagtttgttgcaggagtcctggggacattgtttagcggtggtgtagccgttccccttgcactcagctatcctgaggcctgactctnacatgtcatgaatgattccgatatatctctgtatttgagcc

SEQ ID NO: 128661 - DNA, 511 bp, Arabidopsis thaliana
agctgcacgcctgcagtaccggtccggaatcccgggtctaccacgcgtgcgccacgcgtccgcccacgcgtccgcggacgcgtgggcaagaattggctgatgaaattgagagtgagtgcgctgaaaagtcgtgggaaggaatcttgaggaggatatggcctaaggctaaatatgttgaggtgattgtgactggttcgatggctcaatacattccgacactagagttttatagcggaggtttaccgttggtttcaacgatgtatgcttcctctgagtgttactttggtatcaaccttaatccgttgtgtgatcctgccgatgtttcctacacgctttttcctaacatggcttacttcgagttcttgcccgtcgacgacaaatcccacgaagagattcactttgcaactcactccaccaccgatgatgatgatgatgctctcagggagatctcatcgtcaatcttgttaatgtcgaagtcgggccattctacgaaatcgtcatcactacattc

SEQ ID NO: 128662 - DNA, 510 bp, Arabidopsis thaliana
  unsure (1)..(510): unsure at all n locations
aacgactcacttagagaaagcacgnacgcctgcaggtaccggtccggaattcccggttcgacccacgcgtacggccgagaggcttaccagccacagccggttcatccacattatgagcttgtgaatcagtacaagtctgcactggctgagctcactttcaactcgaagccgataataacgaaccttacaataattgcggggagagaatgttcatgctgcctaatgccggcggagaccgccatttgcaacaacatcctcgaggtaccaactgatcagaagctgccaacactgtacctgttagacagcattgggaagaacatcggaagggattacattaagtactttggtgccaggctgcctgaggtttttgttaaggcttacaggcaagttgaccctcccatgcattctaacatgcggcgatctttttggaacctggaaagggagtctttcatccgcaaacacttcaaggttattgaagaaaaaacttgggtttaatggctaaaagaggaa

SEQ ID NO: 128663 - DNA, 730 bp, Arabidopsis thaliana
  unsure (1)..(730): unsure at all n locations
cggacgcgtgggctcgaaacacaggttaatgatctaaaaggtgagcattcatcacttcttaaacaactgagcaacatgaatcacaagtatgacgaggctgctgttggcaatagaatactaaaggctgacattgagacattaagagctaaggtgaaaatggcggaagaaaccgtgaagagagtaacaggaatgaatccgatgcttctcggaagatcaagtggacataacaacaacaacagaatgccaataactggtaacaacaggatggattcttctagcattattccagcttatcaaccacactcaaacctaaaccatatgtcaaaccaaaacatcgggatcccaaccattctacctccaagactcggaaacaatttcgctgctcctccatcccaaaccagctctcccttgcagagaattagaaatgggcaaaatcaccatgttactccaagcgccaacccgtatggctggaataccgaacctcagaacgattcagcatggccgaaaaaatgcgtggactgatcaaacaagaagcgggtttcgcactatattaatgtctatgcatctgtaatttgtaagtgttattaagttacgaatcatgagaaaacatcttgtgaaaatacagtctcatggcttatatatatatataagctctgtcttataacattacaagattcttatttaagatccgcataaaatatttatagctaatnnnnnnnnnnnnnnnnnn

SEQ ID NO: 128664 - DNA, 556 bp, Arabidopsis thaliana
  unsure (1)..(556): unsure at all n locations
tgatactccnnnnnnnnnnnnnnnnnnnnnnnnnnnnnnnnnnnnnnnnnnnnnnnnnnnnnnnnnnnnnnnnnnnngacccacgcgtgcgagcacatgcacactaattctactcgccaaataaagtgaaaagagatggctgatggaggaaaggtggtctgcgtaaccggagcttccggttacatagcgtcttggatcgtcaagcttttgctcttccgtggctacaccatcaatgccaccgttcgagacccaaaagatcgaaagaaaacagatcaccttctagcacttgacggcgcaaaagaaagactcaaattattcaaagcagatcttctagatgaaggttcttttgagctcgcaattgatggatgcgagactgtcttccacactgcttcaccggttgcaatcactgtcaagactgatcctcaggttgagctgatcaatccagccgtcaatggtactattaacgtcctaagaacttgcactaaagtgtcttctgtcaagagggtcatcttaacatcgtccatggccgcagttcttgcgcctgagaccaagttgg

SEQ ID NO: 128665 - DNA, 404 bp, Arabidopsis thaliana
cgactcttcagttccttatttaatcatctcatcttctggaaattcgaggtttttatagggttgtggtcttagcaatggaaggaatgttgtcgtccggtgaccaacagagattagtctcttctttccttgaaatcgccgtcggacagaccgccgaaactgctcgacagttcttacaggcgacaagctggaaacttgaggaagctattcagctcttttacattggaaatgaaggtggtatgcttcagtctggtacacacactcagccagcgtccaacgatgatgcggctgcacagtcttggggggcggctacaggcacaggtaatgaaatgatactgcccaacgatgtcgatgaagtccgtgctcctttacctgttgtgagggagactctttatggtgaatcaatg

SEQ ID NO: 128666 - DNA, 601 bp, Arabidopsis thaliana
gccggcactatacgactcttatagggaaagctggtacgcctgcaggtaccggtccggaattcccgggtcgacccacgcgtgcgcccacgcgtccgtaccaaactagaatctttgacaaaaaacgaacctttaaaactcagattttatctctcttcagtctccacgctgcttgaaactgaagcagagaagcaaagagatgtcttttgaggagtttacgccgttaaacgagaagtctcttgtagactacatcaagtcaacacctgctctctcttccaagatcggagccgacaagtccgatgatgatttggttatcaaagaagttggagatggcaatctcaatttcgttttcatcgttgttggatcctctggttctcttgtcatcaaacaggctcttccatatattcgctgtatcggtgaatcatggccaatgacgaaagaaagagcttattttgaagcaacaactttgagaaagcatggaaatttatcacctgatcatgttcctgaagtctaccattttgacagaacaatggcgttgattggaatgagataccttgagcctcctcatatcattctccgcaaaggactcattgctgggattgag

SEQ ID NO: 128667 - DNA, 566 bp, Arabidopsis thaliana
  unsure (1)..(566): unsure at all n locations
gtaanttgcccnnccccnaaaggcntaggnngnccncattaccngcctttgcccttcaaaatggggcagtggatcggagccaaaggggggcggctaatgggaatagctatgactgcgatgtctctatttaagacagttggaccagctggtgctggcatcttattttcttggagtgagaggcgactaaacgctgcatttctaccaggatcgcatatggtattcttcgtcttgaatgtgatagtagtggtcggagtagctctgacattcaagccatttctaccgacgggtcgaagatgaaattcatttgaattggtaagatagggaatgtatggacaagtcgattcttttcatttcagataccccagaaaccggtaataaaatttcgctaaccttaggatttcagctccttctattacttgtccttttgttttgctttgtctgattattatacaccaaaaccgctttcataatcgtggatcccatccaaaagtgatgtattaatcggttaacaaatcgtatggtcagtcaatacggcagtaaggaaattagaagatgagattgagagg

SEQ ID NO: 128668 - DNA, 541 bp, Arabidopsis thaliana
actcaccttagggaaagctcgtacgcctgcaggtaccggtccggaattcccgggtcgacccacgcgtccgcttcaaaatagagcagtgggtcagagccaaagaggggcggctaatggaatagctatgcctgcgatgtctctttttaacacagttggaccagctggtgctggcatcttattttcttggagtgagaggcgactaaccgctgcttttctaccaggatcgcatatggtattcttcgtcttgaatgtgatagtagtggtcggaggagctctgacattcaagccatttctagcgacgtagtcgaagatgaaattcatttgtattggtcacccccggaatgtatggaacacgttgtttcttttcatttcagatacgaaagaaaccggtaataaaatttcactaaccttaggatttcagctccttctattacttgtccttttgttttgctttgtctgattattatacaccaaaaccgctttcataaaaaaaaaaccagggcgcccgcgctctagaggatccaagcttacgtacgcgtgc

SEQ ID NO: 128669 - DNA, 885 bp, Arabidopsis thaliana
gatcgttgatctctaaatctccttacgatctctcctctcacgagtctccaagtcgtccaagctcataaagattcatcgagaagaaagataaaatcctaagtctggtgcaagtctcgagtagaataacatcatttctaggacatggcaaactcattacggctgtatctagcatgcataaaaaatacactcgaggctgccatgtgcttacagaattttccttgtcaagaagttgaaaggcataataaaccagaggttgaattaaagacgagcccagaacttttgctaaatcctgttttaatatgccgaaatgaggctgaaaagtgtttaatagaaacatctattaattcactccgggttaagcctcaaggtcaagcaagcggatgaacttgaaaacatactaaccaaaaaatttctcagattcttgtccatgagggcagaagcttttcaagtactgaggaggaagccagtccagggctatgacataagctttcttataccaaactacccctgcgaagagatgcagaaacagaagctaattgatttcattattcagtttatggaggatatagagaaacaaataagggacttgaaggagtcagtgaattcaagaggaagactcgttgctacggagttcttgaaacagttcatgtaaagcagctcttgaagtagtataaccccccccttccttgtacccctccctcgttatttggttaaaatccatctactcttcattttgctactttctctgttattctaacccaaccaaagtaccgagccatcggcttggtaattgtagtgtatgtaatgcgatacttaaaaaaaaaaaaaaaaccaaaccccaaagggcggcagctctagaggatccaagcttacgtacgcgtgcag

SEQ ID NO: 128670 - DNA, 744 bp, Arabidopsis thaliana
  unsure (1)..(744): unsure at all n locations
aacgactcactgagagagaagaacgtacgcctgcaggtaccggtccggaattcccggttcgacccacgcgtccagcacatctaatcttaatgctcttcagtctggttgttgtaagccgtccaatgactgtaacttcacctatgtgaacccgactacttggacaaagactcctggtccatacaaaaacgaggactgtaatgtgtgggacaacaaaccaggaactctctgctacgactgtgaagcctgcaaggctggtctgcttgacaacatcaagaactcatggaaaaaggtggctaaggtcaacattgtcttcctcatattcctcattatcgtctactctgttggttgttgtgcgttcaggaacaacaggaaacgcagttggtaatagattctaatgcgttgaaaccaagactaaggccagagaagatatctgaagtgtcatcatcttactgtcaagtaagttaaagcagcatttaagacaactcgttgatcgcttgtcttgtgtgtgggggattgcaatttcaatgtattttctctcttaaatttgcaacataatgagttacaaaagcacttgcttgtgcttctatttcgactcttttgtgtgttgagtagcttatacatctgttgagacgagtgagatttgtaaaagaagttccctttccaaaaaaaaaaaaaaaaaaaggatcacacccnaagggcgaccgctctagaggatccaagcttacgtacgcgtgcgtgcgacgt

SEQ ID NO: 128671 - DNA, 420 bp, Arabidopsis thaliana
cccactcgccggattttcgatcttatccttatcttcttccttgttctatttctcttctaactaatctcttctcttctcttaaaatcaaacgtaatcataaataaagatcttcttgttgaatttctcttgatcctcgcaaaatcacagattcttgaaattcttttttcttgtcttgaaattcttgagttcttgagttatgaaaagacaatggacagagttatgaaatgataaatctcaaccaattccttgtttatcattctatatcagttgtgattcttcattggttttacgttatctcttgaacaaaaaaacatggcaaacgcagagaagacaagttcaggttccgacatagatgagaagaaaagaaaacgcaagttgtcaaaccgcgaatctgcaaggaggtcgcgtttgaagaaacag

SEQ ID NO: 128672 - DNA, 821 bp, Arabidopsis thaliana
  unsure (1)..(821): unsure at all n locations
nnnnnnnnnnnnnnnnnnnnnnnnnnnnnnnnnnnnnnnnnnnnnnnnnnnnnnnnnnnnnnnnnnnnnccacgcgtccggtttcgtgcatagattaggaatctcgaaaccctaattctgttttctacacgaaacccatcaaaatcgaattttgatcgtttctaatttctgccatttgattctcttcatcagtcacatttaggggaaacgagaagccctaatctttgattctttaatcgccatggctaatagctctttcaagttggaacacccactagagaggagacaaattgaatcttctcgcatcagggagaagtatccagacagaattccagtgatcgtagagagagctgaaagaagtgatgttcccaatatcgacaagaagaagtaccttgttccagctgatctaactgttgggcaatttgtgtatgttgtccgtaaaagaatcaagctgagtgccgaaaaggctatcttcgtctttgtgaagaacacattgcctccaactgctgcaatgatgtctgcaatctatgatgagaacaaagacgaagatgggtttctctacatgacttacagtggagagaacacctttggtttggtttaaatgtgtgccttccaatgcttttgtgctgatgtgtatattatatgctcttttataacactatgaatatgcaaaagttatttctactactattaatgtaaatgttgctttgaatttaagttgttagtttgggttttaaaaaaaaaaaaaaagnnnnnnnnnnnnnnnnnnnnnnnnnnnnnnnnnnnnnnnnnnnnnnnnnnnnnnnnnnnnnnnnnnnngc

SEQ ID NO: 128673 - DNA, 551 bp, Arabidopsis thaliana
  unsure (1)..(551): unsure at all n locations
ttttaaatatgttatttcagattctctgatcggtgtgaatattggtactgaagtgacaaacatgccaagtccaacacaagtagtagcactcctcaaatcacagaacatcaaccgcgtccgcctctatgacgcagaccgctcaatgcttctcgcgtttgctcacaccggggttcaagttataatctcagtacctaacgaccagcttctcggtatcagccaatcaaatgcaaccgcagccaattgggtgactagaaatgtagctgcatattaccctgcgaccaacattaccacaattgctgtcggatcagaagtcctaaccagcctaacaaacgcagcttctgtccttgtctcagccctcaaatacattcaagctggctctcgtcacgggccaatctcgaccgtcagatcaaagtatcgacaccgnaatcttcaaccatcattcttggattctttccctccttcggaagctttctttnaaaagacttggggntccagtaattgncctctcncaaatcctanagncaaggttgcatggtggnaacgttaccgat

SEQ ID NO: 128674 - DNA, 847 bp, Arabidopsis thaliana
  unsure (1)..(847): unsure at all n locations
gtgatgtgaacaatctcactctctttctctatctctctttcgagtttctttggagtattatataacaaatcagtccaagacacctcttttctcacaccaatctcgctctcaccacaaaacagagaatctcagatcgaagaagcaaagaaagagagaatgggtttcacttcccgaggaaacccttcttttctcttcttcttcttcttcttcctctgtctctccacagtctctgcttacatcaacagcacaagcagcaataatgatgaagtaagaagagagctagcttctgggagatgtaattggtttagagggaattgggtttatgatgtaaagtacccactttatgatccttactaatgtccattcatagatccacagtttaactgtaagaagtatggtcgtcctgacaatgcttaccttaagtatcgatggcaaccatcttcttgctctctccccagattcaatgggttgtatttcttgaggaggatgagagggaagaagataatgttcgttggagattcactaagcacaaacatgtggcaatctcttgcttgtctaattcactcttggggtcctaacactcgttacactcttattcggccaaaagggtctaggcttcactttacctttgaggaatacggagtgacgttgttgctatacagaacacagttctttgtagatttgaatgtngagaaagtttgggagagtgcttnaagcttgattnccattaagcaaagggaatattttgggagaggcattggncgggttttnantttcaaacncggtgggcatttngttggccacaaanccggncancatttangcccttgggggttncaatngnaat

SEQ ID NO: 128675 - DNA, 531 bp, Arabidopsis thaliana
agctactacgcctgcaggtaccggtccggaattcccgggtcgacccacgcgtgcgcgtccttggaggggacgacgacggatctgtctttctgtctactgaaaatccaaatttcatcctctccatttatttaactttttcagatttagttttgtcaagaaaacacaaaatgtcttttcttgcgccttgtcaaattttggagctgaatattatttcggcccaagaattggcgcccgtggcacggtgtatgaagacatatgcaatcgcttggattgatccagagcgtaaattgacgactcgggtcgacaatacgggcggaacaagccctacatggaacgacaagtttgtgtttcgtctagatgaggaagcactctacgatgccacatcaatagttgttatagagatctatgcattgcattggttcaaagacattcatgttggaacggtacaagccttaataagtgaccttgtaagcccttcttcggctatgagattcgttaccctagaggttcttcgtgcctcgggccgccccc

SEQ ID NO: 128676 - DNA, 890 bp, Arabidopsis thaliana
actcactttagggaaagctgctacgcctgcaggtaccggtccggaattcccgggtcgacccacgcgtccgactttttgttgttgttatgtttcttgtcttacaagaaatgtgagttttgtttcaacaaaaccctaggttccaatctctgcctactatccagataacctctctttatcagcatggatgtgtttattcggaacaatacaatgtgcagtcgtctctttcttccttgagaaagacccaaacgcttggattctccattcctactccgagtttgccacatgtctctatgcaggaattggggcgtcagcactttcttttacggtccaagcttgggctacttgcaaagagaggtcctgtgttttctgcactgtttaatcctctttgtacagtcattgtcacaatcttggctgctttgttcttccatgaagagatttacactggaagtttaatcggaggattgggcgtgatattgggactttacactgtgctctggggtaaagcaaaagatgtcatgatgaatcaagatcagagagacaatgatcagaagtcagaagtgaagattcatatagaagattcttcaaacacaacaatctgtaataaagatctgaagaatcctctgttgtcccaacccaaatcaacagaagaaatcccaacccatccacaactatactaattcaatattcttccattctactgtttcttaaattttgaaagctgttttgttctaatcataaatgtaatatgatgtattaatgaaaaatcaaagtctagcttggtaaaaaaaaaaaaaaaaaaaaaaaaaaaaaaaaaaaaaaaaaaaaaaagggcggccgctctagaggatccaagcttacgtacgcgtgcatgcgacgtcatagtcttctat

SEQ ID NO: 128677 - DNA, 529 bp, Arabidopsis thaliana
  unsure (1)..(529): unsure at all n locations
aaccgactnattgtggagaagctaccacgcctgcaggtaccggtccggaattcccgggctgacccacgcgtccgaggccgcgtggggttaggatactcctatccttgtttccaaacgggattacggttaacgacggcgatggcgccggaaattcacctgaaaccgaagaaccctagaattttatgccttcatggattcagaactagtggtcggattctccaagccggtataggtaaatggccggacacaattctccgagatctcgacctcgatttccttgacgctccttttccggccaccgggaaatcggacgtcgagcgtttctttgacccaccgtattacgagtggtaccaggctaacaaggggtttaaggaatataggaattttgaagagtgtttggcttatatagaggactacatgataaagaatggaccttttgatggtgcttcttggctttttctcagggagcctttcttaccagcagctattcctgaaatgcaagatccagggtgcggttcttactaaaggg

SEQ ID NO: 128678 - DNA, 893 bp, Arabidopsis thaliana
tgggacgcctgcaggtaccggtccggaatcccgggtgggccacgcgtccgccaagaatttcaagggttttgttcttacagcccattattcgcaaactcaggaccttttcacttctcgtcttcaaagccagatagagaaattgcccaaatgggttgaggatatagttcagaacatctttttcacagggggggggaggtgggacacgccttgtccaaggagaacaacctttgtagggggtggaggagagtgcctaatgatttatctaagctacaagcgcggctgggggataccaaggaattggcacttgggctacgggctcctctatattggaggaaacccttagacgcatgggagctcctaccttaagcgggcccagttataactctgcccaactttggtccaccaaatagggaaaaaaattcaaactgcttgacaaaccccccgggcccttagaaaaatccgaaatcctgaagaggagcggggaacccatggagggggtacaatttgtgcccctacgccatgggacagcctcaatggcacaaccctggggcaggcgttaaggcctccaaaaggggcgtgggataaagcctggaggccgggaaaaaatttcctaaggggagattgaccttttcgcgggtcccgcgatttgagggcctaagcccaggaaacccccccccgggggattggaaaaacttccgagccagctcgaaaaagaaatccagaggggcccaccttggggcttgagaaatcttggacgcgggggaagggcatgccccggcaaagaataaggcggggtgggcgggtcccacagaaagaggtgggggctcggcggccgaataataacctattcacggcaaaagcattcccacatgggttgtgagacactgtgaaaa

SEQ ID NO: 128679 - DNA, 637 bp, Arabidopsis thaliana
ccgggccgagccacgcgtccgggcggtctcagctttccgtggcacgcggttaccgtttttttaccattctcagtttcccgtcgcgggaactgtgtcaggaacgtcgaagaagatgatcggagccaggaatttcaagggttttgttcttacagcccagtattcgcaaactcaggaccttttcacttctcgtcttcaaagccagatagagaaattgcccaaattggttgaggatatagttcagacatcgataaacacaggtccacgaggtgtgacacgccttgtccaaggtgttcaagcctttgtacgggttggaggagagtggctaaatgatttatctaagtctacaagcgcgtctggtggattaccaagtgaattgcagcttggtctactgtctcctctatatttgaggaaaactctttgaacgcatgggagctacttacattaagctgggccagtttatagcatctgcgccaactttgttcccaccagaatatgtcaaagaatttcagaactgctttgacaaagctcctcctgtgccatttgaagaaattcgtaaaatcttgcaagaggagcttgggagaaccattgaaagtgtatacgaatatgttgaccctacgccaattgcatcagcctcaat

SEQ ID NO: 128680 - DNA, 417 bp, Arabidopsis thaliana
cgaccacgcgtccgctttatgttaaatctcttcttaatctcctccttcatctctacttctcttgccgtcgaacctccgcctgaaacaatctaccaaaactttctccaatgtttcacaaaccaaacaaaagctcctcctaactcattagccgacgtcgttttaccaaaaaccgctgccgctttcacccccgtcttacgcgcttacatccgtaacgcgcgtttcaacaccacagcgactccgaaacccgcgatcgtaatcgcggcgcgttccgagagtcacgtccaagctgccgtcatctgcacgaaatcgctaaacatccaactgaaaactcgaagcggtggtcatgactacgaaggtgtttcctacatctctcacgttcctttcttcgtcctcgacatgtcaaatctccgtaacatc

SEQ ID NO: 128681 - DNA, 372 bp, Arabidopsis thaliana
agtaaacaaaactaccaaaaaaaaaaacagaaaaaaacctttcaggtctcaactagcaatggagatgaagaagattgcctgcggagtcgttttcgctgctgcttccatgaccgccgtcatggctgcagaggtcggagcacctgcaccaggacccgccgcaagtggagcctccgtagctgttccggctcttggctctttggttggagcttcccttgtgtctctcttcgcctactacttgaactaagcttttctatttaaagcaaaaaaagaagaaatatcgatgtctctgtcaatttctatgatgtccaattttgtgtgtgttgtttagacaggcaaagtgaataaaacgaaaaataatttggattacgggcc

SEQ ID NO: 128682 - DNA, 591 bp, Arabidopsis thaliana
  unsure (1)..(591): unsure at all n locations
cccctcgatgncgacggtatcgataagcttgatatcgaatccaggctcgctgacgagttctcaatagtaacctctccggcgcttatcgtgaaaaaccctatgttccagacttctcttacgctttccttgcaaaatctgcctcaattttggattgaagacaagagcttgaggctttttctccaatcttaattgaaactttggggtttttctcacggggattttgcgaattagggtttcggattggggattttgttacatcgaaaggactttggagattcagcgttgggctcggtaattgaagaatgcagaattcataaacaccgctctggaattttactttttaggataacaaaggagggtcattttatctgttaattgatgggtgaagagatatctagcactgtgaacctggatttgaatctggggtcctgatccctgagttaggtctcggagcccagcgaccaattatgccccggcctgattgggggaaatggacctggctgccaagggaacccgaatccccgagaagggtaaaaaccggaccgggcacgtcnaaccgggttnaatcctccgggcctgctnnaanaaanc

SEQ ID NO: 128683 - DNA, 436 bp, Arabidopsis thaliana
cgcaaacacaagaacgtgtatatatacacaatatgtaggcgtttccggggatctatcgggcacacgatgtctatcaatccgtatgtgacaatcttcctcctcctcgccgctacctcaagccaagcgttgagtatttctctagctgacccctgcacggtgtcggattttcctgcattgtgcagaagtaccattaagggtcaaactaatgtgaatgcagcgacggatgtggccataaaagagttgatgaagcggacgaggcaagccaagaaaatcgcggagaaagagctgaaacgcgatggaggagtcgcgacttgtttgtccaacttcaatagcgcgtttgataatttggaaaaggctcttacaaacattaaggaaaatgatggttttagccttaacattaaccttagcgccgccttgacggattacgatacttgca

SEQ ID NO: 128684 - DNA, 495 bp, Arabidopsis thaliana
acgcctgcaggtaccggtccggaattcccggttcgacccacgcgtgcggctccgcgtaaacactacgcgccgccgtaagcttgactatctagttcaagtcttccgtcatgtctacgacttcctccgtgcgtgttcgactagctttcgttgcgttactctcagcgacgacttttgactggatccataaatatccctcgcttgaggcgtctgaaaaacctctcggtaaaccctagctctacattgaaagccagcagaggaaagatcttcttcatctcccaaactggtacagctaaagccttagctcaacggcttcacgagctatgcgcatctaacgacatagcatttgatatcgtcgatccacatagctacgaacctgaagatctccctaaagaaaccctagttttattcatcgcgtcgacttgggatggggggaagccgcctaagaacggggagtttctttgtgaactggctcggggagagccctggagatttccg

SEQ ID NO: 128685 - DNA, 917 bp, Arabidopsis thaliana
  unsure (1)..(917): unsure at all n locations
nnnnnnnnnnnnnnnnnnnnnnnnnnnnnnnnnnnnnnnnnnnnnnnnnnnnnnnnnnnnnnnnnngaccacgcgtccgaaaggtttcaacatttgtctcttgaaatcgatcgccgtttttctccatcctccgttcataattccggcaccgtttatccaaaatctacacttggctgaaaacatgagtcgtaatccggaggttctttgggctcaggggggtgtaaagtttacctaactgtcgccttacctgatgcgaaggacatttcggtgaagtgtgagcctcagggtctattcagtttctctgctcttggtgcccaaggcgagcgctttgaattcagcttggagttatatgggaagattatgacagaatatcggaagaatgtaggactaaggaacatcatattttcaattcagaaagaagagagaagctgggggacacgactggctgaaatcggaagagaaacctgccccttacatcaaagtccactgggaataatggggtaatgaggatgaggaggtcaacttctgaacagcctctgatgatgagagtgcattttgttattaaaataggggaagcagcgatgaccatggattggtctatcttcccggatctggaaaggcaaaaaacaagtagctaaacgggacaacaacccacccaccaatgtgggagatgaagaaaaagtaaagactagaagcctgaacattggcttaaggtgatccggtttgtttgacctacttaaccgccccttttgcttcgggtacctaggttccctcatttaaggtccgagggaaaacataggggcctgaggagtgggctttttttgttggggggcacaggggggtgggtggatctccgagggggatttaaggtggagggggcctcatacataccggggagtgttttttaaaaaaaaaag

SEQ ID NO: 128686 - DNA, 915 bp, Arabidopsis thaliana
  unsure (1)..(915): unsure at all n locations
nnnnaataccactcacatagggaaagctcgtacgcctgcaggtaccggtccggaattcccgggtcgacccacgcgtccgtcagggcaacgtgaacagagtctagagatggctaattcctcctccttctccccctctaccaccgtaacagatttaatctccaccgtccatgacgacatcatagagtctcacatcttgacacgtctcgacggcgcaaccttagcatccgtctcttgcgcctcctcacatcttcatcatctcgcttccaatgagatcctctggtccaaaatctgccgatccacgtggccttcttgctccggtggttctcgttctttcttctccgacgcttattctatggtggaaaccggcggtacagtctctgatctcgaccgggccgtttcggaattgatctccgccgtggatcttcactacagagggaagttgatttttagtagagtcgggaaaacgggaactacgacggcgtgggtttaagttttcaccgcttgaggattgatccggtggataccaagggatacggggggacgcccattaaaaaaagacagaggcgggaaacacgggtgggaacctaaaaaaggattgactctgacctgatccggattaacccgccgggaacgaccggcaaatatttcaggcccgggccgggtggggcaaagaatcggatagcggagatgggggcgccattcccacggggggggggcgggggtgggggacccggggcacctcgggaggaagaaccccggaggaagggctcaaggggaaaagggggacccttaaacgagggcacttgtttttaaggggttgggggaagggttggaggggggggtcgatcaaaaaaacaagggtgggaaaaagataaggaaaaaggggacgggtcctttctgggcttgcgggggggg

SEQ ID NO: 128687 - DNA, 547 bp, Arabidopsis thaliana
  unsure (1)..(547): unsure at all n locations
atgatttgccggcactatacgactcacttagggaaagctggtacgcctgcaggtaccggtccggaattcccgggtcgacccacgcgtccgattaagggaaaacggaggattccaaagtatctagcagtaattcagctgctcatgattcttcagatgatgattgggaagctcttgcagatgttgaaccgagtaagttactccccgtagaagagttgcctgaaatatcaaagctttcggttgaagaacctaaagttcaaggacctaagagacgtggaaggggaacgtttacttataagagtgatgcaatgtacagtgatcgagatttctctgagtcgaggtttgatgatgattcagaagataacgatttatctcgtgagtcagagaagactgatgaatcactgaaatccaagtatggcacacgccatgtcctcgtacttgctggttttctccaagtttgagaactactgaattggagaagctatttaaagacttcanagatagtggatttatcattcgttgggtcaatgatacaacagcacttgcagtc

SEQ ID NO: 128688 - DNA, 739 bp, Arabidopsis thaliana
  unsure (1)..(739): unsure at all n locations
nnnnnnnnnnnnnnnnnnnnnnnnnnnnnnnnnnnnnnnnnnnnnnnnnnnnnnnnnnngaattcgtgccacgccgtcggggaattttctgaaagcgtcagactcgctgagacctaactatggagaacacacggccaaacgaagaagaaggaagaataagtgaaccaaattggagcgaacgagtggaggatctcgtggtagccggcgacgtcacggcggcgatctcctttctcgagtctttggagaccaatcttcaatcgcggttaggttcttcctcctccggcgagagaacggagtttgggcttcaattatccgccgctcttacgcagttggcggatctctactcttctgagggactttcccttaaatccgatgagcttcgaactcgctcttccctcattaagcaacgagcgttggattgtgatcttgcctcttcaagaagttccggcaatgtagagaatcaatctgttgcttccagtggactcaagtctgacccaaatgtctcaagctttgatgctgatgggaaaacggaggattccaaagtatctagcagtaattcagctgctcatgattcttcagatgatgattgggaagctcttgcagatgttgaaccgagtaagttactccccgtagaagagttgcctgaaatatcaaagctatcggttgaagaacctaaagttcaaggacctaggagacgtggaaggggaacgtttacttataggaggatgcaatgtcagtg

SEQ ID NO: 128689 - DNA, 423 bp, Arabidopsis thaliana
cccacgcgtccgatctttatcaatattattaaggatcttaccagtgttgaacaactgaaagacagagatacgacccaaacaaatctgacacttctcaccagttttgctcggcaaggaagaatttttctggggcttcctatctctggacaagacgaagattttttcaagggtctcgacgtcactgcagatcagaaaaagagttttaagaaagctttcaacacatattatgatgctcttgcagatctccttcagtctgagcacaagttacttctccaaatggagaaagaaaatgcaaagctggtaaatgctaaaggagagcttagtgaagacagtgcatcttcttatgaaaagctgaggaaatcatacgaccatctctatcgaaatatctcatctttggccgaagcacttgatatgcaacctcct

SEQ ID NO: 128690 - DNA, 498 bp, Arabidopsis thaliana
cgcctgcaggtaccggtccggaattcccggcttgacccacgcggtgcgagccctttaaaaaaatcctttgtgtaagatgtacatagaaattgcttcatcttcttcactttctcttccattattacccttaaccagacctcatatctacacttcgatacccttctccaccattcctgaagctagacaacgcaatctcatcttcacagtctctgcttcttcttcttcagaatccacacaaaacaaaaaggtatggagaaaacaaccggagaagaacactacgtcgtcgtttcaggccttaaggaaacatcggaggtatcaaagatctgcttttctcgaccacaacgtcgatatgggacgagccttttagccttcaattcacgcagacccagaacggaaaaagagcgtttttttcttgtgctttcaaacttacaaaggacagacaatgtatctatacggggcctgggcgcccttctttctcgagagaatgattggcagaga

SEQ ID NO: 128691 - DNA, 603 bp, Arabidopsis thaliana
  unsure (1)..(603): unsure at all n locations
nnnnnnnnnnnnnnnnnnnnnnnnnnnnnnnnnnnnnnnnnnnnnnnnnnnnnnnnnnnnnnnnnnnnnccacgcgtccgggaaatcgtgaatccaaccaacaagacatttctctgactctcttcttccttcttctcctccaatttagggttccttcaaattctctctgatttcgtttgaaattgggggctcctcttcgaagatgacgatccctaattccgatttcatgttagaaaacggagtctgtgatttgccttttactcctgaggaagagaaacggattgtatcggagcttactagcgaatcggaggataatttgaaacaaggcaacttgtattttgtcatctctaaaaggtggtatacaagctggcaggaatatgttgagaattcggctaatgaatgttcaactggagagtcttcggaagctccgaggcctggaccgattgataaccatgatattatcgaaagtgatagcgacattaatgatccacaacttcctaaattgctggtggaaggagaagactaccttttaattcctaacaagtttggaaaaaacttggtgaatggtatagccgaggtccttcgatagaaaggaattgatct

SEQ ID NO: 128692 - DNA, 633 bp, Arabidopsis thaliana
  unsure (1)..(633): unsure at all n locations
aggtctcatacgactcactctatggaaagctggtacgcctgcaagtaccggtccggaattcccgggtcgacccacgcgtccgctaaaaaggaggaggatgtcgtgacggtatctgataattctttgactgtccatgagcccagagtgaaggttgatttgactgcttatgtggaaaagcatgagttctgctttgatgctgttctagatgaggatgtttcaaatgacgaggtgtatcgggccacaattgagccaataattcccattattttccagagaactaaagctacatgctttgcatatggccaaacaggtagtggtaagacatttacaatgaaaccattacctatacgagcagttgaagatcttatgaggttgttgcgtcaaccagtatacagcaatcagaggtttaaattgtggctcagctattttgagatatatggtggaaagctgttcgatcttctcagtgagagaaagaaactttgcatgcgagaagatggtagacagcaagtttgccttgattggcctgcaagaatatgaagtttcagatgtacaaattgtaaanggatttatcgagaaaggaaatgccgaaaggagcacaggttcaactggagcaaatgaggaatcttctagatc

SEQ ID NO: 128693 - DNA, 540 bp, Arabidopsis thaliana
  unsure (1)..(540): unsure at all n locations
nnnnnnnnnnnnnnnnnnnnnnnnnnnnnnnnnnnnnnnnnnnnnnnnnnnnnnnnnnnnnnnnnnnnccacgcgtccggattttatcggatgtgtcgtaatgaaaggggtaaaacacgtggcagtcaaccaggctgtcagttgttggtgaaagcagacaagcgcgtgattttaatataatctctctttacccgcgccaacaacactttaccaagacagatctctcatggcggtgctctgatgcttcagcctttgattttttccttttttgacctttttaatctctaattataataatcagtacaaaatcactgttgtttaccattaatttaaggaattaatcctaatctgattttaaggaattaatctctatttgccaaagaagaggcgcaaaggctccgtcttttttcttcttcttggttctgggttaccgatctgggctctgtcttcttcttcttcttcttcttcttcttcttcttctcctccttcttcgtttacgtctctgtgaaatgctcaagctgattangggttatcaacttt

SEQ ID NO: 128694 - DNA, 592 bp, Arabidopsis thaliana
aatatctctctttctccgccgaacttcttcgaatcaagtttccgtttatcactctaatattgttaaagtttccactgataccaccgctctagtcatggctgaagctgaagatcagcaaaatttcgttgcacacaatggagatcaggtaccagatcaagggtcagatgagttgcataatgggttaccgtaccaggttcatgatgagacccttgttcaccaaccatacgaggttgaagatccgattcttgaacctcagcagtacgaggtaccagatccgactcttgaaccacagcagtacgaggtaccagatcagactcttgaacctcagcagtacgaggttgatgatcagttagagtatcatcaataccagttgcaggaccaggctaatgaagatgtccaagatcattcgcaagatgacctacaatatcagccacaaaatcaggagcatgtttcaagttttcaagacgggggctcaatggtccaggctcagtatcaggcgcaaggtgatgtacaagatcacaatggtgatgaagtgcaagataaagtagaagatgaggaaggaattcctgagcatcttgagtctctacagaaa

SEQ ID NO: 128695 - DNA, 710 bp, Arabidopsis thaliana
tacgactcactatagggagagctggtacgcctgcaggtaccggtccggaattcccgggtcgacccacgcgtgcgcaaaaacaaaaagagttgataaactacagtaatggaaaatgagggttcatgatcaacggctgagatttgatgtcacacccaagccgatgggtttgaacgggagttctttgatcacggcaagatccgtcgcacttcttctctttctctctctgcttcttctgattctgccaccgttcctgccgccgcttccaccgcctccggcgacactcctcctccttcctctactcctcatgattctcctcattttcttggctttttctccttctaatgagcccagcctcgccgttgaacctctcgacccctgatgtcggcgacttgcgttgcgaaccgtccgtacatacataatatgcattacacaaatatgtctaattgtgtctctatgtgtatgttattcaggagccaggttaaggccttttaggtttagtttcgtgcaagtaagatcatgtcatgtgatagatctccgagtttttcttttcaaggatttcgtgtaaatttagtttttaattactttctatgagcaattttatttttcaattcaattcgttttttctattcttgttttgtagaagaattttgttttatcagcgtcacattatgaattgtagaagaataattttaaaatgcagtagaagcctt

SEQ ID NO: 128696 - DNA, 655 bp, Arabidopsis thaliana
  unsure (1)..(655): unsure at all n locations
ccggaatnccggncgaccaggcgtccggtggtttcctggaggctctcagcatcttcgagtcgttgcgaggatgcgttagaagagagtgtgctgtcaatcttcgaatctgcaaagacagtgtgagaatgggtgaccaatatgtttcttagtggtgatgttctcttttgctttgttggtggaatcttaggactgtattgactggccatggctgctgataccacagcttcaagttactggttgaattggagggtcctcctctgtgcattaatcctcttagctccaatagtattagcagctgttctcatttggaaatatgaaggcaagagaagaagacagcgcgagagccagcgagaattaccagggacattgttccaagatgaagcttggaccacatgttttaaaagaatccaccctctttggctgcttgcctttaggggattctcgtttgttgcaatgttgactttactcatttccaatgttgtgcgcgatggagctggcatattctacttctatactcagtggacatttactcttgtcacactctactttgggtatgcttcggtgttatctgtttatggatgctgcatctataataaagaagctagtggaaacatggagagttatacaagtataggtgatacggaacaagggcact

SEQ ID NO: 128697 - DNA, 529 bp, Arabidopsis thaliana
  unsure (1)..(529): unsure at all n locations
nnnnnnnnnnnnnnnnnnnnnnnnnnnnnnnnnnnnnnnnnnnnnnnnnnnnnnnnnnnnnnnnnnnnnnnnnnnnnnnnnnnccacgcgtccggccacgcgtccgaaattatacatcttcctcctcttcctctgccaacttataatcccgtcaaagatctttccttttttcttcttctggtttctttgtggtttcctggaggctctcagcatcttcgagtcgttgcgaggatgcgttagaagagagtctcctctcaatcttcgaatctccaagactgtattgactggccatggctgctgataccacagcttcaagttactggttgaattggagggtcctcctctgtgcattaatcctcttagctccaatagtattagcagctgttctcatttggaaatatgaaggcaagagaagaagacaacgcgagagccagcgagaattaccagggacattgttccaagatgaagcttggaccacatgttttaaaagaatccaccctctttggttgcttgcctttaaaggggaatt

SEQ ID NO: 128698 - DNA, 1163 bp, Arabidopsis thaliana
  unsure (1)..(1163): unsure at all n locations
tccagctctctacgactcactatagggaaagctggcacgcctgcaggtaccggtccggaattcccgggtcgacccacgcgtccgcactacttcactcagtggcaccgttcaggtcgaatctgagggattcatggcgaaatggattgggtttaagaacactgctggtccattgggacaccaagcggtcgcactccgtgtgaacggagaccgtgcggtcatattcaactgtagattcgacggttaccaagacacactctacgtcaacaacggacgtcaattctacaggaacattgttgtatccggtacagtggatttcatcttcggaaaatccgcaactgtgatccaaaactctctcatcctcgtccgaaagggaagccccggacaatccaactacgttacggctgacggtaatgaaaagggtgcagcgatgaagatcggtatcgtcctccataactgccgtatcataccggacaaggagctcgaagctgacaagctaaccatcaaatcgtacctaggaaggccgtggaagaagtttgccacgactgtgattattggaactgagattggtgatttgattaaaccagaaggatggaccgaatggcaatgagaacaagaccacaagactgctaaatacattgagttcaataaccgtggcccgggagctgccactactcagaggcctccttgggttaaggtggctaagtctgcggctgaggttgaaacttacaccgtggctaactgggttggtccagctaactggatccaagaagccaacgtgcccgtccaactaggattgtaagaggacaacacaaaaaagttaagaataaaacagtatgtgataatgttaaggtaacgatacgacgtcgtctctggggatcagaactcttttttggatactatatacaaagatagggttctagacgtgttgagatgatgtttgtataagattgctttcgtttcacgtgcaaaagaggaaaaaaaattgttttgttattttttttgtagtacaaataattaatttttttttatcacatgttgtatccttaagaaaattgatacacaaaatattttaaataccatcatttgctaaaagaaaaaaaaaaaaaaggccggccgctctagaggatcccagctcacgcacgcgtgcacgccnnnnnnnnnnn

SEQ ID NO: 128699 - DNA, 410 bp, Arabidopsis thaliana
cgaaatctgaatcaagagattaaacaaaaattgaacggacttgctttgacacagcagaccgtaaatcgggatgggggctcctaagcagaattggactcaagaagaagaggcacgctttaaggtctggagttataaagcatggacctggtaaatggcgcacaattctcaaagatcctgaattcagcggagtcttgtacctgcgttccaatgtccatcttaaggacaaatggagaaacatgactgtcatggcgaatggctggggatcgcgcgaaaagtctaggttagctgttaaaaggacgttctcccttcctaaacaggaagagaactcactagccctaaccaattctttgcaaagtgatgaagaaaatgtggatgcgacctctggactccaagtttcttctaatcctcct

SEQ ID NO: 128700 - DNA, 415 bp, Arabidopsis thaliana
  unsure (1)..(415): unsure at all n locations
agactggtgtttccttcacgctaaagnngattggggaagacctaaatcctgttctgagcttgtgtcctgcagactggagcattgacagagaagcaggaggagggcgatctgaaacaaaccagaaaaagtctcttccaatagaacctagcacatgtaaaaaaatcaggaaagacgtgaacatcaaagatgacaacagcaaagagaaaaatgacaaagaagagagcaaatcagtggatggagagaggaaatatctgagagggacatatttaactccatcaagccaaaaacactttgtgacattaacaattacaccttcctctataaaaaaagatagacttattctttccccacaatttgcaaggaagaacaatattgacaagcctggaatgatatatctgctggatacagatggtac

SEQ ID NO: 128701 - DNA, 481 bp, Arabidopsis thaliana
cggtcgcgtgggtttttttctcccgaacatgatctttcaatctcaacgacgatttctcagtgactaatactacatttgtatacattcttcatcatcatcatcatcatcatctgtgtttttgttcatattcatttttcagttatcgctttcaatttttaaaacttttttcttgggtttcacaaaatttgtcgttaatcgatgaatttgattgttttcaagatcacccatctctcgaattcacgaaatctctcagcttttccgtgattcttggtaaaaattcacaaaatcgaaattggagaaagaaagaaaaaattagggtttgaggaaaagcttcgatttttcacacgatgagtcatcaccggcgagattccggcggagatgtagttcacgtgattcccacaaacaatcctccgccggataattggtttccgaatctcggcgatagtgctgtttgggcgacggaagatgattacaatagagc

SEQ ID NO: 128702 - DNA, 456 bp, Arabidopsis thaliana
caagaaacgaattgtctctaaaaagaagaagatggcgaaaaatagctgtttggccaaaatcactgccggagttgccgttggcggcgctcttggcggcgcagtaggtgctgtctatggaacttacgaggcgattagagtcaaggttccggggcttcataaggttagattcattgggcaaactaccctcagcagcgcagcaattttcgggctttttctaggtgcgggcagtttgattcactgtggaaaaggctactgattcccttacattggtttagctctacaagctttaagtttgtatctctcttagtctcttggtgaaagattggattctttttttttcgagtggtattgagctttttgttgaaataactattggatgaatcgtttttatacgtttctgctactctttgtgtgataaaatcgtctctcttgggtatggtcagaaagcttcttatt

SEQ ID NO: 128703 - DNA, 695 bp, Arabidopsis thaliana
  unsure (1)..(695): unsure at all n locations
ggtgnnnnnnnnnnnnnnnnnnnnnnnnnnnnnnnnnnnnnnnnnnnnnnnnnnnnnnnnnnnnnnnnnncttttttttttttttaacacaagattaatttttgtaaactggattaaaaatacaaaacaacaccgctcattaaatggagagaataataaaattcaccaattataaaagaagatcaaaaccgctcctcagttctctacatcaaatctatgaaaaaaaatgacagacatttccagtctctttagaaaccgaagtcgcaaggaccaacttgactatggtttaactgtgatagttatatcaactctttgttggtgtctttggctctacgccaaatgcaaacggcggtctccaccgttgccgccgggaccttggggccttcccattatcggaaaccttccattcctccaaccggagcttcacacctacttccaagggctggctaaaaagcacggtcccattttcaaactctggctcggggccaagctcacaatcgtggtcacctcttctgaagtagcgcaagagattctcaaaacgaatgacatcatcttcgcgaaccacgatgtccctgctgtgggccctgttaacacgtatggtggtacggagatcatttggtcgccgtatggaccaaagtggcggatgctgaggaagctatgtgttaataggatactgagaaacgccatgttggatt

SEQ ID NO: 128704 - DNA, 499 bp, Arabidopsis thaliana
  unsure (1)..(499): unsure at all n locations
nnnnnnnnnnnnnnnnnnnnnnnnnnnnnnnnnnnnnnnnnnnnnnnnnnnnnnnnnnnnnnnccacgcgtgcgcccacgcgtccgatggattcttcttttttactcgaaactgttgctgctgcaacaggcttcttcacacttttgggtacaatactttttatggtttacagaaaattcaaagaccatcgagaaaacaaagaaaatgattcttcttcttcaacacaaccgtctccttcaccacctctgtcgtctttatctctcacgcgaaaatacgatgtctttccaagcttccgcggggaagatgtccgcaaagacttcctcagtcacattcagaaggagtttcaaagacaaggaatcacaccatttgttgataacaatatcaagagaggagaatctatcggtccagaactcattcgggcgattagagggtccaagatcgcaatcatcttgctctccaagaactacgcttcttcaagctggtgcttagacgaattggt

SEQ ID NO: 128705 - DNA, 405 bp, Arabidopsis thaliana
agatattgaagtaaaacataaaagaaaataaaccctaagaatatatcgaaaatgatcaaagggctcttgttggtttttttctttttaatcactgcaaagacttctgtttcacgtccgtttgcatggtcgagaggtaacatgccaggcgaaagtgggtcgggccgtgggccgaattgggagtacaattggggttggggctctgctccaggatctggatggggttacggggcaggctcaggtagatcaccaacaggatggggaagaggatccggatacggttatggatctggatcgggatcaggtaccgggtatggatatggttctggaggtggtggagcacgtggtggtggatatggttacggaaagcgggaaatggtcggtcttggtggcggtggtggtggtggt

SEQ ID NO: 128706 - DNA, 503 bp, Arabidopsis thaliana
gaatcaaacagtggcttaaacccaaaaaaggaacatggatgttagtatgagtttttcacaagatatggataatgagtatgagaagctgataagaagaatgaatccaccaagggttgtgattgataatgactcttgcaagaaggcaactgtgataagggtggatagtgcaaatgaatatgggattcttcttgaagttgtacaaatccttactgatcttaaccttactatcactaaggcgtacatatcttctgatggtggttggtttatggatgtatttaatgtcactgatcaagatggtaacaaagtcactgatgaagttgttctagactatatccaaaagtctcttgggcctgaagcttgtttctccacttccatgagatcagttggtgtcataccatcaacagacagcacggttattgagttaactggatgtgacagaccaggtctgctgtctgaactgtcagctgttttgacccatctcaaatgcagtgtcctcaacgctg

SEQ ID NO: 128707 - DNA, 656 bp, Arabidopsis thaliana
ccttttcagatttcgcttcttcaattcatgaaatcctcgtgattctactttaatgcttctcttttttacttttccaagtctctgaatattcaaagtatatatcttttgttttcaaacttttgcagaattgtcttcaagcttccaaatttcagttaaaggtctcaactttgcagaattttcctctaaaggttcagactttggggtaaaggtgtcaacgttggcgatgggtcttgacggaaacaatggtggaggggtttggttaaacggtggtggtggtgttagggaagagaacgaggaaggttcatggggaaggaatcaagaagatggttcttctcagtttaagcctatgcttgaaggtgattggtttagtagtaaccaaccacatccacaagatcttcagatgttacagaatcagccagatttcagatactttggtggttttccttttaaccctaatgataatcttcttcttcaacactctattgattcttcttcttcttgttctccttctcaagcttttagtcttgacccttctcagcaaaatcagttcttgtcaactaacaacaacaagggttgtcttctcaatgttccttcttctgcaaacccttttgataatgcttttgagtttggctctgaatctggttttcttaaccaaa

SEQ ID NO: 128708 - DNA, 514 bp, Arabidopsis thaliana
ctaatacgactttatatagggaacgctggtacgcctgcaggtaccggtccggaattcccgggtcgacccacgcgtccgcccacgcgtgcgcacttattcacattctctcaccagacacaaactccagattcatccgacaatggaaactttcagaacattccatctttttctcttcttcttcttcttcacattcactactaccctgacgtcaccatctcagatcgcagactgtacaatgtgcacttcttgtgacaacccttgtcaaccaaacccttctcctcctcctccaccgtcaaatccatctcctcctcctccatctcccaccaccaccgcctgtcctccacctcctagctccagtggtggtggtccttactactactaccctcctgcttctcaatctggctcttaccgtccaccaccttcttcctccagtggtggctactactatccacctcctaaaagtggaggaaactacccttatacaccgcctacaaaccctatcgttccatatttt

SEQ ID NO: 128709 - DNA, 627 bp, Arabidopsis thaliana
  unsure (1)..(627): unsure at all n locations
nnnnnnnnnnnnnnnnnnnnnnnnnnnnnnnnnnnnnnnnnnnnnnnnnnnnnnnnnnnnnnnnnnnnnnnnnnnnccacgcgtccgctccatttctatgttggagatgcttatgactctggcagcaagattgacgacaatcatattttaaggaagcttaaacccaaggaaatctggcatctgactgtgcttggttcgattgcaaccacacaaagggaatatgttgctttgcatgcgttttcccagcttaacccacagatgcaaaatgcaattctcaagcctagcccagagcagtttcctaattacggggagcagactcctacagtgcccgattgtttcactccgagctttgctggccatttacacagaagctttaatgctcctcagttggcagcaattcactgggccgcaatgcatactgcagctggtacgagcagtggggtaaagaggcaagatccatggccatttactcttgttcagggccctccaggaacaggcaagacacacacagtttggggaatgttgaatgttatccatttggttcagtatcagcagtattacacttccttgctgaagaaattagctcctgaaagtataaacaagttaatgagagcagtcagaaatatt

SEQ ID NO: 128710 - DNA, 647 bp, Arabidopsis thaliana
  unsure (1)..(647): unsure at all n locations
cccttttcccncattggagccncncatggggggccccctttttccccaacccttgaatggnctcccatnttggtgtcaaccccccaaggaagcccnccncgttnngcttncatctgggaacctgttatggatttgaagccaaggattaggtgagatatcgaaatgcccttgtgaaggaatgatggtgactgccgctgcttctgatggatctacttatgatttctgtagtcgctactttgccccgagattcggaatcaatgaggaccctgttactggaagtgctcattgtgctttagctcattactggagcctcaggatgaacaagtgtgatttcttcgcctaccaggcttcaagcagaggaggaacgttgaaggtgcacctggacaaagagaagcagagggttctactgagaggcaaagcagtcactgttatggaaggttatgtcttagtgtgattttggctatgatgaaaattcaggctcttgtaaacgatgaaattaataaaagattccatatattctcggatatatataattgtatccattaataaatactcgttttttaagtaaaaaaaaaaacaaagggcggccgctctagaggatccaagcttacgtacgcgtgcatgcgacgtcaagactcttctatagt

SEQ ID NO: 128711 - DNA, 497 bp, Arabidopsis thaliana
ccagctctattcgactcacttagggaaagctggtccgcctgcaggtaccggtccggaattcccgggtcgacccacgcgttcggagacagttgagttcgacacattatcagggattctaacagctaaacatctcaaaaatgatgatgatggagaagaatcaagtatcgaattggatttccctgttgttccaacatatgaagtcaactacattgatgatgatctctctttgttctccggagccttgaatggagctaccattcttgatgtcaaagccacacagaaagacctcctcgttgtgctttcatcttgggaagctgttattgattcgaagccaagattagatgagatatcgaaatgcccttgtgaaggaatgatggtgactgccgctgcttctgatggatctacttatgatggctggagtcgctactctgccccgagattcggaatcattgaggaccctgttactggaagtgctcattgtgcttgacctattactg

SEQ ID NO: 128712 - DNA, 1049 bp, Arabidopsis thaliana
ctggtttattgttggtggcggtgataacattagtgggtcatcggagagtgttgtactaaacatgtcggctcttgcatggtcggtcgttgcttcagttcaaggacgtgtacctcttgctagcgagggattaagtttagtggtgagttcatacaatggtgaagatgtactagtcgcttttggtggatacaatggacgttacaataacgaaattaatcttcttaaaccaagccacaaatcaacattgcaaacaaagactctggaagcgcctttgccaggtagtctttctgctgttaataatgccacaaccagagacattgagtctgaggttgaggtgagccaagaaggcagggtacgggaaattgtcatggacaatgttaaccctggatcaaaggttgaaggaaacagcgaacgcattattgcgactattaaatctgagaaggaagagctggaggcatcactgaacaaagagaggatgcagactctccaactaaggcaagagttaggagaagcagaattacgaaacacagatttgtacaaggaacttcaatctgttcgtggccaacttgcagccgaacaatcaaggtgtttcaaactggaggttgatgttgcagagctaagacaaaagcttcaaacattggaaacactacagaaggaactcgaactcctgcaacgtcaaaaggctgcctcagaacaagctgcaatgaacgctaaacgacagggctcgggtggcgtatggggctggctcgctggaagccctcaggaaaaagatgatgattcgccttgatcatttttggtccggtaatgccattttcctccggacgatatttgctttcagtaaagaaatatatatagttttttttgtctgagtctctcgcattgtttcttcttccaataagatatttttttagcgagctttgattactaccgatgtttagctttgttctctgttatacaagtgattcaccagaatattcgttaacttttttgaaatatttgttttgggagtgtctgacaaaattatgaaaactaaatcagtttacgatcagcac

SEQ ID NO: 128713 - DNA, 501 bp, Arabidopsis thaliana
ttttccgatttagcgaagccagcaaggatctgtttcagagggaaaaaaaagaggttccgactttttgttagctagcggctcactctactttgtctcccccaaaaaagccgttagggtttatcatatccaccgccttgctttactctcgccggagtcgtacggcgaagcacggttgttcggcgttgtctcagctttagattcttctcttcatagctagaattcgcgaaagctgactttagctgaaacgaatttctcctaattttcgagatatggcggaggtatcgatgggaagcagcagtagcagcacggatctgtctcccgaggaagagcgagttttcatcagagacattgctattgctgctgaggctaatagtaaagaaggcgatacattttatctcatcactcagagatggtggcaagaatggattgagtatgtgaatcaagaccaaccatgtaacacaaatgatgggtcttcactgtcagagcattgcgactctcctg

SEQ ID NO: 128714 - DNA, 434 bp, Arabidopsis thaliana
ttggtcgcgtgggtgattttttcaaataaaataaaataacggaagctggtttaaagaacaccgttgaattctattttcccataagctgaaaaaaaaactaaatttttgtgttgcccaccaaaaggtttgaaattttgatccgacgatacttgagctgatttacgttattagtgctatttcgatttcctcaaagatttcgttttttttttcttctaaatttcttagttaacctcttgcgtgtgcaattggtgcacttagcaattcctcttctgggccggtgatttgggttgcgattgtttttttttttttagggtttgattggatcgtggccctgatttagaacctaattgcggtcaaaagagtctgtgggaggattgaattggaataaagtgttatctttttttgattggcggaattcacattcaatcggaaag

SEQ ID NO: 128715 - DNA, 1168 bp, Arabidopsis thaliana
  unsure (1)..(1168): unsure at all n locations
ggaaagaaaaaaaaaaaaaaagacttctccccaaaaatggcgtttacactaggtggaagagctcgtcgtctagtctctgcaacatcagttcatcaaaatggttgcttacacaaactgcaacaaattggatcggatcggtttcagcttggtgaagcaaaagcaataagattactacccaggtgataagataaagtttggtctttatagttctttaaaaaaaaaagtgaatcaaagaataaagacagagattactctgtttttttgtatcataggagaacaaacatggttcaagaattaggaatcagggaagaatttatggatctaaacagagaaacagagacaagttatgattttctggatgaaatgagacacagatttctgaaattcaagagacaaaagtatctaccggagatagaaaagtttaaagctttggccatagctcaatcaccaaaggtaatggtgataggatgtgcagattcaagggtatgtccatcttatgtactaggatttcaacctggtgaagcttttactatccgaaatgtcgccaatctcgttaccccggttcagaatggaccaacagaaaccaactcggctcttgagtttgcggtcaccactcttcaggttgagaacattatagttatgggtcatagcaattgtggaggaattgcagcacttatgagtcatcaaaaccaccaagggcaacactctagtttagtagaaaggtgggttatgaatgggaaagccgctaagttaagaacacaattagcttcatcacatttatcctttgatgaacaatgcagaaactgtgagaaggaatctataaaggattctgtgatgaatttgataacttattcatggataagagatagagtaaagagaggtgaagtcaagattcatggatgttattacaatttgtcagattgtagtcttgagaagtggagattaagttcagacaagactaactatggattctatatttcagacagagagatatggagttgagtaaatattgaacaatcctcagttctaatattcagatgtatctttgtacatacgaaatgatatttacacaattggaaaaaaaaaaaaaaagnnnnnnnnnnnnnnnnnnnnnnnnnnnnnnnnnnnnnnnnnnnnnnnnnnnnnnnnnnnnnnnnnnnnngaaatc

SEQ ID NO: 128716 - DNA, 486 bp, Arabidopsis thaliana
  unsure (1)..(486): unsure at all n locations
ttattacctgagcaaaaactgaaagaaaaaaaaaaggaaaaaaaaaaagacttctcctcaaaaatggcgtttacactaggtggaagagctcgtcgtctagtctctgcaacatcagttcatcaaaatggttgcttacacaaactgcaacaaattggatcggatcggtttcagcttggtgaagcaaaagcaataagattactacccaggagaacaaacatggttcaagaattaggaatcagggaagaatttatggatctaaacagagaaacagagacaagttatgattttctggatgaaatgagacacagatttctgaaattcaagagacaaaagtatctaccggagatagaaaagtttaaagctttggccatagctcaatcaccaaaggtaatggtgataggatgtgcagattcaagggtatgtccatcttatgtactaggatttcaacctggtgaagctttttcactttccgnaaatgtcgncant

SEQ ID NO: 128717 - DNA, 451 bp, Arabidopsis thaliana
agagtaaacttttcagacagatttgtttcgagaaaagatcgcttgcttggcttttcaggataatctgagatctatctgtagaagaagcagatacagaattcagaaacgatgaccgacgtcgatgaatccgttagacgccgtacagccgccgtttccgagtaccggaaaaagctcctccaacataaggaactcgaatcccgtgttcgaacagctagggagaacttaagaggagctaaaaaggaattcaacaaaaccgaggatgatctcaagtctcttcaaagtgttgggcagattattggagaagtgcttcgacccctggataatgaaagattgattgtgaaagcgagcagtggtccacgttatgtggtgggttgccgaagcaaagtggataaggaaaagctaacctccggaactcgagttgttctcgatatgacaacactaacaattatgc

SEQ ID NO: 128718 - DNA, 481 bp, Arabidopsis thaliana
cggtcgcgtgggcggacgcgtgggcggacgcgtgggctcagatatcgtgattcttgacgataactttgcttctgttgcaacggttttgaaatggggaagatgcgtgtacaacaaatattcagaagtttattcagtttcagctcactgtcaatgtagctgctctagtgatcaacttcgtggctgcagtttcagctggagacgttcctttgacagcggttcagttactgtgggttaatctgatcatggacacactcggtgcattggctttagctacagagaagccaacaaacgatcttatgaagaagaaaccgatagggagagtggcgccattgatcacaaacatcatgtggaggaatctactagctcaagcgttttaccaaatctctgtgctcttggtgcttcagtttagaggaagatcgattttcaacgtgactgagaaagtgaagaacactttgatctttaatacatttgtgctttgtca

SEQ ID NO: 128719 - DNA, 511 bp, Arabidopsis thaliana
ttcttcgcgtccgcttcacacacctttgatcagactggacacacctataacattacccgtatcctcaatgagaagaatttcgatatcaatctagacgcttacaacggttacagcaagctctatttgagtgtgatgttcgcgttgctctatggactcagctttggttctctttgcgctaccatctctcatgttgccctctatgatggaaagtttatatggggaatgtggaagaaggcaaagacagcaacaaaggacaagtacggtgacgtgcattcgagattgatgaagaagaattatcaatcagtacctcaatggtggttcatcgcagttctagttatttcctttgctttcgcactctatgcttgcgagggctttgacaaacagcttcagctcccatggtggggacttatactcgcttgcgccatcgctttgttcttcacattacctatcggagttatccaaagcactactaaccagcaaatgggtcttaacgttataacagaactgatca

SEQ ID NO: 128720 - DNA, 438 bp, Arabidopsis thaliana
tgctttcgcgtccgctttaaactacaaatcaaggcaggggcctctctattctctgcagttctcttgtctctttgtttactctcttcactttttctctcaaatgcaaacgctaagccaaaactaggcttcaccgcggatctaatccaccgtgattctcctaaatcgccgttctataacccgatggaaacctcttcccagcgtctacgaaacgcgatccaccgatccgttaaccgtgttttccatttcactgaaaaggataacacaccacaaccacagattgacctcacctcaaatagcggtgaatatctcatgaacgtatccattggaacacctcctttcccgatcatggccatcgccgacaccggaagtgatctcctctggacgcagtgcgcaccatgcgatgattgttacactcaagttgattctctctttgaccct

SEQ ID NO: 128721 - DNA, 647 bp, Arabidopsis thaliana
acttaatcagaattacacaaatgggaactaataagattcccgaaaccctcaacgggaaccttgttcttatacttatcatcaccataatgatggtgactcactcccatggatttcaactggagatcaggaacgagctatcaggaaggtacaggaagcttgtgtacaaatgctggtcccgcgataacgatttcgggtggcgacagaactggccaggccagtacaaggactggtccttcgccatttcactattccacacctacttctactgccacttccgtacagcgtatggacgcgtggataagcagctagtagcgtcatgggagttaaaacaagagtgtggggacaggagaaaatgcacttgggtcgttaagaaggacggactctacttgagacaatggaagaccaaattttttagtaacaagtatggtaacgaaaggtggaatgtgtatattgaacatgatgtcctcaagaaaagttggagctaattaacaatttcacggtgttgattgtcatgaagatcgcgaggaccggatatcgtgattttcgtctctgtatgtgttattcatggtaataaaatcatacaatgtgtaactatatacccatggtgaaaatgagaaagaccgcctctatatatataatatgttgtt

SEQ ID NO: 128722 - DNA, 1027 bp, Arabidopsis thaliana
  unsure (1)..(1027): unsure at all n locations
cacgagatacaaatcggagttgtccgtatattatattttgtagcgatcaagagagactaaggcagacatgtgagaggggagaggatcctataaacaatttaaatctaagatctctgcttcctccttctcatatatatattgcatatttacacatagttcctctatacagaaactgatcgagaaaactcacgaaacaagaggctaatcaaaagcatagaagaagaatggtttcaagggaacagaagagaggttctttgcaagagaagtttcaattgcttcgttcaatcactaattcacatgctgaaaacgatacatcgatcataatggatgcatcaaaatatatccaaaagcttaagcagaaagtcgaaagattcaaccaagaccctactgcagagcaatcttcaagcgagcccacggatccaaaaacaccaatggtaacagtggaaaccctagacaagggttttatgataaacgtgttctcaggaaagaatcagccagggatgcttgtttcggttttagaagccttcgaggatattgggcttaacgttcttgaagctagggcttcatgtaccgactcttttagcttgcatgccatgggactcgagaatgaagatggagaaaatatggatgctgaagcagtgaaacaggcagtgactgatgcaatcaggagctggggtgaaatcaatgatccacagaactagattgacccacttttcattttttttttatatataatttatttcttattatacaaaatataaggaaataacacagtttctatagtatttctgcttcttcttttttctttttcttctgtccattttgtagtccagaatttccccgtgaaaagggataatgaagaaaaatcaattgtatgtttatttatttcacgtaagcaatagaaaatacgttcttaaggtacatcacctaccaaaaaaaaaaaaaaaaaaaaaagnnnnnnnnnnnnnnnnnnnnnnnnnnnnnnnnnnnnnnnnnnnnnnnnnnnnnnnnnnnnnnnnnnnaacga

SEQ ID NO: 128723 - DNA, 444 bp, Arabidopsis thaliana
caataccattgtctgagaaatcagattcaggagcaaatgttgctgtaaatgagaacaatcaagagaatgaaagagctctaggtccatccatctatctaaagggtttacccctttgatgcaacacctgccttgcttgagaatgagttccagaaatttggacttattaggaccaatggaattcaagtgagaagccagaagggattctgttttggttttgttgagtttgaatccgcaagttccatgcaaagcgctatcgaggcatcacctgtcatgctcaatggacacaaagttgttgtggaggaaaagcgatctaccgcaagagggaactatagaggacgttccacgtttggtgtaaacacaggctacagaaacgaaggaggaaggggtcgtgggagctttggaggtggaagaggaggatatggccggaccgatttcaacggatat

SEQ ID NO: 128724 - DNA, 381 bp, Arabidopsis thaliana
tgttttaaccttctagggcttaagccttctccgttagatttagctttgatgtttaaaaatcttttcaaagttgtaacctttcgaatcttctgaagaaacccatgtccatgaatggtcagagaagctcttcaatttctttctcgcctgagaaaatcctcgaatctcccagacccattcacctgcaacaagcatattcatcagctaatcaattccaattgcggcattctatctctcaaattcttagcttacttagtctccagaggttacactcctcatcgttcttcattcaattcggccgtatcgtttgtttgtaaactagggcaagttaaattcgctgaagatatcgttcactcgatgcctagattcgggtgtgaaccagat

SEQ ID NO: 128725 - DNA, 906 bp, Arabidopsis thaliana
  unsure (1)..(906): unsure at all n locations
gaaaaagttctcaaggcgatgcgagaatctgactcatgcaagcctgccatttttgccatgtcgaatcccactttgaatgccgagtgcactgctgctgatgctttcaaacacgccggaggaaacattgtctttgcaagtggaagtccatttgagaacgttgaacttgagaatggtaaagtaggacatgtgaatcaggctaacaacatgtatttattcccggggatcgggctagggactcttctctctggtgcacgtatcgtaactgatggaatgctacaagcagcttctgaatgccttgcgtcctacatgaccgatgaagaagtccaaaaaggcatcctttacccttcaatcaacaacatccgacacataacagctgaagtcggggcagctgttctacgagctgcggtgactgatgacattgcagaaggacatggtgatgttggtcccaaagatctcagccacatgtctaaggaggatacagtgaattacattacacgcaacatgtggttccctgtttacagccctctcgttcacgagaaatagacaacaactctatataactcttctcaggtttcatagaaagccaaaaggcaaaaaatcttcgcttcatcttttatttgtgatcaacattctttttttcttcaaaatgtgatatgttttaagaaaaacaatgccaaaaagagggcttaagaacaagaacagggttagttctaggtcaacctgtacttttcctttttttttttggacatttttccaacttcttacgattatttctgatgataatgattacaactttatatcctgttttggcaatannnnnnnnnnnnnnnnnnnnnnnnnnnnnnnnnnnnnnnnnnnnnnnnnnnnnnnnnnnnnnnnnnnnnnnnnnnnnnnnnnnnnnnnnnn

SEQ ID NO: 128726 - DNA, 400 bp, Arabidopsis thaliana
  unsure (1)..(400): unsure at all n locations
agaaagtgaggccacatgttcttcttggtttatctggagttggtggtatctttaatgaagaagttctcaaggcgatgcgagaatctgactcatgcaagcctgccatttttgccatgtcgaatcccactttgaatgccgagtgcactgctgctgatgctttcaaacacgccggaggaaacattgtctttgcaagtggaagtccatttgagaacgttgaacttggatcgggctagggactcttctctctggtgcacgtatcgtaactgatggaatgctacaagcagcttctgaatgccttgcgtcctacatgaccgatgaagaagnncaaaaaggcatcctttacccttcaatcaacaacatccgncacataacagctgaagtcggggcagctgttctacgg

SEQ ID NO: 128727 - DNA, 679 bp, Arabidopsis thaliana
cccaagcgaccggaaaaagatatcaatgcctgcacatttaatgtatgatggccaagatgataacctgtttgagcacttctcaaccgttgcccagaggctcggtgtctacactgccaaggactatgctgatattctggagtttcttgttgaacggtggaatgtggagactttgacagacctttctagtgaaggacacagggcccaggactttgtctgcggactacctgcaagaatccgtaaaattgaagagagagctcaaggaagagccaaagaagctgccaaaaacataccattcagctggatatttggtcgaaatatcagggcttaagaagtttactacacaattctctttccaattatcccaagtaagtcataaaggtcttcaccaaccatttcaccaatgaaggaccagtttttaagaccacgaaagttcatttgaatgtgttttgttttatacggaacattgtagataaagttatgtggttaggttatgtttcttgtttgaatcagtcaagaccaaagaaaatgtgtttgagtgttcttagatattgtatggtttaccaagaacaagacttaagattttcctttaaaaaaaaaaaaaaaaagggcgcccgctctagaggatccaagcttacgtacgcgtgcatgcgacgtcaagctattctatagttgacctaaa

SEQ ID NO: 128728 - DNA, 729 bp, Arabidopsis thaliana
  unsure (1)..(729): unsure at all n locations
nnnnnnnnnnnnnnnnnnnnnnnnnnnnnnnnnnnnnnnnnnnnnnnnnnnnnnnnnnnnnnnnnnnnnnnnnnnngacccacgcgtccgggtggaaaggagcatctgggttctctgctcgttccacagctgaagaagtcactcatggaatcgatggtactggtctcactgctatcgtcacaggagcatcaagtggtattggggaagagactactcgtgttcttgctcttcgtggtgttcatgttgtaatggcggtaaggaatacagattctggtaatcaagtcagagataagatacttaaggaaatacctcaggctaagattgatgtaatgaagttggatcttagctctatggcttctgtcaggagctttgcatcagagtatcagtctttggaccttcccttgaatcttctcatcaataatgcggggattatggcatgtcccttcttgctttctagcgacaacattgaattacagtttgcaaccaatcatgtgggtcattttctggtgacaaaccttcttttggaaaggatgaaaaaccgcttgtgaaagcatagaaaagggngaattgtatttgctcataaaagggatcgtttgcttaccggaagggggtcatttgacaaaataatgagaagcaaggccatactttgcaacctatggcatcaaagctcggacatttgccccctctgactcgttagctttaaagaacagggggattcatgctattcct

SEQ ID NO: 128729 - DNA, 473 bp, Arabidopsis thaliana
  unsure (1)..(473): unsure at all n locations
acgcctgcaggtaccggtccggaattcccggtttcgacccacgcgtccgggcggaagaacaatgcagaagactctacacgcttaccgtcttcagaatcttccagaacgagctcgtccaatcttacaattatctctgtttaaagacttatgaagaaggagcaatcagtaggttcttggtgaggaaatgtgggaacgagagtgagaaacacgccgtgactttcagtgcgtcgaatctcaattcgagttgcagctgtcaaatgtttgagcacgaaggacttctgtgtcgacatatcttaaaagtgtttaatctgctggacataagagagctcccgtctcggtatatactgcaccgatggaccaagaacgcagagtttgggtttgtgcgtgatatggaatcaggcgtgagtgctcaggatctcaaggccttnatggtttggagttttagggaagctgcttctaagtacatagagttt

SEQ ID NO: 128730 - DNA, 889 bp, Arabidopsis thaliana
  unsure (1)..(889): unsure at all n locations
nnnnnnnnnnnnnnnnnnnnnnnnnnnnnnnnnnnnnnnnnnnnnnnnnnnnnnnnnnnnnnnnnnnnccacgcgtccgatttcaaatcttgaaaaggactctggtttattcagaaacccaagaaacaacaaggcgtgggaagtttcttacattatccgagttcttgtttcttccaaaccgttacagctctctcttaagcctcttgatagaaggggagggtgcagcttatttagggggacatcaaagaattagcgtggtcgatgcggtactagatgaattgaagagagctactactcaacaaaacaagacaggtgcaagaacaatactgatccagtctactgataaggctgtcttgatgaagtcaaggagaagaacaaaatgaatcatgacgacgctgtcttagagtcgacacaacatgcgtgaggtacaaattcgggatcaaaacatcaagaattgccaggctcgatggcatcaaaaaaaaatcattctttcctacaagggtattcatcctgaaaaggagacaatattgttcaaactaaaacaaacggcttcggtttacgttaaagaattacaccggggggaacccatgctttgactttacataatcaacgtaaaataacctttttggcggaggtccaatgaggggtattactgacttccagcaccctggaaaccaaaaaaacagggttcggaatttgggtctacacaccgggagccataatttcgaaaccatgcttttcaccggtgaaccatattccccttcttgctagatggggggcccctttgctaaaaaaaaaccccccttttttcctaaaaggaaggaaacaaaaaagccctgaatttagcagattctggggttttttaaagaaggagggggacccccccggg

SEQ ID NO: 128731 - DNA, 572 bp, Arabidopsis thaliana
  unsure (1)..(572): unsure at all n locations
cnnnnnnnnnnnnnnnnnnnnnnnnnnnnnnnnnnnnnnnnnnnnnnnnnnnnnnnnnnnnnnnnnnnnnnccacgcgtgcgctcacgcgtgcggccacgcgtccgcaagacacacagtgcaaaatgacaaagagcccttcatcgatttcgaatcttctctctgagtaaatcaatttcacaaattcgaggtttttggtttttagcttactacactactccaagaagaaaatctcaagttaaagtcatttcctatcaaatctcttttcatggcggctgctattctcgtttctcctgttcgctaaattgcgtcattttcattgaagcttattataaaagcggcgtagatctgtgattctactcattgcatttccgcgtttgtgaggagaaagaggagaagatgttgtgtgcttgttcaggcgaacaattccggttcgaggatcagcccggttcgccggaatccctagctacaagagatttctcagctagtgggccttcttctcgaaacggaggaggcgattgggattccaaattggaagatattcaagtcgatgaagctgaatcgactttaaag

SEQ ID NO: 128732 - DNA, 591 bp, Arabidopsis thaliana
  unsure (1)..(591): unsure at all n locations
anacgggncaccaagccntcgggcataanaccggtaggcccatgnaaacccncncgnctggaaggaacatngggaantcagcagctcaacncgattattggaccccggcatcagtcccaccaaggtcgagttttcccccgtcacctccaccacgacgaccgtctgtctcacccacaaggggacggacgctcgtgttcccccccagtgtttccgccgcgagcgtgttcatctttggaggaaatggctcgggaagaggttcgaagatcgtcttcagccagtggtaggagaactagcctcgaaggggttttgatttgttcatatctctcttctttcttctttttcctatttgtttttaatttttggcgttgatttgttttttggattccaaatataaaaaattgtttttttctttttcttttgttgtttatgaatccggacgtcgatagagagggtttgtgatgttttgtacataataatcaacatttcttctttcacattaaaaagagatccaaagtattgtgtaaaaaaaaaaaaaaaaaaagggcggccgctctagaggatccaagcttacgtacgcgtgcatgcgacgtc

SEQ ID NO: 128733 - DNA, 678 bp, Arabidopsis thaliana
  unsure (1)..(678): unsure at all n locations
agcttttctagcagatgatttcaggcttttgcttataatggatcctcagcttaaaggtcggtttccggcaaaagcggctaggagcatagcagatatagcacagaaatgtctgcaggtggagccttcagagcgtccaaccatgagaaacatcgtggatcaactcaagatcatacaggacatgaagtactcgtgtaggttcccattgagagaacccgcaccggtcgtggcaaggaaacatatgggaagatcaagcagtctcaacacgattatttggaccccggcatcagtgccaccaaggtcgagtttttcaccgtcacctccaccacgacgaccgtctgtctcacccacaaggggacggacgctcgtgtttcccccagtgtttccgccgcgagcgtgttcatctttggaggaaatggctcgggaagaggttcgaaagatcgtcttcagccagtggtaggagaactagcctcgaaggggttttgatttgttcatatctctcttccttcttctttttccctatntgtttttaattttggccgttgatttgtttttggaattccaaaatatanaaaaattgtttttttcttaanaaaaaaaaaaaaaaaggcgcnnnnnnnnnnnnnnnnnnnnnnnnnnnnnnnnnnnnnnnnnnnnnnnnnnnnnnnnnnnnnnnnnnnn

SEQ ID NO: 128734 - DNA, 557 bp, Arabidopsis thaliana
gtctttcaaaggtgagcttgggaaataatggcgtagctctactagctcaagtttgagctctcccataatgagtacatcaagcttgtcctccatctcctgcctcctctggagatctctctcatgatgacttcgaaggtatgagaaactacagagataatgttaaactgcaacaaggttttagaacaccgggcagcccttagcgacgatccctttctctgttgggcaatttgccaaagggcaatggtctgtgttctcattcccccaccaatctggtaagcttatgttattgttctgtaacgcaaagtagatcaacactcccataaccgcagtgcctgcatcaagagctgcagagaggatgtagttatgccttgcccaccatcccttgtacctcctgaagatatagtagttgaacacgatcccaacagcgaaccacgaccagtaatgcacagccttggccattggcatcacattagcccctgagaagatcaagggaatatgaatctgatgtatccacttcttctccgggaatttccttgcaaagaaccagaccgggacag

SEQ ID NO: 128735 - DNA, 613 bp, Arabidopsis thaliana
accacgcgtccacgtaaaatggcgactggtaaaaccgtgaaagatgtttctcctcacgatttcgtgaaggcttacgcttctcacctcaagcgatctggaaagattgagcttcctctatggacagacattgtgaagactggtcgtttgaaggagcttgctccatatgaccctgattggtactacattagagctgcttctatggccagaaagatttacttgagaggaggtcttggtgttggtgctttcagaagaatttatggaggtagcaaaagaaatggaagtcgaccaccacatttctgtaagagcagtggtggtattgctcgccatattctccaacagttggagacaatgagcattgtcgagcttgacactaaaggagggagaagaatcccttcgagcggtcaacgggatttggatcaggttgctgggcgtattgcagctgaatcatgaagagctgttgttctccttatgcttgctttggaggagcctcaagaatgttatagatctttttagcttttgtgattttagatctccactctcttctgctctgttcattttggcgaactaatttgatatttgatgaagctattaaagatttgttccttacagtgaa

SEQ ID NO: 128736 - DNA, 1094 bp, Arabidopsis thaliana
  unsure (1)..(1094): unsure at all n locations
ttttaggtgcacactatagaagagctatgacgtcgcatgcacgcgtacgtaagctcggaattcggctcgagggttaacgctacagttgcgagaaacattgccggcatttgtggaaatgtcatctccttgttcttgttcttatctcccatacctacgtgcataaccatatacaagaagaaaaaggtggaggagtacaaagctgacccatacttagccacggttctaaattgcgcactatgggtcttttatggcttaccaatggttcaaccagatagtctccttgtgatcaccataaatggtaccggtttagccattgagctggtgtatctcgctatcttcttcttcttttctccaactagtcgcaaggtgaaagtggggctatggttaataggagagatggtgtttgtaggaatagtagccacatgcacattgctattgttccacacacataaccagagatcttcttttgttggaatcttttgtgtcatttttgttagtctcatgtatattgctcctctcaccatcatgagtaaggtgatcaagaccaaaagtgtgaagtacatgccattctctctctcacttgccaatttcctcaatggtgtcgtttgggttatttatgcacttattaagttcgcccctttcattttgaattggaaatggacttggaccggtatcaggagcagtcccactttttctcctaggcttgctattacaagccaccccccaaagatgatgaagatgaagaagatgaggagactctttctaaggttaactctcagttacaacttagtggcaacagtggacaagctaaacgagtttcagcttgattatatgtttggattcatgagatatgaatttagttttatgtttttttttaagcttttggctgatttaactttaagtaactctattattttcgcgtttcctttttgtaaaatgcaaactctttttcttctatgaaagatattaactattattatatgcgacaaaaaaaaacccaaagnnnnnnnnnnnnnnnnnnnnnnnnnnnnnnnnnnnnnnnnnnnnnnnnnnnnnnnnnnnnnnnnnntgtacctaannnnnnnnnnnnnnnn

SEQ ID NO: 128737 - DNA, 531 bp, Arabidopsis thaliana
  unsure (1)..(531): unsure at all n locations
atgatctnnnnnnnnnnnnnnnnnnnnnnnnnnnnnnnnnnnnnnnnnnnnnnnnnnnnnnnnnnnnnnnnnnnnnnnnnnnnccacgcgtccgcccacgcgtccggctcgctctcttctttgttcttgctccttgttctagttcggatttttcttttgaagtgaaatggttaacgctacagttgcgagaaacattgccggcatttgtggaaatgtcatctccttgttcttgttcttatctcccatacctacgttcataaccatatacaagaagaaaaaggtggaggagtacaaagctgacccatacttagccacggttctaaattgcgcactatgggtcttttatggcttaccaatggttcaaccagatagtctccttgtgatcaccataaatggtaccggtttagccattgagctggtgtatctcgctatcttcttcttcttttctccaactagtcgcaaggtgaaagtggggctatggttaataggagagatggtgtttgtaggaatagtagccacatgcacattgct

SEQ ID NO: 128738 - DNA, 404 bp, Arabidopsis thaliana
tgctgtgttttaccaacaactgcaggagtttgagcaggggatattcggatctgagatgatgtcggcgatgaatattaatgatgctccaacgtttgggtttggtttccctaagattgataatcaagcacaagctcctgtgttcaacaatgctcctacttcttctatattttcatctcctgcttcaagtatccctcctcaggagttcacttttggagcaactccaccaaagccaacaactggtggtgatattgcaatggatggctcttagaaccagataatcatatactcttgcaagaattttcatcaacaaatatactgttgtgagaatgtttctttttcttttttgtacatggagattggtgcattgcttgagagagtttggggtttgagaacatgagattgga

SEQ ID NO: 128739 - DNA, 519 bp, Arabidopsis thaliana
  unsure (1)..(519): unsure at all n locations
aacctctatgcgctatgataaacaacaaccttcgctgctacgaccttgccatggagttaagtaatagcactttagaagctcttccacaaaattatgcagagcaggtgaattttgaagacacttgcaaaggtttcttggaggtggctaaggaagcagtgcatcaaacagttcgcgttatctttgaggatccaggagttcaggaattacttgtcaagctttaccagaaagaatggtgcgagggacaggttaccgagtacctcgtggcaactttcggtgattatttcacagatgtgaaaatgtatgtcgaagaaagatcatttagaagatttgtcgaagcatgtttggaagaaacagtcgttgtctatgttgaccatctcctaactcagaaaaactacatcaaggggaggaaccttttataccggnttgagggctagatgaagggggttctccatgggatttcctttngggggggtntttaagnnccatcttaaantngggggccggnttcagattnattng

SEQ ID NO: 128740 - DNA, 478 bp, Arabidopsis thaliana
ccacgcgtccatctacttccaaaatggtggcgaaaggatctggtttccaagcttccttcaaaccgttggttgtccactcattttcttccctcttctcttatctttcctccgccgtcgtcgttgccttgaagaacaagaaacgactccatttttcctcatgaaacctcctctctttatcgccgctatcgttgttggtttgctcgtgggatttgacaattacctctactcttacgggttagcttatatccctgtttctactgcgtctttgatcatctccgcgcaattaggcttcactgctctctttgcattttttatggtgaagcaaaagttcacacctttcactataaacgctatcgttttgctcactggtggtgccgtagtccttgcccttaactctgatagtgacaagcttgcatacgagacacacaaggaatatgttgttgggttcatcatgactcttggtgcagctcttctctat

SEQ ID NO: 128741 - DNA, 529 bp, Arabidopsis thaliana
  unsure (1)..(529): unsure at all n locations
ccnnnnnnnnnnnnnnnnnnnnnnnnnnnnnnnnnnnnnnnnnnnnnnnnnnnnnnnnnnnnnnnnnnnnnccacgcgtccgagagaatcatctcaaatctaggatgacttgtacggacaacaacaacatctgttttcgggcagcgagaggcggattctgacagtggaggaagtaccgtgacgatggactcgacgttgcagatgatgggtctagggttttcctcaaattgttcttcagattggaaccaaaccattttacaagaagacttaaactcaagcttcataaggagctcacaagatcaagatcatggccaaggattcttatccacaactacttcaccttatatacttaatccagcttgttcttcatctccatcaacttcttcggcctcaagcttgatacgaaccttttacgatccccaaccaagtccatacaccttttgtctccaccacaagtgggttcaatcaacgatccctcaactttcttgggctaataagacaaatcctcatcatcaagtagcttatggac

SEQ ID NO: 128742 - DNA, 545 bp, Arabidopsis thaliana
  unsure (1)..(545): unsure at all n locations
agctacnnnnnnnnnnnnnnnnnnnnnnnnnnnnnnnnnnnnnnnnnnnnnnnnnnnnnnnnnnnnnnnnccacgcgtccgcccacgcgtccgcacatgtagatgcatcgctttcttttaatgctcttatttccctttagcgacaaccgtcccatgatgttcttcagatcattcatcgttttcttctttcttatctttttcgcatcaaatgtttcttcccgtaaacaaacctacgtgatccacactgtcacaaccagtaccaaacacatcgtaacttcactttttaattcactccaaacagagaatatcaacgacgatgatttttctctcccggagattcactatatttacgagaatgccatgtctggtttctccgcgactctcaccgacgaccagcttgatacggtgaagaacacaaaagggtttatctctgcttatccagacgagctcttatctctacacacgacatattctcacgagtttcttggtctcgaattcgggatcggtctttggaacgagacgagcctatcttcggacgtcatcat

SEQ ID NO: 128743 - DNA, 409 bp, Arabidopsis thaliana
tcgcattcccatcctaggcctaagcttgtctttggcctttgagaatttcgagaccaacactagagtacactttataacctctcaagttcctggttataaacttaaatttccaggatttgggacacttaagtaactcagtcacttcgcacataccattcaagcggatataatctggatttattggcttctcatagtcccaaccatgcatctctaactcaatccctgtctttttgatataggaaactaggcattgatatatggttagatacgtggcaatacatgagtggagacagtagctgtgagacgtggcaagagaagattggtcgatgggagtgttagaggaagaatcgagatgcagagatatatagctaatgaagatcatttgcagaagataagaagattttggatt

SEQ ID NO: 128744 - DNA, 463 bp, Arabidopsis thaliana
tgtttctttgcttcgtacggatttgaaggctttacctcaccggagcttccaagtagaagacgacactgagtcactgacacagggatacaaattatggcgccttttggcgggaaatctttagcggacgttgtttctggcatcggagggaatggtgttggcggggctctggctgcggtggccgccgctctgttggtccgcctcttcgctggacctggcatcgctctcttacctgaagacgaagctgaagatgattacgctgagacggaagacggtggtggtgattcaattcgtccggtgacaatccgttggaggaacatcacctgctcgctctccgataagtcctccaaatcggtgaggtttttgttgaaaaatgtatccggagaagcaaaacctgggaggttgctagcgattatgggtccttctggttctgggaaaacaacattgctcaaatgtttagcaggac

SEQ ID NO: 128745 - DNA, 613 bp, Arabidopsis thaliana
ctgggggacctatcattattaggaaactgtccctcagtccggccggattccggtcgacccagcgtcggatcttcatccctttcgcaaaccctagcagtcgaaagatcgaaatcgaaaacccctaaaacgatgaaggtgattgctgcatttctcctcgcgaaactcggtggaaacgagaatccaacctcaaatgatctgaagaagatcttggaatctgttggtgctgaaatcgatgaaacgaagatagatctgttgttttctctcatcaaggatcatgatgtgacggagcttattgctgctgggagagaaaagatgtctgctttgtcttctggtggtccagctgttgctatgggggctagaaggggggggtgttgttccttcttcggcggctgacccgttttctaatctataaagaagggtgaaaaagggaaggttattttctgacaagcaggcttgaaggtcctttttatgaacatttggaaaaaatgtccctaagaggcaaaaccttttgtttctgagggggttttatggagggatctttgtttaagggaaaacttggtttttgaagtgggttaagagtcgtgggggggaaaaccaaaaaaaaaaaaaaaaa

SEQ ID NO: 128746 - DNA, 502 bp, Arabidopsis thaliana
  unsure (1)..(502): unsure at all n locations
gatcttggaatctgttggtgctgaaatcgatgaaacgaagatagatctgttgttttctctcatcaaggatcatgatgtgacggagcttattgctgctgggagagaaaagatgtctgctttgtcttctggtggtccagctgttgctatggtggctgaaggtggtggtggtggtgctgcttcggcggctgagccggttgctgaatctaagaagaaggttgaagaagtgaaggatgaatcttctgacgatgcaggcatgatgggtctctttgattgatcatttggttagaagtttcgtttaaaggtcaagactttatgtttctgatgttggttttattgatggatctttgtttaatgttgaggcctgtgtgtctctggttggtttaatgatctttggtggtgatgactcaaaaaaaaaaaaaaaaaaaagnnnnnnnnnnnnnnnnnnnnnnnnnnnnnnnnnnnnnnnnnnnnnnnnnnnnnnnnnnnnnnnnnnnnnnnnnnn

SEQ ID NO: 128747 - DNA, 977 bp, Arabidopsis thaliana
gtccgacaatcttaaaagatgatatgcgcaagaatccgaccgctaatttcgtcaccactagctttcactatctcaacaaccaaacactccagaatcaatctccgattactccctcgccgctccttctccgtcatgtcttcttcaaccccacagagtcagatcatagaacacatcgtcttattcaaaaccaaagacgacgctgactccaccaaaatcacctccatgatcaacaacctcaacgctcttgcatatctcgatcaagtgcttcacatctccacctctcctctccaccgtatctcctccgctaccgccttcactcacgtactccatagccgttacgaatctaaagaagatctagcctcctacgctgcacatccagatcacgttcgtgttgttaaggaatctgtgttaccgatctgtgatgatatcatggctgttgattggatcgctgatcgaatccccggaaccgtagcgccgcttcctggttcggttgctaaactcacattgctcaaattgaaagaggatgtagcagatgaggcgaaatcggagattacgggagtgattaagggactaagtgagaaatttccagggattgatcagattactgttggagaaaacttttctcctgctagagctaaaggtttctctattgcttcgattgcgtatttcaaggatttgagtgaaatggaagctgtggatgctcagaaagagttggtgaattcgcaaaaggataaggttcgtgattatgtggattctaccattgttgttgagttcgttgtgccgtcttcttcacagtcttctagtctgtagaaagtttcaatttcaatcccttgaaagctttgggacctgtttgttatttgagaataaagaaacttgagtgtggtgatatatgcttctgtttcattatcttcttatctctcggtgaggaactctgttggaataagaatttttaagcactaaaaaaaaaaaaaaaaaaa

SEQ ID NO: 128748 - DNA, 678 bp, Arabidopsis thaliana
gagtatgcaaacgtggagggggctttccatgagaaaggagcatcgtacatcaagtgggcaggtcaaatggcggtcgggctgtaagaccggagtgccatggatcatgtgcaagtcgcccgacgctcctgatcccgtgatcaatacctgcaacgggatgaaatgcggcgagacttttcctggaccaaactcacccaataagccgaaaatgtggactgaggattggacttcattctttcaggtttatggaaaagagccttatattagatctgctgaggatattgctttccatgccgctcttttcgttgcaaaaaatggaagttacatcaactattacatgtaccatggtggaacaaactttggaaggacttcatcttcgtatttcattacaggatactatgatcaagctcctctcgacgaatacggtcttttaagacagcctaagtacggtcatttgaaggagcttcacgctgcgataaaatcctctgcaaatcctctgcttcaaggaaagcaaacgattctctccttgggaccaatgcaacaagcttatgtctttgaagacgcgaacaatggatgcgttgcgtatctggtaaacaatgacgctaaagccagtcaaatacaattcagaaacaatgcgtatagcttgagtcccaagtcaattggtattcttcagaactgcaa

SEQ ID NO: 128749 - DNA, 485 bp, Arabidopsis thaliana
cccacgcgtccgctctcacattattttctgtttggaatcttggatctttctttctgagatcattcgtcttttgtactgattttgagagatttcatttttgtttgtttaccgatccgccgccgtggatttttgttttccgatgacgatcaaagatgagtcggagagttgcggtagcagagccgtcgttgcttcgccgtcacaagaaaaccctagacattaccggatgaaacttgatgtctatagtgaggttttacagcgacttcaagaatctaattacgaagaagccactcttcctgatttcgaggatcaactttggctccatttcaatcgtcttcctgctcgatatgctcttgatgttaaagtcgagagagcggaagatgttctcacacatcagagattgctaaaattggctgcagatcctgctactaggcctgtctttgaagttcgaagtgtacaggtttctcccagaatctctgctgactctg

SEQ ID NO: 128750 - DNA, 551 bp, Arabidopsis thaliana
  unsure (1)..(551): unsure at all n locations
ggccgctggncgcctgcagtaccggtccggtttcccgggtcgccctcgcgtccgccttcttcactctctctctttctcgtgaaagcaaaacagatctcaaatctcgggagcaacaatggagtttctggtaacagttgcggaattcagcctctggctgctgctgatcgtcttattcggatttctatccgttgttgtttttgaagcttggagaaggagacacagtaacgtctctgtcgagaccgtgactacactcgacgatccgaaatctataaaaccgattccttgccctcatattaccgaccctgccgagaagtatttgtctttaatagttccagcgtataatgaagaactgagacttcctgctgctcttgaggaaacaatggattaccttcaagatcgtgcatcacgggacaagagtttttcttttgaggtggtgattgttgatgatggaagtgttgatggaacaaaaagagtagcttttgatttcattagaaagtacacaattgacaacataaggggttacccctcggggggttatnaaanggggggtt

SEQ ID NO: 128751 - DNA, 606 bp, Arabidopsis thaliana
  unsure (1)..(606): unsure at all n locations
aacgagcattagctgcttccttggaggataacaacatgaaagagtcttcagatgatcaatcaacaataatacctgaagaagtagcagttgaagcagttacatccgcggtcctgccaacattcccaccactgccggaagaaccaaagggaggcgatcgcagcctacaatgcagagttgggatccgtttacctaacggacaaagactccagaggaatttcctcaaaacagacacaattcagcttctctggtcattctgctattcccagcttgaggaatcagagaggaagaagccattgaagctaacacaagcgattccaggtgaatcaaagacattggagtatgaatctaacttaaccttggagcagtctggtgttgccaattccatgatctctgctacgtgggaatgaaatatcctcataacgagaaaattatctattatggtgtgtttgtttcttaaggtttatcagattagttgtttaattgtttttaaactcgacttttttttatgaaaagaagaacacattatggtatttgatttgcaatgaaatggaaaaatcgtctattaagattaaacacacaggcaaaccgctctagaggatccnagct

SEQ ID NO: 128752 - DNA, 466 bp, Arabidopsis thaliana
agcaaattttgaccaagcacatgttcagttgtttaaaagctttcatggtagcttttcacatcaagtaatggttcgtgatctccactacattgaaggttctaaagccatgccaaaggttttgccaacgttggatcaaaatgaaggtgtgctaaagcattctgctagcgttcaaagaggaagagaatttggaactaatctttggtttgatcttgttgataaaccgaatgaatggtgtgattaccgtgaaatgaaacagaatggatcggttaatcctaaacaccctgatttcaagaagaaagacgggagtcaagcgctttggcttaacaatgctcctacagagatattgtccgagctcaaagacgtgaagtttgatattccaaaatacgcaaaacatccaaaggccggagaggaatcatggaaggacttggtagataacatgaataagtggtgggacaatagagtggac

SEQ ID NO: 128753 - DNA, 1004 bp, Arabidopsis thaliana
  unsure (1)..(1004): unsure at all n locations
tgcaaacgtgctgaacttggttacaactacggtgtcatactgattccagaaggtctgatcgactttattcctgaggtccaagagctcattgctgaactgaatgaaattctggcaaatgaggttgtcgatgaaaatggtttgtggaagaagaagctcaccgagcaatccctgaagctgtttgatcttctgcctgaagcaattcaggaacagctgatgcttgagagagacccacacggaaatgtccaggttgctaagattgagactgagaagatgcttattcaaatggttgaaactgaattggagaaaagaaagcaagctggtgcatacaagggacaattcatgggacagtcacatttcttcgggtatgaaggaagatgcggcttgcccacaaattttgatgccacatactgttatgcacttggttatggcgctggagtactcctcaacagtgggaagaccggactaatttcttcggttgggaacttggctgctcctgtggaagaatggactgtaggtgggactgctctcacagccttgatggatgtcgagaggagacacggtaagttcaagcctgtgatcaagaaagcaatggtggaacttgaaggtgcaccatttaagaaattcgcatcactgcgtgaagaatgggcattgaagaaccgatacatcagcccaggtccgatccaattcactggacctggttcagactctctcagccacactctacttcttgaactcggggctcaatagtctctcgactaaccaccattcctttgcttttctgccttccttggaatttcgcatcagtcttgttttatcttgaatattacgtgtccgtaacatttcgattaagttgattcctctcgtgtttcttcaacatataagataattataatattatttctctcgtgtttcttccacnnnnnnnnnnnnnnnnnnnnnnnnnnnnnnnnnnnnnnnnnnnnnnnnnnnnnnnnnnnnnnnnnnnnnnnnnnnnnnnnnnnnnn

SEQ ID NO: 128754 - DNA, 481 bp, Arabidopsis thaliana
tcgagaaaatcaaaaaaaaaatttgaaaaataattttttctttgtaactgatctttccatacttttgattctctgtttcgcttcggcggaatcagagaatcgtttcaagttacaaattcgcaacaaaaacgtgttgtgatatcgagtatttattcgtttacggggaagaaacatttcaagtgagaaatgggagtgtctcaaaccgacggaagaatggaaggttggctttataccatccgacacaaccgatttggccttcaattttcccgtaaacgatacttcgttcttcacgagaacaaccttacaagttttaaatctgtaccatctgatcacaatgaggaacctgagagaagagcatctctagattgttgtattcgcgttaccgacaatggtagagagagcctccatagaaagattcttttcatattcacgctttacaacacttcgaaccatttggatcaactaaagttgggagcaagta

SEQ ID NO: 128755 - DNA, 462 bp, Arabidopsis thaliana
cgacccacgcgtcagattaattgtttttctctcttgattgagagaaaaacaaaggaaaaaatttgaaaaataattttttctttgtaactgatctttccatacttttgattctctgtttcgcttcggcggaatcagagaatcgtttcaagttacaaattcgcaacaaaaacgtgttgtgatatcgagtatttattcgtttacggggaagaaacatttcaagtggtataagcatttcctgattgtttgaaactttgaatcgtttaataaatttaaaaataagaaaaaaggatttgtagagaaatgggagtgtctcaaaccgacggaagaatggaaggttggctttataccatccgacacaaccgatttggccttcaattttcccgtaaacgatacttcgttcttcacgagaacaaccttacaagttttaaatctgtaccatctgatcacaatgaggaacctgag

SEQ ID NO: 128756 - DNA, 379 bp, Arabidopsis thaliana
cccacgcttctttgagcctcttgcagaagggtctaggaggcggtgatgacttgatggaaaaccaattgtcaaacgacgactactccatcggattcatggctgcagaagaccagaacatgtccctggttgaggagcagttcaggctgaatattgatgagcttctagaagagaatttggatttctggttaaggttcagcacagcatttggacagatacagagctacgacacttcaatcgaagatctacaagccgagatatcaaagctcgagcagagaagaaagcaagatggaagcagcacagccaaatatgccctgagatcagatgttcgaccactgtatgtacacttaagggaaataaacacagacctgtggctctggct

SEQ ID NO: 128757 - DNA, 452 bp, Arabidopsis thaliana
gaacatcttgctgccgttgagattatgcaacttaagcatatcatcatccttcagaacaagattgatcgtattcaagagaatgttgccattaatcagcacgaggcaattcagaaatttataatgaacactgttgctgatgctgctccgatcgtccctgtctcagcacaactgaaatacaacattgatgtggtgtgcgagtacattgtcaagaagatcccaatccctgagaggaattttgtgtcacccccaaatatgatagtgattcggtcttttgatgtcaacaaacctggttatgaggttgatgagatcaaaggtggagttccaggtggaagtatcctacggggtgttttgagagtcaaccaatttaatcgaattccgacctggtatcggtaccaaagacgagcgtggcatctcaaaatgcactccaatttactcttgatttatttactttt

SEQ ID NO: 128758 - DNA, 447 bp, Arabidopsis thaliana
  unsure (1)..(447): unsure at all n locations
ggcgcctgaggaccggnccggtttccggggggctcatcctccgggccgatctctcatttcagtaatgagtcgtctctaaaattggttttcgttccccgaggaggtttcttccctagtagaccataagatcgctgagaatatgtcgtggctgcgaacggccgtgaatcaggctgtggaggtcggaaaccgcaaaaacatcacacgaaccgtcaaaaactatgccgactccgtcgtccagcacgctggccaagccgtcgctgaaggagccaaattgttccaagaccgcattggtgttggggcttataagagtgttcatcagacaattcagagattggaagaagctgcagtctcatatagaggtcaagaaagggcattgctgattactagatggctaagtgtgcttaacgagattgatagagctactgacagttctctaaaggataaaca

SEQ ID NO: 128759 - DNA, 462 bp, Arabidopsis thaliana
aattcaggttaccttcaagttacaaattgagacaatcttgttctttgtttgttagattaccttctattcttgattgtgttttccgaagattttttagaaccaatccacttgtttttcctaatacaggggtggtgttttcgtggtggtaaaaggataaaatttcttgagaatgcctgcatacatttctgaggagaagttgttcttcaacaagaaacctttcggatccaaaatctcagacagcaacgaaattgaagaacttgatcaagagaatttggttgtgacaagacaagaagttaatgatgattccaaagtggcaccgagagatgtagtagctacatcaacaagtgtctctaagaaggctttaaccttgggagatattttatcattggaggattcccaaagcccacccaacaaaaacaacactaatggacctgaagaaaacatggtccatcataacccaca

SEQ ID NO: 128760 - DNA, 393 bp, Arabidopsis thaliana
  unsure (1)..(393): unsure at all n locations
cggtgaatagtcaccaccgattacgatgacgtttctaaatgataatgattgtatcagtcaccaaacgacgcagcgcccaaagctgatagaagacaagtgattggtgtgaaagagtgtggtgaaacttatgttctggcagagtataagcctatatatgttcatcagctcgtccttgtccttgcaactgctatacagctgggattgtgtatgacattgaaggatgttgaatatgaaggaagattagatggaatctttgtgatgttttgaatcttgtttgtagcttcatataaaattatgattatgtaaagtcttatgtgtaatcaaatgtttaactttttcctttattcaacaaaggatttgtatcgataaatataaaataataaaagagcnaaa

SEQ ID NO: 128761 - DNA, 414 bp, Arabidopsis thaliana
  unsure (1)..(414): unsure at all n locations
gacccacgcctccgcggaagcgtgaggttggcggtgttgggtgtaacgagcgtttgcaggaaatgatgaggactatgtgctcagaacgtgatggtaagctgtttgcaacagatgaccgttactgcatcgataatggagctatgatcgcttacacaggtctactcgcgtttgttaatggtattgaaacaccgatcgaagactctacctttacacaacgatttcgcacagacgaggttcatgcggtgtggcgagagaaagaagctgtactacttggggataagaaagttgcagcgaattgagtctgtccccatttttgttcatttttcatcaaatttgagattgaatctctctctactcgataaattggtttttgctaagtagttcgggctatataatanaaaatnnnnggncgaa

SEQ ID NO: 128762 - DNA, 459 bp, Arabidopsis thaliana
aactttattgtctctcttcctttccattgcccaaaaagaaacagaaacttttctccgagaatcctcatttctccgttgaaaaaaggaccttgagaggaaatgtttcactgtttctagggttcttataatccacttcctcatcattagagaatggaaaatctcctcttctctttgatatttcttcggatttcgcttatgtcctgaatctcttgaagacccaattgaaaaaatctcaactttttttctcccggcgtttccggcgatatacaatgcggattctcgtgaatctcattctcttctccttgattcctctggcgttctccaatgaaaactccagctcgtatctcattgcgcgaccattgatcttcgaaacccagctcaagaacataaacgacaatgtcaatctacattgcacgagctggagattcgcggcggagacaaacaatctcgctccatgga

SEQ ID NO: 128763 - DNA, 733 bp, Arabidopsis thaliana
  unsure (1)..(733): unsure at all n locations
ttccaagcgtcagtgaaaaccaaaaaaaaagaagaagatcaaaaaaaaaaggatgtcagaagaagaagtggtggtgttgaacttctggccaagcatgttcggagcaagagtgatcatggcattagaggagaaagagatcaagttcgagtacaaggaagaagatgtgtttggtcagaagaccgatctattgctccaaagcaacccggttaacaagaaaattccggttctcatccacaacggtaaaccggtatgcgagtccaatatcatagtcgaatacatcgatgaggtctggaaagacgataagactctccgtctactaccttctgatccttatcagaagtcacagtgtagattttgggctgatttgattgacaaaaaggtttttgacgctggaagaagaacgtggacaaagaggggcaaagaacaagaagaagcgaaacaagagttcatagagatattgaaagtgttagaaagagagcttggagataaggtctacttcggaggaaacgacaacgtttcgatggtggacttggttctcatctcctactacccttggttccacacatgggagactattggtggttttagtgtcgaggaccacaacttccaagctaatggnctggatccgtaaatncttaacccggcccggttttctngaaatntttacctgnccccttaagntttttnatccggncccttagtncaaaaaggnccngggttttntntggtnttt

SEQ ID NO: 128764 - DNA, 470 bp, Arabidopsis thaliana
ttagatattgactaaaagtcaaacagtcgttaccggaatcaatggccgggattaaaacttctccggcgacgattaagctcttcaccgttctattcctcattctcacaatctcatctccatcacccaaattcgtaaacgccttcactttcccattttccttcacacaatacaaaaccctaatctcaatctcacgatcactcctcctccgcgtcgcaaacctacgcgcttcacgtggagacgcattgggttcgtctcgtgtacgagcaatggctgatgaaatcgatcgtggattagggttagggtttataagcagagcttggtctgttggttgggattatatgtggaattacgcttggagaaagggagggattgactacggtgagatgtatggtgcgattggtgatctcaatgagcttatgggtttagtgactgagtttaatagagctgaatctaatgctgataaagctagc

SEQ ID NO: 128765 - DNA, 640 bp, Arabidopsis thaliana
ggtcgaccacgcgtcagtacaaatacactttctgtctcactcaataaaataggagatctaaaatattatgacgaagatctacaagctgcaaggtcgtattatgatagagctttaaatgtcagacgtgatgcaatgaagcaccacccaaatgctccttcacaaattctggatgtggctgtttccttagccaaagttgcggatatagacaggactctacaaaatgaagttgcagcgacagatgggttcaaggaaggcatgagactgctggaatctttgaaactggactctgaagattctgctctcgagcaacggcggctctctgtactggagttccttaagaagcaagtagaaaccgatgctgaaactgcactctaaaccgatgcaggcttaagtacgtatatagaaattatacctaagttctcgtctgtggcattttgctgaataaagaaagcaaaaatgttgtatttgcgctcaagggacaaagaaacagagttgtctgtatgttgtgaattgtgatggttttcaactttcaatgcactaatcttgcaatgttaaattgttaagcatgattgtactctatgcacttgtgaaatttaaaaattaagatatcttaagcggctacagctgtgaactgctttct

SEQ ID NO: 128766 - DNA, 714 bp, Arabidopsis thaliana
tcgacccaggcctccgtttaaattaaagatgggtaaagacgaccaccacgagcaagacaaaagattcttctcacatcatactcatcacggccatgggtatccgccaggagcttatcctcctccaccgcagggagcttatcctccaccgggaggttaccctccgcaaggttatcctccaccacctcacggctatccaccggccgcttacccacctccacccggtgcttatcctcccgccgggtatcccggaccatccggtcctcgtccagggtttggaggaggagttgggggattgatagcaggagcggcaacagcggcagcggctgcaatgggaggtcaccatgcgggtcatcacggaggctacgggcaccacggccacgcaaaatgcaaaagagggtttttcggaggaggaaagtacaagcgaggaaagcatagtatgtttggtggagggaagtacaagcgtggcaagcacggtatgttcggaggcaaaagaagcaagcatggcatgttcggagggaaacgaggcaaaggcatgttcggacgaaagaagtggaaatgatccattagcatcctctctacatatattatcgtaacaatttaacattaagcttaatataaaaatgtggatgtataatttgttttatatgatgtatatatagctatatgtatctatgaagagaatttaacatggttgaaatatttttcttactgatt

SEQ ID NO: 128767 - DNA, 811 bp, Arabidopsis thaliana
cgcctgcaggtaccggtccggaattcccggttcgacccacgcgtccgtacggctgcgagaagacgacagaaggggaaggcaaaaaggatttgcttttacgaacagagagcgagccagagagagtgagtaagagagaatgacgagcgtgagtgggtgtggttcagtgagtctgataactaaccgcagtgcgttcttgggaaacggacttcaacaccgtgccgttttccttaaaccatggtcgtcttcttcgcttcagtctcggtccatggttgtcgaagccaaaaccaaaaccagcagcgaagacagaatcgcccgccactctcgtatccgtaagaaggttaatggtacaacggagaggccaaggctatgtgttttccgatcaaacaagcatctttatgttcaagtgattgatgataccaagatgcacaccttagcttcagcttccactaagcagaaaccaatctctgaagagttcgactacacctctggaccaaccattgaggtagcgaagaaagttggggaagtgatagcaaaatcttgcttggagaaaggtatcacaaaggtagcctttgaccgtggtggttacccttaccatggacgtattgaggctcttgctgctgcagcacgtgaacacggtcttcagttttaaccgtcgttttctttccttgtttctttccgatgaacagcagtgtatgaatgtagagaacccattttccccaattgaaatgttgagatttttttaaaaaaaaaaaaaaaaaggaataacaaagaacagcggacgctctagaggatccaagcttacgtacgcgtg

SEQ ID NO: 128768 - DNA, 959 bp, Arabidopsis thaliana
  unsure (1)..(959): unsure at all n locations
tgcttttccttcaatggagtgagcaccaaaagaaacttagcaattttataaggttattttttatttcggtccaaaaagtgtgcatattgacaattttatagaggcaaagataagtttccattcacgtgcatacaaaggcaatgtttggtgctataggtagaaattggtagctgatataaaggtttctgtcaaaacttatttaatttgatttgcatgtggacgggtgtttcaggactaaagcagagccacggatatactatgcaccagtgaagcctttggaagaagatacaagtgaggtagaacaacagaaagagcggacattcttagaatggaaggcagcaaggagacaagaagtgagtgagtatcaaaaggagatagaagagcagtgtctgggtaatgttgagaaagagctggagaggtggcaaaacgcaaggaaggcaaggaaagcaaacaacgagggtatgaatttgcaggaaacgatggacaaggaattagagactcataggatggagcatgggccaaagaagagaaagatacctggaggaggagtaggagatgaagatgaagaagatgaagtagaggatatcaatggtggagaggatgaaatgataatggatgatttactggaggagggaggagatggaaccatcaaggaggaagtggcaactgatacagttaaagcagaagcagtggaggaagatattaaacatgaggttctctaagtcatatagtttgtttgttcttgaaatttggtggagtttgcgagttagaaaactggtcaaatctattttggagcgttgtaacgtgaattatggtaatttctaggaaagatttgcctttgtgctatataatttgttttgtttnnnnnnnnnnnnnnnnnnnnnnnnnnnnnnnnnnnnnnnnnnnnnnnnnnnnnnnnnnnnnnnnnnnnnnnnnnnnnnnnnnnnnnnnnnnnnnnn

SEQ ID NO: 128769 - DNA, 713 bp, Arabidopsis thaliana
gctttcgctttctccatgttcaaacaaagaaagctcgtgaagaggcacgcagctgagatcttcacatctgtgatagtttcaacggtattctcgctctactccactgctcttgttggacgtttagtcggtttagaaccttctttaacggtttcaatcctacctcgctgcatcacggttgcattggcccttagcattgtatcactctttgaagggaccaattcgtctcttacagcagctgtagtcgttgtgactggtctgattggagctaactttgtacaagttgttcttgacaaactgcgtttacgtgatccaattgctcggggaattgcaactgcttcaagtgctcatggacttggaacagcagctttgtcggctaaggagccagaggctcttcccttttgtgcaatagcttatgctcttaccggaatcttcggatcgttactgtgttctgttcctgccgtccgacagagtttgctagcggtcgtcggctgaggattgatgatgtggcgaaacacgattgatggtctcaaagctggcgagttacttaaaatatgagagcagtttgctttggatgccaaataagcttgtattaatgaaaaagatgatggaaaatgtttatttattttattttatatatgtaaatgttgtgagatttgtacaacatacataaattttatataggagtaggatgtcccagctttccaaaaaaaaaa

SEQ ID NO: 128770 - DNA, 511 bp, Arabidopsis thaliana
aggcgattctcttcaaaggctacaccggaggcgatttggagtttaatcggaaccactcggacgagtctccgatgtagaaacgaggaagattacttcaattgagattaagaggcatagagagagagatttgtgtattcgatcgaatcaagcttgggtttgttagtaatggcgagaatagctatagttttagatctactgaagaaatctcaatccaagcacagtcttcactcatcttccttctcttccgccgccactgctccctttgcgtctaggtttctattcggttctttcgagcctcgagtttcgtatcgtggtgttgctgctggaatagacgatgattaccttggtgctatacggaaaatgtctgcggatggaaacttctaaagggtaacatcatctttaatatgatttcatttaaagaaaatgtcatgctttatttattaattacactactaaatgatataatttagtgattatgtagaatgcttaatttcttggtgatatataagaa

SEQ ID NO: 128771 - DNA, 581 bp, Arabidopsis thaliana
  unsure (1)..(581): unsure at all n locations
nnnnnnnnnnnnnnnnnnnnnnnnnnnnnnnnnnnnnnnnnnnnnnnnnnnnnnnnnnnnnnnnnnnnnccacgcgtccgttcatcaaatgttgtacgagagaatacaaacagcaaagaaacattcagaaaagaaatggaaggctgcagataacacgactcctgattcttatcccaggttcatggatgcactctataatttacttgacggttctattgacaatacaaagtttgaagatgagtgccgagctatttttggagcacagtcatatgttcttttcacattggacaagctagttcagaagtttgttaagcatctccattcggttgcatctgatgaaacagacaccaagcttctgcaactacatgcgtatgagaactacagaaaacctggaaaattctttgatctagtgtatcatgagaatgcatgtgccctcctccatgaggcaaacatatcccggatcagatattcatcagaaggaacacgtctctcgattcagcttatgaacagtgggaacaatcagcttgaagtaatgggtgtagcgatggagccggcatttgcagattatctacaaaataaat

SEQ ID NO: 128772 - DNA, 439 bp, Arabidopsis thaliana
  unsure (1)..(439): unsure at all n locations
gggctgcgaacccaattctcgtcgtcttcaaactcagttttccgaaaccccaagcaccacaaggattgcatggcctgaagaaccacttaatcgagaattgtgctggaattcgcaaattttccctcgcgtttttctttcacactctcggaatcggaaatttccaccaagctccgtcaagcgatagattctgacaattcctcgcgtgcgcgcagtgaatatgaagaaagatgaaaacattggtttgacggggagaaccatttacaccagatccctagcagcttcaattcctgcctcagttgaccaagaaacccctggtttgaggaggtcaagccggggacaccatctacgaaggtaataactccagcttctgctactagnaagtcagagagactggctccctcacctgcttcagtttcaaaaaagtccggtggatcgtcaa

SEQ ID NO: 128773 - DNA, 583 bp, Arabidopsis thaliana
tatacgactcctataggggacgctggtacgcctgcaggtaccggtccggattcccgggtcgacccacgcgtccgtctctctctctctctctctctctctctctctctctctctctctctctctctctttttacttcttcttcttcactttctctctgaatctgccgtcacgcggaagcttccgattcaaaacactctctacatgcattgttggtgtacaactacaacactatacgacgagtcttcaagcttccgcgtcttcttcctcttttgagaatcgcttcttctttcctccatcgttggttcacgattctctctgcaatgagtgatttcttcgatgaggggaagcagcaattcgcaagtgttgctgatgggaatgcaccacttaagtatccaagcttcaagctacctaagtcgactttcgagagatcctggcaaacataccgccaatggtagaagctaaataaggaggatgctcttctaaatcaagggttcatgaaccaaaggaaattcatggctaaggaagaaacgggacctgccgtcttttggaatgcaaaaggtttccccacttcctggaaaggagg

SEQ ID NO: 128774 - DNA, 670 bp, Arabidopsis thaliana
  unsure (1)..(670): unsure at all n locations
cgcccccgtgctcgtaagtgcnctccnacttctctccctcnnccctcacttgcgttctcctctcctcctcacgccaccacatcgcnccgccgtctcagctgtncaccgctctatggtaagacccgtggtaccngctcactgatcgcaacgtcctaccgccttttccaggctcgtctctgttctcatctttcccaacacttcgaatttcctcgagagccttaactcttacgtccgtgagaaagaagcgtctatgatcttgaaactagctggtgggctctgtgttgtaatcttttgccttgagtggatcgttcttgttctcgcctttttcttgaagtactacgcttatgtcgatggtgataacaatggagttgctatgaaaaggactggtaaggttcagagtgaagagactctcaaaaattccccatgggcgttccaagtttgaagaaaaattcacttcttgtaatgattttgtttaagagaagagaggttgtatcaaatgttagtttgatctgtgtttcagggtttggtttatatgtattgaagaattgaattggttgattactttgttgatgaaaaaaaaaaaaaaaaagggcggccgctctagaggatccaagcttacgtacgcgtgcatgcgacgtcaagactcttctataggtcacctatagaatcg

SEQ ID NO: 128775 - DNA, 482 bp, Arabidopsis thaliana
gaaaacccgggccgagccacgcgtccgcttcctttcttcttcgcaatctcaaaatccaaaattttctgcaacccgaatcagaaacctccaacatcgtcatgggtttaattcctcaaccacaagaatcgatccaagaatctcattactacacacataaactcttcctcactgcaaactacgtcctcctcggtgcatcgtcaagctgcatcttcctcactctctctctccgtctaatcccttcactctgcggtttcttcctcatcctccttcacgccaccacgatcgcagccgccgtctcaggctgtgcagccgcatcttatggtaagaaccggtggtacgcagctcacatgatcgcaactgtccttaccgccattttccaaggctcagtctctgttctcatctttaccaacacttcgaatttcctcgagagccttaactcttacgtccgtgagaaagaagcgtctatgatcttgaaactagct

SEQ ID NO: 128776 - DNA, 462 bp, Arabidopsis thaliana
gggcgacccgcgcgtgcggcgaaattctctgatctctcttcattttattttccctctacatctctcccaacgatttccaaatctcacttcactttggctcctccacctgaatccatggatattgcttcgtcatctctctcacaagctcacaaagtcgttctcacgcgtcaaccttcttcccgggtcaacacctgctcccttggctcggtctccgctatcggattctctcttccgcagattagctctccagctttaggtaaatgtcgccggaaacaaagctcttctgggttcgtgaaagcttgtgttgctgttgaacagaaaacccgaactgctatcatcagaattggcacaaggggaagtcctctagcacttgctcaagcatacgagacgcgagaaaagctcaagaagaaacaccctgaactcgttgaagatggagctattcatatcgagatcattaaaacg

SEQ ID NO: 128777 - DNA, 482 bp, Arabidopsis thaliana
caggtctcatcgactcacttatggaaagctggtacgcctgcaggtaccggtccggaattaccgggtcgacccacgcgttctgccacgcgttctgtgagtttgaggttggacggatgacacttggacggttgctagctttaggctataatgttgttgtgagttacaagagagcttcaactgctgtcagttatgggaatttatccctatcacgtgaaacgattgatactcttggagagactttccatggttctgagagggacagataggaagagtgtgggagctgaagctctgagaatgggcatcactgggccctggatcaccaaatcatacctcgaactgatccttgaaagcaaaggtgtaccacccttgaatacaccttcactgttgcaaacctgtactggtatcactaaccaagagaagcaaattgtttctccaaaaactatccgaactaccccaaacatcgttacccggcttgaggattt

SEQ ID NO: 128778 - DNA, 423 bp, Arabidopsis thaliana
tctctttcttcttcaatggcgacgaaactcatactcaagaaaacgacaaaatccatcagccgtcaccaacgtaactacctccgccgtcaccggaaatctcagatcggatgctcaccgtctccggccacaaccaccgtaatcgccaccatcaacaaatcgatctacagatgtcatcgaacttttctctgtttgttttcgcgtcacgcaacaaaaggattcaaaatcctcaaacctcgcgaagattttcagaattctccgtattcattgtttcacgaaagatctggtaaatcattcgacgagacgaacaagacgatcgtgttagatctagacgaaactcttgttcattcatcaatggagaaaccagaagtaccgtatgatttcgtcgtgaatcccaaaatcgacggccagaccttaacgtttttc

SEQ ID NO: 128779 - DNA, 648 bp, Arabidopsis thaliana
  unsure (1)..(648): unsure at all n locations
accacgcgtccggaagaagatagctcctgaagacaaaaatggcggtttctctcccgaactcgtttcttcagattagcccatgtgttccttctctgcaattaagaaagccggtgatggcggcagtgaaaggaggaaaacaatcggtgagaagaagcagcaatacggtggttcagataacgtgtcgtaagaaggaattgcatcctgaattccacgaagacgcaaaggtttactgcaatggagagctggtgatgactacaggaggaacaaagaaagagtatgtggttgatgtatggtcaggtaaccatccgttttacctcgggaatcgttcggctttgatggttgatgctgatcaagttgagaagtttcgtaagaggttcgctgggctttctgagattatggagattcctgtgctttaaagggagaaatccattatgcctactaagaaaagtaaagggcccaaagggnagaagaaatgnatgaggccttttcctggtaaaccctatgnctttgnaattggtggccttccaattgaagccgngaactgcttagcncggcccgaattcccngcttccattacaacnaatgccgaccaagaaccccttaaaaaaagnttnaccaaggggaaacaancccccccctttttgnngc

SEQ ID NO: 128780 - DNA, 339 bp, Arabidopsis thaliana
  unsure (1)..(339): unsure at all n locations
ggttgatgtatggtcaggtaaccatccgttttacctcgggaatcgttcggctttgatggttgatgctgatcaagttgagaagtttcgtaagaggttcgctgggctttctgagattatggagattcctgtgcttaaaggagaaatcattatgcctactaagaaaagtaaaggtcccaaagggaagaagaaatgatgagtcttttctggtaaagcttatgtctttgaatttgttgtcttttcaattgaagtcgagatactgcttaggctgttaaaaattgtatgtgaaatttccttctgaaatgctattggttatgctttcctttaaggaaaaaaccatnt

SEQ ID NO: 128781 - DNA, 871 bp, Arabidopsis thaliana
  unsure (1)..(871): unsure at all n locations
gcaggactatgagtctgatttgacaaaactcttcacttggacgtgcgaaagatgcaatggtttgacaaaggatttcgaagtaatagaggtcatatttgacgttgaacactgcttacaggcgtatgttggggtggctaaggatttgaatgctatcattattgcatttcggggaactcaagaacacaggttttattctagtcattgtaatctaaaagctactccttcgcataaacttggttaatgcttaatcaatccaaaacttgtgcaccatacaaaattgggtctcagacttgttctggaaacagctcgatctgaattaccctgacatgccagatgcaatggtgcaccatggcttttacagtgcttatcacaatacaactttacggcctgcggttttggatgcaataacacgagtgagaaaagtctacggggcgaacatcaacatcatagtgaccggtcattcaatgggaggagccatggcttccttttgtggtctagacctagttgtaaatgaaggtgaagaaaacgtacaggttatgacatttgggcaacctcgtgttgggaatgccgcttttgcatcttattacagtttgcttgtgcccaataccttccggatcacgcatgaccgtgatatggttcctcatctgcctccttactattaccatttccctcaaaaaacataccaccacttcccaacagaggtgtgggtgaaagatttcagtttttcgaattttgttctttttggtttggagaaagtttgtgacaacactggtgaagatcctacttgcagcaggtaactatcaatccctctgaaacaacttactgatataatttctctccactacattagcaaggncaaacttccaagtcg

SEQ ID NO: 128782 - DNA, 387 bp, Arabidopsis thaliana
ggtagaagtctggagaacatagtcaaaagtaacgctatagctctactcgccgaaacgtccagcagttgatgtggctgaggtctttctttggcttatggctgtcggtaccattttatgtgcttcttactggtctgcgtggaccgtcagggaagaagctattgagcaagacaagctgctaaaggacggctcacatgaactttttgcagttagcaaccaccagctctagaggtgttgttgaggtcaccgtgatatcagcaactttgtcttgtagcggcggcttctggtgtccctgatcaatgctctacaacgcttatgtcagtctggtttatatacgtgttggtggtactcttttgcatacgtggcgtacatgggctgcaaacttgtttg

SEQ ID NO: 128783 - DNA, 446 bp, Arabidopsis thaliana
cggtcgcgtgggcgcaaaggaatgggtgaagaggggagacttaggacacacgaaagtgtatctacacatcaaaccaatgtttggaggcactttcactgacattgtcgtgtggatattctaccctttcaacggtaacgcccgcctcaagtttttattcttcaagagcctgtcgctgggggatatcggcgaacatattggagactgggaacatgttacgttgcgcatcagcaacttcaacggagagttatggcgagcatacttctctgagcacagtgggggaactctagtggaggcatgcgatcttgagtttcaaggtggaaacaaacttgtgagctactcgtctcttcacggacacgcaatgttttcaaaaccaggacttgtgttgcaaggcgatgacggaaacggcataaggaacgacatggcaagaagtaacaaattctttgacg

SEQ ID NO: 128784 - DNA, 485 bp, Arabidopsis thaliana
catcaccgtcgttattacactaaccaatcggctttcatcgccggagaactgattaacatataagaaaatggcgtttgctagagcagtgagaagaccaattggagtcttttattatagtgttagtagtagatttagttctggaaatgagtattctactgtggcaagcaaattcgaaactttgtctcagtacaaaagctctgtaccgtctggttacacaagccttgttcgtggttttgggaatttcatacggagttttagttcggaagctcctcctgctgtatctgaccaaatgagtcttattaagcaacttagggaaagaactagtgctcctattaaagatgttaaggcttctttagttgaatgcaattgggatcttgaggctgctcagaaggatttgagaaagagagggaaagttttggcttcgaaaaagtcgtcacggactgctgcagaaggaatgcttgccgctgctcaaaatgaagggaaag

SEQ ID NO: 128785 - DNA, 495 bp, Arabidopsis thaliana
gttttctagatttaagcactatctaagaaaaacaaaatcaaactcataaagaataatgggagaaacagaagagaaagtgaagaaccatgataacaaagaagaggaacacaacaaggctgagaaagctgagaagaaggacaagaagaaggataaagataacaaggataagaacgaggacgataaaaatggtggaggagaagaaggggaagatcaagagaagaagagcaagaagaaagataagaaagcgaagaaagagaagaaccctgaagataagaaagatccagagaagttgaagatgaagcttcagaagattgacgaaaagattcaagctatggtcttaaagaaagatgagattgtgaagcttattcatgatgctgaacaagctaagcctagtactgctgcagtagatgcaccaccaccaactaactaattcagatacacaaattatatactacaataagttaactaatatatttgtcaataacagatgctgct

SEQ ID NO: 128786 - DNA, 442 bp, Arabidopsis thaliana
tgtggtatctaaatgtcgaacaccgtcgaagatgacgacgacgacttccagatccctccttcctcacagctttcgattcgaaaacctcttcacccaaccaacgctaacaacatctctcaccgccctcctaacaaaaagcccagactctgccgttacccgggtaaagaaaatgtgactccgcctccttctccggatccggatctcttctgctcctcttctactcctcactgtatcttagattgtatcccatctagtgttgattgctctctaggagatttcaatggtccaatttcttctcttggtgaagaagataaagaggataaggacgactgtataaaggtgaatcgtgaaggttatttgtgtaattcgatggaggctaggttattgaaatcgagaatttgtctcgggtttgatagtggaatccatgaggatgatgaaggtt

SEQ ID NO: 128787 - DNA, 437 bp, Arabidopsis thaliana
tggataattaaagaacaccaacaacaacaaaaacagaggaagaaaataaaaaccaaatttttcttgttgcaatcatttgaaattaaattcaattcttcgattcttccgagctggttctcgaattgggtttgctgcaaattgtgaatccaataaaatttgttcgtgttgttgtgttgatggtgatttgttagggttgatccgatcaaaatttcaattttgtatcgtaaaacgatgaggtttctaagcctcgtcggaaactcattcggttgttctgcgtccggcgaacgcttagtatcagcggccagagacggtgatttacaggaagctaaagctctcttagattacaatccaagactcgctcgttactctacttttggcgttcggaactctcctcttcattactccgccgctcaaggccaccacgagatagtttctct

SEQ ID NO: 128788 - DNA, 979 bp, Arabidopsis thaliana
  unsure (1)..(979): unsure at all n locations
ctgcggtaccggtccggaattcccgggtccaccctcgcgcccgctgcaacaactctcaattcctccattttcacacaatccaaaacccatggattcttcaatacccgacccgtttaccgaaaacccttcaccaccatcacctccgctttaatccccgcttcaaaccgtcaagctccaccaaaacaacaactctatcaaccattccgtccaccaccatcaccaatccctccaaagttccgatcactcgacaccgccggaaaaatcgaagtcctcgctgatcgtctcggtctctggttcgaatacgctccactcatttcctccttatacactgaaggattcactcctccatcaatcgaagaactcaccggaatctccggtgtcgaacagaacagtctcatcgtcggcgcgcaagttcgagactctttagttcaatccggtgccaaaccggagcttatagctgcgtttgacacaaatggagccgagcttctctacgagattcgtcttttaaacacaactcaacgtgtagctgctgctgaatacattgttgatcacggtttcgatacgaaaggagctggagatcttgcgagagcgattaaagattttccgcatcgtcgtggcgacgttggtttgggagactttgattataacttacctggagatggttggctttttatgctttataggaaaagtagagagcatcggagtccgtccggagattcgaactacatttactcgaacaagctcttgaaaccgcggtaacagagaaggcgaaaaaggcggtgttgagggagttacatggagagagtgaagaagagagagttaaagangaggagataaaaatcattcgtgttcctgtagtgagattaaggtttngngaagtagcgggacnaagttcngttgttnttttacccggtttntaaagcagaaganggagaagagaagctnctttnaagnaccaatggagtttttaaaantngag

SEQ ID NO: 128789 - DNA, 590 bp, Arabidopsis thaliana
  unsure (1)..(590): unsure at all n locations
ctgcaacaactctcaattcctccattttcacacaatccaaaacccatggattcttcaatacccgacccgtttaccgaaaacccttcaccaccatcacctccgctttaatccccgcttcaaaccgtcaagctccaccaaaacaacaactctatcaaccattccgtccaccaccatcaccaatccctccaaagttccgatcactcgacaccgccggaaaaatcgaagtcctcgctgatcgtctcggtctctggttcgaatacgntccactcatttcctccttatacactgaaggattcactcctccatcaatcgaggaacttcaccggaatctccggtgtcgnaccaggaccagtttcatcggtcggccgggcaagttcgggccctctttaggtcaaatccgggtgccaaaccggngcttttatagcttgggtttgacaaaattggggccggggttttttttngggggttnggttttttaaacaaaatttaaaggggtaggtgcttgctggataaattgttgatcaagggtttggtncgaaggnntggngtttttngggggttaaggtttccgnattgngngggggtggttt

SEQ ID NO: 128790 - DNA, 657 bp, Arabidopsis thaliana
  unsure (1)..(657): unsure at all n locations
gnaagntccngctcataacgatgcgtntccactactcattcctctgtttttcattttcccancaccaaaacaaaaccaagannccaccaatactcgtttccancttttcgtctcatcttactttacatctctcttggtgttcttgttgctgctcacagcaaattgttnncacttgggaaattatacgcaaactttggcgtcttcacgctgatttccgcgactcagttgatatttaccgctattttcgcagccattattaaccgttttaagttcaccagatggattatcttatcgataatcggcagcattttgatttatgttttcggtagtcctgaatttggaggagagcctgatgaaaacgaagaattctacagcatccaagcttggttaactttcgctgcttcagttgctttcgcattatctctctgtttattccaactttgtttcgagaaagtgttggtaaagacaaagagatatggtaacaagaaagtgtttagaatggtcatagagatgcaaatttgtgtctcttttgtcgcaacggttgtttgtctcgtgggtttgtttgcgagtggcgagaataaggaactgcaaggcgatagccacagggttttaagaaaggggaaaccgtattacgttttgagtttgatcgggttggca

SEQ ID NO: 128791 - DNA, 541 bp, Arabidopsis thaliana
caaaaataagggagagggcaaaagcgtaaataacaaaagtcgatgacgagggccaaagccccaatggaaggtgttaagctaaactctcttcttgtctgatatttcttctactctcaagtctcaaccacataaccaataaaaaatgctactaatcccaatttcttcttcttcgtcttcgtctattagccctcctcctaattcatatccatcgaatcatcactctctgtttttctccaatctcacattcccaattcaacatggaagtagaaagttgaagactttgcgactcagagccaatttctgggagtcaatccgatctgggtttgtgaagaataataagtagtacggcaacttgtggaaccaccttctatagtcaatgatgaagaagaagagactgagccattgttacctgcggaatttactttagttgagagaaatcttgaagatggtttagttgaagagatcatattttcttctggtggcgagattgatgcttatgatcttcaaggtctttgtgataaggtgggatggccaaggagac

SEQ ID NO: 128792 - DNA, 509 bp, Arabidopsis thaliana
tggtcttttcgaatgtgatttttggttgatgatgatgaggctagttcaagtgtcttccagtgaatccatttcttctatttgccctcccgccccccggaatggtggagttctctacttgaagcgtggttctgtctgtgtatgtagagtcttgaagccgaataaagttgctctcaacagtatgattctttcagctatgaggacttgctcaatctctgggttccatactcatcttccgaagtcaagcggttcagtttcttcgagaaagaggttttcttctactgctttatcactcatcactcaaaccatttcaccatttgctcatccccgttcatcagtaattgtgtcaagccttctctccccatctgatatccctcagaaatctgaagaatggtttgctttaaggaaagacaagttaaccacaagtgcattcagtacagcgctggggttttggaaaggaaaccggcgtgccgagctctggcatgaaaaggtttatgattcagatgcacgag

SEQ ID NO: 128793 - DNA, 590 bp, Arabidopsis thaliana
tggttcgcgtggggcagatggaagcgtttcgagctgcgttgggtttgcctgatcagcaacaggtggctgaggagggtattattgatgatgagccgatgagggagggttttgaaggtagattgaaagagaggcgggaacattcttttttggacagagatagtgggaggaagaaggtagatgaggatgtggatgagaaagatgctaaggtaaaggaatgcaagaagcagcgaggtggtgatgatgatgatgtggatgtagtgaagcgtcataagaaaaaagagagcttgaagagaagacatgatgattcatctgaatctgatgagcatggtcgtgaccgtagaaggcgctctaagaagaaggctaaggggcgtaaacaagaaagtgaaagtgactctagcagctcggattctgaatctgactctgacagtgatgatggaaagaagagaggaaggaagaagcctacatagactacaaagaaacgcagcagaaggaaaagaagtgtctcttctgaatctgaagaagttgagagtgatgatagcatgaaacttaggaagtcacacataaagagccttcccttcaaccgatctggt

SEQ ID NO: 128794 - DNA, 662 bp, Arabidopsis thaliana
gagctctcgtaagcctctgaattcgatttgacctgacaaccatacaaaaaattctcccgagaaaatctctctctcaacgaacgaatttcgaatcaccaagaagaaattctgagatttgtttgcgtttcatcggaataatggaagtgaaagtagcaacaacgacgtcgtttcattggtcaggacgacacacagcgattcctcaatgtccgtcattttcgcaaaccctaacttcatctaaacgccgtcgttctcgtggaatagccggtgatgtttccgtcggaggaggatctttgagattaaaaccttcgacgtttctcggaacacaatctgggaaacttcaccgatctaaatcatgtgagctttggcaattttctaattccaccacgaagaagattagaactgatgtgaagaagaaacataatcctttgagaagagtttgtagtgcgagctccggtttcttctcctccgacgaagcattctctgtgaaaatgcacgaattagcttcacaattcagaaacgcacgcgatgaagaagaagaagagaacaaacagaaatcagaagcagtagataaccgatacgatagcaataatcatagatttggttctttgaagctattacaagagtctgttccacgtttagcttctttggaagcttcatgggca

SEQ ID NO: 128795 - DNA, 1500 bp, Arabidopsis thaliana
  unsure (1)..(1500): unsure at all n locations
agacaatcgagtctcgagtctgtgaaaccaattctcgcgagtgggagattgtagccatggcaggagtatcgctcaagtgtggcgattgtgggacgctgctgaagtccgtggaggaggctcaggagcacgctgagctcacctctcactccaatttcgccgagtccactgaggccgtgctcaatctcgtttgtactacttgcaccaagccttgtcgctcaaaaatcgaaagcgatttgcacacgaaaagaacagggcatactgagtttgtagataagacattggagacaatcaaacccatcagcttggaagctcctaaggttgccatggagattgatgataatgctagtggtagtggagaggctgcagaagagatggttgttccagacgttgacaataacattctcgaggaacttgaagcgatgggcttccctaaagctcgtgctacccgagcactccattactctggtaatgccagtcttgaggctgcagttaattgggtggtggagcatgagaatgatcctgacgtagatgaaatnccaaaggtgccttccaactccaatgttgggcctgccaaacctgctcttacgccagangaagtgaagctaaatccgcaagaattaagggaacgtgcacggaagaagaaagaagaggaagaaaaacggatggaacgtgaaagagagaaggagcgaattaggattggcaaggaactcttagaagcaaagcggatggaagaagtaaacgaaagaaaacgtcttatgtttttgcgtaaagctgagaaagaagaagaaaaacgggctagggaaaagatccgtcaaaagcttgaagaagacaaggctgaaagaaggcgaaaactcggattgcctccggaagatcctgcaactgcagctgcaaaaccctcagtgccagttgtggaggagaagaaggttacattgccaattagaccggccacaaagactgaacaaatgagagaatgcttgaggtcccttaagcaagcccacaaggaggatgatgctaaagtgaagagagcgttccagactctgctgacttacatgggaaatgtcgctaagaatccagatgaggaaaaattccggaaaattagactcaccaaccaaacatttcaggaaagggttggttcgctaagagggggcatagagttcatggagctatgtggatttgagaaaattgaaggaggagagttcttgttcttacctagagacaagatcgattcagccatcataaactcagctggaacagaactcaactccgccatcaacaaccctttctttggagttctttaaatccatgcctcttcttatgaaactaaaaaaaaattcggatatctctatgaataatactggctagtgacattctttttgttttgcttaaataagtggaaaatttggagagcagaactaaaagcttccattactgtttaacccgtcttgttgtttgcattctaccttttaaggtaaaaaaaatgacatttccataaaaaaaaaa

SEQ ID NO: 128796 - DNA, 469 bp, Arabidopsis thaliana
tgggctttgtgaacagtaaaactcccaaatttgcaaatgactcatcttcttcacctggagagaatctagggttccagatttactcttcgtcttcctctcttcgcttcttccccactgggattttccttttcttctccttttttctctacccatcgatctacacatcctgatcttcttagaagccccaatccttatacattccgggaacaaaaaacctagctttttttttattccggcttaaccagttttcgaaaaaccctagcttccatggcgaaaactcgacctggtgtcgcctccaaaattaagacgggaaggaaggagctggactcttataccatcaagggcaccaacaaagttgtgagagcgggagattgtgtgttgatgcgcccatcagatgctggtaaaccaccatatgtggcccgtgttgagaagattgaagctgatgcgaggaacaatgtgaaggtgcact

SEQ ID NO: 128797 - DNA, 846 bp, Arabidopsis thaliana
  unsure (1)..(846): unsure at all n locations
aattcccgggtcgacccacgcgtccgagctgacaaagactcaaccaacgtctatagcgtgtatttttttttaaatgcaccacccgcttacagccaatcatgtaagtggcgattatgttcaacgggcactcaattatcctaaatacagatcataaaaacgctaacttttaatttctctctttctgagaaaccggttctcatcgcgggaatcgaaaaatgggacgaatcggtttagtagcgactgagctggaattgacgatcgtgtcgatatgggcaggagttctggacaacattgtactccatggagactttggatgtagccggaccgatccttccggcgagatcggtcggtaaatgttctctatcatctccatgttcatcgtggcctaccttgaacaagccaccaaaggcgggctttataatcctttgaccgctatggctgctggagtaccccggtgggttcagccgaggcatcttctccgtccttggaacccgaatacccccatcgcgaagggaaaataacggaaatccacaatttccttttaggcgtggatatataagacacattattacaatgtttccaacccggtaatttttccccctttgcaacaatcttgtcgggaaaaaaggggacccatataaaccctcataaatgggttgcgcccaatttcttcaccacaacgggggtggctttttctaaaaccacagatatgggggatctttcctttaaacacaatttccttgtcaaatttggtnaacctgggtttacctcaagaatgggcgggaactttagagccaaaggcaatctttatttcccctcgggggaaaagtgtattcccttttcatt

SEQ ID NO: 128798 - DNA, 688 bp, Arabidopsis thaliana
  unsure (1)..(688): unsure at all n locations
agacccacccgtctcgagctgaactcagactgcaaacaatgcaccttagcgcacaattttangtaattatgcaccagcgcgcttagagccaatcatattggtggcgatgctgcacaacggacctcacctattctaaatccagatcataaaaacgctaactttcaatttctttctttctgagaaattggttctcaccgcgcgtcccgaaaaatgggacgaatcggtttagtagtgactgatctggtattgccgttcatgtggatatgggcaggagttctggtcaacattttagtccatggagttcttggatttagccggaccgatccttccggtgagatcgttcgttatctcttctctatcatctccatgttcatcttcgcctaccttcaacaagccaccaaaggcgggctttataatcctttgaccgctttggctgctggagtctccggtggcttcagcagtttcatcttctccgtcttcgttcgaatccccgtcgaggtaataggatcaattcttgcggttaagcatatcattcacgtattccctgagattgggaaaggacctaaactaaatgtagcaattcaccacggtgctttaacagaagggatactaacattcttcattgtactgctctcaatgggactaacaagaaaaatcccgggaagtttctcatgaaacctggatcggt

SEQ ID NO: 128799 - DNA, 391 bp, Arabidopsis thaliana
tttgttcgcgtgggcggacgcgtgggtgaaccttcgtatttggacattggtgatggtgtcatctacaaaatccccccaagttatgacaagctggtggcatcattaaacttaccgagcttttcagacattcatgtggaagaattttacttgaaaggaactctggatctgagatcattagcagaactgatggcaagtgataaaaggtctggagtaagaagccgtaatggaatgggtgagcctcgacctcaatatgaatctcttcaagctagaatgaaggccctgtcaccttcaaactccaccccaaattttagcctcaaggtgtcagaagctgcaatgaattctgccattccagaaggatctgctggaagtactgcacggacaattctgtctg

SEQ ID NO: 128800 - DNA, 570 bp, Arabidopsis thaliana
  unsure (1)..(570): unsure at all n locations
gcggcgggcgtgaggggaggngaggggggcccccccggtagtattcgccgggacctatacgactcacttagggaaagctggtacgcctgcaggtaccggtccggaattcccgggtcgacccacgcgtccgggaaaaatggagatatggttacttatcttgggctctctcttcctctctctccttctcaatctcctcttctttcgcctccgtgactcctcctctcttccgttaccacctgaccctaactatttccctttcattggaaccatccaatggctccggcggggcttaggtggactcaacaactatctccgctccgtccaccaccgtctcggtcccatcatcacccttcgcatcacttcccgcccctctatattcggccgccgatcgttctcttgctcaccaggctctcgttttgaacggtgccggtttcccccatcgtccaccggcagctccgatcagtaagattatttcgagtaaccaacataacatcagctcttgtttatatggagccacgtggcgtcttcttcgccggaatctcacttctgagattcttcaaccctcgcgcg

SEQ ID NO: 128801 - DNA, 402 bp, Arabidopsis thaliana
gtttctcactgtactgttttaaaaaccctcgaattctctttactcttccgtcggaatcacctctctttgttttgggttctgataaatgttcaccggcgacgagacggccgagtagaaagactcgtgggtttgtcgtgacgtacgcgcactctaatccgaagataatcaatccgaagaagaagtcgaggtatgggcaaacgttatctccatatgacagtgatgaagatgatgatgatgatgatgatgatgatgatgatgactggttacttaatgatgatttcgctgaggttacagagtatgagaagaagaagcctaagtcacataagcaaaccattgctaagaaaagtgtgaagaaagggattgtcaagcctgaagaaagcgagactgatgaagatgatcttg

SEQ ID NO: 128802 - DNA, 455 bp, Arabidopsis thaliana
  unsure (1)..(455): unsure at all n locations
tcgcttttctaacatttcttcttccacaagaaacaacaacgaagccatatattcttttgtgtcttagttgctactctcacattacattatctgggatcaaatatggctcatgtggatgggcaagttggatatagcgaggaattcatcgagaattcgcggggaatgcaactcttaacatgcaaatggtttccagtcaatcaagaaccaagagctctcatcttcttttgccatggctatgcaattgattgcagcaccacctttaaagatatagcacctaagtttgcaaaagaaggctttgctgcgcatggaattgaatatgaagggcatgggagatcaagcggtctctctgtctacattgataacttcgatcttctcatcgatgatgtctcttcacatttctccaaaatatctgagatgggagataacacanagaagaagaggtttttgatgggaga

SEQ ID NO: 128803 - DNA, 479 bp, Arabidopsis thaliana
tctgcttttcattaacttaaacctcgtacgtttgtgtaatgatttgattaggaggttgaacaacaactcattatctgggccctttcctgcttctctgtctcaaatccctcacctctctttcttagacttgtcttataacaatctcagaggtcctgttcctaaatttcctgcaaggacattcaatgttgctgggaaccctttgatttgtaaaaacagcctaccggagatttgttcaggatcaatcagtgcaagccctctttctgtctctttacgttcttcatcaggacgttgaacccaccttattagcagtggcactgggggcaagcctggccttggctgttagtgcaatcctctctctcgggttcatttggtatcgaaagaaacaaagacggttaacgatgcttcgcattagtgacaagcaagaggaagggttacttgggttgggaaatctaagaagcttcacattcagggaacttcat

SEQ ID NO: 128804 - DNA, 610 bp, Arabidopsis thaliana
ggttaaagaagaagagttgagaattacaaaatggaggagacgacgattcctttcaagagcttacatagcagagaagatcaaggtcataagaagaaggtacattcagtagcttggaattcgaatggaacaaagcttgcttcgggttctgttgatcaaacggctcgcatttggaatatcgaaccacacggtcatagcaaggctaaggaccttgagctaaagggtcatactgatagtgtggatcagctatgttgggatcccaaacattcagatcttgttgctactgcctctggtgataaaagcgttcgtctttgggatgctcgcagtggaaaatgcacacagcaggcagaacttagtggagagaatataaacatcacctacaaacctgacgggacacatgtagctgttggtaatacggatgatgagcttacaattctggatgtccgtaagtttaaacctcctacaccaggcggcaaattcaattttggggttaatgagattccttggaacaatcccctgggggattttttcttccttgactactggacttggcactgttgaagttctttcatatccatctcttaaaccacttgacactctcacagcccacaca

SEQ ID NO: 128805 - DNA, 528 bp, Arabidopsis thaliana
  unsure (1)..(528): unsure at all n locations
tgatatnnnnnnnnnnnnnnnnnnnnnnnnnnnnnnnnnnnnnnnnnnnnnnnnnnnnnnnnnnnnnnnnnnnnnnnnnnnnccacgcgtccggcactttagaaagaaaccctagtccgacgacctctccttcgccgctgaatcctcatcgctggtcagatttctatctatctcgctcttctatgtttccctatctcgttgattcttggcggctttctttttgatgaaattggattacgatggctggatatcctactaatggatcagtctacgtttcaaatctccccttaggaactgacgagaatatgttggctgactattttgggaccattgggttgcttaagagagacaaacgaactggtactcctaaggtatggctgtaccgggataaagaaactgatgagcccaagggagatgctactgttacctatgaggatccgcatgctgctttggctgctgttgaatggttcaataacanagattttcatggaaacaccattggagtttttatggccgagtcgaagaata

SEQ ID NO: 128806 - DNA, 510 bp, Arabidopsis thaliana
cggcactaattcgactcatatagggaaagccggcacgcctgcaggtaccggtccggaattcccgggtcgacccacgcgttcgtacagagctctatggctttctccattgcgatttattgtgagctcggcgccgtcaaagttaacgccttacgtatctcgaggacgaggactaagtggaattgatactggggctggttgttcttgttctcgtagtgtcacgactttgattggtggggagttcattcgatgccaagatgactcaaagatcttacagttgcagattggcgatgcccttcgttcacgagagaggcaaggagcgtcagcattgctttttaagttaatccaggggaattattcacttattgctgatgagtttcatgatattctatattattgtgctcgatcaccggatccctgtgtaagtatgatctatgacagagtctcccttcggctgtcctaaatcttcggttatctctcacaagttatattgcactgaaattttggcagggt

SEQ ID NO: 128807 - DNA, 1016 bp, Arabidopsis thaliana
cactaatcgactcacttagggaaagccggtacgcctgcaggtaccggtccggaattcccgggtcgacccacgcgtgcgggcttataatctttctagagatcacaaaccagatcttgaagctgagaaagaaaggatattgaaagctggtggctttatacatgcagggcgagtcaatggaagcttaaatctatcacgagctatcggtgacatggaattcaagcagaataagtttttgccatctgaaaagcatatagttaccgctagtccagatgttaacactgttgaactctgtgatgatgatgatttccttgttcttgcctgcgatggaatttgggattgcatgacaagccaacaactcgttgatttcatacctgaacaattgaattcagtaagctaacttgatttttcttcctttggattacagttttttttccagtctatccttttctggatgctacagtttccttctttcgattggtaacattcaggagaccaaactctcggtggtatgtgaaaaagttctcgatagatgtctggctccaaacacttcaggtggtgaaggctgtgataacatgaccatgatattggttcgattcaagaaccctactccatcagagaccgaactaaaaccagaagcaagccaggcagaaggaaaccacgatgagccgagctcatcaaactaggcccatcctcagagtcacggaagatccctctagatctagtattttggttcagattgtaaatcattttgaaagacagttatatatctcaacctgacgttgatttcagtatatcaccatttcctccgtgtgcagacttttgtctcatgagctcccataatgtagaaaggaataattggtgtaaaaatgttgttggccttaaaagaacatatcatcatgtaaataaacaaaacaataagacatttacacaaaaaaaaaaaaaaaaaaaaaaagggcggccgctctagaggatccaagcttacgtacgcgtgcatgcgacgtcaagctcttctatag

SEQ ID NO: 128808 - DNA, 511 bp, Arabidopsis thaliana
  unsure (1)..(511): unsure at all n locations
angngcntatcttcccggcttccgggcctgnattcagccngaatagtttttnccatctgaaagcaaatagtttcccgttgtcccggtgtttaccccggtgaactctgtgatgatgatgattcccttgttctggcctgcgatggaatttgggtttgcatgacaagccaacaactcgttgatttcatacatgaacaattgaattcagagaccaaactctcggtggtatgtgaaaaagttctcgatagatgtctggctccaaacacttcaggtggtgaaggctgtgataacatgaccatgatattggttcgattcaagaaccctactccatcagagaccgaactaaaaccagaagcaagccaggcagaaggaaaccacgatgagccgagctcatcaaactaggcccatcctcagagtcacggaagatccctctagatctagtattttggttcagattgtaaatcattttgaaagacagttatatatctcaacctgacgttgatttcagtatatc

SEQ ID NO: 128809 - DNA, 458 bp, Arabidopsis thaliana
tctgtttttgtgatcaatgtagagccgagttcagatactcgtttggcgaaagtgaaagtagattcggactttaccgcaccttgtgatacttctatactgtacccggctgatggagggaatatgcattgcttcaccgcgaaaacggcttgcgcggttcttgatgttattggtcctccatactctgatcccgcaggacgtcattgtacttactatttcgattatccgttctctagtttctcgggtatagttttcgaaactttttctatgatttgtgttagaatctagctactagtagtactgtagtagggttgaacataaacaccgagctgattttcataataacctgaatagggaaaaagagtttgataacaaataaaccacaccaaccagctgaatgaccttgtatatatggaagaaatactttcaaaatatgaatcaatgttgatattatttatatt

SEQ ID NO: 128810 - DNA, 825 bp, Arabidopsis thaliana
  unsure (1)..(825): unsure at all n locations
agctctcnnnnnnnnnnnnnnnnnnnnnnnnnnnnnnnnnnnnnnnnnnnnnnnnnnnnnnnnnnnnnnnccacgcgtgcgcccacgcgtccgcggacgcgtggggtgtttagtaagctcttgtttggtacaatgcatatcaaatcctatgattgggtccctgattctccccagccgagttcagatactcgtttggcgaaagtgaaagtagattcggactttaccgcaccttgtgatacttctatactgtacccggctgatggagggaatatgcattgcttcaccgcgaaaacggcttgcgcggttcttgatgttattggtcctccatactctgatcccgcaggacgtcattgtacttactatttcgattatccgttctctagtttctcggtcgatggagtcgtggttgccgaggaggagaaggaaggctatgcatggttgaaggagagggaagagaagccagaggatttaacggttactgcattgatgtatagtggaccaaccatcaaagaatgaatgtggaagcatagcagaaaaaaaaaaccctttctttttctttgttctgttagagtattttcttgatttctggttgcatataaaaagaggtttttggaagtacatagaagaacaaatctagtatttattattttatttagataacagagaacaacaagtacacctttgtcggaatgctgtagtctgtgttttggtcaaagatccttacaagttttgtcttaaaaaaaaacaaaaaaagnnnnnnnnnnnnnnnnnnnnnnnnnnnnnnnnnnnnnnnnnnnnnnnnnnnnnnnnnnnnnnnnnnnnnnn

SEQ ID NO: 128811 - DNA, 831 bp, Arabidopsis thaliana
  unsure (1)..(831): unsure at all n locations
cgggaacnnnnnnnnnnnnnnnnnnnnnnnnnnnnnnnnnnnnnnnnnnnnnnnnnnnnnnnnnnnnnnggtctctccacgcgtccgatttcattcgttttctgagataaaagtgagagagaaatctaaattcgagaggagaagttttaatttttctgagttagattcaatggaagagatcacggaaggagttaacaacatgaacttggctgttgatacccagaagaagaatcggattcaagtttccaacactaagaaaccattgttcttctacgtcaatctcgccaagaggtacatgcagcagtacactgatgtcgaattgtctgcactaggaatggctattgccactgttgttacggtcgctgagatattgaagaacaatggctttgctgttgaaaagaagatcatgacatcgactgtggatatcaaggatgattcaaggggtcgtcctgtgcagaaagctaagattgagatcacgcttgccaagtctgagaagtttgatgaactaatggctgcagctaatgaagagaaggaggctgcagaagcccaagagcaaaactagattgtttcaagttttttctgttcaacgatcttatttcttcgttccctatctctatctgcttaattttaagacacttctatttcgttaatttttggttcacttttttatttcaccttggattgtgtcctctgtacctctgagcatttttatttaaagatcgtaggaagtataaaaaagatggctaggagaaaaaaaaaaaaaggaagggcgaccgctctagaggatccaagcttacgtacgcgtgcgttcgacgtcataatcttcgatag

SEQ ID NO: 128812 - DNA, 499 bp, Arabidopsis thaliana
  unsure (1)..(499): unsure at all n locations
gtcgtcgtcccttaactcgagaaaaattagggttacggattccgattagcaagcatggaagagatcaccgatggagtgaacaacatgaacttagccaccgattcgcagaagaaaaaccggattcaggtttccaacactaagaaaccattgttcttctatgtcaatctcgccaagaggtatatgcagcagtacaatgatgttgaattgtctgcccttggcatggccattgcaactgttgttactgttactgaaatactgaagaacaatggttttgctgttgagaagaagatcatgacttcaactgttgatattaaggatgatgcaagaggacgtcctgtgcagaaagctaagattgagattacgcttgtgaagtcagagaagtttgatgaactaatggctgcagccaatgaaggaaaagaagatgcagaagctcaggtgcagaactgaaaatggcttttaaccattttgggggccccgggggttttttccaaaanngggg

SEQ ID NO: 128813 - DNA, 578 bp, Arabidopsis thaliana
tacgactcactttagggaaagctcgtacgcctgcaggtaccggtccggaattcccgggtcgacccacgcgtccggcagcagtaccctgatgtcgaattgtctgcactaggaatggctattgcccctgttgttccggtcgctgagatattgaagaccaatggctttgctgtggaaaggaagatcatgacatcggctgtggatatcaagggatgattcaaggggtcgtccggggcggaaagctaggattgagatcacgcttgccaagtctgagaagtttgatgacctaatggctgcagctaatgaagagaaggaggctgcagaagcccaagagcaaaactagattgtttctagttttttctgttcaacgttcttatttcctcggtccctatctctatctgcttaattttaagacacttctatttcggtaatttttggttcacttttttatttcaccttggattgtgtcctctgtacctctgagcatttttatttaaagatcgtaggaagtataaaaaagatgggttcgttgcaggtttttaacccccagggcaaccgctctagaggatcccagcttacgg

SEQ ID NO: 128814 - DNA, 525 bp, Arabidopsis thaliana
ccgagttcgtcgcctatggttcacccaagtttgagcttgcttcatgctggtggcagtactctcacatctgactatggcagtgatactgcttatgaaacatctgaggttggatccacgcgtccgcggacgcgtgggatttctgaaattggtacggaagatctaactctggatgaagatttaactttaacaaatccaatagagaagctcgttaactttagcatgtccaacattgacgaggggctttcaatgagcgaaacaattctagagcaacttgaagactttcccaaacataaagtccgctcaagatatgtcaataatatcctagggaaggatgtgtataatggaaatgcttcaaaaggcgtatttcttgctaacaatggttcacgacttctctctgaaccagaaccatcaactcactcagtaatgcatgacagaaatgatagtgctgaaaggtttgctttacacaccggtcagacatcaacatctggtctcttaatttcaagcagggatagccacctggatcta

SEQ ID NO: 128815 - DNA, 547 bp, Arabidopsis thaliana
  unsure (1)..(547): unsure at all n locations
ggccccccccgcggcactccccccccgcgtagtatcgccnnnnnnnnnnnnnnnnnnnnnnnnnnnnnnnnnnnnnnnnnnnnnnnnnnnnnnnnnnnnnnnnnnnnnccacgcgtccgctctctctacacactttttcagattccatcatcacttgttcttttcacacccaataaaaacttgcatctttcttctaaattgttgatgatcgcttctcatatttgaccctagagacaacatcatttctaccgacaaagatttgatatcgaatccaacaagtgaaagatgggtctatcaagtcttcctggtccatcagaaggaatgttatgtgtgatattagttaatacagcattatcgatctccattgtcaaaggcattgtaagatcattccttggcatagtaggaatcagtctctcgccgtcttcatcctcgccttcttcggtgacggtatcttcagagaattcatcaacttcagagtcatttgatttccgggtctgccaaccagagagttaccttgaggagttcaggaaccggactccgatactgg

SEQ ID NO: 128816 - DNA, 409 bp, Arabidopsis thaliana
aacgtttcggtcgttgtttcttgaaattccactgttattagactcttgactctgttttgtttcccgccgatctcgtgatgatggccaccaccaccaccaccaccaccgctagattctctgattcatacgagttcagcaacacaagcggcaatagcttcttcgccgccgagtcatctcttgattatccgacggaatttctcacgccaccggaggtatcagctcttaaacttctgtctaactgcctcgagtctgctttcgactcgccggagacgttctacagcgatgctaagctagttctcgccggcggccgggaagtttcttttcaccgttgtattctttccgcgagaattcctggcttcaaaagcgctttagccaccgtgaaggaacaaaaatcctccaccaccgtgaa

SEQ ID NO: 128817 - DNA, 863 bp, Arabidopsis thaliana
cccacgcgtccgatctggggcttacaacagaacactcacgccctttggtttccagaacgaggaccgaactctgtgggaagccactaacgtctatgtagagatgagcccattcatgtctgctaataaaatcaagaagccaatcttacttattcatggtgaagaagacaataacccaggaactctaacaatgcagtcagaccgattcttcaatgcactaaaaggccacggcgctctttgccgtcttgttgttcgtcctcacgagagccacgggtactcagcacgggaaagcattatgcacgttctctgggaaactgaccgttggcttcaaaaatactgtgttccaaaccacatcagatgcagatacaagtcccgaccagtccaaagaagggtcagattctgcagacaaagtatccacaggcacaggtggtggtaatccggagtttggtgagcatgaagttcactccaagctcaggagatcacttctctgagttcccaaaagtggttcactagccacatgcagcatgcgagtgcacttgcagaaacagagagcacaaaaaaaggcagatgcaacacaaacttatttttcatacaaaacattgattcataataatatgaaaaaaagtttttgaattacttgaaatgctggaaacactctttcaagtgcaaaacttcgatcaataagtttcataaatattcaccttttgtaatttctcgaaacaaaacaaaagagattatgtctgaatgaacatcacatctgaatttgttacaaatcccaaaaaacaaaaacaaaagggaggccgctctagaggatccaagcttacgtacgcgtgcatgcgacgtcaaagtcttgtatagtgcacata

SEQ ID NO: 128818 - DNA, 460 bp, Arabidopsis thaliana
  unsure (1)..(460): unsure at all n locations
tnncncnantananttnncntgtctcaataaaatatccaccttttgtaatttctcgaaacaaaccaaaagagattatgtctgaatgaacatcacatctgaatttgttacaaatcccattctcagatttgtttatttcttaagaacccaacaaaaaaaaggaaaaaaagacagaaatggaaatcaaacaatcttcaggaaccagttattgagcggcttaattactcttcagcagctacaacactgatctcacctctctcaagcaagtcatagaaagttctggttttcctctgttcgttccaatggtgcatcttccaaagaccaccagcagctaaaccgagtgccaaaccgataaataactccttgacaacgctaggccctttcaatgtcgcatgtgcaaccttgtgtcctgccatctcttctttcttcttctcaaccaagtcggagtgtggaggtgtagac

SEQ ID NO: 128819 - DNA, 407 bp, Arabidopsis thaliana
accacgcgtccgctcgacggaatacttaatctctttgataatctttctctctggtgacgttttgtgaatggtggaaactaatctgattggtgataatcataggctcaccctttcaactaaaagggcgagctttctcatcatccctctctctcaagactctgttttctcattcggttcttgcaaagaaggctggtacttccgttgcattggccttgacccgtgaaccaatcaatcatcatctccgatcatattttcaataataatttctgtgttttgattttttgagaattttgaaaaaaagatgttgctttacaagaaaaagaatcagattgttaaaggaaacagaatcttgatcagcgtaacgtttcttggtagtgctggtccgatccggttcgttgctaatgaag

SEQ ID NO: 128820 - DNA, 479 bp, Arabidopsis thaliana
gcagggcgtgttgttgaattcagcgtcgatcagcatggcagccggtttattcaacagaagttggagcactgctccgatgaggagaaggcatctgttttcagtgaggttcttccacaagcttcaaaattgatgactgacgtttttggaaattatgtcatccaaaaattcatagaacatggaactccggcacagagagaagaacttgtgaagcaacttgctggtcagatggtttcactaagcttacaaatgtatggatgccgtgtgatacaaaaggcccttgaagtgatagatgttgaccaaaagacagaactaattcgtgagctcgatgggaatgtgctgaagtgtgttagagatcaaaacggaaatcatgttatccaaaaatgtatcgagagtatgcctgctggtaggattggattcgtaattgctgctttccgtggtcaagtcgccactctttctactcatccttatggatgccgagt

SEQ ID NO: 128821 - DNA, 590 bp, Arabidopsis thaliana
cccaagcgtccgttctatctctctcttctccattctctctctctatagagacacacaaaagtagaaagacgaagaagaagagagaacgggtttgtagttggtggttgcgtttctttctcgtttatattcttctttcttttttgttttcatctttcaattcctcggccgcttttttgtttataatctaatcgacgcacgaacagagcaatctcaagctcttcttcttccccacaattgaatctgattctgagatcctcttaccttctgtttgatctctctgtttcctgacgaaggagatattgtagagaaagaaaggggttctcatgattctcgtgttttgagtctctttccagtatagattaaaacttacacttgtctttctttgtctttttgggtggaaatctacgtagatctgttccttttttctcataaaacttttgggtttaaatttctgtacaaataaaatatttgtaagaagaaaaaaacgtttttttaaacaagactcgaaaagggtcagacccagaagtctcatcttttaccttttttcttggtcagctttgaaaggcttcatcttttttttattccgtttt

SEQ ID NO: 128822 - DNA, 459 bp, Arabidopsis thaliana
agcccgcatactttggcaacatagatcgtggatggacagagaagctactgctttcaccatctccaattgatggagaatggctaccaaaaagtgccatcgatgctttggtccatcttatggttgtcatatcgggacgtccaaagggactctttaaagagtgttcaaaacgtatcgagtctggactgcagatcattcaagatgaactgatcaagcttggaattactgacgaagttagagaggctgatttgcggcacacagctatctggatgtctagggtttttcttatgctacagatgcagtttcttgagaatagagtggctttggaacttacaaggtctgattatgtcgaagctgaagaggctttggttgatatgaaaaattggtttacacgatttccaacgattttacaagcttctgagtgtatgattgagatgctcagggggcaatattctcattctg

SEQ ID NO: 128823 - DNA, 731 bp, Arabidopsis thaliana
  unsure (1)..(731): unsure at all n locations
nnnnnnnnnnnnnnnnnnnnnnnnnnnnnnnnnnnnnnnnnnnnnnnnnnnnnnnnnnnnnnnnnnnnnnccacgcgtgcgcgaagaggcatttcgtcgaacacttggcgagcatagagcgcgatgatgaaaggaagcaaggcgaatctctctgccttagcggagaaatgcaaaactgtaatcgtttcgaactggcaagggtacctaaataccgtcaaacctgaagataaagctagtataatacatacttcaaagattaagtatgtgatgagaagaggaaagccatatctctgggtaccagaaagtgaaccacacaatgtcaacataatgtttgatgaacgtggatccttttctattgcccatccgtatcctggtccccttgcagctttattcaagtctataggaaagcttccagaaagggttgcttttactggagagattgttcctgttaaagagaaaagggttgatgcggtgaagaaatatgtcgaggaagctatacagtcagagatgaaagcgattagcgataccccaaattctgtccgtagtattttgaattcttccgatcagatgtatgcctcccggtgtgacagtcttagagccctgatcaatgatgcaaaggaaaaatacgttatctataagttcgttccaagctcatgtatgtttattgacccaaatggtacgaaagaaatagacttgaaggttttggactgtcaaaaccagatccattaggg

SEQ ID NO: 128824 - DNA, 1306 bp, Arabidopsis thaliana
  unsure (1)..(1306): unsure at all n locations
nnnnnnnnnnnnnnnnnnnnnnnnnnnnnnnnnnnnnnnnnnnnnnnnnnnnnnnnnnnnnnnnnnnnnnnnnnnnnnnnnnnccacgcgtccgcggacgcgtgggcttgacttccagtattcacctttctcagctcaacagtctatgcaatcaagaactagcaacaatgcctcatcacttggtggccaaagcatttcaatgccagaggcgctccgaggcagtggaattccggcaacacagccaacccagcaaacactacctggtgctaatatcgctactggacctgctcttcctcagcagcttccaatgcattactctcaacccacattacctctaacacactatgcaaacatgatcggttatcctctaatgcctcagaattatccatacatgccatctgctttccagcaaacatttgctggtaatagtgcataccaccagcaactagctgcattgcttccgcagtacaaaaccaatgtctctcccggtaatttgcctcagtctgcaacagcgcctgcctctgcttatggatttggaaactcgaccaatgtcggatctgccggaacttccctctaaccaacagtctgctactaccggtacaacgcttgggtatgacgatgttcttagttctcaatacaaagagaatcatctgttggcacttcagcagcagcagcaacaacagcaacatcaacaacagaacgaaactcggcgatgtggcatcagggtcatggttccagaaccatgtcaggtgtcccgactaacacctattacaacctccaagcacaacaacaactgcaactacatcaccagcaacaacaacagcaggctcagcaagcagcgggagggtatcggccagctcagcaccaacagcattatggatctcatggatacccaaattattatcagtctcagaccgaaatgtcactcgagcgccagcagcaaaaccctagggatggtgctgggtctcaggctggtcaaccgtcgaatcaatctcagcagcagctctggcaaaactcttactaaataaagaaagagagtggtttttttcagcttctttctctcgcttatagaggtttgtgtggcgagtctgaagaggaaatatggttgtgttctaaaatgtaacttatcatcatcttttgtctcctctgttaacttagggaacatgcaactctgatttcatcaatgcaacttcagaaatgaaactttttttttttaaaaaaaaaaaaaaaagattattttannnnnnnnnnnnnnnnnnnnnnnnnnnnnnnnnnnnnnnnnnnnnnnnnnnnnnnnnnnnnnnnn

SEQ ID NO: 128825 - DNA, 562 bp, Arabidopsis thaliana
cgcctgcaggtaccggtccgcttttcccgggtcgacccacgcgttcgcccacgcgtccgctttgcaatgcgtgttgcatatggtttgtgtctgtgttgagtatcggaggaggaacaggaggagaaccaataggacgacgacgacgactcctccacggtcacgttcttcttcttcctcttcatcttcttcttccttggaggaagaagctttgggttccaggaggaattcaggtgtgcaggacttgtcgcttggccacttggataccgaaagcagcagtgttgctaagcatctggaatctgccaatacgatgttttcttttatatggtggatcattggattctactgggtatctgctggtggccaagagttggcacaagaatcccctcggatttactggctgtctattgtctttcttggtttcgatgtgttctttgttgtcttctgtgttgcgttggcctgcgttattggaattgcggtttgctgttgcctgccatgcatcattgcactgatcaacctttgtaatcttctatccctgccgtttaaagttgtcctttcttccttt

SEQ ID NO: 128826 - DNA, 510 bp, Arabidopsis thaliana
  unsure (1)..(510): unsure at all n locations
nnnnnnnnnnnnnnnnnnnnnnnnnnnnnnnnnnnnnnnnnnnnnnnnnnnnnnnnnnnnnnnnnnnnnccacagctccgcggacgcgtgggtgggtatctgctggtggccaagagttggcacaagaatcccctcggatttactggctgtctattgtctttcttggtttcgatgtgttctttgttgtcttctgtgttgcgttggcctgcgttattggaattgcggtttgctggtgcctgccatgcatcattgcagttttgtacgctgttgctgatcaggaaggggcttcaaaagaagacattgagcagctcaccaaattcaagtttcgcaaactaggtgatgccaacaaacacactaatgatgaagcccaaggaactaccgagggaataatgactgagtgtggtacagattcacccattgaacatactcttttgcaagaagatgcagaatgttgcatctgtctctctgcatatgaagacggaacagagctaagggaactaccttgtggac

SEQ ID NO: 128827 - DNA, 564 bp, Arabidopsis thaliana
gggggggggggggtagtatcgccggcactatacgactcatatagggaaagctggtacgcctgcaggtaccggtccggaattcccgggtcgacccacgcgtgcgcctctccctctccctctccctctttatctttctcttcctcctttgctaataaacttttctttgaaccttacacgccttgttgatattactctcttaaatatatattttcgtacattaacacagacatatataaagctaaagatttcttcacgtaatgggtttgaaagatattgggtccaaattgccaccggggtttcgatttcatccaagtgatgaagagttggtttgtcattatctttgcaacaagattagggccaaatctgatcatggtgatgttgatgatgatgatgatgatgttgatgaagctttgaagggttctactgatcttgtggagattgacttgcatatctgtgagccatgggagcttcctgatgtggcaaagttaaacgcaaaggaatggtacttcttcagtttccgtgatcgaaagtatgctactggatatcgcacgaacagagcgacag

SEQ ID NO: 128828 - DNA, 470 bp, Arabidopsis thaliana
gtttgatccatcggagaatgtagtgtatgactatataggaggagttgaagatttaaggaattctaaagttagaacagtatccgcagcgaatctttcatttgtcgaggatacagctcgcattttacgtgcaattaggattgcagcaaggttaggattcagcttgactaaagacgttgctatttctgtgaaggagctttcttcttcattactgagacttgacccttcaaggattcggatggaaatcaattatatgctggcatatgggtccgcagaagcttctttacggttattatggagatttggcctcatggaaattcttctacctatccaggcatcttatcttgtttcccaagggttccggaggcgtgatggaaggtccaacatgcttctgtcgctatttcgcaaccttgaccgacttgtagcacctgatcgaccatgcagcgagttcctctggattgggatcttagcat

SEQ ID NO: 128829 - DNA, 441 bp, Arabidopsis thaliana
aagaagatatcacacagattgtctccacaaatttgattggatcaattctatgtacacgaggggctatggatgtgatgagcagacagcacagtggtggacacatctttaacatggatggtgctggctctggaggttcaagtactcctctcactgccgtatatggttcaacaaaatgtggacttaggcagtttcatgggtctatagtgaaagaaagccaaaaaacaaacgttggccttcacactgcatcccctggcatggttctgacagaacttcttctcagtggttcgagcattaaaaacaagcagatgtttaacataatctgtgagcttcctgagacagtagctagaactttggtaccacgaatgcgagttgtgaaaggttcgggaaaagccgtcaattacctaactcctcctcggatattgttagctattgtcacttcct

SEQ ID NO: 128830 - DNA, 524 bp, Arabidopsis thaliana
  unsure (1)..(524): unsure at all n locations
ccgggacgcctgcagggaccggncctgctttcccgggnggatcattccgnccgcggacgcgtgggggaatcccttttctcgaagcacatggtgtgtactacatacaatgtcgaaaccaatcatcgtgatgttgtatttattaagactgtcaatgaccaaccaagtgcctacattaagggaataaaacatggcaaagctctcattcgggtttccattggtgataatctcaggaaatcagattacgttctggtttcagttggggcgcatatctttcctcaaaacccggtcattcacactggaaatttgttaaatttcagcataacaggggctgataatgaagtcactggtcaatggtttacatcaaacagaagtgtcatatccgtcaatgtggcatctggccaagctaaagcgatcagccaaggctcaactcacgttacatttaaaggtcatggtttgaaactgcaaacaaaagtcacagtgctatttggaaacaccatatgtcgactctccaggagaaacactga

SEQ ID NO: 128831 - DNA, 1028 bp, Arabidopsis thaliana
  unsure (1)..(1028): unsure at all n locations
agctggtacgcctgcaggtaccggtccgtgtttcccgggtcgacccacgcgtccgatctaagtttaggattataatcttcatcatcattatttgttattattaatctccatattcagaaaattcgattaataaaaaaagaagcttacaagagagtgcccatataattggaatatctccctctcctatcttgcgtcggaatctctcaaaaatttcgccattgttgttgctctgaaatctgttaactttggtgatttgattgcatttgcctttgagagttttaatcttcaatttttggctacatcgagatttggttctgaattttggcatctctattagtagtgaggccatttcctgatttggatcataaagagtggagaaaaatcttgcctttgtctccttaggattgtggcttgatcaggtaatgagactatgtgcttcaaaattgagacttgtttggtgaaagaagcggatgaaaaagtttctgtgtacagcgagaggaattagtggtttctgcttacgaatgatatgagaggttcttggtacaagagtgtttcctctgtttttggtctcagaccacggatcagagggttgttattcttcattgttggtgttgtggctctagttactattttagcaccattgacatctaattcgtatgattcttcgtcaagttcgacacttgtgccgaacatttatagtaactataggaggataaaggagcaagctgctgttgattatcttgatctgaggtctctttctttaggggctagtttaaaagagtttcctttttgtggtaaagaaagagaaagttatgtgccttgttataacataactggggaatttgcttgctgggcttcaagagggtgaggagttagatcgacattgcgagtttgaaagagagaaggaaagatgtgtagtccgtcctccgagagattttaaatacccttaggtggccacttggagnggntnaattgggtggacctgaggttccnaagncccttttttntcaggccttgcacggggtnnt

SEQ ID NO: 128832 - DNA, 691 bp, Arabidopsis thaliana
aggtgttcctggggaaacaaaccaactccatcaggcacagcctcaaacccacttcccccaccagccccggcatcagtcccttctctgtctgcaatggacctcttagcctacgagaggcaactggctctagccaagatgcatcctcaggctcaacattctctgaggcaagcaggtcttggagtcaatgttgctggaggaactgcagctatgtatgatggtggctatcagaatgtagctgcggcccatcagcagctcatgtactatcagtaataaaccctcttcactggctctgagatacccttttctgtttctttctttttcttcttcttaattttataactttcttgctttttctagaccttccttgttcaagagtctttatgtatgtgtctctttcatttaaagccgttggttttatttatgtatgcagagctttatgctcagtttgtaacctataggtcttacttggattgtaagccaagcaataagacaacatcaaataaaaggggatttggttttctggggtttatgttgtttgtggttctgtaatgataggtttgaaacaaagtaatttgtcttttataaaagttttatagtttccaaaaaaaaaaaaaaaaaaaaagggcggccgctctagaggatccaagcttacgtacgcgtgcatgcgacgtcatagctcaactgtagtgtc

SEQ ID NO: 128833 - DNA, 946 bp, Arabidopsis thaliana
gaagagcgatgtatacagttttggagtagttttacttgaaatattaaccggacgaagatctgtggataaaagtcggccgaacggggaacagaacttggtagaatgggtgagacctcatctcttagacaagaaaaggttttaccggcttattagatcctcggttagagggtcactactcgatcaaggtgctcagaaagccacacaagtagcggcgcaatgccttaaccgagactccaaagcagacccgaaaatgagtgaagttgtggaagccttaaagccattaccaaatcttaaagactttgctagctcttcttcttctttccaaacaatgcagcctgttgctaagaacggagtcagaacacaaggaggagggtttgtgtcgagaaatggaccgccaatgaggagtttgtctagcttaaacttgcctcaagcatccccttatcgttatgcccgtcaatcaccaaagcctaaaggaaaagagccatgactccaaaatagatattaatttagttcttcatgtctgaccaaggtttactgatttgagctgtatgttcagctttctgtttcatcgatcctttccgactcaagacgggggctgcagccttttactcagatcaaaaagatggtctgtgggaaactgaagcctggcaagtttggaacgtttcggatcctggtttgtgttctttgagttgaaaaaatatctttggtcctgaaggtcttatgattttgatcttatgatgattttaatgtgtagaagatgtaaagtttgagagtgtaaagtttccataaatgataaaaaccagttgtctgtaaaaccttatgtaatatatgttctgatatgtattgatttttcatcaaaaaaaaaaaaaaaaaaaaagggcggccgctctagaggatccaagcttacgtacgcgtgcatgcgacgtcatagctttaactatagtgt

SEQ ID NO: 128834 - DNA, 484 bp, Arabidopsis thaliana
  unsure (1)..(484): unsure at all n locations
gccggctctattcgacttttatagggaaagctggtacgcctgcaggtaccgggccggaattcccgggtcgacccacgcgtgcggtttaaacgctgccgtgttccgccggatcgccaccgttgaagtcaagatgccgtcgcacaagtcgttcagtgatcaaaaagaagctagggaagaagatgagacagaccagaccgatccctaattggatccgtctccgtactgataacaaaatcaggtccaacgctaagcgtaggccctggccccgtaccaagctaggattctagagcactctcacccggactcagattcgtccgagtttcttaattgctttcttgtatcggaattgtggtctttgacccctaaaagttttagttttttgttaaggattttgtggcttatagctatgtttaaatcttagaccttgaagaagagtgcatgattatgaattataatagttgaaccctttcccctnnngngnnng

SEQ ID NO: 128835 - DNA, 875 bp, Arabidopsis thaliana
ttgttgagagggttgccaacatgcttaactacttcttgctacaactcgtgggtccacagcgtaaatctttaagcctgaaagatcctgagaaatatgaattccgtccaaaacagttacttaaacagatcgttcgcatatatgttaatctcgcaagaggagacacagtaaacatattccctggtgccatctccagtgatggccgatcatataatgaacagctattcaatgcaggagcagatgtgcttaggagaataggtgaagagggaagaatcattcaagagtttatggagttaggcacaaaagccaaagctgctgcttctgaagctctggatgctgaagctgcacttggggaaataccagacgagttccttgacccaattcagtacacgctaatgagagatccagtaatacttccaagctcaagaatcacagttgatcgtcccatcattcaacgtcatcttctcagcgacaatcatgatccatttaaccgagcacatttgacatcggatatgttgataccggacatcgagttgaaggcgaaaatcgatgagtttgtgaagtcgcatcagtctaagaaacggacaagtggagaagatagcagcaacaaggaaaggatacagactacaaacagtgatatgttaattgattaattatgtgttccaaaagtaacaaaataataacaattattcaggactttttttttttacttttgctaggctttcttttctattaggatttatctatctattttagggcttgctttccacttatttgatgccacgggaaaaaaacttataaatatcatgtctagaactgtttctatcataagttcgatgtgttcacgagtttctatgcatttcgacgtttgttcatgg

SEQ ID NO: 128836 - DNA, 1023 bp, Arabidopsis thaliana
  unsure (1)..(1023): unsure at all n locations
agatactccnnnnnnnnnnnnnnnnnnnnnnnnnnnnnnnnnnnnnnnnnnnnnnnnnnnnnnnnnnnnnnnnnnnnnnnccacgcgtgcgcccacgcgtccgcccacgcgtccggttatcattcatctttttctacaaaatatcaaattcagcctcgaaggagatggatgttttgtaactcacgcaacaactcgatttcatcggatgatgagtaccgttcatcacccaacatagctataagtcttttaagacgttacaggaccgtgattggacgcggtgaaggcgaaaccttaaaagaattcatatccgctggtgtgaatgcatatgcgctcggctgcacagatgaagatttgagaaaagaactaatggctatgaaagattcgggtttagagattgagagaatggagaattacggcggaagcacacagactaaatccaaaattacgctgtctgaggtagatgaatgcatattgtggcttaggattgtattcatcacgatcttgtgtacgccgcaaccaacagtcataagatggtcatcgactccttcggtttctgatgaaattctaagcaaatggagaggcttttgcgcggttatagcaaatgcatactatattagaggaatggcttggctgcctgtgaagactcttcagttggagcagatggcggtgacaggacaatcagaggagccgtccgttgtggccagccgaatgagactggtgtttagcactctcgaggtagtgagtcctcaatggccacgggtttaactatgatgttctgcagattgaaatatacgagttctaaggtatctttgttttgttctttgaatcttcaaaatgtttttatcgtcttgttaatcccattttgtaaatggttgtagaactactgtaattcaataggtcactgttttaatccccgaagaaaaaaaaaaaaaaaagagagggcggccgctctaaaggatccacagctcacgcacgacgtgnnnnnnnnnnnnnnnnnnnnnnnnnnnnnnnnnnngtaaatcg

SEQ ID NO: 128837 - DNA, 709 bp, Arabidopsis thaliana
  unsure (1)..(709): unsure at all n locations
acggacgcgtggggtttttctttttgcagccattcaaaatattggtggcttcaaattcacctcttacacttgtagcttgtgcttcatccaattctttgcagcgattaaaacacacaaaaagtttgcatatgaattgctgactctgaatttctcaaaaagataagggcattgcttcattgatatggttaagaaatgttagttgcgtatcctgcgggaactatcaacaaattccaaatccctattagctgctatgccgctttgcgcagattcaagacctcgccttttggtcctctgattagttgttctgtctccccaagatcaatagttccttgtagcaatgtagagtgttatcattcatctttttctacaatatatcatattcagcctcgaaggagatggatgttttgtaactcacgcatcaactcgatttcatcggatgatgagtaccgttcatcacccaacatagctataagtcttttaagacgttacaggactgtnattggacgcggtgaaggcgaaaccttaaaagaattcatatccgctggtgtgaatncatatgcnctcggctgcacagatgaagntttnaggaaagacctaatggctatgaaanttcgggntngnggtttaanagattggggaattntgggcggaggccacagcctaatccaaaanttcgtngcctngggangtnaatccaatttttggctta

SEQ ID NO: 128838 - DNA, 472 bp, Arabidopsis thaliana
ctctttctctgttctaagaaagggaagctctttgtctttgtttgggtccttgccaagatccaatttttacgatcaaaatcgacccggtggaattcagacacgtcttttagatagagatatgtcttgttcatcttcttccggatcagaaggagaagaagagggtttcgatgcttaccgtaaaggtggttatcacgccgtcaggatcggcgatcctttttccggtggtcgttacatcgctcagagaaagcttggttggggtcaattctccaccgtttggcttgcctacgatacgctcacctctacttatgttgctttgaagattcagaagagtgcacaacaatttgctcaagctgcacttcacgaaatcgaatttctttcagctgctgctgatggggatctcgacaagacgaaaatgtgttgtcgtcttattgaccatttcaagcatagtgggccaaatgggcagcatttattc

SEQ ID NO: 128839 - DNA, 522 bp, Arabidopsis thaliana
  unsure (1)..(522): unsure at all n locations
nnnnnnnnnnnnnnnnnnnnnnnnnnnnnnnnnnnnnnnnnnnnnnnnnnnnnnnnnnnnnnnnnnnnnnnccacgcgtgcgcccacgcgtccgcttttcgtccgtaacctgccttacactgcaacagaagaagagcttatggaacattttagcacattcggtaagatatcagaagtccatcttgttcttgacaaggagacaaaaaggtccaggggaattgcctacatcctttacctgattccggaatgtgcggcaagggcaatggaggaattagataactcaagttttcagggccggttgttgcatattttgccagctaagcaccgtgaaacatctgataaacaagtgaatgacacttctaacctgccaaaaacattcaagcagaagagagaggaacaaagaaaggcatctgaagctggtggagatacaaaggcttggaatagtttattcatgcgacccgatactattctagaaaacatagtcagggtgtttggtgtaagcaagagtgagttacttgaccg

SEQ ID NO: 128840 - DNA, 531 bp, Arabidopsis thaliana
  unsure (1)..(531): unsure at all n locations
nnnnnnnnnnnnnnnnnnnnnnnnnnnnnnnnnnnnnnnnnnnnnnnnnnnnnnnnnnnnnnnnnccacgcgtccgagaagcaacagacattactctgttttcatatgaacactcttcatcctcacaagcagcaacaagaacaagcacaacaacaagaagaagctagatacgaatgggatctttctctctccaccgtcgtatcttcctcctcctcctccgcctccgacgttatcggagctattgaattcgatcccactgataacatcgtcgctaccgccgggatttcaagaaagattcgtttttacggcctcccttctcttttacgtaacaacgctgtctccggtaccggagtttccttcgtcgatcaagccaccgcctgcgaatattacatctgtactccggcgaaacttagtagtctccggtggagacccgggtcgggcggtcgggttattgggtcgggagattacgacggcgtagtgatggagtacgatcttgagaagaggacgccggtattcgaaagggacgagcac

SEQ ID NO: 128841 - DNA, 582 bp, Arabidopsis thaliana
tgcttacgcgtccggtctatcatggtctatggtttggatctgatgtggctgtaaaggtgttttccaaacaagaatattcagaagagatcataacatctttcaaacaagaggtatcattgatgaaaaggcttagacatccaaacgttctgctgtctatgggagctgcggcatcacctcagcgtctttgtatagtgacagagtttctaccacgaggaacatgtcaaaactagatttgaggcgacgtatccatatggcatcagacattgctcgtggcatgaattatcttcaccactgtagtcctcccatcattcaccgtgatctgaagtcgtcaaatctactggttgatcggaactggactgtgaaggttgctgattttggtctttctcgcatcaagcatgagacgtacctcactacaaacggaaggggaacgcgtcaatggatggcaccagaagttcttcgaaatgaggctgctgatgaaaagtctgacgtttacagttttggagtagtactatgggagcttgtgacagagaagatcccatgggaaaatctaaaagctattccaggggatggaagccggggggt

SEQ ID NO: 128842 - DNA, 417 bp, Arabidopsis thaliana
cccacgcgtccgcccacgcgtccgtaattgtttggagctttctctccctaactatctcgagccgtagaaattaaagtaaaagaacaaaaactttattatacatttttctcttcctctttaatatatatacattattacaagtttagatttcataaaagaaagtcaagaagaagaaagagctgagacgagaattgaagtgagaaagcatgaggaagcgtcaggtggtgttgaggagagcctcgccagaggaaccttctacaagctcgtcgacggcttcgtctctgacagtgagaactgtgaggtacggagaatgtcagaagaaccacgctgcggcggtgggaggttacgctgttgacggctgccgtgagttcatggcaagccgaggagaggaaggtaccgtggcagcgctaacgtgcg

SEQ ID NO: 128843 - DNA, 441 bp, Arabidopsis thaliana
gcgtgacgatgttgaatctcggaaaaccgcatccgaaagtaacgtaccaccacacgccctcgtcgatgacggaagatgaaatggtagatcttattggaggagagaactctgtggatttgataacggtggctaccgccgtacactggttcgatctcccgagattctacgcgatcgcgaatcgtctcctccgtaaaccaggaggaatcatcgccgtgtggagctacaacactgacatggtggtgaatcccgagttcgactcggtgatgactcggttcatcgctgaaacgttgccgtattgtaaattcccagagagtcagtattttttggacggatataagacgttgccgtttccgtttgagagcgtgggtttgggctcagagggaaagcccatggaactggagatgaagaaaacggtgtcgtttgaaggattcttgcggatgc

SEQ ID NO: 128844 - DNA, 390 bp, Arabidopsis thaliana
tttttctaaccatagtgtatctctgaactgagagtagcaggttgcaattaaaaactaaagattgtgtcagacagacttatgtattaccacaaccagcaccaaggaaagagcatcctctcttcatcgagaatgcccatttcttctgaaaggcatccgttcctcagaggaaatggcacaggagattctggactcattctctccactgatgcaaagccacgactaaaatggactccagatcttcacgagagatttgttgaagcggtcaaccagcttggaggaggagataaggctactcctaagacaatcatgaaagtcatgggcattccaggccttaccttataccatctcaagagtcatctttagaaatataggctaagcaagaatcttaat

SEQ ID NO: 128845 - DNA, 597 bp, Arabidopsis thaliana
cgcctgcaggtaccggtccggccttcccggggcgatccatccgtccgcccacgcgtccgggctgtaccctcaacttctcttgagagtggcaaggtagcaattatttccgaatcaaagaagagaaagaaacataagcctagcaaagaatcccggtacaattcattgtttgatgaattagttcctccctgtatttccttggaggaagatgatagcagcagcgatgactggctttttggaacaagtcggaaagaaaatgtttcttctgccaagtcttcttataagactgatgaagacacgatcatgagcttgcagacgtcaagagattgttcctctttgcctagagctatgttattgtctgaagttggaattttttcattaccatatactgtcccgttttaggtcccatattgttttgttctttctcagcttagccttaggccttagctttgtacagttatcattgtaacaatcacagtgatctatgatacttgaacgatctctgtatttttgacactaatcaaaaatcatggtttccacttaaaaaaaaaaaaaaagggcggccgctctaaaggatccaagcttacgtacgcgtgcatg

SEQ ID NO: 128846 - DNA, 519 bp, Arabidopsis thaliana
gccgttagtatcgccggcactatacgactcatatagggaaagctggtacgcctgcaggtaccggtccggaattcccgggtcgacccacgcgtccggtacttttgctgctattgtgagtgataatatcaagcttctctacttgagaaagagcttagtccaggaactgctcaagtctcctgatacctttgagggtaaaatgttgggaagttttgtgaggatcaagtctgaccctaatgattatcttcgggggtgcccttatcagcttgttcaggtgacaggcgtgaagaaggaacatgggactgatgattttcttcttcaggttacaaattatgtgaaagatgtttctatatctgtgctatctgatgataatttctcccaggaggaatgtgaagatttacatcagagaataaagaacggacttcttaagaagcctactattgtggagatggaagaaaaagctaaaaaattacatagagaacaaacaaaccactggcttggaagagaaattgaattgttaaa

SEQ ID NO: 128847 - DNA, 894 bp, Arabidopsis thaliana
  unsure (1)..(894): unsure at all n locations
cggttctgaattcccggagccgaccctcccgtatctccactagtcacacctaaatccattttctttttccaagccaacccactatatcaaggaaactttcctcatcctcgagtctgtcttcttccttttcctcanattttgagctcccaacgcgctcttggtcttgtagctaggccttgtaatccacttcgacgaggattatctaggtttttatcaagtcgacagcttttccgacgatccaaagttgtcaaggcagtagcaaccccagaccccatcttggaagtacctttaactgaggaaaatgtagaaagcgttttggatgaaatccgaccttaccttatgtctgatggtggtaatgtggcattacatgagatcgatggaaatattgtgcgggttaagctgcagggagcatgcggatcatgtccaagttctactatgacaatgaagatgggtattgagcgtcgtctaatggaaaagatccctgaaatagtggctgtagaagctcttccagatgaagagactggccttgaactgaatgaggaaaacattgaaaaggtgctggaagaaatcaggccttacttaatcggaacagcagatggatcgcttgatctagtggagattgaagatccaatcgtgaagataagaatcacaggacctgcagctggagtcatgacaggttcgtgtagcagtcactcagaaactaagagagaaaattcccatcaatcgcagctgttcaacttatatagaaacaacaactcttcttgtatgctttgtattagctcccttgtatagtattgttgtgcatagattatgtgttttgttgacatttgctatttgtcctcaaataagttttcaacatttttgttttaaatagaaaaaaagtccttattattt

SEQ ID NO: 128848 - DNA, 463 bp, Arabidopsis thaliana
gcgaaacaaaaactcgtggaggagatatgcaattgctgacgctaaatccggcggccatttccaggacgccgccgcaagccatagacccttcctcatcctcgagtcttcttcttccttttcctcagattttgagctcccaacgcgctcttggtcttgtagctaggccttgtaatccacttcgacgaggattatctaggtttttatcaagtcgacagcttttccgacgatccaaagttgtcaaggcagtagcaaccccagaccccatcttggaagtacctttaactgaggaaaatgtagaaagcgttttggatgaaatccgaccttaccttatgtctgatggtggtaatgtggcattacatgagatcgatggaaatattgtgcgggttaagctgcagggagcatgcggatcatgtccaagttctactatgacaataaagatgggtattttagcggcgtctaattg

SEQ ID NO: 128849 - DNA, 482 bp, Arabidopsis thaliana
cgtgcgctttgaaagaagagagagcaaacacagtttttaaattcaacacaccaacaaaagctttggagtctgagccagcttcagctcctgcatcatcatcctcagctgcgactgggcctgtgactgaagatgaaatccgcgctgttctgatggaaaagaagcaagtcactacacaggatcttgtttccaggtttaaggcaagacttaagaccaaagaggacaagaatgcctttgccaatattctgaggaagatctcaaagatacagaagaacgctggttctcaaaacttcgtcgttttgagagaaaagtgaggacttcctgttttcacagctaactcttttcaaaaagatttcaagatatctcatgagctagttaaaataagaatgtttttctcatttcttgatttcagatgtttaaagttggacctatttttttcccatgacactattagtaattgaaaatcttcaaatgttttattcgag

SEQ ID NO: 128850 - DNA, 567 bp, Arabidopsis thaliana
ccagctacatacgactcaccttagggaaagctcgtacgcctgcaggtaccggtccggaattcccggttcggaaacctttctctatttatctctctatacacaacaatggcggtcttcgttttatctctactcatactctcttccttctcagccattccattcacttatgcagattctggaatgatcggagttaactacggccgtatagcagacaatcttccggcaccggagaaagtagttgagctactgaaaacacaaggaatcaaccgcatcaagctttacgacaccgagacaactgtactaaccgcactcgcgaactccggaatcaaagtcgttgtctctctccccaacgaaaacctcgcttccgccgccgcagatcagagctacaccgacacttgggttcaggacaacataaagaagtacattccagcgacggatatcgaagcaatcgccgttgggaacgaagtgttcgtcgatccgaggaacacgacgacgtatctcgttccagctatgaagaatgttcaaagctctctcgtcaagttcaatctcgacaaatccattaagatc

SEQ ID NO: 128851 - DNA, 382 bp, Arabidopsis thaliana
gtgttcatgtcttcatatctctaaccataagataaaactcaagatttctgaagaggacagctctggaattcatatacgttttgcctctccatctgattctcagcttatggaattggagcaaatctgcattttgaaacccgatgatgaggaagaaatggagtcaccatcaccatcgaaaacagaggaaaatttaggcgtggttcctctgtcttgcgcgtttacgagacaagaacattgcgtttccgagacgaaagaacgcgaagaatcgactagaagactaagcagccttatttttctttacctcatcgttatgtccgtacagattgtgggaggttttaaggcgaatagtcttgcggttatgacagatgctgcgcatttgttg

SEQ ID NO: 128852 - DNA, 565 bp, Arabidopsis thaliana
tacgactcactatagggaaagctggcccgcctgcaggtaccggtccggaattcccgggtctacccacgcgtccgatggtgttgacagtggaggtgatccaaaagatattcctaatctgacatttgaggaattcaaggagttccaccgtcaatattatcacccaagcaacgccaggatctggttctatggagatgatgatcccgttcaccgcctccgtgtcttgagtgaatacttggatatgtttgaagcaagtccatctcccaatagttcaaagattaaatttcaaaagctattctctgagcctgtcagactggttgagaaatatcctgctggtcgagatggtgaccttaaaaagaagcatatgttgtgcgttaactggctattgtctgagaagcccttggacttgcaaactcaacttgcacttggcttcttggatcatcttatgctggggactcctgcttcaccactaagaaagatcttattggaaagcgggtttaggagaacctcttgtcagtagtgggttgtcagacgaactcttgcagccccagttcggtattggtttgaa

SEQ ID NO: 128853 - DNA, 475 bp, Arabidopsis thaliana
ctctcgttcaaaatacaaatgaaccgcagaaagtgaatgggtttttgctggtggcctctactgctggatatgcatatagcgataaagatagagcctggattggagctatggctgagaaattcagaggatgacatgagctgttcatgatgatgttatctttgactggtgaaacacttcagttcctacagaaatttctcgaggccataaaccagattctggaaaaccaaagagaataatggcaagtgattagataacagtaagagattaatggatggagaattcttgcttgtttccatgttaccttgaggcgtaccacctttctgattgctaggagtaggccgggcattagggaccttacgtcaattatgtcatgtttaacagtgtaaacctgtggacagcattttgtatcagaagaattttaatgagctatgtagcctaaattttaaaatagagtatccaattttcagtttgaaaa

SEQ ID NO: 128854 - DNA, 1088 bp, Arabidopsis thaliana
agatcgacgatcgaataagtctcgcgctgaaatctatctttgtgcaagcaaactctcgaagaaccttagattgaagatggtactgatcgaatcaagtgagagtgaagacgagatcctcatcaaaaacgaaccaaagccagcgtcttcatcctcaccgcaacccacggagacgaaacaagtcgacggagatgattccgatgggttcgaaactgccagcgaacgtgaaattagcgatgaagaaggagaggaagatggtaccaaaaatgacgccgtcacgagtcaggaggaaccacagcactcggagaagaaggaagagcagattgagctaatgagtgaaggagaagccatagtcgacgacggatcaaacaaggagaaagctttggcagaagcaaatgaggctaaagcggaaggaaataaactgttcgttaatggcctttatgaagaagcattgtcaaagtatgcttttgctttagagcttggtcaggagttacctgagtctatagagcttcgatccatatgctatttaaacagaggtgtatgtttcctcaaattgggtaaatgtgaagaaacaatcaaggaatgcacaaaagccttagagctaaatcctgcctacaataaggccttggttcgaagggctgaagcacacgagaaacttgaacacttcgaagatgctgtcacggacctgaagaagatcttagaacttgatccttcaaatgatcaagctaggaaagggattcgacgtcttgaacctcttgctgctgagaagcgagaaaagatgaaagaagaagctataactaagctgaaggagatgggaaactcgattttgggtcgatttggaatgagtgtggacaactttaaggcggttaaagatcccaacactggctcctactctctttctttccaaaactagtttaatatcgtagttgctcttgatgtattgcttctaccacttaaatgtttagcaacaatctggttaatattgcaatgtgttattgttcttgatgcatacatgaaaaaaaaaagggcggccgctctagaggatccaagcttacgtacgcgtgcatgcgacgtcatagctcgtctgtagt

SEQ ID NO: 128855 - DNA, 488 bp, Arabidopsis thaliana
gagggaaagataaacagtgaattagaaagagaaggaagtttcaatggaatcgctaacatctatttctccttccataattcttcctccggccaccactactacgatccccgtttcaacttcacgatcagtgttgattcgtcttccttcacgccgttcttcttaccttttcggcttgtccagctccgggagacggatttcgatttctagaagaagacacttcgttagctgtaaatcgaccggcggcggaggaggaggatcagataagcttggtggcgatgaagaagagagcgaggaagttgagaaggcgcttcacttggatggtacgatccctgggacttccgatgagtttgtaaggcaagtttcgtcgcgtgcttacgacatgcgtcggaaactcgagcagaccgttgattccactagctatgacgtgttggagtccaacccatggagaggagattcgaagcctgtatatgtattaacacatagagaaa

SEQ ID NO: 128856 - DNA, 522 bp, Arabidopsis thaliana
atgatttaaaaagttgaggaagaagaagatgtagaacattttgaggatgtgatagagggagatgatgttgatcccaataagaccgcgcggccggacgagaatgttgttgaagttgatcatgatggtgtcgaaaagtcaagtagagatggtgattcttcttcagatgacgaagaggctttggcaatcaggctatctgatgaagaagatgataatgcttctgatgattctgaagagctaattagaaacgaaactccccagcttgaagaagtcatggaggtttctaatgatatggaaaaaagaagccaaccgccaatgagaccgagttctcttcctggaggatatgatcctcgtcatagagaaccttcttactgtaacgcagaccgtgcaagttggtgggaattgggggttctttcaaaacatgctcacccctcggttgctacaatggctggaacccttctctcaggaacaaatattgtttacaacggaaacccgctgaacgatttatctctaactgctttcttg

SEQ ID NO: 128857 - DNA, 502 bp, Arabidopsis thaliana
  unsure (1)..(502): unsure at all n locations
atgatactccagctacnnnnnnnnnnnnnnnnnnnnnnnnnnnnnnnnnnnnnnnnnnnnnnnnnnnnnnnnnnnnnnnnccacgcgtgcgcgatattcgcagtacagagtcaaactgtgtgacagacctaccatatgttctgatgaattctctcaattccatcgagaagggttcatactctccctgactttggaggatggaagcattggctatggagaggttgcacctctgaacagtaatgtagagaacttaatggatgttgaggggcagcttcagttagttcttcacctcatgaatgaagctaaatttagttacatgcttcctttgttaaatggctcgatttcttcctggatttggagtgaacttggaattactgcatcatcgattttccctagtgtcagatgtggtctggaaatggctcttctaaacgcaatgggcagtaagacatgattcttctttctgataatgaagtatccccaacaaactagaatcatgtcttac

SEQ ID NO: 128858 - DNA, 566 bp, Arabidopsis thaliana
  unsure (1)..(566): unsure at all n locations
aggtcttcttcggaagcaagctaagtcatggcaacgatttcgtcaactctactcttaaattcttctagatcagctttaccactaagattcccaaaattctcgggattttcttcttcctctccattcgctagatcttacagatttggacgacgtaatctggaaccactttccaacggaatgctttcgtcgggaagtagagccgacggtgctacggcggcggctgcatcgatggaaggagtgatgacggaggcgatgaaactgattcaatcggcgtcaccaacttggaaatcagctgtggctaacaatttattgatttttgttctcggttcaccgcttcttgttaccggattgtccgcttctgggatcgccgccgcgtttttgcttggtactttaacttggagagcttatggctctcctggtttccccttagtcgctgcttacttcgtcataggaacagcgggaacgaaggttaaaatgacggaaaaggagccaaggtttgnccnaaangaaggttnannggccccagtganttgttaaggcccctggtgggctgncttntttaaaaa

SEQ ID NO: 128859 - DNA, 681 bp, Arabidopsis thaliana
gattgatttaggtgacctatagaagactatgacgtcgcatgcacgcgtacgtaagctcggaattcggctcgagctcgagcccgtcttcattcgcttgaacttaccgaattggaccaagttatctggaaccactttccaaccgaatgctttcctccggaagtaaaacccaccgggcttccggcgggggttgcttcattggaagaatgaataccggagccaataaacctgatccattctgccttaaccacctggaaattaaccttggggttaccatttaatggattttggtcctcggttcaccgcttctggttaccgaattgtccgcttctgggatcgccgccgcgtttttgctttggtactttaacttggaggagcttatggctctgctggtttcctcttaggtcgctgcttacttcgtcataggaacagcggcaacgaaggttaaaatgacgcataaggaagcacaaggtgtggccgaaaagagaaagggttgaagaggaccacgcagtgtgattggttcaagtgctgctggttgtgtctgtgcttttctttcaatatatcaagtgggaggagcagttttttcccagcttttccggcttggttttgtttccagtttctggactaaagtttcttacactgtcttgagcgagatatgcaatgcttattgaaaaacatcgtatt

SEQ ID NO: 128860 - DNA, 428 bp, Arabidopsis thaliana
ttttatcgccgccgatattctcacgccggtatgattcgaacaacattcgcgaccgccatcgctcatttccacacgcattctcatggaggagctcaagctcgtcctctacagaacaacacacgagaagtaatccattgtcctgaagcttggttagtcaaaatcgtatctactttgttcgtgtacagagttccagattcagatctctgtttctgttacttaagcaagaatctaaatccgtttatctcctttgaggttgtgaagaaattggataacaatcctcacatagggtttcgattttgggagtttagtagattcaaattgaacattcgtcattcgttttggacttataatttgctaacgagatctctttgtaaagccggcttgcacgatttagccggtcagatgtttgagtgtatgaagagcgatgg

SEQ ID NO: 128861 - DNA, 553 bp, Arabidopsis thaliana
  unsure (1)..(553): unsure at all n locations
cnnnnnnnnnnnnnnnnnnnnnnnnnnnnnnnnnnnnnnnnnnnnnnnnnnnnnnnnnnnnnnnnnnctagtccacgcgtccgcccacgcgtacgcagcttttttcccatcttcttcttcgcatcacatattcttcattactaatatatctcctactccagtcttcctccatgaattcctgtagcttaggagctcctaaagttagaatttttgcaacaaatttcagtagattaagatgtggaaacttgctgataccgaacaatcaaagactatttgttgaccaaagccctatgaagtatctgagtctgagaacgactctgcgatctgtgaaagctatccaattgtctactgtcccacctgcagaaacagaagctattgcagacgtaaaagattctgacgagaccaaatcaactgttgtgaatactcacctcatgcccaagtcctccgaggtggaagcactcatcagcgaaatcaccgattcctcatccattgcagagtttgaactcaaactgggaggtttccgcctgtatgtagcaaggaaattaactgacga

SEQ ID NO: 128862 - DNA, 573 bp, Arabidopsis thaliana
  unsure (1)..(573): unsure at all n locations
nnnnnnnnnnnnnnnnnnnnnnnnnnnnnnnnnnnnnnnnnnnnnnnnnnnnnnnnnnnnnnnnnnnnnnnnnnnccacgcgtccggttggtggacctgctccgggaatgatgcagcctcagatctctcgtccaccacagctttcagctcctccgattattcgacctccgggacagatgttgccaccgcctccttttggtggtcaaggtcctcctatgggaagaggtcctccaccgccttatggtatgaggccaccgccacagcagttttctggaccaccaccgcctcagtatgggcaaaggccaatgattcctcctcctggtggtatgatgagaggacctcctcctccacctcatggaatgcaaggacctcctccgcctcgccctggaatgcctcctgctcctggtggttttgctccaccgcgtcctggcatgccaccacataatcagcagcagtgattaggttagcagtgaatgaacaggactcttgtctcggctttttactgtttttgtcgctgttttcttgagattatgaaggctctaagatgtttgattgaacttcctcaggtttacg

SEQ ID NO: 128863 - DNA, 458 bp, Arabidopsis thaliana
atccgccctagggttttcttccatacacaatcagactcaacgataagtaccaatcggagaagagatcacaagtggatgatgagttacgaaggcaacggagatggtgtcgctatctccaccgaaaaccacaacgagaactacatatctctagagagctcgccttttcatgaagactccaagtctcgagaatctcatgatcttaaaaaggattcttcgaaaatcagtgagaaagacaatgaaaatggacgtgataaagacggaaacaaagatcgtgatcgtgagaaggatcgtgatagggagaagagcagagacagagatagggagaaaagcagagatagagatagggatagggagagaagtaaggataggcaacgagaccgtcatcatagagatcgtcatagggaccgtagcagagaacgtagtgagaaaagagatgatttggatgatgatcatcatcg

SEQ ID NO: 128864 - DNA, 373 bp, Arabidopsis thaliana
  unsure (1)..(373): unsure at all n locations
tgatttaagattgcatcaatgaagaagaagaggtcaagcacggaggttgatggtgcttcaacagctgctgcaaaggaagcagctgcgaggaaggcaaagttggccgcagcgaagaaaaaagaaaagaaaaactacaatcagcaacctgtgaggtgaagaaatcaatccacccaccgttgtgatatgaacataggttttgttcatatgagacttacttgccttgaacaaatcttttgatggggaatgtggttgggtcgtgttttagagttatgataactttggatcttttaatcctatcacaatgggacatgacaagaagaaactctgtatgaatttttccttttacatacattctttgctcatatntattgag

SEQ ID NO: 128865 - DNA, 519 bp, Arabidopsis thaliana
  unsure (1)..(519): unsure at all n locations
attcaccttcttcctcaaaattntctctttctctctncttcgaaattcttcctcctctttttctgcagaaactatccaaaaatctcttcgttttcacaatttctcattattaaaaaaaaaactttaaattcttcttcttcaagaaaaaatggcggtggatcttttatcggaaaattctaatatgagtccaagaatctcattttcacgtgacttttgtcaatcagacgcaataccaatcgagaaacgtcccttaagatcatcaaactcgaaaccatcaagcctcaattcaagcatagatttcgatttctgcattcccggcggcgtaaattccggcgaaagcttcgatcaaggttcttggtccgccgatgaactcttctctaacggcaaaatcttaccaacggaaatcaagaaaaaaccagaaccgggtaaaaaagaaccagaaccaaaaccggttaaatctaaaccggattcaagaaaacagaggaaacaaccaaacgaagaacaacaagaagacgacgt

SEQ ID NO: 128866 - DNA, 506 bp, Arabidopsis thaliana
tcgcaaatgatgaatcacacgatgatatacatgtacaagaaggctggcaactatgagaaagctcgaaaagtattttcttcaatggttgggaaaggagttccccagtctacagtcacttacaatagccttatgtctttcgaaactagttataaagaagtttctaagatctatgaccagatgcaaagatctgatattcaacccgacgttgtaagttatgctttacttatcaaagcatatggaagagccagaagagaggaagaagctctatctgtttttgaagagatgcttgatgctggtgtaagttatttgtctttttatctttcaggccaacacataaagcttataacattttgctggatgcatttgctatttctgggatggtggagcaagcaaagactgtctttaagagcatgcggcgggacagaattttcccggacctctggtcgtacacaactatgttatcagcatatgtgaatgcatctgacatggagggtgctgagaaattc

SEQ ID NO: 128867 - DNA, 572 bp, Arabidopsis thaliana
  unsure (1)..(572): unsure at all n locations
tcgcnnnnnnnnnnnnnnnnnnnnnnnnnnnnnnnnnnnnnnnnnnnnnnnnnnnnnnnnnnnnnnnnnnnnnnnnccacgcgtccggaaagagcttcgtcttcttcatctccatcattatctccattgacattgttctcaattgcgaataataatcataattattcacacaaccaaagcattcatctctcagattctcttaaaaaaatggagaaatcagatcctccaccagtcccaaagcccggcgccactattatcccctcctccgatccaattcctaatgccgatccgattccatcttcttccttccaccgccgatctcgctccgacgatatgtccatgttcatgttcatggatcccctctcctccgccgcaccaccttcctccgacgaccttccctccgacgacgatctcttctcttctttcatcgatgtcgatagcctcacctctaatcccaatccctttcaaaatccttccctctcctccaactccgtttccggcgctgctaatcctcctcctcctccttcctctcgtgctcgccaccgtcacagcaattccgttgacgctggatg

SEQ ID NO: 128868 - DNA, 313 bp, Arabidopsis thaliana
tcaaacagagaggaagaagatgaagcggacggtgagggactacgcgattcgatcatcggtggtggcgttgggatcattggcctttggttacttgtcactggagctgggttacaagcctttccttgaaaaggctgaacaatacgaaagatctcttcagtcttctcaacaacatcaacaacaagatgaacaagaagaagcgaggtgggacaatagcaatgtcgaggggtgggaggagaaaaggtagtcttataatcggtttcaatacagacatatcaaagtgtgtaaggaagaagaaccttatcaaaattttctt

SEQ ID NO: 128869 - DNA, 765 bp, Arabidopsis thaliana
gatggcgtcgttggccgcaccggacctgaattcccgggtcgacccacgcgtccgtgtctgaaaaatctagaaacagcagcaatttggtttctctatccgattcgtctctctcacgccctcacgtttctccacctcatcctcaaactaaccacaagacctcttttttagagtaaccaatcacagagagatagagagagagaacagagtcaatgtcaatggcgtctatagcttcttcttcttccaccaccctactctcttcctctagggttcttcttccctccaagtcttctcttttatctcctaccgtctctgtccccagaaccctaccctcttcctcggcatcatcctcttctctctgttccgggttctccagtctcggttccctcaccaccaaccgctccgcctcacgccggaacttcgccgtcaaggctcaggctgatgatttaccactggtcggtaataaggcgcctgattttgaagctgaggcagtttttgatcaagagttcataaaggtgaagctctctgagtacattggcaaaaagtatgttattctattcttctaccctttggacttcacttttgtctgccccactgagattactgccttcagtgaccgttatgaagaatttgagaagctaaacaccgaagtattaggggtctctgtcgacagtgtgttctcgcatctcgcgtgggtccaaacagacagaaagtcgggagggctcggtgatctgaattatcctcttgttcggatatcactaaatccat

SEQ ID NO: 128870 - DNA, 447 bp, Arabidopsis thaliana
tttctttcgcgtgggcggacgcgtgggcggacgcgtgggcggacgcgtgggcggacgcgtgggatagagagagagaacagagtcaatgtcaatggcgtctatagcttcttcttcttccaccaccctactctcttcctctagggttcttcttccctccaagtcttctcttttatctcctaccgtctctttccccagaatcataccctcttcctcggcatcatcctcttctctctgttccgggttctccagtctcggttccctcaccaccaaccgctccgcctcacgccggaacttcgccgtcaaggctcaggctgatgatttaccactggtcggtaataaggcgcctgattttgaagctgaggcagattttgatcaagagttcataaaggtgaagctctctgagtacattggcaaaaagtatgatattctattcttctaccctttgga

SEQ ID NO: 128871 - DNA, 552 bp, Arabidopsis thaliana
  unsure (1)..(552): unsure at all n locations
cccacttatcatattagaatgtcctcagtccgtccgattccggcggcagctccatattataacttttttgaaattcgaccataaaaccgtcatccacaagattcttcacacagaggaagcaggatccgaatcagaacctgaatcagagattttgagcagagggaaggagtcttgtaaagaggagatggagaattttcttcggcggccataccaattagggagttgcaagaggatatcaagaaaggattagcctcaaccgcgcctgttcatcaccgtttacagatcgagtttcattacaccacaaacgcagagattaccagtctataaaagcctaggcagagttgctaacggtttgttgagtttcttgtaagttgtgtacctaattgggaaaggggatttaaagttaaccagtttgatctaactatccaaggaatttacttttttgcctcttcaaaaaaaaaaaaaccatactaaaaattaganaggggggggcggccgcttttaaagatccaaacttacttacgcgtgctcgcaanttataatttttttttg

SEQ ID NO: 128872 - DNA, 671 bp, Arabidopsis thaliana
  unsure (1)..(671): unsure at all n locations
gccnnnnnnnnnnnnnnnnnnnnnnnnnnnnnnnnnnnnnnnnnnnnnnnnnnnnnnnnnnnnnnnnnnnnnnnccacgcgtccgcccacgcgtccgatcttatctctccaagatctggggatttcgtatgcatgggaccaaggcagcagcttctgttgtagaagaacatgtctcgggggcagaacgtgaggatgaagaatatgctgatgtagattgggacaaccttggattcagtcttgtacggacagatttcatgttcgccaccaaaagttgcagagacggaaacttcgaacagggttaccttagccgttacggcaacatcgagctcaaccctgctgctggaattctcaactatggccagggactaatagaggggatgaaagcgtacagaggagaagacggtagggttcttctcttccgtccagagctaaacgcgatgcgtatgaagataggagctgagagaatgtgtatgcattctcccttctggttcatcaagtttatttgaaggngttaagcagaccgtttttgcaaacaggngttnggtccccctccngggaaaggctcnttgntcncaaacccnttttttcggaantgggcnaacttgggnttgcttcaaaatnaagggacacggtttttnnntttggccccccntnaaacttnttttgggggc

SEQ ID NO: 128873 - DNA, 559 bp, Arabidopsis thaliana
  unsure (1)..(559): unsure at all n locations
accacgcgtccgatttcaaccactctctgtctctcttcctctttgtagtttctcaaatattttcttcagagttggcacgacctcattaataataatcttctctacacctatcaataagagatatattttagagtttcactttggtgcacaaacaaagctcgtacaacattcttcgtatatggctcttcgtcgctgcttacctcaatattcaacaacttcatcttatctctccaagatctggggatttcgtatgcatgggaccaaggcagcagcttctgttgtagaagaacatgtctcgggggcagaacgtgaggatgaagaatatgctgatgtagattgggacaaccttggattcagtcttgtacggacagatttcatgttcgncaccaaaagttncagagacgggaacttntgaacaggggttaccttagccgttacggnnaacatcgngcttaanccctgcttgctgggaatnttcaactnttgggccaggggctnattagaggggggtnaaagcggtncagaggngnagncggttngggttntttttttccgtcca

SEQ ID NO: 128874 - DNA, 567 bp, Arabidopsis thaliana
tctattcgacttacttagggaaagctggtacgcctgcaggtaccggtccggaattcccgggtggagccgcgcgtgcgcccacacgttcgcccacgcgtccgatttagtttcacaaaatcctttattgctgaatggttatgttgttacatagtgtgggactaattccatgttcaaaccaacaaaagtcttttctcttccatagttattaccgttacagatgcatagtttgttcatctgaaacaggtttgtccataagaagacaagctttggagcaagttgattctaagttgtctagtggagacgaaagagctgcattgtctcttgtcaaagatctccaaggaaaacctgatggccttcgatgttttggcgctgcaaggcaggtgcctcagagactctacacgttggaggaactgaaactgaatggtattaacgcagcttcacttctctcgccaacagatacaacgcttggctccatcgaaagaaaccttcagatcgcagctgtctcagggggaatagttgcttggaaagcctttgacttgagttctcaacagcttttctttcttactc

SEQ ID NO: 128875 - DNA, 795 bp, Arabidopsis thaliana
taccgctccgaaattcccgggtcgacccacgccgtccgaccataaaactaggtttcacactttctctctaaacactgtctcttttctccgatacatatcccgccgcttcccctgtgtttttcttcgccgtccgtcgttcttttcaactccttagctgcgatattaaagtctagacacaatgagaggaaggagctacacgccatcaccaccaaggggttatggaaggaggggccggagccctagccctcggggccggtttggtgggagtcgtgacagtgatctcccaaccagtctcttggttcgcaacttacgtcatgattgcaggcaagaagacctcaggaggccatttgagcagtttggtcccgtcaaggacatctaccttcctagggattactatactggagatccaaggggggtttggattcattcagtttatggatccccctgatgctgctgaggctaaacatcaaatggatggttatcttcttcttggtcgtgagttgactgtcgtatttgctgaagaaaaccggaagaagccaactgatatgagaacaagggatcgaggtggcaggagccacagattccaggacagaagacgttctcctccttgggactcttcggctccatctcgtcggggtcgtagatcatgatcacctcgctggggatttaatttatcctcccctaaaagaaaataatatagggctgtgctaccttacgcttaaacaatttgagaaggagaaggcattactttttgtttaacccccccaataagggtttcagggtttcccaaccgga

SEQ ID NO: 128876 - DNA, 450 bp, Arabidopsis thaliana
aaaaaaaaataagataataaaaggacgaggcaaacacgaagagctcacaacgagattcatgctttcagatttcaactgtcaccggaagttggaagttcgtttgtgataggatctaaacaagtatcaaagtctacaaattctggattaagcaagttaaagacttgtgattcccctgtatcttcaacaacctcgtcttccaaaactttatccaaagacatctgtggatagccatagcaagccgcagttacattatacaggaaaggtaccacttaaggctttgcattccaaagaaaatgtcacagtcgctttgtttgatatgtttggtctgtggattgttaacattccataaagtcgatatggatcttgcataggcttgcttactcttttgatccagctgcaaagatcttccaagtgaaaaagggtagtgagttctctgattcatacatggaa

SEQ ID NO: 128877 - DNA, 451 bp, Arabidopsis thaliana
ggagtagtgaatctcggaattgttgaagaagacggtacaccggaatcaattgcgattttcatttatgggcggacgcgtgggatctgtagcgacggcgaaatcttcgacggcggtgatgagctccattccgccttttctgagcaaaacgtacgatatggttgacgatccattgacggacgacgtggtgtcttggagcagcggaaacaacagcttcgtggtttggaacgtgcctgagttcgccaaacagcttctaccaaagtatttcaagcacaacaatttctccagcttcgtcagacagctcaatacttatggttttagaaaagttgatccagaccgctgggagtttgcaaacgagggctttttaagaggccaaaagcaaatactaaagagtattgtccggcgaaaacctgcacaagtgcagcctccacaacaaccttaagttcagcactca

SEQ ID NO: 128878 - DNA, 529 bp, Arabidopsis thaliana
gccggcacgcctgcaggtaccggtccggaattcccggggcgacccacgcgtccggcttgtttagcttgccgggtctcgatgtcttcaacattggaaccattggatgcaaaaccgaaggcaatgcctcaaccatcgtcgaaggcataaagaacacattgatcaaccatccacgcttctctagcatactggtgactggtcatggtgagcacaaaggaaaagctagatggattccaacgaaaataaacgtagaagagcatgtcattgttccggatatagatcccaacattgagaatcctgatgagtttcttgaagattatacatcaaacatggctctttctccaatggatatgtccaaacctttatgggagtttcatttattgaaacttaaaacatcacatgcggaagctgtgaccgcggctaggttccatcattctttgggcgacggaaggcccttatgtctcttttactcgcttggactcggaaaacatgtgatcccgaagcaccccccacttttggggctccgaaaaaa

SEQ ID NO: 128879 - DNA, 666 bp, Arabidopsis thaliana
  unsure (1)..(666): unsure at all n locations
nnnnnnnnnnnnnnnnnnnnnnnnnnnnnnnnnnnnnnnnnnnnnnnnnnnnnnnnnnnnnnnnnnnnnnnnnngagccaggcgtccggcttgaaaggcatataatgagcagtggtggaacagcagctagtcactggccttggtttaagaagatggaagatattgtgggcaattcattagccttgaaaggcgcgtctgatgaagatagaagcggaagctcaatggggaatactgtgaagccagctagaaggtatcctctggtaacatataacccaggagttcagattaataacgtcaaatcaaaggctacatcaaaccctagatggcgaagagtggttctaaaaatcagtggtgcagctcttgcctgcaccggtcctaataacattgatccaaaggtaatcaatctgattgcaagagaagttgcaatggcttgtcgtcttggtgtagaggtagcgatagttgttgggagtcggaactttttttgtggcagcacatgggtaactgccactggtttggatagaaccactgcatattatataagtatgagtggcgtctgtgatgaactctgctttacttcaatcctccctggagaaataggggtgcaggcacggttccaactgcaatatcggttaagggtgtcggggagccttacaatccgtaacgagc

SEQ ID NO: 128880 - DNA, 632 bp, Arabidopsis thaliana
  unsure (1)..(632): unsure at all n locations
nnnnnnnnnnnnnnnnnnnnnnnnnnnnnnnnnnnnnnnnnnnnnnnnnnnnnnnnnnnnnnnnnnngccacgcgttcgtccatgcgtacgcccacgcgtccggagaaatcaaacccggcgaattggactatcgttgtcggagtttgtcagtggatgaattgccatggctaaatctaaccaaaacttttctccgtatgaagagacccagccgattgattctaatccaccttcttcttctgattctggcgaggataaagatagcttgcttggggattgtgacacacaacctgttgatgacaatgctttgattaatgatcagtatatggagactcaggtcatggatactgaatgtgataatgaagaatttcttctttgtaatgaaactcaagcagttgatttgggatttgaaaccggagaagaagtacttgtagaggggaaacaggtacttgaagcttctgatggtttggctactcagggttgggatctttgtgatgatgaagttgttgtggatagtgatgatgaccgtactgttgtgttggagggcatcagcgatctctctgatagtggtgactcgggttgcaaagcggaacctgtcgtttctaggaagagataggccggtgctaatgaaagg

SEQ ID NO: 128881 - DNA, 745 bp, Arabidopsis thaliana
tctaattcgacttactatagggaaagctggcacgcctgcaggtaccggtccggaattcccgggtcgacccacgcgtccggaaactgaagaaagccctaagaataaaaagcctgttgtgggaatggaacaagctgcagagaggagttcaaccattgttgcatccacctctgaagggtcggattttgatccgatatctcgattgaggaagctcttgttccgccaaatgcttgtgggaatcaaagacggcagattcttccttggaaatttccattgcattgacaaacaaggaaacatcattctccaagacactgtggagtatcgtagcatacgaagatcatctccttcgcctactgaacagcgttgtcttggtatgatcctaatcccttcctcttgcaggacatcttgccatgttgattgctctatcgatgaacagctttcgttgattcagctgaaagagtagagcttcttttaagacttcatgagagaatctttccaagtttcatcaatgttgtaaccaataataggtcttgtcatggatttagtctcttcatcatggccaaaatcaaaattttattccatgtctttgtatggtcaatgattcacatgtttttgtgaagatatatgtatacattggaaactgtttttgaactttttgtatttacaaaaaaaaaaaaaaagcgcggccgctctagaggatccaagcttacgtacgcgtgcatgcgacgtcatagtaaatctatagtgc

SEQ ID NO: 128882 - DNA, 650 bp, Arabidopsis thaliana
  unsure (1)..(650): unsure at all n locations
nnnnnnnnnnnnnnnnnnnnnnnnnnnnnnnnnnnnnnnnnnnnnnnnnnnnnnnnnnnnnnnnnnnnnnnngcgcccgcgcgtccggtttaatcacaagtattcatctcgacgagctgttcgtcgactaggtacacgcgcgatcagatcagcgtcgctttcggcgatggctatggtaaccagatatacgcaccaaggcttgatgatccatctacaaaaacgtttgagcaatgttcatcagatacatttcagataaacggaccatgtacataccagatatgctatgtatatctctacaggtctggtccagatggttggatcccaaacactgtaaagatatatagccatggctctaaagcggtcaccttcccatataacacatatgttcctgagagtgtatggtatggtttcaattactgcaacagcgcctcagattctaatgtccttgccattggtctcagaaggagcgtgatcatactcctaggttttgttgtcagccggaccacattgctcttgtaagcctgttatgttccggttttgtataaacatattaggacttgtgaagaataaatgtgtaccgttttggggaaatgggtctcagaactgtattaagtattaaccataaatctatgatgaagttacttactcct

SEQ ID NO: 128883 - DNA, 581 bp, Arabidopsis thaliana
cggaagcgtgaggccttcaccaccaaatcggtgcctccttgaatagtcgccgccgtcgtctatcatcgccgcttgtgactccgatgagaagctaggttattgaatcagagattatggctgcttcaatttcaagaaggatttttcgcacttttggatccttttcagctctaggacgttcctcttcaccaaatttgtctgcgaatacatctggaaatggtttagcttctcttactaatgatctaaagtatggaatggctttactttccaaccgaaagctctccacttctattttgactcctgatgattcatttccttctgatttacttaccaaaaagactgtgcttacaccagaccgaaccataggacaatatcaagacttggtcattccagtgactaattttcagaacgaggaaaagggtttcatggttctagcaggcgatgtctttgatgttccaataaggaaagatatcattcacaatgtcgtgcgatggcagcttgcgaaacgccagcaagggaactcattcgaccaaaacgttagtgaggttagtggaactggtagaagccatggaatcagaaggtac

SEQ ID NO: 128884 - DNA, 407 bp, Arabidopsis thaliana
  unsure (1)..(407): unsure at all n locations
taccggaatgatcttcttattgagcttagtaggcatcacaccattagctgaacgtctcggatatgccaccgagcaattagcttgttacactggttcaactgttggaggtctcctaaacgctacatttggaaacgtgacagagctgatcatatcgattttcgctcttaaaagtggaatgatacgtgttgtacagctgacattgctcggctcgatactttctaacatgttacttgtacttggctgcgccttcttttgtggcgggcttgtattttcccagaaagagcaagtctttgacaaaggtaatgctgttgtgaattcgggattgcttttgatggctgtcatgggactactcttccccgcagttcttcattacacgcacagtgaggntcatgctgggtcatcagagc

SEQ ID NO: 128885 - DNA, 527 bp, Arabidopsis thaliana
gcggacgcctgcaggtaccggtcccttatcccggggctaaccagcgtccgctctcctctcctttgcctattttctaaaatcttctccggccacccaccggccaccttatgatctttttggtggcggcgattacaccatcaatttgttagtttatttatatattaatatgggttgcggtggctcgaggcttggaggtgtggcgacgacaagggcggaagaaggcggggttgtgccacttccagcgggaatacgtccccttctccggcgaaggttagaggagatgaagaaacggagccatgcaggcgtcttgaaagggagccagacgttgtctaagaaagagcttcttaggcataactcttccgaggacggagaagatacggaggagaacgacggtagcttgaaggcgtccgctaaggttgctccggcgcctgatcataatgtagaagagaagaaagaggttatttatgaaaagattccatccaaagatgatgttaaagaggtgaaggaagaagaagttggaacaaaca

SEQ ID NO: 128886 - DNA, 455 bp, Arabidopsis thaliana
tcgcagtaaccacacagagaaattaagaaccctaatttaaaacagaagaatggtacattcgaagaagttccgaggtgtccgccagcgtcagtggggttcttgggtttctgagattcgtcatcctctcttgaagagaagagtgtggctaggaacattcgacacggcggaaacagcggctagagcctacgaccaagccgcggttctaatgaacggccagagcgcgaagactaacttccccgtcatcaaatcgaacggttcaaattccttggagattaactctgcgttaaggtctcccaaatcattatcggaactattgaacgctaagctaaggaagaactgtaaagaccagacaccgtatctgacgtgtctccgcctcgacaacgacagctcacacatcggcgtctggcagaaacgcgccgggtcaaaaacgagtccaaactgggtcaagcttgttg

SEQ ID NO: 128887 - DNA, 532 bp, Arabidopsis thaliana
  unsure (1)..(532): unsure at all n locations
nnnnnnnnnnnnnnnnnnnnnnnnnnnnnnnnnnnnnnnnnnnnnnnnnnnnnnnnnnnnnnnnnccacgcgtgcgcccacgcgtccgcaaagctcagtgtttaataattgtatagcttttttggtgaacgaagagtcagatcggcgagcctgagatgggttggggttcggtgttgctattactggcggtggctcttctttgtcagagggcaagttcaatcggagctaactggggcacacaggcgtcgcacccacttccaccggacatagttgtgcggatgctaagagagaatggtattcagaaagtaaagctctttgacgccgaatacgacactctcagagctttgggcaaatccggaatcgaagtcatggttggtattcccaatgagatgcttgcgactctcgcctctagcctgaaagctgctgagaaatgggttgctaaaaatgtctctactcacatctccaccgaccacgtcaacatcagatatgtgggctggtggggaatgaacctttcttgcctacttataatggg

SEQ ID NO: 128888 - DNA, 1164 bp, Arabidopsis thaliana
  unsure (1)..(1164): unsure at all n locations
atacctcttctcgtaggtctcctctcaactcctttttctcgtattcaagaacattcggtaacagctcttctaaacctctccatatgtgagatctaacattaggagccattgtttcagctggagcgattcctggtatagttcaagggcttaagaaaggaagcatggaggccagagagaatgcggcggctacacttttcagtctatcagtgatcgatgaaaataaagtgactatcggtgccttaggagcaattccgccactcgttgtattacttaatgaaggtacacaaagaggcaagaaagatgctgctactgcactctttaacctctgtatataccaaggaaacaaaggaaaagctatacgtgcaggagtgattcccacgttgactagactcttgacagagcccggaagcggaatggtcgatgaggcactcgcgattttggcgattctctctagccaccccgaaggaaaagcaatcataggatcctctgatgcagtcccaagtttggttgagtttatcagaactggctcgcctagaaacagagaaaacgcagctgctgttctagtccacctctgttctggagacccacaacatcttgtcgaagcgcagaaactcggccttatgggtccattgatagatttagctggaaatgggacggatagagggaaacgaaaagcagcgcagttgcttgaacgcatcaagccgtctcgctgaacagcagaaggaaacggctgtgtcacaaccggaagaagaagctgaaccaacacatccagaatccaccacagaagctgcagatacttaaagattgtctttgttttggatcctcgggtcatctctttcacagtacgtatgtttattattctcactttttgtttgtgctactcatcctccctcgaggtaggattcacggtagacgcggaagagggaaatggcctccttctccgatctacttttaactttatggtgatatctttgtgtggacagagcaatctggtccacaggagagaaaagcaaatatgcatacatacacgtcaacttgtatcattgtaacactatgtttgtaatcatttccacgaaaaaaaaaaaaaaagggcggccgctctagaggatccaagcttacgtacgcgtgcatgcgacgtcatagnnnnnnnnnnngtaacgaaat

SEQ ID NO: 128889 - DNA, 484 bp, Arabidopsis thaliana
gaacgcatcagccgtctcgctgaacagcagaaggaaacggctgtgtcacaaccggaagaagaagctgaaccaacacatccagaatccaccacagaagctgcagatacttaaagattgtctttgttttggatcctcgggtcatctctttcacgtacgtatgtttattattctcactttttgtttgtgctactcatcctccctcgaggtaggattcacggtagacgcggaagagggaaatggcctccttctccgatctacttttaactttatggtgatatctttgtgtggacagagcaatctggtccacaggagagaaaagcaaatatgcatacatacacgtcaacttgtatcattgtaacactatgtttgtaatcatttccacgagcttttttttgttttcaatacaagatctctctgttcgctttcttaatagcattgagatactaattgaatataatgcagattcccatttttcataattaat

SEQ ID NO: 128890 - DNA, 574 bp, Arabidopsis thaliana
  unsure (1)..(574): unsure at all n locations
tttccgacatgatcaagatatcttaactttagccattaattcaaagtttttttttctttctaatactcgaaatggctttcttaaggagttttttcgctaccaagcatatcattcgccggtcttttactacggaatcattatcaacgcctaaagggttctttgctgtgtatgttggagaaaatctgaagaagaagagatatcttgttccggtttgttacttgaacaagccatctttccaagctttgcttaggaaagcagaagaagagttcggttttaatcatccaacgggcggtttgagtttaccatgcgacgaagctttcttcttcactgtcacttctcagattcgttaatcccatacaataattaaagtcttttttacattctcttatttatagaagaaaatacacattgtacatactatacttttatatacatcctgatgagaagaataattccccgaccatcttttgcttaaaaaaaaaaaaaaaacaaaccccaagnnnnnnnnnnnnnnnnnnnnnnnnnnnnnnnnnnnnnnnnnnnnnnnnnnnnnnnnnnnnnnnnnnngtcccaa

SEQ ID NO: 128891 - DNA, 644 bp, Arabidopsis thaliana
  unsure (1)..(644): unsure at all n locations
agaatggaaacggaaattctgaggaaggtgagaaaactttcagcattttgttagagggaggagaaacaggaaacaaacactgagaatgccaatcagtttgcttaaccggccttatgattctcaaccgttcaagcttggctatagcagagttatcagagacagcgaggctccaaagtctgtagcttgaaacactctccaaagattgagctaattcgatgaaatgcaaactcacacacacatctctgatatttgctgtttcatagggacaatataaaggtagtttcattcacagtcatgggaaactgaggcttgtgatagcctcgaaatgaagttacaatgttttggattttgaccggaaaggttgtgcagaggtgagaaaaagccaagccattcttttgtttaccaagtgaggtgatataacatttttctggggtttttcttttaattcagccaataaaacgtaggaaattttggacataattttttcttttatggttcttcatgtttaaacattagttttcacgtaatttacttgcgtatttctcatcgaaaaaaaaaaaaaaaaaagannnnnnnnnnnnnnnnnnnnnnnnnnnnnnnnnnnnnnnnnnnnnnnnnnnnnnnnnnnnnnnnnnngtcctaaa

SEQ ID NO: 128892 - DNA, 416 bp, Arabidopsis thaliana
taccgcactgtgagagtgaaaaagactatgatttgctgccaaaggtggttgagttttctgaggaaaatggttatagaagtgcagaagagaagtcttctaaagtagagaccctcgatggcatgaacatgaaacttgaggaggacaccgagaagaaggaaaagaaagaacgttctccagaggatgagacagttgaagttgaattcaaaatgtgggaaagttgtcagattgagaagaaagaagtttttcataaagagtctgcaaaagaagaagaggaagacttaaatgtggtggaccaaagccagaaaacctcgccagtaaatggattaaccggagaagatgagctgttgaaagagaaagagaagaagaagaagaagacattgtttggtaaagttgggaatcttctcaagaagaaagga

SEQ ID NO: 128893 - DNA, 570 bp, Arabidopsis thaliana
  unsure (1)..(570): unsure at all n locations
gaggcgaagcgcaccggaggaaccataagtcgataaacccaaagcttagatgaacggtgagttgacttctttccgattttgacccaatcatctatcgccacgtcataggttactgcgtcctctgcaatccataccctgaaccggcaccttctctgtctctcccccaaatcgaaaacctaattcgatcgtcgtctccgacctacatctgccggaaaatatcttttgaccatggatttcaggattgataatggagtagctgctgggatgatgatggggattcctgttgagcttgaggttaccacggttgagaatcataatgaaatgggtgaaagctctggtcaagcaatgattgagcaagatgatgacaaccataatgaactcggtgaaaattctggtgagcaagatgagaaggtggatcttgattctattcctctggctgttgcagatatgacagaggctcaaggagatgagccttacgttggccaggagttcgaatctgaagcagcggctcatggtttttataatgcgtatgctactaaagtanggttcgtcatccgtgttagtaaactg

SEQ ID NO: 128894 - DNA, 501 bp, Arabidopsis thaliana
  unsure (1)..(501): unsure at all n locations
cgcctgcaggnaccggnccggctttcccggggcgatccacccgnccgccgactttcaacgaaaactcagtgcctcgtccctctctttcaaaaaggtttttggttatggcgacgaagaaagtgatagctatatgtcagtcaggaggagagtttgtaactaataaagatggctcattagcttattctggtggtgatgcttatgccatagacatcgatcaggacacttgtatgagcgatttcaaatccgaattagctgaaaatttcgggtttagttgggagaatatgacactcaagtacttcctccctggaaacaagagaaccttaattactatctctaaggataaagatttccaacgcatggttagcttttccgcagacgcaccaaatgtcgaaatcttcgtcttacccgaagaagccgaagcaaggaatgtctccaacatgccagctagtagatcaagtaggacaactgcatcagaagcagtggtacctgtagtgtctgcag

SEQ ID NO: 128895 - DNA, 848 bp, Arabidopsis thaliana
atgatataccaagcaactatactgactcactttagggaaagctggtacgcctgcaggtaccggtccggaattcccgggtcgacccacgcgtatggaagagggcaaaatcgttcgcagaagaagcgggtaagaagtctcagacgataacacaatcatcctccgcgaccttcgtcaatctcgtcaccgagactgctaagaaatccaaggaactcgctctcgaagcttcgaagaaagctgatcaattcaatgccgccgatttcgttgctgaaacggctaagaaatccaaagaattcgctgctgaagcttcaaagaaggcggatcagttcaaagtcgccgcgctgaaacaagctgatcagatccagaacatcaaatcgatcgctgatataatcgggaccgggaccgggtcaggatccggttcagaagcggagcttctcgaattcggtgtaacggatgatttgagagagttcgctgaaggcttgacctctgctacattccaagcttttcctgatcaagatcaaggggatgaagtttccgatgtgataacaaatgcttcgaatgttcgaaaggatctctcggattggcaagagagacatgccactctggttctaacctctgtcaagcaaatctccaagttaagatacgaactttgccctcgtttcatgaaagaaaggaggttctggaggatttatttcacactagtgagcactcatgtttctccatatgagaggaagtacatggaggaacttaagaccaaaggagagcatggaaatgaagaagctaagaaggctccagcgactggagagacagaaacagtcgaaaagaatgttgcaatccgtagaacatctact

SEQ ID NO: 128896 - DNA, 433 bp, Arabidopsis thaliana
ttcattttctctgcatcagagattccggtgtccttcttcctttcactcgcgtataacctcttttccttgacgttgtctccgtgagctctctgtgctttgactgcaaccatgtcgactattatgcagaagatcaaagaaattgaagatgagatggctaaaacacagaagaataaagctacttctcatcatctgggtttgttaaaggccaagcttgctaagcttcggagggaccttcttgcaccgcctaccaaaggtggcggtggtggtgctggagaaggttttgatgtgactaaaagtggagattctagagttggactggtcggatttccttcggttggaaaatctacgctattaaacaagctgactgggacattttccgaggttgcttcttatgagttcacgactttgacatgcattcctggtgttatcacat

SEQ ID NO: 128897 - DNA, 469 bp, Arabidopsis thaliana
ttaagcacgttaccagttgaagactctgctgaggtctggaaaagattcattcagtttgagcaaacatatggagatcttgctagtattctaaaggttgagcagagaatgaaagaagcactttctggaaaaggggaagaggggtcttctcctccagagagttcacttcaagatgttgtttctcggtacagttacatggatctttggccatgcacttctaacgaccttgatcatttagccagacaagagttgcttgtgaagaatctgaataaggaagcaggggaaacaaatctacctcatgttccctgcggctatagggagtgtagcttcttcggcaaaaagttgttttatcccaggttcatctcagatcgggttgtccaagacccgacaaagaaatcagagtttgctagttctgcaaacccagtggcagcttctgcttcgaacaccttcccaagtactgtgactgcaactg

SEQ ID NO: 128898 - DNA, 966 bp, Arabidopsis thaliana
  unsure (1)..(966): unsure at all n locations
tgtgttcgcgtgggcggacgcgtggggttccagtgatgcagcccatgtatcaacaacaccagctctctatgtctgggccacatggacatccttcaatgatgatgagtcgaccaccacaaatgcaacctgttatgcgtgtgccgcctccaccgggatctcagttttctcatatgcaagttcctcaaccttatggtcagcttccaccgctttcgatggggatgatgcaaccaccacctatggctgagatgcctcctcctccaccacccggggaggcaccaccgcctcttcctgaggagccagagccaaaaagacagaagctcgatgagtcagcccttgttccagaagaccagtttcttgctcagcatccgggtccggctacaatcagggtttctaagccaaacgagaatgatggacaagtcatggagatcacagtgcagtcgttatccgaaaacgtgggaagtttgaaggagaaaatagctggggagattcaaatcccagcaaacaaacagaagttgagtggaaaagcagggttcttaaaggacaacatgtcgcttgcacattacaatgtcggagcaggagaaatcctaacattgtctttgagggaacgtggtgggagaaagagatagagagacagctggtctacgcagggaaatgctttttgatctcttattcttctctagatgtttaaattgatggccaaaactatatgtactactctctcgttcacacatctttactcttggctcatcatatctctgctatctatggagttttagaaaaagtagagtgattattactgacttaagcttgttttggatttgcagctgaggcaacatttcgctctgtaatcttaaaaaaagaatgtgatactttcctttgtcaaaaaaaaaaaaaaaagnnnnnnnnnnnnnnnnnnnnnnnnnnnnnnnnnnnnnnnnnnnnnnnnnnnnnnnnnnnnnnnnnnnn

SEQ ID NO: 128899 - DNA, 926 bp, Arabidopsis thaliana
  unsure (1)..(926): unsure at all n locations
ccgggcggagccgacgcgtacggatttggattctatttctcagctttggagtctgttggtttctcgtccggtggattcaagggtatctcacaagaacgcttgggagcnttatnttgagcacgctaagctatggttagctaattccgagcagccaatcgaatcaaactgcaatacttcatatgctgcattgagagagaagttgaagaagattatggcgtctgactatttcaccactactccggaaatgaaagctccggttgatgtggcggctgcagctggtaactatacttcttaccaggtgcctgtggacgtggaggcttcagggcattaccagcaaaaggaagaagatgcatcaaattccaaagaagtagaatcagttgttaatgatcaatctcaacaagatgagcatcaaaaggttgagttagtgaccgaaggagaggtggtccatggacagcaagaacagggctatactcaggtgggaggagcagagaatgctaaaagagactatgtgccacgtgggtcttaccagaaccaaacgaggtcgtcgaggtgctccaagaagtggtggtggctatcagaatgggcgaagaagaccaagtggtggtggtggctacccaaaatggggcggtaccaatccttatgattcaatctggttggaaaacggttatccaaaggaactaccttcccaccacataaggaaagggatctttgttgtttgttggtggttgaagaaaattggcccattcccattcaacccactacccagaaacccccaatgttgctgttgcgtcttagcttttgtgcctctgtcttttgggtgcgtctctttcattatcttgcgtttatgctataacgcatataagcctaatctcgtgtttgaaacgtttgacaatggctcggttattgctatgaactttttttttttt

SEQ ID NO: 128900 - DNA, 619 bp, Arabidopsis thaliana
  unsure (1)..(619): unsure at all n locations
tttntgncaccacagtgccccaaggttnttntcccnagggggtgccntggcnccagaccnggcttncccaggtggnggccngggattctaaagggtttttgccccgtgggtcttcccagaaccaaaagaggtcgtcgaggtgctcgaagaggtggtggtggctatcagaatgggcgaggaggaccaggtggtggtggtggctaccagaatgggcggtgcgaatcttatgatcaatctggtggaaccggttatcaaaggaactcctacaacaacagaggaaggggacgtggtggtggtggtggtggaggaaatggccattcatacaacaactaccaagaccccaatgttgctgttgcgtcttagcttttgtgcctctgtcttttgggtgcgtctctttcattatcttgcgtttatgctataacgcatataagcctaatctcgtgtttgaaacgtttgacaatggctcggttattgctatgaacttttttttttttaaaaaaaaaaaaaaaaaaaaaaaaggnnnnnnnnnnnnnnnnnnnnnnnnnnnnnnnnnnnnnnnnnnnnnnnnnnnnnnnnnnnnnnnnnnnnnnnnnnnnnnnnnnnnnnnnnnnnntagctg

SEQ ID NO: 128901 - DNA, 672 bp, Arabidopsis thaliana
  unsure (1)..(672): unsure at all n locations
cccccccactcaaggtgcttcnttggaaattgggtgaggttggccactccccggggaccaagttcaaggggggccttaaaggacttgagctacgatgatcaatgcaacaagtgtgagaaggaagctgtgaacgtatcgcttggaaacttgctttcgtacccattcgtgagagctgaggtggtgaagaacacacttgcaataagaggaggtcactacaatttcgtcaaaggaacgtttgatctctgggagctcgatttcaagaccactcctgcttttgccttctcttaagaaagaaagctaccgggacatataaaactcttttgagataaaaaaagacactttgactcatctttcttcattctctcatgttgatgattcctctccaacttctttgatttctttttgttaattcaaaacttcaactttgctgcttctatttcaaaagctcaaacaataaagctgtaaccaacgtttgaaacttctatatttgtctaattgatgtttgaacgaagatttgaactttccttcttaatctctttttccaggttatatgtgtatgttaattgttaaaacttcttggcaaaaaaaaaaaaaaagnnnnnnnnnnnnnnnnnnnnnnnnnnnnnnnnnnnnnnnnnnnnnnnnnnnnnnnnnnnnnnnnnnnnnnnnnnn

SEQ ID NO: 128902 - DNA, 393 bp, Arabidopsis thaliana
ttcttgacttcaacatactccattctctatatacaacctttttaagaaaactttgattaatcagatcaaatatttataaattaaaacacacacacactttctcaacaatgagattctctctttctcccgtacgtccgcatagtgtagtagtaccttcactaccaaaacaggacgtcgtttcttatataagtggtacgacgtcgaatcgtcaatgtcgatgtgtacttacacttccttctccttcagtttccacttcccgaccaccggttttacccaaaccggaaacctgggagagtttgctgctaaaccatgatcaaattccaggcgaattctcacccactggttcgagtatcccggttaagcttggccggagatggatggagtatcaggggc

SEQ ID NO: 128903 - DNA, 838 bp, Arabidopsis thaliana
  unsure (1)..(838): unsure at all n locations
atgatattgccagcannnnnnnnnnnnnnnnnnnnnnnnnnnnnnnnnggaaaagctgagtaaaaccgtgcagccctgaacttcccacgcgtccgctcttcaaccaatccgttgaacgtcgtcgtaataagcttcatcttcatcaatcatcatcactttcttctttctcccacagatccttccttttctccttcatcttccccttcttccttttccctcatcgcccaggaacacatccgatctgcaccctcttcgttcgattctcacaattaatatctagggtttgcgaggaccccccctctctattcaaaaagagagagcagattttctctataatcccctttggtttcaagtggtgtaattggatcgtgtagctgcttttataatgacctctagcacgacaggagatcgaagatggggtactacaagaagaagtggcatgactatattgggaaaggttgctgtccaaaaccgattaactgaccaagccataggttagagaaccaaggccttgacccatatgtagatattgttccaaagggaacacttagttggggcagtaaatcatcactgaatgcttgggggacatcatccttgtcaccacgaactgaaagtggccctggttcaccaagccacctcagtgatcgaccttcttctgggggaagtgcactcgaccttcaactgccgatagaacaaagcacatgactcttcttcttctgttgcatggggattcgaactcgcggcttcatcagcatcatggggtgtntacatctaatcagccatcagttgcactacaggcgtcacatagtgcagacacaagaccaggaagttcccagta

SEQ ID NO: 128904 - DNA, 389 bp, Arabidopsis thaliana
cggacgcgtgggcggacgcgtgggttaatatgaaaggtttggatggattacaagggcctatatacgtgggaaccgggtgtgtttttaggagacaagcactttatggatttgatgcgccaaaaaagaagaagactaagcgtatgacttgcaattgctggcctaagtggtgtttgttttgttgtggtcgaagaaagaatcgtaagtcaaagacaacggataagaaaaagaagaacagggaagcctcaaagcagatacacgcgctagaaaatatcgaagagggcaccaaaggcactaatgatgcggcgaaatcaccagaggcggcacaattgaagttggagaagaagtttggacagtctcctgtttttgttgcgtctgctggtatggagaat

SEQ ID NO: 128905 - DNA, 699 bp, Arabidopsis thaliana
  unsure (1)..(699): unsure at all n locations
acccacgcgtccgcccacgcgtccgcgacgaaaggcgtcccgatattgaggttcgttacgccggcgaagattttcatcggaaacttatctgatcgtttacgccggcgaagatttccatcggaaacttaatctgatcggaaggaagaaggctcgatgaagagcagattgaagagctacaggaggaagaagctagggttagccacagttatcgtcttctgttctctctgtttcctcttcggtttctatggctccactctactttctcagaatgtgcctcgtgttaaacccaggttgagaatgttggatatggttgagaatggggaagaagaagctagctcgatgcctcatggtgttactggagaagaatctattggatcgattccttttcaggtacttagttggagacctagggctatatatttcccgaattttgcaactgcagaacaatgccaagctattattgagagagcaaaggttaatctgaaaccttctgctttggctctccggaaaggagaaacnnctgagaacactaagggcactagaacaagctcaggaactttnatcagtgcttcagaagagagtactgggtgctctggatttttttnaaaggnaaatcggaagngctancgntgntnccaaggtccccatgggggggcaattaatattttnncgggtttgaccttggccaaaagttttntt

SEQ ID NO: 128906 - DNA, 574 bp, Arabidopsis thaliana
  unsure (1)..(574): unsure at all n locations
gatgctggaacgtatgtaatagcaaagataaagaaggaaaatnatgaaggcacttatgtattactgaacggaagtggggctacaccacaagggaatgtgcccttccttgacttgtttgacataaatacaggcaacaaagaacgaatctgggagagcgacaaggaaaagtatttcgagacagttgttgccttgatgtctgaccaaaaagaaggggatttaaaaatggaggagctgaaaattctgacatcaaaggagtctaaaacagaaaacacccaatattctctccaactttggcctgataggaaagtgcaacagattacaaactttcctcatccgtatccgcaattggcttcgttacagaaagagatgatcaggtatcaacggaaagacggggttcaacttactgcaacactatacctaccaccaggctatgatccatcaaaagacggtcctcttccttgtctgttttggtcttatcctggtgaattcaagagtaaagatgctgctggtcaagtccgtggctcgccaaatgaatttgcaggcattggatcaacttctgcccttctttggcttt

SEQ ID NO: 128907 - DNA, 628 bp, Arabidopsis thaliana
  unsure (1)..(628): unsure at all n locations
nnnnnnnnnnnnnnnnnnnnnnnnnnnnnnnnnnnnnnnnnnnnnnnnnnnnnnnnnnnnnnnnnnnnnnnnnnnccacgcgtccgctaacctcgcaaagaaaaaaccatcttactttctttttttttctctgaaaaacctcttttgattaggtttaaagatggcatcaaaaaaagcaagaaaaccaaaccgagccgaaaagaaactcacaagaagctgtttcaagaaacaagttcctcaacacaacaacatcaacacaagtataactctcgatcaaacatctacatctactattgtctctacatgttcttcttcatcaacgactttgtcttctcctctagacacaatctactctgttccctctccatccccagcagcggtgctgacgtcaccaggcggttgttgtaccccgaaagccaagaagtctaggataccggagatgctgacgtgtccaccggcgccgaagaagcaaagggtctcgaaaaactgtgtgttacgacggagacagatcgttttctttgctccgccggagatagagctcttcttcgtcaacgcacacgatcgatgaacgtacttttagttaattattagtatcttttttttttttgatataggatcaatacagaaa

SEQ ID NO: 128908 - DNA, 666 bp, Arabidopsis thaliana
caaaattcatgtggtgtaaattgtctaaagtctgtatttttttttattgacatccattttttttgtgtcgaaagtctatatatgaagtcaaattcatgaacaaatgcttctaggctaaaaacgttatcgtaatctttaatcttcaggcttcttttctaaaattccgactggttaccgagggctagaaaatccggtcaccgtcgccggagacaacctcggtttctaaacgaaaccatcgtgaaggacggaaaaaaggagcttgaagacaaaacaatgacgagcgttttcgacgaacataaaccctccgatgactctcacgagtccaagatcgtcatcaatggagaagaagaggtgttggaggaggagaatgataatccgattgaagaagtccggttaacggtaccgataaccgacgatccaacactaccggtgctaacgtttcgaacatggactcttggacttttctcttgcatattgcttgccttcgtgaaccagttctttggtttccggtcgaaccagctttgggtatcttcagttgcggcacagatcgtgacccttccgctagggaaactcatggcaaagacgctaccgacaaagaaatttgggtttcccgggacgaattggtcgtggtcttttaaccctggtccgttcaatatgaaggaacat

SEQ ID NO: 128909 - DNA, 577 bp, Arabidopsis thaliana
  unsure (1)..(577): unsure at all n locations
ccagcactattctactcatctagggaaagctgtgccgcctgcaggtgccggtcccctataccccggtcgacccacgcgtgcggtcctcctcctatatatacaaaatcttaagaaatctctctacttgtttcctctgttatcataatctcttctctctatatctcttctcttcttcttttaccctgttttttttttcattccacagagcccaggttgattgattttgttattcagagatatggggagaggaaggattgagattaagaagattgagaatatcaacagtcgtcaagtcactttctctaagagacgaaacggtttgatcaagaaggctaaagagctttcgattctctgtgacgccgaggttgctcttatcatcttctccagcaccggcaagatttacgatttctccagcgtctgtatggagcaaattctttctagatatggatacactactgcgtccactgagcataaacaacaaagagaacaccaacttctaatttgtgcttcacaatggaaatgnaagctgtgttgcggaatnnngnttctntgaaggggggaccttgaaagattacag

SEQ ID NO: 128910 - DNA, 344 bp, Arabidopsis thaliana
  unsure (1)..(344): unsure at all n locations
gagatttgatcaatttctaaagaaaaccccttcctctactagtcctcctcctatatatacaaaatcttaagaaatctctctacttgtttcctctgttatcataatctcttctctctatatctcttctcttcttcttttaccctgttttttttttcattccacagagaccaggttgatcgattttgttattcagagatatggggagaggaaggattgagattaagaagattgagaatatcaacagtcgtcaagtcactttctctaagagacggaacggtttgatcaagaaggctaaaagagctttcgattctctgtggacgncgaggttgctcttatcatcttct

SEQ ID NO: 128911 - DNA, 447 bp, Arabidopsis thaliana
cgacccacgcctccgctggctccatcacaaagtgcttcgttctggtacagcgaccatggcagtttttgttcttgtgatgattttgttggccatggctggtcactcaagtgggacatggtgtgtatgcaaagaagggttaagcgaggcaatgctgcagaagacattggactacgcatgtggtgcaggagctgattgtggacccattcaccagaccgggccttgctttaaccctaacaccgtcaagtctcactgctcctacgccgtcaacagcttctttcagaagaaaggtcagtctctgggcacttgtgactttgctggcacagccaccttctcagcctctgatcccagctacactacttgtcctttccctgcaagtgccagtggaagtgggacaacgactccagtgacgacaacaccttcgacaagagtccctacaacaactaatac

SEQ ID NO: 128912 - DNA, 692 bp, Arabidopsis thaliana
ccttcgccttcgcccacgcgtccggttctctcagtggagaagaagactcgagtcatctgcagaaaagattcccgatcggattggatcatataagattttagggatttggaaaaaatcttgagctatggaggcgaatgcggcggtggacggaacggggaatccgatccctacgtcggcggttttaacagcttcggcgaagcatataggaatcaggtgtatgccggaaaacatggcgttcctgaaatgtaagaagaatgatcctaacccagagaaatgcctcgagaagggacgtgacgtcactcgctgtgttcttggcctgctgaaggatcttcaccagagatgcccaaaggagatggatgcttacgttggatgcatgtattactacaccaacgagtttgagttgtgtcggaaagagcaagaagcttttgagaaagtgtgtccgttgaaatgagaaagtcaagtttttatctgtctcctaataagcaaatgttcattttgactctggagcgttactctaatcactcttccatcgctgcctgcttcttttccttttctggtaatggaagacctttaaaccatgtaatattgtcgtgtttcctttgtccagttctcccgagggaaacgattttggttacttgtgcaattgactctcaagtacagagcttaattagtcgtaaacaaggttttctatt

SEQ ID NO: 128913 - DNA, 1150 bp, Arabidopsis thaliana
  unsure (1)..(1150): unsure at all n locations
gatacttcagctctatacgacttaattttgggaaggttggtccccttgcaggtcccggtccggatttccgggttcgaccaagccgtccgtccggttgcaaaagacaacaggaggggttgaagatttaaacggaaacgctaaagaatacaatcttattgatggtggagttgcagctaacaacccggctttgttggccattggggaagtaacaaatgagatctcaggaggaagcagtgactttttcccaataagaccaaatgattacggaaggtttcttgtgctttcgcttggaaccggaaatcataaagccgaagagaaattcaatgcaaaagaagtagctggttggggactattaaattggttaacaccggacaactctacacctatcattgatgctttctcgcaagctagctccgacatggttgatttccatctctctgccgtttttcgagctcttcattccgaagccaactatattcgcatccaggtatcaaaatcagctagcgcactaaccatttctttttctttgtctccacaattcctaagatttgggtattaattatataggatgacacattaactggggatgctgcttctgttgatatcgctaccgtcgagaatctggacattcttgccaagacaggagatgaactacttaaaaaacctgttgcaagagtcaacctagactcgggttgtaacgaaaatgcttatgaaacgactaatgaacatgctcttataaagtaagtggcccaatttttgcattttatagctttattctttcatacttaaggtgattaaaagtattttgctaatatatttaaattttggttgtgaaggttagcaggaatactttcaaaagaaaagaagatccgagacattcgttcacctcatgcaaaagctccaattaggatctaaagagatcaattattgtatcttgtatattgttgatgattcgtttgtttcactaatgcacgtttggatttatattaataaaaaggttgcaccacattgtggtcacttgtacgtttgaataaagtcaataaatatttaatggaaaaaaaaaaaaaaagnnnnnnnnnnnnnnnnnnnnnnnnnnnnnnnnnnnnnnnnnnnnnnnnnnnnnnnnnnnnnnnnnnnaacgaaagtcaac

SEQ ID NO: 128914 - DNA, 767 bp, Arabidopsis thaliana
gttgaagatttaaacggaaacgctaaagaatacaatcttattgatggtggagttgcagctaacaacccggctttgttggccattggggaagtaacaaatgagatctcaggaggaagcagtgactttttcccaataagaccaaatgattacggaaggtttcttgtgctttcgcttggaaccggaaatcataaagccgaagagaaattcaatgcaaaagaagtagctggttggggactattgaattggttaacacacgacaactctacacctatcattgatgctttctcgcaagctagctccgacatggttgatttccatctctctgccgtttttcgagctcttcattccgaagccaactatattcgcatccaggatgacacattaactggggatgctgcttctgttgatatcgctaccgtcgagaatctggacattcttgccaagacaggagatgaactacttaaaaaacctgttgcaagagtcaacctagactcgggttgtaacgaaaatgcttatgaaacgactgatgaacatgctcttataaagttagcaggaatactttcaaaagaaaagaagatccgagacattcgttcacctcatgcaaaagctccaattaggatctaaagagatcaattattgtatcttgtatattgttgatgattcgtttgtttcactaatgcacgtttggatttatattaataaaaaggttgcaccacattgtggtcacttgtacgtttgaataaagtcaataaatatttaatggatgc

SEQ ID NO: 128915 - DNA, 725 bp, Arabidopsis thaliana
  unsure (1)..(725): unsure at all n locations
atctggatactctatcactttttccttcaatcccaatccattttttgaagatggaaaactgacaaagacttttacctttctcgaagaagggacaaccaaaatcacagccacgcctatcaaatggaaagagggcaaaggcctggcgaatggagtgaatcatgagaagaatggaaacaaacgtgcactacctgaagagagcttctttacctggtttagtgatgctcaacacaaggaggatgttgaggatgagatgcaagacgagcaggttgcagatatcatcaaggaagatttgtggcccaaccctctcacctacttcaacaatgacgctgatgaagaggactttgatggagacgatgatggagatgaagaggagaaagaaggtgactctgatgaagatgatgacgaagaagacgaagttggtgaggaatgatggcagggatacccagaaaccacatttgcttacatgtcttctctataacagagtgtgtaaagttttgtgtgttgaaaggtttttaattttaagcaaaagtggattatgacgacaacagacaagcttttaattttattttaccgtaatagttatatcttgttgtaagaaaccattttcagccttttgttggaaaatcctgcttaataaaaacaacaaaaaaaaataaannnnnnnnnnnnnnnnnnnnnnnnnnnnnnnnnnnnnnnnnnnnnnnnnnnnnnnnnnnnnnnnnnnn

SEQ ID NO: 128916 - DNA, 528 bp, Arabidopsis thaliana
tatacgactcacttagggaaagccggtacgcctgcaggtaccggtccggaattcccgggtcgacccacgggtgcgggagaaccatggcgggtaagcagatcggcggagacggaggtttaccggcaaatctcgccggaatgactaaaagtcagctctatgatattatgtctcaaatgaagacgttgattgatcaaaaccatcaacaagcgagggagattctgattcggaaccctcttttgacgaaggctcttttccaggttcttcttcacttcgctaatcttttccatcttctaaatctgcaatccgtgtggtcttataagcaatgaggaattctgatttggagcttcttacttgagtaaattgattggactagtttgggtttagtattgttgaagaagcaggcacaaatcatgctcggaatggttcagcctcctcaagtgactccgaaaggtgagccacaagctgtacaacaacctcaacaatctcatcaatctatcccgccaaagccaaacgttcaagctcatatgt

SEQ ID NO: 128917 - DNA, 485 bp, Arabidopsis thaliana
tcgaccacgcgtccgcccacacgtccgcatttctgaaatctctcaacttcatcatcaagtgggttcctatgagaggggcgactctttgattgcttcgccacatcttttatttttatccttctaagtcatttctctatctatccatatagataaaaaccttctaatagatctctgtgtcattttattcgtaagaatgagatctagtgtagaagataacaaaggatggataggaccagcgacaccggagatatcgaacggttttgagtttcagaaaggttcgaaccggacaccaaaccatcaccggtctactatggggaagccagcgccgtcaaaatgggacgatgctcagaaatggctttctggtgtagggtttgctcgtggaggtggtggaggtggtgacaagagtagtcatcactcaagaagtaataagccgagaaactcgcacgcggatgatgctagacttatagctttagcttcacagagag

SEQ ID NO: 128918 - DNA, 486 bp, Arabidopsis thaliana
aggtggctcagttcagcagccctaacctcaatgtagcttacaaaatgggagtccgtgagtaccaagacctcactccttatgcaaatgccctggaagaaaactgggggaaacctccggggaaccttaactcagatggagagaaccttcttgtctatggaaaagcgtacggtaatgttttcatcggagtgcaaccaacatttgggtatgaaggtgatcccatgaggctgcttttctccaagtcagcaagtcctcatcacggttttgctgcttactactcttatggagaaaagatcttcaaagctgatgctgttcttcattttggaacacatggttctctcgagtttatgcccgggaagcaagtgggaatgagtgatgcttgttttcccgacagtcttatcgggaacattcccaatgtctactattatgcagctaacaatccctctgaagctaccattgcaaagaggagaagttatgcccacaccatca

SEQ ID NO: 128919 - DNA, 446 bp, Arabidopsis thaliana
cgccgacgctcctcctccttccattcttggtcttcgtatccataattcttccctcaagctgccatggcgaatgggaaatcctcacggagcaaaacttctcttctcagatccgtctccaccctcacgtcctcctctttgtcaccactccatggtgtggtgagtccagatctcttaagtatgaaattactcagatggttcagagaagagaagagtttggcttgttgaagttaatggttgtatacagaaactcagaaaaggtgttagcacaagccattggtgctgctgtcaatgggataacaattttgtactatcacaatagtgtgccttacaactatctagggaaactccgagcctcgaatatattgtcatctattcatccttatctgacatctacgcctgaagaactccctctaaacatttgaagtctccaaagagtttgaaagatt

SEQ ID NO: 128920 - DNA, 451 bp, Arabidopsis thaliana
  unsure (1)..(451): unsure at all n locations
tcgaccacgcgtccgatcggagcattgagcaacacaatggaggaggaaccggagagaaggaaagctatcgctctcttcatggctttcggtaccaaaggcgatgtctaccctctcgctgccattgccgcagttttcgctcgtgttcaacaacactacactgtggttttgatgtcacatttggctcatgagaacctaagctcccatttgagtaaagcaaaagtttcatattttcctatcaattctcctcctgctctgtctaatgaacctcagggtactcaaaacgtcacagactcgctgaggaaaatgtttttggaggaaaaagaaaggataaaaagggaacacagacaagagtgtcattctgcattcagaaccattttcggaaaggatccttgtatggagggtgatttcgntgtcataaatttctttgcattggaaggatggagcctagcag

SEQ ID NO: 128921 - DNA, 868 bp, Arabidopsis thaliana
ctaattcgattaacttagggaaggctggtacgcctgcaggtaccggtccggaatcccggggggggcgggcgtccggtgatttctctgtgatgcctcttgttgttgctcatgtgacaagatttgcatggggaggttactcaattggaatcgggacaagccactctctattggagggaatctcagctgacaaattcattcaacgcttgggggcgaagtctcacattcacggcaaatccaacaaaaagattactaataaaagggaagatgtgggcataaaccgggtcatgatcgacgatatctactggttaaccgggattgtcccggaaaccatgctggaaccctttgtgatctggaccagttgatcaaacgggggataataacctatcaggagccaaaaccggaacttaaagttaccagactctgggttttgggatcaaaacggtcgagcttaatgggcatgcaatggaaaggattaaaaaaaatccctgggaggggggcatgggctcctcctttaaggttcctggcggcaattgggggaagggaaaaccaggggctttagggtgagggagaacgcctggggtggatacatttccaggggacataaggaaaaacggggaccccgggcgcaaagggtttccgggacggatcggtgttgcctgggggcttcaccccggaaaatcttagagagctcccctcgttaaaagcaaaagacgggaagccaaaaacattggccaggtactaactttacggaaaccccggggggatggcgaaactctcctttaagggtaccctactcgggggaaaagcctttaaaggggtttggacgggggccaggaattggcctggtcccgggcaaaggttttataaa

SEQ ID NO: 128922 - DNA, 518 bp, Arabidopsis thaliana
cttcgatactcgtctgggcatggcgtttttgctcaacaacgcttcaatttcatctcatttacgctcgtcttcttcacagacgggtgatgctttatcaatatcgcgtcgtggattccacattgagccaggaactcgagagaaagctctcttggctgaagattctgctttgaagagattcaagtctcataagaaaagtgtgcacaaactgaagaggattggtgatgtgctcactgttgttgttgttgcaggatgttgctatgaaatctatgtcaaagctgtgatgaaaaaagaagctctggctgcagggaaaagctcatgagtgttcttgtctttgtatgcctttttgttttatcctttatacagtgtctctttctaataatctcacaataatgtttgtttactcaatgaaaatggcatctaataaagtagactaaaagaaaaagacattgtccagggaaaccaaactctggttttttctgacgttgtgatggaatacacgctttttcttcttttttcac

SEQ ID NO: 128923 - DNA, 476 bp, Arabidopsis thaliana
cactataagtttcaaacttttggcaaattaagcggtttttgttaggttttaattattttttccgatgatgaagcggcgatgagtgtcgtcgtcggagatagatcggagagtactctgatgcggagtgactataaagctcctccgagtcaagctattcccaaagctcgattacaagtttggttctttagagtttgttcttgcattttggtttggacttgtttgattcagctcttttggcattcccaaatcttcactggtttaaccaatcacatttctagattctctctcccggttcagtcagttccattacctcctcctcttcctccaaggaattacacaagtaatggaattttactagtgtcctgtaatggcggtttgaagcagatgcgtgcagcgatttgtgatatggtgactgttgctaggctattgaatttgactcttgttgttcctgagcttgataaaaaatcattctgggc

SEQ ID NO: 128924 - DNA, 214 bp, Arabidopsis thaliana
gcccggcggagtcagcacgaagggatcaggcaaaaactagaaaaaacatgcagcttgctttaggtagtgaaaggaagaagaaataaggatgtactttagcatcttgatcatgtttaggagtttgtaatggcattagttttaatggaataagaacctttctacaaaaaaaaataaagaattggtcctatgtcttttattggtttcaaaaaaaaaa

SEQ ID NO: 128925 - DNA, 459 bp, Arabidopsis thaliana
cccacgcgtccgcccacgcgtccgcgcatctttccaaatggtgttggacatataaatgaagccggaatcgatcactacgacaaacgcataaatgctttacttgctaaagggatcgagccgtacgtgacactgtaccactgggatcttccacatgcacttcatgatcgatacctcggttggctaaacccacaaatcataaatgattttgcagcgtatgcggaggtttgtttccagagatttggagatagagtgaagcactggatcacgttcaacgagccacacacgttcgcgatacaaggctatgatgttggcctacaagctccaggccgttgcactattctttttaagctcacttgtcgcgaaggaaactcatcgaccgagccttacattgttggtcacaatgttattttaactcacgccacagtatccgatatctataggaaaaagtataaggcaaag

SEQ ID NO: 128926 - DNA, 600 bp, Arabidopsis thaliana
  unsure (1)..(600): unsure at all n locations
cggtacgcgtgggctcttggtaagcattcgagagacgaagacgagacggtgaagcaaaaacagaggaatggatctgtattggttccaaagactttgagaattgatgatcctaatgaagctgcaaagagttcgatatggacaacacttgggatcaagaacgaagttatgttcaatgggtttggttcgaagaaagaggttaagctcagtaacaaagaagaaacagagacctcacttgttctttgtgcaaaccctgctgcgttatcaagatcaatcaatttccatgagcagatgtgattgtatacatatgatatatacgtgtatgtatgtatagatgtggtggaagattaagttagatccatcaaaatctgacttttttgttctttcgttgtggcttacatgaagctttataatagcttttgtaccatatactttttagtcttttaagtttgatttttgttgtaagattaaatacgatgaaataaaagttctttttgaccaaaaaaaaaaaaaaaaaaaaaanaaagggcggccgctctagaggatccaagcttacgtacgcgtgcatgggacgtcatagcaattctatagtgcgtcctaaat

SEQ ID NO: 128927 - DNA, 557 bp, Arabidopsis thaliana
  unsure (1)..(557): unsure at all n locations
caaaagtcaactgagaaaagcgttgagaatatgaaaggtgtcagatgtaaaagggtgtcaagatctattggctctgtaggtctttatgtgcctggtggaacagctgttttnccatcaacggctttgatgcttgcnattcctgctcaaattgctggatgtaaaacagttgttcttgcaactccaccaagtaaggatggaagcatttgtaaggaggttctgtattgcgccaagagggctggtgttactcacatactcaaagctggtggagcgcaggctatagctgccatggcctgggggacagattcttgtccaaaggttgagaagatttttggtcctggggaccagtatgtcacagctgctaagatgattcttcagaaccagcgaggcaatggtctcaatcgatatgcctgctgggnccttcagaaggcctaggttttnctnacggaccatgctagtccagtttacaattncagcaancttncctttttnagggggggattggccccgatagncaanttgtcttgtagttntgggggntantttagncttncgncacc

SEQ ID NO: 128928 - DNA, 437 bp, Arabidopsis thaliana
tcgctcttctacccactttattcacctacagaccaaaatgggaaggtggtcagtatgaaggtgatgaaaatgagagacgggatgtgcttcgtctggccatggagttgggagctgattatattgatgttgaacttcaggtggcaagtgagttcatcaaatctattgacggaaagaagcctggaaagttcaaagtaattgtttcatcgcacaactatcagaataccccttctgttgaggaccttgatggccttgttgcaagaatacaacagactggagccgacattgttaagattgctactactgctgtggacattgcagatgttgctcgcatgttccatataacctcaaaagctcaagttcccacaattggacttgttatgggtgaaagaggtttgatgtctcggattctttgttcgaaatttggtggttatttgacc

SEQ ID NO: 128929 - DNA, 505 bp, Arabidopsis thaliana
agtacacaaagctcacattcactccaacccaagcagaccgttttgttctagcattcagaaactggctcagacggcatggcaagagtcagcctgaatggttcggctccaacccgtctaatcaacctctcccttccactgtcttaaccaagcgccagatgctagatagatttgatcagcatacacaagtatgctcttcctgcaaaggagcttacaacagtttccaaatcctcaagaagtttctcgttggcgccacggttttctgggccgccagcgctggtgttccgtctgatgttcagattcgactggttcttgctggtttatcactgatatcagctgcttctgcatatgctttacatggcgtccggaagaactttgtgtttagagattatgtacattctgaaatcgagtagatttgttgtgtatatgtataatcatcatacaaagtacaaacattgtaaatcaaaatccagaggaacttttagacctaaaaaaaaaaaaaaaagga

SEQ ID NO: 128930 - DNA, 528 bp, Arabidopsis thaliana
  unsure (1)..(528): unsure at all n locations
gccggcacgcctgcaggtaccggtccggttttcccgggncgtccatcgcgtccgcggacgcgtccgcccacgcgtccgaacttttctgataacatcggagtaaaaggaaagtaagtcggagtttaatcatcttaagatttgattgaatggctacgctcactgaaatagcaacccttgaggagaagtatatcgaattgtgcaagatgcatggaatcctacccaacactgccattttatctgctttctttgaggcggaggttaaaaagtcaaggaatcaaagatgcattatgaacctttacgtggatagagtgaagtacgatgactatctcccgcttctcgagttatgcaatgagatcaacacatctgaggtacaaggaatagatctatttgtgagatccgcttgttcgttagaagatcattatgcattgcccttaatccgttccgtcaatcaaaaactccgagttgttcatctacatgactctttcgggaaaaacttctggcaggacgttttctttcaaggtttgagct

SEQ ID NO: 128931 - DNA, 552 bp, Arabidopsis thaliana
  unsure (1)..(552): unsure at all n locations
acgcggcgggtcgggcgcacccggggcccgcggccggtagtatcgccgnnnnnnnnnnnnnnnnnnnnnnnnnnnnnnnnnnnnnnnnnnnnnnnnnnnnnnnnnnnnnnnnnnnnccacgcgtgcgagttcggctcccacaggggaaacaaagcgaccgttttgctcatcattatttatagccgccggcgaattgatcggtaaaaaaaaaaacttccgacgtttctacaaagttgcgaatcatgatctacctctctagacgctcactctcttctcttctccgatccggtttcaatctccgcggcgatcttacagcagcagctgtctcttgttcctctctcttctccgacgcggacggtgggattaagaagttacactcgcgagctgggaatgcagtgttatggagaaatagtcagctatgtagttctcaaggaagcttttttggacgaggaggacaagtctcaggttctgtgtttcgatgtttctgcagggggagtgatacttctcctcctagcttgggatcgggagtttttggctcacctatgggttgcc

SEQ ID NO: 128932 - DNA, 450 bp, Arabidopsis thaliana
ggcccgcggacgcgtgggtcttcttcgtcttctttttttttcgtaaaaattcttcttcttcttcttcttctccgagctccgtccgagcagagaagaagagtaaggtaagttttagagtgcacttgtgtggcactctcatttcttatcctgcgcctcttacgatttcttatggtgcgcttctccgactagtttcggtgtctaatggactcttcctcttcttctctatctctccaagaaaaaatctcttctggttatttctagggtttcgttggttcttttttcgaaatgctttggataacgagatttgctggattattctccgccgcgatggcagtgatcgtgttatctccgtcgcttcagtcatttcctccggcggcggcaatccgttcttctccatcaccgatcttcagaaaagctccagcggtgttcaacaacggcgacgaatgtctc

SEQ ID NO: 128933 - DNA, 421 bp, Arabidopsis thaliana
atgttggatggagaacccgtgggtttttgcgcggttggcagttccagaataccttatttaacaacatcaagttcatgattctctgctgcttcgtgaccattctcatcctacttggcacaatccgtgttgggaaccttggaagctccaacgccgactctgttaatcagagtttcatcaaggaaaccattccgattctcgcggagatcccctctgattcgcattcgacggacttggctgagcctcctaaagctgatgttagtcccaatgcaacgtatactctagagccaagaatcgcggagatcccatctgatgtgcattcaacggacttggttgagctgcctaaagctgatattagtcccaatgcaacgtatactctaggccccagaatcgcggagatcccatctgattcgcatttgacaga

SEQ ID NO: 128934 - DNA, 555 bp, Arabidopsis thaliana
  unsure (1)..(555): unsure at all n locations
ccgaaactttcgtgctttcacggacctacaagagcgtcactatattctaccaatgctcctctgtgcttcctaacctttctagctatacatgtcctgagataggtcccatctcagtgtctgaaagccctgaaaaatatcctgagagctgtcgttccagtttcaccgtgaaggttcccacgagtttcgatacaaaagagaaagagttgaatgtgaccaatttggaaagtgttttaagaaaaggatttgaggtgacggcggtgatcaatgagaatacatgtcaggaatgtttatcctctcttggaagatgtcatgtcttcaacgaaaacttaacaccaggagttaaatgtcgtccaccaagtgactctgagggttcttgtggatataatcagacctcaagtacgttcctctgctattgtaaggatcccgtattggcctatcatgcagttcgggcaaatctaattattagatggttaataggtggtgtnttgancttnnatncncatnggtctcagggttttatggttncctgggtgtntctttnccctattttcccgg

SEQ ID NO: 128935 - DNA, 520 bp, Arabidopsis thaliana
  unsure (1)..(520): unsure at all n locations
atgattgccnnnnnnnnnnnnnnnnnnnnnnnnnnnnnnnnnnnnnnnnnnnnnnnnnnnnnnnnnnnnnnnnnnnnnccacgcgtccggttttgccatattggttcccgtcaaatctcattggaccggagtagtatagatttcttcaaggccaatatcgtttcttcagagagaatcgaacggaagatcggaacaagatgatgtccggcgggaactacacgactatagacagccagaaagtctctggatctgtaccttctgttccagatccaggccataccaccgtcaaattcgcagagtcaaatctacaaacttttcctccatctgctactcagggcaagatctctggtggtagtaatccccctcgtgatgctgacgattcattttctgggcatggtaatggtagtacagatgaacctcagtctggtggctggcttcataaattcactgttggtgcttacaagcccttctttgatgtcgacacttccgatgtagttgagagactcaaagaatccctttt

SEQ ID NO: 128936 - DNA, 611 bp, Arabidopsis thaliana
atttaatgcatgatgagagaaagcatgggataaagtcttcttgttacttatttatatttctttccatctatcatggggataatgtatacatatttgcctacctacatagtatatatgcatgtatgtgagtatatataagttaagtctttctcactttgcacaacatctctatgtgctaaggcatctctttctctccctttctcaccaaatactctctcaatttctctctgccactctctttctctagagattttcataatgaaaggtaccaagaagaagacgccatgcaacaaaaagcttggaggatacttgaaagagcaaaagggaaggctttacatcatcagaagatgtgtggtcatgctcatttgttggcatgactaatttacaacttatatgtgttatatatacatgcatatgcacatgcatattatagacaatatctacgttgtactacaacggtttgattgaagaaagggatcggatcttcgtggttgtggcgatttgtgatgtgagcggagttcgcaagatagagatataagggcttccaaccattcatatcatgtatatgagtttttactcgtatatgagttaagataataatttttgagtta

SEQ ID NO: 128937 - DNA, 433 bp, Arabidopsis thaliana
gatttaagtacagttcccgcattgttcagattctctaagattcattcatcaatctgacttttcccgggaaaattcactgtctctgagtccaaacccgaatccagcgatgatgtcgaacttggtagagccatcgtggcgccttctggcagcgagcggcggagatacggttaagcttttcgacgtttctgccgattccggcgatccctgcgttttgagctatactccgtcacctggttgtgctgtcaactccgtcaagtggaatcatacgaatttagtggtggccagtacgggagaagataagaagatatccctgtggcggaaaaatgggcagagtttaggaacagttccagttactgggaaggacggtggtgatagtgctgaggaatgtttatcggctattagcttcagcaaaaaaggctccaggtacatttgt

SEQ ID NO: 128938 - DNA, 1387 bp, Arabidopsis thaliana
  unsure (1)..(1387): unsure at all n locations
gccatcctttgtccagactcatcccaaagcatgtacacgcagatgctttgtggtctccttatgcgtcacgaagtcctccgtctcggcgccgtcttcgcttctggtctcctccgtgccattggattccttcaaaccaattggaaagaactcgccgacgatatctccaccggtacctttaagttcaagaatctctgacccggccattaaagagagcatgtccaagatcttgaccaaaccggaccaagaactggctgatttcataacttcggtatgtggtcaagacaatagttgggaaggtattattactaagatttggcctaacactaagtaccttgacgtcatcgacgcgtgggccatggctcagtatatcccgatgcttgagtactatagcggcgggttaccgatggcttgcacgatgtatgcatcgtccgagagttactttgggatcaacttgaaaccaatgtgtaaaccttctgaggtttcttataccattatgccaaacatggcatacttcgagtttctccctcatcatgaagtcccaaccgaaaaatccgaacttgtggagctagctgatgccgaggtcgggaaagagtacgagcttgtgatcacaacctatgctgggcttaaccgttatagagttggtgatattcttcaggtgactggattctacaattccgctccacagttcaagtttgtgcggtggaagaacgttttgcttagcattgagtcggataaaaccgatgaagctgagctccaaagcgcggttgagaacgcatcgctcttacttggagagcaaggaactcgtgttatcgagtacacgagctatgcagagacgaagactatacctggccattatgtcatttactgggagcttctagtgaaggatcaaaccaatcctccaaatgacgaagtcatggctcggtgctgcttggaaatggaggagtcgttgaactctgtgtatagacaaagtcgggttgcggataagtcgataggaccactcgagatacgtgttgtgaagaatggaacgttccaggagctcatggactatgccatctccagaggcgcatcgatcaatcagtacaaggtgccgaggtgtgtgagtttcacgccaataatggagcttcttgactcaagggttgtatctacacacttcagcccagctttgccacattggtcaccagaacgtcgtcgttgagaagattttggtttgtgttaggatttgtgagtcgtacaataagttcggtgtacggatgtttaccccatcaatgttttttccactctgtccctcctttgtctgatttctaattaataaacaatttaagttnnnnnnnnnnnnnnnnnnnnnnnnnnnnnnnnnnnnnnnnnnnnnnnnnnnnnnnnnnnnnnn

SEQ ID NO: 128939 - DNA, 448 bp, Arabidopsis thaliana
tcttcatttagtaatccttcgccggatcggatcatcgtttctcagattcctctttttaagtttcttccttcagaatgggtaagtaccaggtcatgaaacgtgcaagtgaggttgatctttctacggtcaaatataaagctgaaaccatgaaagctcctcatttgactggcctttccttcaagttgttcgttaatttgcttgaagcaccacttataggctctttgattgttgattatttgaagaaagacaatggcatgacaaagatttttcgcaacacagttataccagaagagcccatgtttagaccggagttcccatctcaagaaccggagcatgatgttgtcattgttggcgaagatgaaagtcctatagacagattggaaacagccttgaaatgtcttcctcagtatgatccttctcgtagcttgcatgcagatccagtgtcatc

SEQ ID NO: 128940 - DNA, 388 bp, Arabidopsis thaliana
ctcggatctttctctaatcgccgatcggaatccgccatgggagtaccggcgttctacagatggctcgctgaccgatacccgaagtcaattagtgacgtcgttgaagaagaacctaccgatggaggtcgtggtgaccttattcctgttgatatcaccagacctaaccctaacggcttcgaatttgataatttgtatctcgatatgaatggtatcattcatccttgtttccatcctgaaggaaagcctgcacctgccacgtacgatgatgtatttaaatcaatgtttgagtacattgaccatctttttactttagtgcgtccgaggaagattctttatttggctatagatggagttgcgccgagagcaaagatgaatcagcagcgttctc

SEQ ID NO: 128941 - DNA, 419 bp, Arabidopsis thaliana
cccacgctgtccgaaagatatcagaagaagagagaagtctcctcccaaaaaaaccaaggaaaaaaaaaaaaaaaagagaaagaaaagaactcgagtgcaaaaagcttctctcttccttcccatggggtgcatttgaactaatctcctccttgaaatcgcttgattgattgttataaatcgattaatcgattcaaaccgttggatattattccaaaacaacccaaaaagagaatcccatgggaagttgtgtttcgtcgccattgaaaggctctccttttggaaagagaccggtaagaaggcgacacagtagtaatagcagaacatcctctgttcctcgtttcgattcttcaactaatctttcccggagattgattttccagccaccaagccgcgttctccccgagcctatcggtgatgga

SEQ ID NO: 128942 - DNA, 455 bp, Arabidopsis thaliana
aatcactcaaccattaaaccccattttgatctctagttttttaaaagcaggagattttccttttcccagaaaagaaatttcccaaatcaaagtttcgagctttcacttctcgacttgcaaattctcgtcctttttactgaattcgatctgggtttttgtttttgattagtaaaataacaaaaaaaaaaaaaaggatttatcagaaatggctgcgagcgatgaagttaatcttattgagagcagaacagtggttcctctcaatacatgggttttaatatccaacttcaaagtagcctacaatatccttcgtcgccctgatggaacctttaaccgacacttagctgagtatctagaccgtaaagtcactgcaaacgccaatccggttgatggggttttctcgttcgatgtcttgattgatcgcaggatcaatcttctaagcagagtctatagaccag

SEQ ID NO: 128943 - DNA, 537 bp, Arabidopsis thaliana
acgcctgcaggtaccggtccggttttcccggggggacccacgcgtccggagccttttaaagttttttttttaccttctcttcatggacttgtctgtacttgataggcttaagtggctgcaacagcaacaaatggtttcacctgagtttcttcagatacttggctcagatgggagagaagagctcaaaagagttgagagttacttgggaaacaacaatgatgagctgcagagtttcagacattttcccgaattcggaccggattatgatactactgatggctgcatttctaggacaaggagcctccatacggagccagggaagaataatggacacagcagagcccttaccctgcagaacaagagaaacccagagggtaggaccgaaaggagagagaagaagaagatccaagccgaggatgaaacagagcccagcttgaaagggaaaccaacctgaggacccagagactccttcagaaatcacgaacccgaatcacatctggtaggccaaacgaggggaacccccgccagaaaagctaa

SEQ ID NO: 128944 - DNA, 577 bp, Arabidopsis thaliana
attttctttcattctgagtttgttccatcgctccaactttcaaacacaagtgcttttgtcttaagaccttttctcttcgggttcgtgagttaagggttcttcttcttcttcttcttttttctctaaactggaaaataaagaagaaaagaacatggatttgcattcttgtctaaactcatactttcttttgctcctcctctgtcttcttaatattaccaccattaactcaacgaagccattagaacaagaaacagtgctttttggcggcaactttccggctttttatgttattggagattcattggttgattcaggaaacaataatcatcttacaacgatggtcaaatcgaattttccaccttatggttcggactttgaaggtggcaaagccaccggccgtttcagcaatggcaaaacaattgctgattacattgctatctactatggtcttcctttggttcctgcttatttgggattatctcaagaagaaaagaatagtatctcaactggtattaactatgcttctgctggctgtgggattcttcctcagacaggaaggcaaataggaacatgtctc

SEQ ID NO: 128945 - DNA, 609 bp, Arabidopsis thaliana
  unsure (1)..(609): unsure at all n locations
cccntccnntttnacccaatttccntttttcnaccggttnggcggcaannccacccaccangccntncttccttnaaaccgtttncggcaggaatttcancgggtgcccaatccccgccgtttcnggaccctccaaccgtcgaggcccggtttctccatggggtcccccaaaggangangaagtggangttgcccancaaggggaaagtgatcgcagccatcttttggaagcttccgatgaccgaacttgggatccctaacacagattttgggcgagagtaattatgaaaaggctaatggcggttacgtttatggagatagtttgttagatgggtttggtgatgcgttttgggagcttgaagtcgaagctgctaattattacacgttgctgcagtctgagctgttcatgtagaaattatcctaatggttgggaaataacttcttttaaaacgtaaatctggaagaataggccaataacaaaacaaaacataaaagactgtgtcttttttttttagtatggaagttcatttcatttttttaaggcacatttcttttgtttttgtggagcttacaaaagatcattttaattgattgagtaatttgtagcaa

SEQ ID NO: 128946 - DNA, 730 bp, Arabidopsis thaliana
ggtattcccggtcccgacccacagcgtccgcgtttcgtttacgcgtaggaccctcacaatttctctctctaacgtttctaaaacatcctctctctctctctctcataacatggctgaaacatctgatgtatcgccattgaagcgttacagagaacaagaaaccctagtcgaggaagaaacgaacaaacgacaaaagccaacttcgtcatcatcctctgcctcttacaaccaaattctctgtcttctcaacgattcagacgaacaaaaccaacacaacaatgacctaacttccttcataaacgctcttcagcaagaaatatcatcggatgaccaatacgccgtcgtttcagaaacctccaacgtcgaagactcgttttcttcatgtgtttcctcaaaggaagaagaagtggaagatgacagcaaggagaaagtgatgcagcatcttttggaagcttccgatgacgaacttgggatccctaacacagattttggcgagagtaattatgaaaaggctaatgacggttacgtttatggagatagtttgttagatgggtttggtgatgcgttttgggagcttgaagacgaagcttctaattatttcacgtttctgcagtctgagctgttcatgtataaattatcctaatggttgggaaataacttctattaaaacgtaaattttaaagaatagccaatttcaatacaaatcttatatattcggttcttttttttt

SEQ ID NO: 128947 - DNA, 457 bp, Arabidopsis thaliana
aaatacaacaaacagaagaaaagtgaaattgctttcgaacaaaaggaggaaactttaaaggcgaactctttagtattcgatccgccattgaagctcctctgactctctctcaaagtacttctctgattcgtcattcctctgcttcgtttagtttaaagggtacggaactgacctgagaggtttgatttgaatctaaaaaggtttagttttttgttaagtttgatggggacagggaattctaaagaaaactggagacagtcatcgtttaggtcaacttctgcttcatcagcatcaccatcttcatcttcatgggcttctcaacaaagttatcctcagtatggtgcagaaagctataattaccctcctccaccttcttatgcccaacctcctgagtatacgcaacctactcctcctttatatagtactcagccttactctgctccgtcttattctgcac

SEQ ID NO: 128948 - DNA, 469 bp, Arabidopsis thaliana
ttggcgtttttcgcagagattcagcttggcatgaggatgaacatgttggatttggttctcgaaggtggttctccggttggtactgataacggcaaaactccaaggcttggagtgattcctaagtacgccggagatgagtcggagatgaaatggttcgaagttcctggattcaatatcattcacgctattaatgcttgggatgaagatgatggaaacagcgtcgttttgattgcaccgaatattatgtcgattgaacatactttagagaggatggatctggttcatgctttggtggacaaggtgaagatcgatctcgtcaccgggattgtgagacgtcatccgatctcagcgaggaatctcgatttcgctgtgattaatccggcgtttctcgggagatgtagcaggtacgtttacgcggcgattggagatccgatgccgaagatctccggtgtggtgaaacttgatgtgt

SEQ ID NO: 128949 - DNA, 749 bp, Arabidopsis thaliana
  unsure (1)..(749): unsure at all n locations
nnnnnnnnnnnnnnnnnnnnnnnnnnnnnnnnnnnnnnnnnnnnnnnnnnnnnnnnnnnnnnnnnnnnnnnnnnnnccacgcgttcgtccacgcgtccgggggtacgcagaaattctgtctgcgtctccgaaccaactctatccttctctcaatccgatccgttccgttcactacttgtctcaatttcgaaccaattggatcgcatcttttaggggctcaaacctttggtgacgaggacgaggaagaagattgtcgcatctgatttatatcggaaaaaggtctcttgccggaaaggacacgatccgctttcataaaggagagattttgacagattcagtagacgccatggatgtgcctagctcttgggatgctttacggaaacaggctagaaagattgaagctcagcttgacgagcagatgcattcatatccgtacacttgtttccacaaaggctttatcaaaatcagatggtaatgagagtgatcttgaagctgggattgacttacttcttaggcaactgcaacaagttaatgctcatatgcaagcttgggtatcttctggggggcagaaatggtctccatactttaactcgacatcaagagatccttcaagatctgacacagggagtttatccacaccgctccagtcttagagcaaaacagagcatgcttcacttcttgagggacttagagaatttgatcggacaaaatagatcacaaagatggtttgggcttgaacaggcccggtc

SEQ ID NO: 128950 - DNA, 645 bp, Arabidopsis thaliana
tgcagtaccggtccggaattcccgggtcgacccacgcgtccgggggctcggaagaattgtgtctgcgtctccgaaccaattctcttcttcttcgctcgagccgatccgtgttctacttcgctcaatttcgaaccaagtggatcgcatctttcgggggcgaggacgaggaacaagaatttttgctccgggataattgcctcatctgatttatatcgggaaaaaggtcgcttgccggataggacacgatccgctttcataaaggagagatctttacagattcggtggacgccatggatgtgcctagctcttgggatgctttaccgaaacaggctagaaagattgaagctcagctttgacgggcagatgcattcatgtcgtagacttgtttcaacataggcttcatcaaaaacagatggttctgagagtgatgttgaagctggaattgacttactttttaagcaactgcatcaagttaatgctcagatgcaagcatgggcttcttctggtggatcagaagtggcctcccatactttaactcgggattgatgagatccttccagatctaacacaggagttttatcgacgtcgctcccgtcttagagcagaaaaagagcatgcctcacttcgtgaggactttagagaatt

SEQ ID NO: 128951 - DNA, 395 bp, Arabidopsis thaliana
tcgcgggacgcgtgggcggacgcgtggggcgaagaaaaaacacttcttcttcttcttcaacaacaacaaaacccaatttcgcggctaaatcaatcgcttcttctactggtcttggaattgagagaagagaccagtttcgctggatctttgaatgaagctggatttggattaagttcaggtgtaaatttgttggaagatggggtcagatcaatgtttttcgagattgaattcacttgagattaaagccctaatttatcagaaaattgggcatcagagagctgacacttacttcgaccagctcggaaaattccttacctcgaggataagcaagtccgagttcgataagctatgtagcaagacggttggtagagagaacatttctctacacaaccgtc

SEQ ID NO: 128952 - DNA, 1112 bp, Arabidopsis thaliana
  unsure (1)..(1112): unsure at all n locations
cagcgcacttccatggacaggcgtctgagccgccatggttcaagctttcaagttccagctggatcattcggtatgttcacaatcatagctctagccctatgggtcattctatatgaccgtgcggttatcccattagcttccaagatccgaggcagaccttttagacttagcgttaagctaagaatgggattaggattattcatgtcattcttagcaatggcaatttccgcaatggttgaaagcttcagaaggaaaaaagctataagccaaggatatgcaaacaattctaatgctgtggtagacatctcagcaatgtggcttgtgccccaatatgttctacatgggttagcagaggctcttcccgcaataggacagactgagtttttctacaccgagtttcctaaaagtatgtctagcatcgcggccttctctcttcggtttaggaatggctgtggctagtctattggcaagcgtggtcctcaatgcggtcaatgaactaacttctagaaatggtaaagagagttgggtttcagacaacattaacaagggtcactacaactattactattgggtactcgcgataatgagcttcatcaatgtgatctactacgtgatatgtagctggtcgtatggtcctttggtcgaccaggtaaggaatggtagggttaatggtgtgagagaggaagaggagttgattgacattgttggcaaaggattcgagaaggaagatctaagtccagttgttaaaaccaattaaggaacaataggtcttgcaagcttgtattttgtttataaagggagcgataaactataggaaatgatattttattgcattggtgtgtggtgttattaagtgttaattaaagtctatatagatttgtaattagattgaattatgtgtttgggttttcattagggtttttgatgaaaaggtaatggtttttggttgtatccaagccaaagtgtttgttgtatttttttttttcgtgttattgcaattcaaggagtcttgtgtaaaaaaaaaaaaaaaaagnnnnnnnnnnnnnnnnnnnnnnnnnnnnnnnnnnnnnnnnnnnnnnnnnnnnnnnnnnnnnnnnnnnnnnnnnngtcat

SEQ ID NO: 128953 - DNA, 618 bp, Arabidopsis thaliana
  unsure (1)..(618): unsure at all n locations
nnnnnnnnnnnnnnnnnnnnnnnnnnnnnnnnnnnnnnnnnnnnnnnnnnnnnnnnnnnnnnnnnnnnnnnnnnnnnccacgcgtccgcccatgcgtccgacataatataatatcatcagagaaaaacaaaatggataattcaaatttcgaaacacttcctgaagatctacaaaaggagattttgttatggttgtctccaaaatccttggtgaaattcaccctcgtctcaaagaaatgtgcatctattatccgtggggaagaattcaaagctctttacatgcgccgatcaatgacaaggcctcgtgtgttgatcgttgccaatgaaagcacaggtgagaagtcattggtgtttcacactttgtatcatgaggaggaaccattgttgtcatcttgccatcaacaacctatgcgtatcaccaacaatgcaccacgttttattgcttctcaaccattcctaggttcgatctgtcttccaaatggtagggagggtgtcattcacaatccgggtacaacaatattcagactttaccgaagatcaaagctccatcattaaagtttaaaaaaacttgtttcggatacaatggagctacggaagttttaaggtggtatgtataaca

SEQ ID NO: 128954 - DNA, 583 bp, Arabidopsis thaliana
cggggattactgaaatacctccctttctagctttaaatgtcacttaaatagccttcgcttgtaaaataaaagtttgaatatttaaaccagaaagctaagtagagaggttgtgatgggtctgcaaacatggatatgcttcacactattctcaattttcttcttcctcctcttactatcagttttctcgtcctattttacccattttatctttttaccaaacttatgagttgtcttaagcaccttcactttgaaaacgttactgggaaagtagttctaatcaccggagcttcctccggcatcggagaggttagctagtattggatgttatgtttaatttgtttgttttggttggtcttatctataatttttagcaacaaataaaaacaatgatgcagaaagttttttttaaaaattatgaatgatatgtaattggtacataatcacgtttggaaaacgaaaacttgaattcaaagtcaaatattgttttggacgttctatcatcatacatatgtacgaccaattgatcctttatatttgacgattgctcgagtagactatcatccgtgaacagtaaaattgttat

SEQ ID NO: 128955 - DNA, 863 bp, Arabidopsis thaliana
ggcttccattagtagcttacacagatgggcatctaatcaacactctcgtcttcctcgaatcacttctatttctgaggctgaccaatctcgacccattaaccaagtcgtcgccttttcggttcctatatccagaagagacgcgagtattattcttctcagctcgattccattgacaagcttcttcgttctaacaccgagctcttccgaagctagagagagacgtagcagaaaagttatccctctcgaggaatattccactggccctgaagggttgaaattctatgacattgaggaaggcaaaggtccagtagcaacagagggatcaactgctcaggtgcattttgattgccgttacagaagcatcactgcaatttctacccgagaatccaagcttttagctggaaaccgtagtattgctcagccttacgagttcaaggtgggatctacgccaggaaaggaaaggaagcgtgaattcgttgataatccaaatgggttattctctgcacaggctgcaccaaaacctcctccagcaatgtatttcattaccgaaggaatgaaagtcggaggcaagagaacggtgattgttcctcctgaagctggttatggtcagaaaggaatgaatgagataccgcctggagctacttttgagttaaacatagagctgcttcgggtgactcctccaccagaagagaagtgaacgctaataagagaagtttgaagcttcaagcattgtcccaacatttgtgtaaagatgacaaaggagaaaagagagaaagatgtaaattttggagtttttagtttgtgtctggttggttatacaccaaactctggtacagttaaataaccggtatatttgttggact

SEQ ID NO: 128956 - DNA, 494 bp, Arabidopsis thaliana
  unsure (1)..(494): unsure at all n locations
nnnnnnnnnnnnnnnnnnnnnnnnnnnnnnnnnnnnnnnnnnnnnnnnnnnnnnnnnnnnnnnnnnccacgcgtccgctcgattcagaaatttggaaagactagcttttttttctctcgggtttcactttttaaaggtcgtgaaaatttgggaatcactgatcaattttgttaatatgatttcctgatttagggtttctctgcatgcctctagaatcagcaagtgtaaagcaattaccatggtgactccgaagcagatcgatttctcttcctgtggtggtggtgataactccgacgataccctctcccatcgagaatctccacggaatccttcctcaaagcgtgctgctgcttccttcgcagcagaagcaggcgaagagactatgaagaaganaaagaagaagaagaagaagaatttgggtccgccgttgatcgtccggatctggaacgaggaagatgagctctctatcttaaagggattagttgattacagag

SEQ ID NO: 128957 - DNA, 572 bp, Arabidopsis thaliana
  unsure (1)..(572): unsure at all n locations
nnnnnnnnnnnnnnnnnnnnnnnnnnnnnnnnnnnnnnnnnnnnnnnnnnnnnnnnnnnnnnnnnnnnnnnnnnnnnnnnnnnccacgcgtccggttgagagagggttttccattctctgtggccgtcaccgtcgccgtgaaatagctctcctctctctatctccgattatataactgcaagctcaaaggaattgtttgttgttaaaatgtttcttacgcgatttgtcgggaggagattcttggcggctgcatcggcgcgatcggagtccactacagcagcagcagctgcctcgacgattcggacgccaacaaatccactcgaagagttctttgagttcgacagaagccaagacgaagataaacctgttgtctatggtcgaggttggaaagcttcagagctgcgtctcaagtcatgggatgatcttcagaagctgtggtacgttcttctcaaagagaaaaacatgttgatgactcagcgtcagatgcttcaggctcagaacatgcagtttcctaaccctgaacgcattccaaaggtgaggagatcaatgtgccgcattaagcatgtgctgac

SEQ ID NO: 128958 - DNA, 934 bp, Arabidopsis thaliana
  unsure (1)..(934): unsure at all n locations
atgatctcgccggcannnnnnnnnnnnnnnnnnnnnnnnnnnnnnnnnnnnnnnnnnnnnnnnnnnnnnnnnnnnnnnnnnnccacgcgtccgcccacgcgtccgtgcagttcccatcgaatttgatattgtaaaagatgagaagtcaccagttttggataggacggaggaagatgaactgaaaactgcagagaccagtgacaaagccgaagcccttaaatgtgcagatgtgaaggtaagctctgagaatggtaatgttggttctgataacacaaagcaaagtgaaaaacgagcattgctgcctgcaaatattgacaaacaagatgatgggcttacccttagcggacggaaaatccccagctacatggccccgactgcatctgcaaaggccagagtcaaaggagaagcctctccgaggtttgcccaagcgaagactgagataaatggggcattacggcgccattcactgccttctccagccaatggtaagctgagtactactactatgtctccaagggctcaaaaacttctcttagcctctgccaaaggatctatgaacggcgacaaatcttttacttcttccaaggacataactcacaagtcaaccagaaccgactggaaacggtgaaggctcaggcaaaagagagtgtcatctactcatcttacatggtcgaattcaattacttagtgtgtttcctctgcattttggtttggtttggtgagtttagagagtgtttggtcagtgttcatgtctagtctattacatcattttcatatcttgcttcaatttactctgatatgtttgaagacgcaaaaaagatgaagtaaatagttaatctctgtataaaaaagaaaaaaaaaaaggcagaccgctctagaggatccaagcttacgtacgcgtgcaggcgacgtcatagctcttctatagtgtgtc

SEQ ID NO: 128959 - DNA, 894 bp, Arabidopsis thaliana
  unsure (1)..(894): unsure at all n locations
taggaccngacncnctttcagccatccccaaccnttttatccccccgggcggnttnttccccggnggcccncaacgggaaccttaccccngttggataacctgaagcccccganccggcttatggggaccccngnccgggnccgaaatggattggcccnggnatttaggatttcccggcggcgancggcgaccggtgttggctttgcccgtntcgtcatttggttatggtgtacagaatgcgacggctccgtgagaatttgtcccgctttgccttagcacgaagaattccaagcgtggaggttttctattcttgatgggccattctataatgggcttatcaggcccaatcaaatggaatttaataataataataaaaatataaattaaatttatcatttatataaactatatatgtagtatactgttgagctcattattgaatagcttgagaggtttgatgtacatagccaccacatgcagtgagcttcttctttttttggtctttaggaattcttttgatttcgtaataaatcaaccttgattgtttaatttttaattactttacatatatagcatttgatacgatatgatttatttatgatgttttagtagaggatgagacatgatttagtattattttcaaatgttttgtattgttataatatttgtattctaattaagaatattctagggtttttgtgtttttaaatatctatttgtataaagcatgttcattatttcttgtttttggttgagctcaatgtatttttatggaattttaaactaagcgaacaattatcttaaaaaaaaaaaaaaagggcggccgctnnnnnnnnnnnnnnnnnnnnnnnnnnnnnnnnnnnnnnnnnnnnnnnnnnnnnnnnnnnnnnnnn

SEQ ID NO: 128960 - DNA, 484 bp, Arabidopsis thaliana
attgaaaacgggaatcttgtttacaagatggaggttttcttgaactctagtgttttgagaagctggaaagactccattatagttctccagacgacgagatcattttatccgtggtctgaagatgtgaaactcgatgtacggtgtttggagtcaatcgctttgaaagctgctatggatcctgcaagagttgattggtcttatacttataaccgaagaaagcttcttccccccgagatgaacaacaatagcgtaccgagagattggtgggtcgaggatctcgctgagctcagcattgatttatttaaaagagtggtttcgactattagacgaaaaggcggtgttttgcctgaggttatcggagaagctcttgaggtatatgcagcaaagagaatccctggtttcatgattcaaaacgatgataatgatgatgaagaagatgtgatgggacaaagatctttgttggagacattggtttcgatgttgc

SEQ ID NO: 128961 - DNA, 546 bp, Arabidopsis thaliana
agctcactctctctgttcttcatcacaccgagaattcgaaaattccgatgaacaagaaacttctcaaccctcttgaagatccaccaaccgcttcttcaagcgaagacgtcgacgaagagatttcatcaggagaagatgaaaaagaacatatctccaattcttcttcttctgaagaagaaaacgaactcaaagatctctccactcaaaccctaaattctccttccaccgaggctccaactctcgattctggatctgagacaaattccgactcagataagccaatcgtcttaaccagtcagaagaagaaagaaggtactgattcatcagggacgaagcgagctagtgaaggaactagctcaaaggacatcaaaagagctaagaaagtttcaggagatgacggtaacaaaaaggctcagtgtctatggactaaagaagatgagatctctctgttacaaggtatgattgatttcaaagctgagacaggtacaagtgctcatgatgatatgaatgggttttttgatattgctaagagatacataagctttg

SEQ ID NO: 128962 - DNA, 558 bp, Arabidopsis thaliana
  unsure (1)..(558): unsure at all n locations
ggcaaatgggtcgcatggaactgatactctatccctcaagggtgaacttgcgaaagaacagagcagagcggaatcattatctgctcaagtcctccaactctcagctcaactccagcaagcaacacaagcatacaatgggcttatgcgcatctataaacctgtgcttagaaacatagagagtagcttaatcaagctgaagcaagatggatcggttacagtggcacagtgaatcaggaaccaagggcacacttctgagtattgaatatatttttatacaacaaaacatctatttagaaccaaggggacaagtgaatctaacacttttttctttattgaacaatttggttcgttgtgttgtaactgttgttcattgaaagcttcggttcgttttcctcaagtttgattttggaaggtttggagtttggttatagaagtgagactaaaccgaatttttgagnnnnnnnnnnnnnnnnnnnnnnnnnnnnnnnnnnnnnnnnnnnnnnnnnnnnnnnnnnnnnnnnnnnnnnnnnnnnnnnnnnnnnnnnnnnnnnnnnnnnn

SEQ ID NO: 128963 - DNA, 509 bp, Arabidopsis thaliana
cggtcgcgtgggatttcaagctcgtcactccgccggaatcttcccgcgccgataagccaggagctacgaaggcctccgacgcattccaggagaagaaatctgtgtctgtgaactacgaccgtggtgagcatgaggtctcggtcaacatcggcgggctcaggaaagctgatattccgagacgttaccgaattcgggttgagaacgaccggtttcagaaggattggagtgtatcggaggttgtggaccggcttatggctctcaatcgttgggaagaagttgatggcgttcttaattcctgggtcggccggtttgctaggaagaatttcccggttcttatcagggagcttagtagaagagggtgtattgagctttgtgtgaatgttttcaagtggatgaagattcagaagaactactgtgcaaggaatgatatatacaatatgatgattaggcttcatgctaggcataattgggttgatcaggctcgtggtctcttctttgaaatgcagaaa

SEQ ID NO: 128964 - DNA, 971 bp, Arabidopsis thaliana
  unsure (1)..(971): unsure at all n locations
gcacttccattgcacttcgcatgtaggatatctgagtgtgcaaatctacaattcacagagcgttagcacataccatggagatcagtggatgtcccatgaggactacgatatgcattgattcacaagtctgtagaaggtggattgcaagagagcgagtagtcactcagctaatagttacagcatctgcaacagttgcagcattgtttctggaacgtgaaacgattctcaggtcgccactcagcgcatctcacgacgagtttctagaaatataaaagagaagactctaacaaacaatgtcttaagaatcaaaaggttctgcttgtggcagacaacgttactaaggttaaacagttagaagctcttgcaggggatttcagcagttttggtcctgggagtgttgttattatcactacagacaacaaggggtttttgaattcttatggtataacagatgtctacgaagttgagcatttgaagttttgtggaatcttacgatcattgggctttaaaaagagagctgctgcgttccagcgggctttgtgtagagcaaagagttttgccacggaatgtttttgttgtcaaagtagtagtatatctggttatgggaaagtgacagatttagtttaattaagttgaatcccttattagtcatatgcattaagttaagtaaacttaataagttgtgtggcttagaaataatattgttttgtctatttttggagtgggttgctcttggggtgtagaaaaatgtcactcttcattggattaagtaatatacatttttttgttccttagtttttaagacatttttttacatctggatgtgccagnnttgtttgtaatatactgttctttccttatagaaataaatattcacaattttttaaaaaaaaaaaaaaagnnnnnnnnnnnnnnnnnnnnnnnnnnnnnnnnnnnnnnnnnnnnnnnnnnnnnnnnnnnnnnnnnnngtc

SEQ ID NO: 128965 - DNA, 685 bp, Arabidopsis thaliana
ggtgagtgagtgagagaagaatcagagaaaatgccgccgaaattggatccatctcaaatcgtcgacgtctacgtccgagtcaccggaggtgaggtcggagcagcgtcttcactcgctccaaagatcggtccactcggtctggcaccaaagaagatcggagaagacatcgccaaagagacagcgaaagaatggaaaggtcttcgagtcaccgtgaagcttacggtacagaatcgtcaagctaaggtcacagtggttccatccgcagcggctctagtcatcaaagccctcaaggagccagagagagataggaagaaagtgaagaacatcaaacataatggcaacatttcgtttgatgatgtgattgagattgctaagataatgcgtcctagatctatcgctaaggaattgagtggaacagtgaaggagattttaggaacttgtgtctcttttggttgcactgttgatggtaaagaccctaaggatcttcaggaaaattaacagtggtgacattgatattcctaacgagtgataaaggtttttacttttgagttctctatcgttttattttttgtatttgattttgaggatttggtattagtaatactatatttcggaagttgagaattgttggcttttgcccatttgaatcctttcttgggattaatcaaaatgttcaattttctcc

SEQ ID NO: 128966 - DNA, 501 bp, Arabidopsis thaliana
  unsure (1)..(501): unsure at all n locations
gnnnnnnnnnnnnnnnnnnnnnnnnnnnnnnnnnnnnnnnnnnnnnnnnnnnnnnnnnnnnnnnnnnnnnnnccacgcgtccgcggacgcgtggggcacaataagatacagtcaaccaagaaagtcgagccaactgcagtgttggacaccaaagataaaacgagtaggcctaaatctacatctgtcgagaagaaatctgttgcagagaatggattgcctgggaatttggtcaaagtctctgttaatggtaaaagattagcggcggccaatatccaatggagttcactccctccatctctttcgaggatgggacaggaagtattgaggcatagagaagctgctcaagtagtcgcaatagaggccctgcaagaagcctctgcttccgagagcttacttcagtgcctcattatgtactccgatcttttgtcaacggcgaaggaagatgatccattgccagtcgttgagcagttcttgaagctccattccggtttgaaaaacgtc

SEQ ID NO: 128967 - DNA, 717 bp, Arabidopsis thaliana
  unsure (1)..(717): unsure at all n locations
atgatttnnnnnnnnnnnnnnnnnnnnnnnnnnnnnnnnnnnnnnnnnnnnnnnnnnnnnnnnnnnnnnnnnnnnnnnnnnccacgcgtccgtgagaaacaaaaatcaaaatacagttatccctggcttagggtttaaagcccgttgctgagtcttttgtaatctgacacacatcacaacaatttctctttacgttcttttggtacgatgcttttgtgttttcagtttatcttaactttgttttatttctcaattttacgattcatggttctgtaaatccatattgggcagtcttttcataaacaaaacgaggtgtgatgctaaatttcattgggacaacgctatattgtagaagacggtgaagattgttatacgttttgcaaggcagggatttatgatgacactctccggtcgttttgcttccttgatgcaattgtttttccaatttaggttttgaattattactcactattttatcagggtagcaacattacctgaaagtgtctctgagctatcacaaagattgaaagaagtttatgtgatcaaaactttccttttaactttattgttttcagtattagctatcttatgttatgtatatcaatgaatgtttttaacgattaaaaaaaaaaaaaaaaaaagnnnnnnnnnnnnnnnnnnnnnnnnnnnnnnnnnnnnnnnnnnnnnnnnnnnnnnnnnnnnnnnnnntgtacctaa

SEQ ID NO: 128968 - DNA, 330 bp, Arabidopsis thaliana
atgaaaattcgatctgatcactgagaaactacggcgacgacgaagaatacggtggaggaggaagtacaatgagaatattaagctacggaatcgttattctctctttactcgttttctctttcattgaatttggcgttcacgctcgtcccgtcgttctcgtcctctcaaatgacgatctcaatagcggcggcgatgataacggagtcggagagtcctctgacttcgatgagtttggagaatccgaacctaagtccgaagaggagcttgatcccggttcatggcgatcgatcttcgagccagatgactcaacagtccaatcagcctcgccgc

SEQ ID NO: 128969 - DNA, 696 bp, Arabidopsis thaliana
  unsure (1)..(696): unsure at all n locations
atgatcctnnnnnnnnnnnnnnnnnnnnnnnnnnnnnnnnnnnnnnnnnnnnnnnnnnnnnnnnnnnnnnnnnnnnnnnnnnnnccacgcgtccgtttcttttttctttcttccgtttcaaagtttcttccttttgggcgggttttaaggaaattttggaatttctctctttttggagacgtttctttaatttctgggcttcttctagttgtgggttttgttttctacttgtagctactgtgtcacgcttttctctagcgaatactttgatgcttcttcatgactctttaacaagattattctgagcttttcctctggccttctaattattaaagtcttcctttttatctattgttaaggtttggcttcgttgtctcttcctcttacctctgctttttggttcagagtatttgaattttggggaatattaaaaattgcctgatactgaaatcaatctcttgctgtctagtgatggctactgaagagaagcctcttaattctcttgatttaagccatgatgattcttcccctgcttcaaatcaggctgaaggatcatctgctataactgaaggcactttctgcgaatgttcaacattggaggcgaaagaatctctctttacagataccctctagagcagctggtctctctcctgaagattcggttgttatcaaaatgcctccaacgcctagtccaac

SEQ ID NO: 128970 - DNA, 698 bp, Arabidopsis thaliana
  unsure (1)..(698): unsure at all n locations
cagcatctatacngactcaccttagggaaagctcgtacgcctgcaggtaccggtccggaattcccgggtcgacccacgcgtccgacagcaaccgccatttctttccaaattcccccaattcccattccaactttaccttctgaagtagaagaagaagccatagaaatgctttgaagtttctgtaaagagaaagatctacaattgttttgaatatgccgaggcagaatcaaagcgtagagaatctacttctacttggcaaaatcaggaaacgtggttgttcttcgccgacatcgtcgacttcttcgattctccgtgaaggttatagattcaaaagagcgatagttgttggtaaaagaggaggatccactactcctgtacctacatggagacttatgggtcgatctccttctccacgagcttccggtgctttacacgctgctgcttctccgtcgtctcactgcgggagcaaaaccggtaaagtatcagctcctgctcctgtttcagctaggaagttagctgcgacgcttttgggagatgaacgggatgcctttcacctagagttgtggaggaggcctgcgccaatgattaggaagcagttgaaaggaggagattcgcgccgctttctccgccgagatcatcggttcattctggttctctaccgcctcatctttctgatcccgtcgatagtccagtctctg

SEQ ID NO: 128971 - DNA, 664 bp, Arabidopsis thaliana
  unsure (1)..(664): unsure at all n locations
gcactaatacgactcattaagggaaagccggtacgcctgcaggtaccggtccggaattcccgggtcgacccacgcgtccgcccacgcgtccgcccacgcgtccgtgaagctaatcctcgttggttgattctctaccggaagcctaatcaaaccctaactaagaagaagaagaagaaagaggattcaagtgttcatcttttggctccaattccaattctcaattctccaactgtggaatggtcaagtctagtcgctgttggttcttatctgtacgccattaccgcagacatcaaagattctccatgctctaacgtttggtaccttgactgtcgaacgcacacttggcttgattctccaagattgcgactggctcacatcaatagtgactttaatgggaggacgtatttcccaggaagctctgaaaagccagattctttgaactgtgttgaagtgtacaacacaaatactcagacttggaatcccgtgcctccccaaaaacgaaaactcaaattcggaaatatggaagganagatttacatacccccttgtcaagagaatcataggaaggctgtggctctaaacccaaaggttttgacatgggaagcggtaggattgggtacgaatttggataggggttctttttgtatgatagggaacatagcct

SEQ ID NO: 128972 - DNA, 614 bp, Arabidopsis thaliana
  unsure (1)..(614): unsure at all n locations
nnnnnnnnnnnnnnnnnnnnnnnnnnnnnnnnnnnnnnnnnnnnnnagccgttnagggaccgggccagaattcccggggcagcccactgcgtccgcaaacccagaacctccgtccgaccaattccggtgcagctaagaaccagagatagagagatagagatgcggaggatcaattcactgtacggaagaattggtctcctaaaacgagtacccgagaaatctacgaagcaagctcatacatttctcgcatctctctccttctctacggaaggtgcttatggcggtgacggtgagtttcagcagaacagctccaaagtcaagatctttgaccgagacctcaagcgaatacatcgtgatcgagcggcgtggctttctcgccaaaaaaaacgattcttttgttgacgctgttgcagataatctacttgatcgcttagaggattgtaagaagagttttcccactgcattttgtttgggaggatctcttggtgctgttaagagattactacgtcgtcgcggtgggattgagaagcttatcatgatggatacttcatatgacatgattaagtcatgtagagatgctcaagacgattcactcgataactccattgaaacct

SEQ ID NO: 128973 - DNA, 779 bp, Arabidopsis thaliana
  unsure (1)..(779): unsure at all n locations
nnnnnnnnnnnnnnnnnnnnnnnnnnnnnnnnnnnnnnnnnnnnnnnnnnnnnnnnnnnnnnnnnnnnnnnnnnnnnnnnnnnccacgcgtccggtcgtccaatagatggacatcaagttggcaggaaggcgtcatttgccttgttataattgcatgcagtggttttggtgctggcgtattttaccgtttcagtgcttcagttatatttattctcctctcagttggtgtggcagttgttgcttcagcagttcttcattatcgccaagcttatgctctgcctctaggttctgggtttagctgtcctggtgtacccattgtgccatccgtttgcattttcttcaacatcttcttatttgctcagttgcattatgaagcatggataagatttgttgttgtcagtgtgcttgcaactgccgtttatgccttgtatgggcagtaccacgcagatccgagcatgttggattatcagagggcacctgaaactgaaagcgacgcttagtaatgctacattatagttgtgttacttaaagccatttgtagagttgatagcaagtttctgcgtttcgtgagagacatactgtatgtcacatacatattcaggtcgagtttaaggattggatgggataaggcagttaaacattattgttgtaaagaagttaataaaagtatgcttgtgcatttcaaaaaaaaaaaaaaaaaaaagnnnnnnnnnnnnnnnnnnnnnnnnnnnnnnnnnnnnnnnnnnnnnnnnnnnnnnnnnnnnnnnnnnnnnnnnnnn

SEQ ID NO: 128974 - DNA, 577 bp, Arabidopsis thaliana
  unsure (1)..(577): unsure at all n locations
nnnnnnnnnnnnnnnnnnnnnnnnnnnnnnnnnnnnnnnnnnnnnnnnnnnnnnnnnnnnnnnnnnnnnnnnnnnnnnnnnnnccacgcgtccggccacaaagaagaagaaaaccttcttcaacgtttaaagtctcttctctctctctctcttaacttctcccattttctttgaactaaagatcaatggctcacaaccattctaatgaagacggctctattggaacctccttgcatggagtcacggcaagggagcaagtcttctccttctccgtccaagaagatgtcccttcatctcaagccgtccgaacaaacgatccaacggctaagtttgccctaccagtggactccgaacatagggcaaaagtgttcaaaccactatcattcgctaaaccacatatgagagccttccacttaggatggatctctttcttcacttgcttcatctccaccttcgcagccgcacctctagtccccgtcattcgcgacaatctcgacctgaccaaaaccgacatcggaaatgctggagttgcatcagtttccggcgccattttctcgagactcgctatgggtgctgt

SEQ ID NO: 128975 - DNA, 387 bp, Arabidopsis thaliana
ctttagcggttttgtcatcttctctactcttctttctcttttctgagaaacccaaaagacaaaaacgaagaagaagattaggaaatcatcttgagaaacaggaggtagcaggagaatatgggggacaaggaagaagtccttgaggctgttttgaaagaaactgtggatctggagaatgtacctattgaagaagtttttgagagtctgagatgtagcagagaaggtctcactacagaagctgctgatgaaaggctggctctttttgggcataacaagctcgaagagaagaaggaaagcaaattcctgaaatttcttggtttcatgtggaaccctctttcttgggttatggaagctgctgctatcatggctattgctcttgctaatgga

SEQ ID NO: 128976 - DNA, 575 bp, Arabidopsis thaliana
atgatacttcagctctctacgactcactatttggaaagctggtccgcctgcaggtaagctttcggaaatccaaaaatgggatctcttccaccgccatcgctagatttctcatcaatcgatcacaattccctcaaaaatggcggatccagccaccaagagatctctcatgataatctcctcaacctcttcaaatcccagcaagatcttctcaatcacttcttcaaacatctcgatctctctcaaaccctagatttctcacgcattctcctttccaccaccggtaccgttttcttcaccggcgtcggtaaatccgctttcgtagctaacaaggtttcacagacgctcgtttccttaagcttccgttcctctttcctctcccctctcgatgcgcttcatggtgacattggcgctctttcgccacgcgatgttctcgttttcttcagcaaatctggcgccaccgaggagcttctccgtcttgtcccttgcgctagagctaaaggagcctttctggtgtctcttacctctgtttctgggaatccactcgctggtgtttgtgatatgaatgtgcatttacc

SEQ ID NO: 128977 - DNA, 585 bp, Arabidopsis thaliana
  unsure (1)..(585): unsure at all n locations
atgatctnnnnnnnnnnnnnnnnnnnnnnnnnnnnnnnnnnnnnnnnnnnnnnnnnnnnnnnnnnnnnnnnnnnnnnnnnnnccacgcgtccgcccacgcgtccgcgcctcctcctccactactactaccaccaccacctttggtttccgtttctctgtatattcattcctcgaaaccctccaaaaacccatttcaatcaatttctcgcttttgccctctacgtttctcgtcctgggtttctcaaatccagctcagtttattccccaattcaataatcaaaactctgtcttttggtgggtcttcgtcaaagctctctcctttacggtccttttctccagcgcatgaaataataaaggacacctgtatttattaaaatcactacattttccgtaacaaaaaaaatcaaactttgttttctcaatggacggtgccggagaatcacgactcggtggtgatggtggtggtgatggctctgttggagttcagatccgacaaacacggatgctaccggattttctccagagcgtgaatctcaagtatgtgaaattaggttaccattacttaatctcaaatctcttgactct

SEQ ID NO: 128978 - DNA, 759 bp, Arabidopsis thaliana
  unsure (1)..(759): unsure at all n locations
nnnnnnnnnnnnnnnnnnnnnnnnnnnnnnnnnnnnnnnnnnnnnnnnnnnnnnnnnnnnnnnnnnnnnnnnnnnnnnnnnnnnccacgcgtccgcggcaaatctatctttctttattttaataaacggaaaaacgaaaagtgaagaaaaatgggagtagtactgatcgatggatcaacggtacgatcttttgtagacgacgaagagcaattcaaaaaaagcgtcgacgagaggttcgcagctctggatctgaacaaagacggcgttttatcgcgatcggagctacgaaaagcgtttgaatcgatgaggctacttgaatcgcactttggcgttgatgtggtgactcctcaggacgagctgacgaacctctacgattcgatcttcgagaaattcgatacggatcaaagcggttctgtggatctggaggagtttagatcggagatgaagaagatcgtgcttgcgattgctgatgggcttggatcttgtccgattacgatggtgttagatgatgatgatgataatttcttgaaaaaagctgcggatttggaagcttccaagcttgagaaagcttcttcgtaatggtgatggatggttttgggatctttttgaaactgttttcgttttgttgttgttcatgttttgatgtaagtgagagtttgaataaataaaactttgtgagaaaaaaaaaaaaaaaaagggcggccgctctagaggatccaagcttacgtacgcgtgcatgcgacgtcaaagctcttctat

SEQ ID NO: 128979 - DNA, 514 bp, Arabidopsis thaliana
  unsure (1)..(514): unsure at all n locations
nnnnnnnnnnnnnnnnnnnnnnnnnnnnnnnnnnnnnnnnnnnnnnnnnnnnnnnnnnnnnnnnnnnnnnnnnnnnnnnnnnnccacgcgtccgctccttcatcatcatcggtttcttcttttgattccacaatgaagcgtttgctgctgcttgttgtcctctgcagcctttctctatcaaggtgtgaatcaaaagtcgtgccgtatgattattctgcaaccatcgagtgtctagagatacctttaaaaccacagtacaatggaggaatcatcgtcagccctgacgtacgagatggcaccctaggctggacaccattcggaaacgcgaaagtcgatttcagaaaaattggaaaccataatttttttgttgcacgagacaggaaacaaccttttgatagtgtctcacagaaggtttatttggaaaagggacttctctacactttctctgcttggttacaagtaagtaaaggaaaggctcctgtgaaagcagttttcaagaagaatggtgaatata

SEQ ID NO: 128980 - DNA, 458 bp, Arabidopsis thaliana
aagaaatggaatgagcacaacaaagcgttatagatgattcgagacattctcatgtatatggataggacttatattgagagcaccaaaaagactcatgttcatccgatggggcttaacttgtggagggataatgttgtgcatttcactaagatacatacaaggcttctaaacactcttcttgatctagtgcagaaggaacggataggtgaagttattgatagggggtcgatgaggaatgtcattaagatgtttatggatctgggtgaatctgtgtatcaggaggattttgagaagccgtttttggatgcgtcttctgagttttataaggttgagtctcaggagtttattgaatcttgtgattgtggggactatctgaagaaatcagagaaacgccttactgaagagatagagagggtagcgcactacttagatgccaagagcgaagagaagattactag

SEQ ID NO: 128981 - DNA, 530 bp, Arabidopsis thaliana
  unsure (1)..(530): unsure at all n locations
atgatcctgccnnnnnnnnnnnnnnnnnnnnnnnnnnnnnnnnnnnnnnnnnnnnnnnnnnnnnnnnnnnnnnnnnnnnnnnccacgcgtccgaagaaaaaaagaaagacaaaactttgttaataaaccgacccagaatcgtggtcttcataatctgtctttaccattttcgttggatttcttcagacagtaatcagaatcatttactttcgtatacagattcattttcttcaaaacgttttatttgttaaggaaaaaagtacaaaactttcgacttttgttttccgggttttgtcaataatggattccgattcatggagtgatcgtctcgcttcagctacgaggagataccagctagcttttccatcacgatctgatacattcttagggtttgaagagatagatggagaagaagagttcagggaagagtttgcttgccctttctgttctgactattttgatattgtctctctctgctgccacatagatgaagatcatcctatggaagccaaaaatggggtatgtccagt

SEQ ID NO: 128982 - DNA, 580 bp, Arabidopsis thaliana
  unsure (1)..(580): unsure at all n locations
nnnnnnnnnnnnnnnnnnnnnnnnnnnnnnnnnnnnnnnnnnnnnnnnnnnnnnnnnnnnnnnnnnnnnnnccacgcgtccgcccacgcgtccgcccacgcgtccgctctctctctcgcctatcatctttttccagttcgctatcagacatatttgaaaccccataactcataaagcttcactcttttccacaatctcttactccaaagttttcttctttccccccaaaaaattataatggtcgacgttgatcggagaatgaccggtctcagaccagctcacgccgctggtctccgtcgtctctctgctcgcgccgccgcaccaacaacaccaacggttagaaacagtctcgtctctttctcttctctcgccgatcaagtaatctcacacttacacacttcaaggatccaagtccaaccgggtctaaccgactccgaattcgctagagcagaagcagagtttgcattcgcttttccaccggacctccgtgctgttctcaccgccggtttaccagtcggcgccggatttccagactggcgttctcccggagctcgtcttcatctcagagctatgatcgatc

SEQ ID NO: 128983 - DNA, 354 bp, Arabidopsis thaliana
aacacgcgtccgcggacaacctttggatctaagtctacagatgaagggtgaagatagacccatatcctttgtgcgtgaggaggatagagatgacaaaagaagaagagcggagttcattttgagacagtgcatggagaacccagtagccctcaatcagttgtaaaataagtgattcattacagtctgtggagcgtactattaatcttgtgatttgtaacctttctttacacaggcctatgttatgattatgattttgtgactgaaagaatgagaatttctaacctatcttttaggcaattgatatgatgtctttctcatgagattcttgttacataacttaatgttagtttcaaa

SEQ ID NO: 128984 - DNA, 484 bp, Arabidopsis thaliana
aacacgcgtccgattgattttgagtctctgttttatccggaagtcgaaattggatggtgataaacggaatgcgtgttggtaagtacgagcttgggaggacactcggagagggaaattccgcacaagttaaatttgctatagatacacttaccggcgaatcattcgccatcaaaatcatcgagaagtcgtgtatcacacgtcttaacgtctcttttcagattaagagagagattcgaacactcaaagttttgaagcatccaaacattgtccgattacatgaggtcttggctagcaaaaccaagatttacatggttctggaatgtgtcactggaggagacttatttgacagaattgtctcgaaaggaaagctttcggaaacacaaggacgaaaaatgtttcagcagttgattgatggagtcagctattgtcataacaaggtcgtttttcacagggatctcaagctagagaatgttcttcttgatgc

SEQ ID NO: 128985 - DNA, 955 bp, Arabidopsis thaliana
  unsure (1)..(955): unsure at all n locations
cacctagtcgcttaactaacgcaagaacactttgtgtatctgatcaaaattatgggaagaaatctcttggacatgatcgttttagatcagctccttccaaaacttttaggcagatcaattgcagaacttttcaatctggtgtgggtttgcttccaagacctaagagaacttcttcaacacctttaaccaaaggagctctttctcaagttcagtctcctcgttctcctaagtccgttttaccggtttttcatcatccatctgttgacagtggtagaaccagtcccattccaattgctaattgcagaggttctcagatccgtaggtgttctagtgagtttgttgacaaaaggagaagcctttcttattctgagctatgggcaggacctacttactctaactcacctccacctgcttctgtgccgattcctaagttttctctccagcaaaagaggacggtatctttgacctttcctgctcctgactctgctgttgatattcgtgaagttgctaagtctgcaccagtttctccaacctcatctggtgacaatccttttcgtagtactgtctctgccactatgacactgcgtcgcatgctcaatcttgagcttgagaactgcagatgaatgaagatcaggagcctttaagggggaacggggtagttttagtttaatgcacatagaaataaagggggtaaggcaccaaagccnggtttnagtttggttcctaagctttaaaatgggggatggggaaaaggnataccggaagcaaggcctttnccccggggggtttgccancaagtaaccnggngcccccctgggnggaaaattngggggggnataaggngggggaaaaanctgggtnanacgggggtgnaacatccaangaaatggggggggggaannaannggggngaaacccggggananggggggggaacaancctggggcgnannca

SEQ ID NO: 128986 - DNA, 506 bp, Arabidopsis thaliana
gccggcactaatacgactcatatagggaaagccggtacgcctgcaggtaccggtccggaattcccgtgtcgacccacgcgtccggagcattgacaccaagtggttcaagatcttgggcaatttttctcttcatcaccacctgggttttcttcttcatagcacaagtgtgtttacttgctggctctgtacgaaacgcttaccatacaaagtaccgtgtctactttggtaacacttccccttcttgtcgatcactgaggaaaggcgtgtttggggctggagcagcattcatagtgctcacggggattgtctccgagctttactatgtgaccctttcgagggccaaagactttcaaccttcaagagatcccggtatccgaatgagtagcctgtagaacttacacctgctttgtagatttaaaatagttatgttcattgttggtatcatcttactatcttaggtcattgttggtatgattttaatagtatggaggaaactaacattattt

SEQ ID NO: 128987 - DNA, 575 bp, Arabidopsis thaliana
taatacgactcacttagggaaagccggtacgcctgcaggtaccggtccggaattcccgtttcgacccacgcgtccgctccttcctcaagtcactttttgagtcgcagcaatttggcgtttggtatctctcaatctgctgcttctccttctcagtcatggtcatggatatcgatttcaacgagtacaagctcaggtgcgagcttcatggccacgatgatgatgttcgtgggatttgtgtgtgtaatgatgagaatatagctacttcatcaagagataggaccataagggtttggtcactggatccatctgataagcgcaagtatacctccgagaaaattctgctgggtcatactagctttgttgggccacttgcatggatcccaccaactgatgaataccctgaaggaagacttgtctctgggagtatggatacttccgtttttgtttggaatctgatgaatggagagaatattcagacattgaagggtcatcagatgcaagtcactggtgttgctattgataatgaggacatagtttcatcttcagttgatcaaaccctgaaacgatggagaaac

SEQ ID NO: 128988 - DNA, 482 bp, Arabidopsis thaliana
atgatatgccgagcactaatacgactcacttagggaaagccggtacgcctgcaggtaccggtccggaattcccggttcgacccacgcgtccggacagaatgtgggcgaggcttttgtcttcgacgaaccaaccgagtttcatgaagcaagctgacaagatccactcaaaccagttggttggtgaaccagggaccatgaaatggtgatcaacactgtctacaaaaacattcgtttgtgttttgacttgaggacatctttgtttgggaagtaaggtttcttaatttaatagaaagcttttcaaaaattgttttataatattcttcaagcaaagagaagagagagagataactcttgtgagaataatgtaacaactcttggttccaactacaactttgcttctgtatatatcccacgctgagtctttgaggctcatgcacctttattctaatttacatcactagcgaatgggacttgaatgaggg

SEQ ID NO: 128989 - DNA, 659 bp, Arabidopsis thaliana
  unsure (1)..(659): unsure at all n locations
ctcattatagggaaagctggtacgcctgcaggtaccggtccggaattcccgggtcgacccacgcgtccgcaaaatttgaggtgtcttctacagatcaatattgatctccaacactctctggttcccagatcttcttcaaccttataccctagtttcgcaatttcattctcattttctccgctcttcatctctttcgatcaaccaatttacgacatggatgaggttgttgttgaagtggagaagacgaagagagaatgggaagaagcgtacgagaagacgattggacatattatctcgattcaacagtacggtaaatcaaggaggggagatggaggagaagagaagttttcgttacagaggctcaacggattggctcaggatggtctctctcttctcaattcccttcaattcaatttggatctgctcgcacctcagcttccttctgatgatcagggttcaatccactcagtcactccttgaaacgtggaagaatcaatatcacagtttgagggtaaacttgagaagtgctaatttgcaagctaaggataacatgaggaaagcagctcaagaagagagagagcttctcctcggtggtggaacagagtctacagttctcagacgtaaacgacaagcanatgctggcgtgacatccgatgctg

SEQ ID NO: 128990 - DNA, 667 bp, Arabidopsis thaliana
  unsure (1)..(667): unsure at all n locations
atgatatgccagcactatcgactcacttagggaaagctggtacgcctgcaggtaccggtccggaattccggtcgacccacgcgtcgccaccgtcggatcttttccccaagtttcagacaaacataaagcagcagagaaaattttcaagtttcaaagagcttttccctcaccaagcaaaatttggatatttgtcagcaaaatctgcagctaaattgggacttgtcttgttagttcaaagattgaaacttttttggttaattgtttggcggaagaagatttacaatgggagaggagcatccgagaaagcggtctagacaacattttgaagcggaggcgagaaacgtatcgttgtttgaatcccctcaatgcgaaacctccaagtggtatttcagcagggaagagattgagcgtttctctccatccagaaaagatgggattgatcttgtgaaggagtcgtttttacggtcttcgtattgcaccttcctgcaaagacttggcatgaagctttcatgtgtcccaggttacaatatcatgtgcaatggtgatgtgccacaggttntacatgcgccaatctcatgcaaaaaatgactggcagacaatagcgacttccagtctgttcctcgcttgcaaagctgaagatgaagccatgtcaactgtccagtgtcgt

SEQ ID NO: 128991 - DNA, 1178 bp, Arabidopsis thaliana
atactgactattcatatgggaaacgctggctacgcctgcaggtacctggtcctggaattccctgggtcgacccacgcgtccgcaaatctacctcatcttcctcctccaccgcagttgcaaccgcccgaaacgccatcatgggaaacaccatcgtctgtatggtatactccaagaaccacacgcatggagaacaccacagagcacacaatccacaccagttggcctaatggtcttaacaaagccagcaacggttagattcaacggtcttgatgcagagccgaggaaagatagggtgattctccgtcagccaaggagtagcaggaccagtctctggatatggtgtgttgccggtttctgttttgtgttcagccttttgcttatcttttttgcgattgccactttgatagtgtttcttgcgattagaccaagaatacctgttttcgacatcccaaacgcatacctacacacgatctacttcgacacgccggagtttttcaacggcgatttgtccatgctggtgaatgtcactaaccctaataagaagatagaagtgaagtttgagaagcttcggattgagctcttcttcttcaatagattgattgcagcgcaagtggtccagccattcttgcagaaaaagcatgagacgagggtggaaccaatccgtctgatctctagtttggtaggcttgcctgtaaaccacgcggtggaactcaggagacagctggaaaacaacaagatagaatatgagattagaggtaccttcaaagtcaaagctcattttggaatgattcattactcttatcagctgcacgggaggtgccaacttcagatgaccggtccaccaaccggaatcctgatttctcgtaattgcacgacgaagaaatgaaaaagaatacggtacagttctctgagtcagtagtcatcttcaaagtctttagctttggcatgtttattcaaatatatttctatttgcttacccacaacttgtataaaagaaaaagacctagtgaactctatccaagaaccgagatcggagtttgtactatttccaagataaagaaactggaaagatattatctttctatgaagcataaaaaaaaaaaaaaaaaaagggcggcagctctagaggatccaagcttacgtacgcgtgcatgtgacgtcatagatcttctatagtg

SEQ ID NO: 128992 - DNA, 532 bp, Arabidopsis thaliana
ccctctctttcgcgaatttattcgctccgccgcttctcacagctaacggttttccccatccgaaatcattgtcgtacattgggaatctcggcgagctccccatcgtgatcgaagctccatctggatttccgagaggaaacagcctcggatcgctttcccaagcggcgattccacggcggaccgtcgcgtcgtcgtgcgccaccacgttcctgtgtaactgttcggcggaccacctgagatctttgcttagcagatctcccgcagacgccaacgtcggtatgctctgtatcgcgtttccgaagtagtacggatccatcttcggctcaagccggtgccggcaattaaccgccattcgaaacgtcgtcgtcttgctcggatcgagattcctcgctcgtgtaacggatcgccatagctgagcgctgagagattggaacgatgaaatctcagccgtccgatcataactcttcttattattcaaaaaactatccaaaacgtttggtaatcgcctctctgctgaaatgaaaaattctct

SEQ ID NO: 128993 - DNA, 985 bp, Arabidopsis thaliana
ctcactatagggaaagctggtacgcctgcaggtaccggtccggaattcccgggtcgacccacgcgtccgttcgaaaaaccctaattcagctaaaggttgatcgttgatctaaaagctcgagtgatgaagggaaattggtcgatcgtacgaaaggttcttcatcgccagttctccactctccgttcctcgacaccatcgtcgcgattatctacttccatccgaccgcttgttctggccccaaactcgatatcgtcgctaatcgctagaaactcgttgttcactgcctccaacattggtccatccatcgattttaacttctccaacacttcgcttcctcatcggagaagcctctgttcggaagctggaggtgaaaatggtgttgttctagtgaaatcagaggaagagttcatcaatgcaatgagcaaagctcaagatggatctttaccatcggtcttctatttcactgccgcctggtgtggaccatgcaggtttatctctcctgtaatcgtggagcttagtaaacaatatcccgatgtaactacgtataaagtcgacattgatgagggcgggatttcgaacactatcagcaagttgaatatcacggctgtgccaacactgcatttcttcaaaggaggctcgaagaaaggggaggttgtgggtgcagatgtcacgaagctgaagaatctcatggaacagctctacaagtgaagacctaatccgttctagtaaagaacgtgttgaatagctgctagttaagactgtccaatcaaatcaaggttaaaaaattcttgcttcctttttcaacaataaggctttatgtagttttctccaaataatgatgagatgtttcatatgatttaaccgatgaattgaagttgggtatgcaaaagacattcctctgaaaaaaaaaaaaaaaaagggcggcagctctagaggatccaagcttacgtacgcgtgcatgtgacgtcatagtaacttctatagt

SEQ ID NO: 128994 - DNA, 973 bp, Arabidopsis thaliana
  unsure (1)..(973): unsure at all n locations
taatcgactcactatagggaaagccggtacgcctgcaggtaccggtccggaattcccgtgtcgactccacgcgtccggagatggaggcacttaaggtatggagtctaacggcgacgccactgaaacaattactccgtctatcctcttcttctacacgtctcgccaccacaatatatggacgaagatcctaccacttatcacctgcgctacgatgtgcctccgcagcttcttcttcttcttccagtgccacgacggctgaaacttctaaaccctccggccgcaatcgccggtctgcgtcatcttccaattccacctctgatcgtgaagctatccgctccattcgccttaaaaaggttgaagaattgagaggccaaggtcttgaaccttatgcttataagtgggaaaaatcccacagtgcaaatcagcttcaagagatatataagcatttagctaacggtgaagaatcagacaatgagattgattgtgtttctatagctggtcgagtcgttgctcgtagagcctttggaaaacttgcattcttgactctcagggatgactctggaactattcagctttactgtgagaaggaaagactttcagatgatcagtttgaacagttgaagcaatttatcgacattggtgatattttgggtgctagtggctcgatgaagaggactgagaaaggtgagcttgactaagatgattatactcgatggagaatcttttttttggggtttgttttgtaactgtttgttctctaattttccaggggagctttctatatgtgtgaattctttttcaattctcacaaagtctctccttccacttccagacaaatatcatggtctaactgatattgatanacgtacccgcacacagatgagctccaccttctgtntatgtaaatccctgtttctaattattaaagaaagatcataagttttcgcacgcgtcgcccgccccgggnattccg

SEQ ID NO: 128995 - DNA, 1113 bp, Arabidopsis thaliana
  unsure (1)..(1113): unsure at all n locations
nnnnnnnnnnnnnnnnactcactatagggaaagctggtacgcctgcaggtaccggtccggaattcccgggtcgacccacgcgtccgcaaaacttcctaagaaaaaaaaacagagagattttttttctctttctaaagcttttttatagagtaaagatgttttcagagcacttaccttcttcttcatctcaagttttccaagaacacttcatcgacagtttcgtctccagaaaattgcttcagcagatcccatttgcccacaacgctcaacaagctcatgtacctgataagaacaacttgagcggcaatgttctcatgctgctctctatccttttgtgcggtatcatctgctccctcgggttgcattacataatacgttgtgcatttatacgttctcgaagtttcatgatctctgatcccatctctatcccatccacaccaagagattcatcagtaaacaaagggatcaagaagaaagctctcaagatgttaccagttgtgaattactcacctgaaattaacctgccaggggtcggtgaagagtgtgtcatctgcttgtctgattttgttgctggagaacagctacgtgtacttcccaagtgcaaccatggattccaccttcgctgcatcgacaaatggcttacgcaacatatgacttgtccgaaaagcagaccctgtttggttgatacatgccaaaaagttttaagtgactgcgatgcagctgatcaagtggcagcgccagcaccggaaggcatagaaatcagaatttttcctttaaaacctgaagcaaaagtagccccttttaaaaaaagcagctaaagtatgccccccaaacaatcataatttcaaattttggctctccagcaagattaaagtttttttatgtccctaaccataggatgtcaaaatcaaacccagcaaagttttttttttgccttttgtttttttcaaaaaggcaagaacaaaaaccttaagctttttgtggccnnnnnnnnnnnnnnnnnnnnnnnnnnnnnnnnnnnnnnnnnnnnnnnnnnnnnnnnnnnnnnnnnnnnnnnnnnnnnnnnnnnnnnnnnnnnnnnnnnnnnnnnnnnnnnnnnnnnnnnnnnnnnnn

SEQ ID NO: 128996 - DNA, 797 bp, Arabidopsis thaliana
  unsure (1)..(797): unsure at all n locations
gtcccgctccggatttcccgggtcgacccacgcgtccggtttttggatcggaaaagagttctagatgatgatgaagaccaagaagaagaagaagaagaagaagaagggggaataatggcattgcaatggctgattctgtcgtatgtggttgccgccgaggtagcgatcgccgtcatcttgactctcccttacccaatgctcctgaagaaacgcatcgtatcacttatctcgctcatactcaatcctgccgcttccatcgtcgccttcgctggatttcaactcctcgatatttactggaagaatgagcataggctattgtgctcatctgaagtttgcactactacagagcgggatcgtcacgagaaatccgtctataaggctcagaggaatggggttctgtgtgcggctgggatccttctctactggtgcatcttccgcatctgcaagtaccacaaagaccttgagcgtttggagcaattagagaagagatacaaggacgagtagaaatcttcccaactgagagtctggtactactgttatagtatcactcggcgtgtgagtagtcccaaaaactgaatgagagcatgatttgatcttgagaaaatttttacacagacccttttgtgttaattccttctgcaacttttggtttactttttggaggaacaacaggctctgtttttcacgtcaaaaaaaaaaaaaaaaaaaaaaaaagnnnnnnnnnnnnnnnnnnnnnnnnnnnnnnnnnnnnnnnnnnnnnnnnnnnnnnnnnnnnnnnnnnnnnnnnnnnncgattc

SEQ ID NO: 128997 - DNA, 550 bp, Arabidopsis thaliana
ctttttctcacttctcataaaaaaggtcattttaaaaaaaaatcagaaaccgtcaaaaagccaccgttgatatttcttccttgttgcttcttcaatggcgtcgttcgacgaagcacctcccggaaaccccaaagccggtgaaaagatcttcagaaccaagtgcgctcagtgtcacaccgtcgagaaaggtgccggtcacaaacaaggaccgaatttgaatggattgtttggaagacaatctggaacaactccaggatattcttactctgctgctaacaaaagcatggctgtgaattgggaggagaagactctttacgattacttgttgaatcctaagaagtacatccctggaacaaaaatggtgtttcctggactgaaaaaaccgcaagatcgtgccgatctcatcgcttatttgaaggaaggtactgcttagacaggctcgtccagatatatgaagctggcatttttttttctcacagctaaataaaatcagaccaaaaatattatggtcatgaactgctttttgtatgggcttttattctttctttct

SEQ ID NO: 128998 - DNA, 530 bp, Arabidopsis thaliana
  unsure (1)..(530): unsure at all n locations
atgattttcgccnnnnnnnnnnnnnnnnnnnnnnnnnnnnnnnnnnnnnnnnnnnnnnnnnnnnnnnnnnnnnnnnnnnnnnnccacgcgtccgtttctccaccgcgcacgttagcctcctctctttcccactccgagatggagacgacgccggagactcagtcgaagactcaccgtctaccggcgggaagagaggattggtggagcgaagacgctacggcgacattgatcgaagcttggggagatcgttacgtcaatctcaaccggggaaatctccggcaaaacgattggaaagaagtcgccgacgccgtcaattcaagccacgggaatggccggccaaagaccgatgtacagtgcaaaaaccggatcgatacgttgaagaagaagtacaaaactgaaaaggcgaaacctttatcgaattggtgcttctttgatagactcgatttcttaatcggtccggttatgaagaaatcgtccggtgctgttgttaaatcggcgttgatgaaccctaatttgaatcctactggatc

SEQ ID NO: 128999 - DNA, 800 bp, Arabidopsis thaliana
actcactatacggtaagctggtacgcctgcaggtaccggtccggaattcccgggtcgacccacccgtccgacctcctgtcataacgataatgggccatgtggaccatggaaagaccactcttctggactatatcagaaaaagcaaggttgctgcgtcagaagcaggaggaattacacaaggaattggtgcatataaggtgtcagtgcctgttgatggaaagttgcagtcctgcgttttccttgatactcctggacatgaggcatttggtgcaatgagagctcgcggagcacgagtcactgacattgcaatcattgtggttgctgctgatgatggaattcgtcctcaaacaaatgaagcaatagctcacgcaaaggctgctgctgtaccaatagttatagctataaataagatagataaagaaggagctagtccagatagagtgaggcaagagctttcttcaattggtttgatgcctgaagattggggtggtgatgttccaatggttcagatcagtgctttgaaaggggaaaatgtcgatgatctgttggaaactgtcatgcttgttgcagagcttcaagagttgaaagcaaatccacacagaaatgccaagggcattgtaatcgaggctggacttgataaagcaaaaggaccatttgcgacgttcattgttcagaaggggacttttgaaaagaggggatgttggtggtttgcggagaagctttccgaaaaggtccgaagcctttatttggaacaccaggggggggaaacggagtttgaaggaagctttggtaccccttcc

SEQ ID NO: 129000 - DNA, 737 bp, Arabidopsis thaliana
  unsure (1)..(737): unsure at all n locations
nnnnnnnnnnnnnnnnnnnnnnnnnnnnnnnnnnnnnnnnnnnnnnnnnnnnnnnnnnnnnnnnnnnnnnnnnnnnnnnnnnnccacgcgtccgaagtccagcctcgattacaatgcccttggcatttctgtgtggatttgataaagcaaaaggaccatttgcgacgttcattgttcagaaggggactttgaaaagaggggatgttgttgtttgcggagaagctttcggaaaggtacgagctttatttgatcacagtggggaacgagttgatgaagctggaccctccatacctgtacaggtgattggtttaaataatgtccccattgctggtgatgaatttgagatcgtctcttcccttgatgtggcgcgggagatggcagaggcacgtgcggtatcactacgagatgaaagaatatctgcaaaggctggggatggaaaggtcacgctttcctccttagcttctgctgtatcagcgaaaaagatgtcaggcttagatttgcatcagcttaatatcatcttgaaggtcgatgtacagggatccattgaagctgtaagacaagcccttcaagtcctccctcaggagaatntcaccttgaaatttttgctacaagcgacaggggatgtnagcaacagtgatgttgatctagcatcagcgagtgaagctatcgtttttgggtttaatgtncaaagcggcctggttncnttnaanaaagcttccagnaaaacaaaaggtgtt

SEQ ID NO: 129001 - DNA, 400 bp, Arabidopsis thaliana
ctaaagaagaaaccaaaaacctaaaagaacagacagaggaagaaaagatctttaatattttttttatttctcttcctggttgagaacttttacttcctctccccttaattgcaacaatgggaaattgttgctctcatggaagagattcagatgataacaaagaagaaccgaggccggaaaatggaggcggcggtgttggtgccgctgaagcctctgttagagcttctaaacacccgccagcatctcctcctcctgcaaccaaacaaggaccaataggacctgtcttagggcgaccaatggaagatgtaaagagctcatatacattgggtaaggagctaggtcgtggacagtttggggtgactcatctctgcacgcaaaaggccacggggctgcaattcgc

SEQ ID NO: 129002 - DNA, 551 bp, Arabidopsis thaliana
  unsure (1)..(551): unsure at all n locations
nnnnnnnnnnnnnnnnnnnnnnnnnnnnnnnnnnnnnnnnnnnnnnnnnnnnnnnnnnnnnnnnnnnnnnnnnnnnnnnnnnccacaggtgcgtgagaaaagtgtactgcatcaacaaatccttggccaaattaccacttagtgtggaggatgctgctcggagtgaagcagatatcgaagcatctcttcagactccatctccagctgctcgtgtcaatcaggatacacgtttgaactatagggtgctcgacctcagaacaccggctaatcaagccatcttccagcttcagtacgaagtcgaatatgccttcagagaaaaattacgatttaagaattttgttggaatccacacaccaaaactgatggctggtagtagtgaaggaggttctgctgtatttaggttggaatacaaagggcaacctgcttgtctagctcagtctcctcagctccacaagcaaatggcaatatgtggtgacttgcgacgtgtctttgaggtaggtcctgttttcagggccgaagactccttcactcatagacacctgtgtgaattc

SEQ ID NO: 129003 - DNA, 574 bp, Arabidopsis thaliana
  unsure (1)..(574): unsure at all n locations
nnnnnnnnnnnnnnnnnnnnnnnnnnnnnnnnnnnnnnnnnnnnnnnnnnnnnnnnnnnnnnnnnnnnnnnnnnnnnnnnnnnccacgcgtccgcacgaacttccattaatcaccgactcgcagaacctttctctcattaaatcttgtggaaacctcggaaattgaatctgcgtgagtttcaatcgcttgatcgatccatcaaaccctagagatggtgaggaaaaaggtaccggaatggcttaatagcaccatgtggtctactcctcctccgccatcttcttacgacgatggtctcctccgtcattcccccgtcactaagatgaaggaagaggcagaatcgatttccgttgctcccaggcttaattctgctcctccgccttcttccaacacttcggttccatcgccgtcgcatagaccgaggaacggtaacagtatctctggcggtagtggcgaatatggacattccgttggtccttccgccgaagacttttcccgccaggctcatgtctcagcggagttgtcgaagaaggtgatcaatatgaaggaattgaggagtctagctttacaaagttt

SEQ ID NO: 129004 - DNA, 748 bp, Arabidopsis thaliana
  unsure (1)..(748): unsure at all n locations
atgatctannncnnnnnnnnnnnnnnnnnnnnnnnnnnnnnnnnnnnnnnnnnnnnnnnnnnnnnnnnnnnnnnnnnnnnnnnccacgcgtccgcttcagtttcaatttgtttgttccatacactgtacctcaatacgtaatctctggtctcataatgtttgttgctgctgaagtactcgaaggtgtgaatctatcgttgttatcgcgggtaatgtcatcaaggctatcgaaaggaacgtacaacggaggattgctctcaacagaagctggaacgttggctcgtgttgtggcagatgcaaccataacattgggaggatatttgggaagaggccatctcctgaatgccactcttctaccatcacttgtcatctgcattggctccatcgttgctacttgttgtacttataactcactctattgattttggagttttgctaccaaattttacaaaatagaataaaacagtgtgtatgatcgatcctctctttgatttgattatttttgttgttctaattcatatgggtgtatatgtgttttataatacatataggatgtatattcgtatatatacggtgaatatcaaatcccccccttgttggaaattccagttttgtgagattctttttctgaagtattgtaataaattctcataaaaaattataagtttttatttggtnnnnnnnnnnnnnnnnnnnnnnnnnnnnnnnnnnnnnnnnnnnnnnnnnnnnnnnnnnnnnnnnnnnnnnn

SEQ ID NO: 129005 - DNA, 534 bp, Arabidopsis thaliana
  unsure (1)..(534): unsure at all n locations
atgatctnnnnnnnnnnnnnnnnnnnnnnnnnnnnnnnnnnnnnnnnnnnnnnnnnnnnnnnnnnnnnnnnnnnnnnnnnnnccacgcgtccgcccacgcgtccgaagagagagatgggagggagggtttgtggcagataaactgatagaaaactttcgaacctctcttctttaacttttactactctctattcgtttttctcttccttttgtggtgccgcctccaactgaaagtcttctaatatatattctcaattattctagctctccgggagaagtcttatctcacgccaatctctcatttcccactatgaggcatgaggagaattacttagacctcaacaatcttccagatgatttttctaaagatggcaataagcaagccctcgaggaaggttcttcctctggtcaaagaaagaagaaagggagtaaagaagggaaagatgagagtgggaaagtgtacgaatggtcgatttgttcactcaagttctgcaaatcccaagctctttggtggccacatgaatcgccaccgac

SEQ ID NO: 129006 - DNA, 720 bp, Arabidopsis thaliana
  unsure (1)..(720): unsure at all n locations
atgatctgccagctannaatacgactcactttagggaaagctcgtacgcctgcaggtaccggtccggaattcccgggtcgacccacgcgtccgcggacgcgtggggggagacaaattaattggttgggggacttttttgtcctacgatttcccagaaacctcgtcggcgaaattcaaacaaatcaaaagtcttaaatttaaggataatccaaaatattcgtttgttgaatatttttgcatcagtttgttttgcattgggctcttaaaccaattctatcactcagaattattgttttgtaataatcgtgagaagaaactttagggtttcactgtttcagagttttgattggtgaattataaaagatgcagcaatctccacagatgattccgatggttcttccttcatttccgcccaccaataatatcaccaccgaacagatccaaaagtatcttgatgagaacaagaagctgataatggcgatcttggaaaatcagaacctcggtaaacttgcagaatgtgctcagtatcaagctcttctccagaagaatttgatgtatctggctgcaattgcggatgctcaacctcagccaccagcagctacactaacatcaggagccatgaccccccatgcattggctcctaatccgtcatcaatgcagccaccaccaagctacttcatgcagcaacatcaagctgtgggaatggctcaacaaatacct

SEQ ID NO: 129007 - DNA, 521 bp, Arabidopsis thaliana
  unsure (1)..(521): unsure at all n locations
nnnnnnnnnnnnnnnnnnnnnnnnnnnnnnnnnnnnnnnnnnnnnnnnnnnnnnnnnnnnnnnnnnnnnnnnnnccacgcggtccgcccaccagtgcgttgcgtaaggactagtcgtatggtctattctatggctcattccaagctcacattttgaaccctcgatttcccattcttctcatttctctccactctactcctcagatcaaccaaaagctccctcacagctctctctttatccctccgattcttaatcacagcctcacttacggcagccggcgtatcctcacccctagcaaccacttccgctacctccttcataacatcgccgttaagatcaccttactcatacctcaagtaattcctgactaaaaacttggccgaggaactcgtgcagttacgcatgtgcatatgcacattcattcttccacctggaaccaacgcatgatcaagcttctcaatgagctccgaagtgctctcaataattctataggtcccacgtctagaccagagaccatccgt

SEQ ID NO: 129008 - DNA, 527 bp, Arabidopsis thaliana
  unsure (1)..(527): unsure at all n locations
nnnnnnnnnnnnnnnnnnnnnnnnnnnnnnnnnnnnnnnnnnnnnnnnnnnnnnnnnnnnnnnnnnnnnnnnnnnnnnnnnnccacgcgtccgcccacgcgtccgcggacgcgtggggctttctaaatggatccctgtctcagagagaagcagatcgcttgcactggtctatagtggcatgtatcttggttccgtcacaggattggcattctctcctatgctaatcaccaagttcggatggccatctgttttctactcgtttggctccctcggaagtatatggtttttgctatggctaaaatttgcatatagctctcccaaggatgacccggacctaagtgaagaagaaaaaaaggttatactgggaggtagcaaaccaagggaacctgttacagtgattccatggaagctaatactgtctaaacccccagtctgggctctcataatttcccacttctgccataattggggaactttcatactattgacatggatgcccacatattacaatcaggtcttgaagttca

SEQ ID NO: 129009 - DNA, 490 bp, Arabidopsis thaliana
ctatttttgtgattcaccaagcagaagaaaattgagaaaaaaaaaagctttaagatggagaaaaatctacaaaagcaggaatttctagctgagacctcagagatgaagaacaccaaaaacaacgacgactgttctgtacaacaacaacaacgatttgtgtggccatgggttggtctagtagccaacataccaacggaggtggaaccatcgggtcggagagtaggcaaaagcggttcaacgttacgtgatgagttcactatgaaagggtttaatccaacaagagtccaacccatttgggatttcaagggtcattctggttttgctttggttgaattcgctaaagactttgaaggattcgaaagcgccatgaaatttcgaaaggagttttaatttagaccgtcatgggaagagagattgggaaaaaggtcatcgcttgagagacaataagctctatggatgggttgccagagaggatgattattatcgaagt

SEQ ID NO: 129010 - DNA, 528 bp, Arabidopsis thaliana
  unsure (1)..(528): unsure at all n locations
ccgnnnnnnnnnnnnnnnnnnnnnnnnnnnnnnnnnnnnnnnnnnnnnnnnnnnnnnnnnnnnnnnnnnnnnnnccacgcgtccgactttcccgccattgttagtaccagaactctctgggccgccgcgtctccgtcgtcgtggctatctacagatggcggataagaagaagcgaaagcgatcaaaagatgacgaggcggaggaacttcctttcaaaagcattctggaatcagacgacgttatcacggagcttctcaaatcgtatatttcctcttctatcaaagccgccgccggagccggcggtgcctcctcctcttcatcgaaacctctaaccctagctgacctctctctatcatcttcctgtcgtgaagtcgcagatctctcactctcctccgtgcagacagagatagagacagtcatcgtccagatcgcccgttctattctcgccggtgatggcttctccttcagtggtccttcacgcgccgcctcgaatcagctgtatgttcctgagctcgaccgtatagtgct

SEQ ID NO: 129011 - DNA, 534 bp, Arabidopsis thaliana
  unsure (1)..(534): unsure at all n locations
nnnnnnnnnnnnnnnnnnnnnnnnnnnnnnnnnnnnnnnnnnnnnnnnnnnnnnnnnnnnnnnnnnnnnnnnnnnnnnnnnnnccacgcgtccgcggacgcgtgggcttctttattgcttatagcttctgagcatcaatggatccaaatcataataatcttctcatctttgtagccttttttgttctctgcttagccaccaatggtgtaaccggatatgccacggtcacaggctcggtgttttgtgaccaatgcaaggatggagagagatctttgtttgattttcctgtctctggaatcaagattagtgtcacatgtgctgatgaaaatggacaggtctatatgtcaagagaagagactactaattggcttggaggatatgtaatgagatttgatgggacaccggatctaagtaactgttatgctcaagtttcagacaatggagttcaacaagacccaagtagctgcagcattgcttcaggtcctgcacagaaacttaaactaatgttcagcttttttgggattgaaacgtttg

SEQ ID NO: 129012 - DNA, 617 bp, Arabidopsis thaliana
  unsure (1)..(617): unsure at all n locations
aatacgactcactttagggaaagccggtacgcctgcaggtaccggtccggaattcccgtgtcgacccacgcgtccgctgtaggattaacaagtcatcctaacacctctaattggtcgccaatctcacatctttccgtctgcacagggcaaagttcatctgatcagcaatcaaatttgaaggctactccaagaaacgatgatgttgacatatatattgcaatttctgatgatgattaaagatatgatgcgaagagaagcaagtagacaaatgttgtatattataaactcaaggctacttggtgaaaagtaaagctttgtatcttttgttttgtggttcccttagtcctttatgttgtatgtattgctagctaatgtttatgcctagtggaaactgacctaattttgattcgtttgtggaatcaatgttagatggaatccgtttatgtattttggtgcatattacgctttcggtatataatcttttgtatcatataagttcataaccataaactggttttatgtggcaaaaaaaaaaaaaaaaagnnnnnnnnnnnnnnnnnnnnnnnnnnnnnnnnnnnnnnnnnnnnnnnnnnnnnnnnnnnnnnnnnntgtcctaa

SEQ ID NO: 129013 - DNA, 532 bp, Arabidopsis thaliana
  unsure (1)..(532): unsure at all n locations
nnnnnnnnnnnnnnnnnnnnnnnnnnnnnnnnnnnnnnnnnnnnnnnnnnnnnnnnnnnnnnnnnnnnnnnnnnnnnnnnnnnccacgcgtccgcccacgcgtccgtcctaaccaaagcagcttccaagcatctagagaaaacagaatctacaatacttgtccttagtaagcaaaaatgtgtgcattagtacctccattgtttccaaactttgggtggccatcaacgggagagtacgacagctactacctcgccggagatatcctcaacaacggcgggtttcttgattttccggtaccggaggagacttatggagctgttacagcggtgactcaacatcagaatagctttggtgtttctgtttcgtcggagggaaatgaaatagacaacaatccggtggtcgtcaagaagcttaatcacaatgctagtgagcgtgaccgtcgcaggaaaattaactctttgttctcatctctccgttcatgtcttcctgcctctggccaatcgaagaagctaagcattcctgcgacggtttc

SEQ ID NO: 129014 - DNA, 511 bp, Arabidopsis thaliana
aatacgactcaccttatggagaagcacgcacgcctgcaggtaccggtccggaattcccgggtcgacccacgcgttcgcacaaccactaagtggaactgacattgatgcagttatctctggatttttgtcgcctctgcacaaggtccatgccccatctaagattcataacggaagtgataatggccaccttgctgatgctactgttgaccaagcatccggaattttatcatccccagataccgagatagacaatgcatctgatagagagttatccttcaggatattcttgacagatgaacgtggtttgaacattaaaccactgcagtctgaatcttctataagcccgggtaccgttacaagagttttagtcgagtggaatgagggtgagcatgaaagatatgattccagctacttgagtgatcttccagaggttcataaaacaagtttctctgcaaagaagacaaggcatgaatcgatatccctgttgtcgtgtttggaggcttacttagca

SEQ ID NO: 129015 - DNA, 533 bp, Arabidopsis thaliana
  unsure (1)..(533): unsure at all n locations
tcagtgacacatcgagtcgaagaagaacatacatttctactgaatcagatctgatctgctttgtcagtttttaaactgttctgatctaattgagatttctcaattccactcaaaatcctttaaagcttgtctctttttggtatctctgaatcaatttggggaaatcaagaggagaagtgacaatggatgcgtttagaagacaagcgagtaagcttagagaccaagtcgcaaagcagcaactggctgtgataaagcaattcagtgggactggttatgaaagctcagatgtaatggtgattgatgagcttgaaatgcaaaggcatcatcaactcggtaaactttaccgctctactcgttctgcaaaggagttccagagagatattgttaaagcagctgaggcatttaccacgatcgggctcagacacattgaagcaggaaccaagttgtctgaagactgttgtagggtttgggaccggaaataggccagaccatttgtggggtttncctggcccagnttcagcttttccgggnnc

SEQ ID NO: 129016 - DNA, 820 bp, Arabidopsis thaliana
  unsure (1)..(820): unsure at all n locations
nnnnnnnnnnnnnnnnnnnnnnnnnnnnnnnnnnnnnnnnnnnnnnnnnnnnnnnnnnnnnnnnnnnccacgcgtccggcctgaaatttgttctcttcttttggttgcaatttctcgatctcgaattttctgagagaatacaaaacttaatttctcaaaccccagcagattcgaatttagggtttcttacacccattagatttcgcgtcgatggcgtccaatcgcggtgcgggtggttctctatacggcggagctgatccgtatagatctagagaagggctaagcactagaaatgcttcaggttcagaggaaattcagctgaggattgatcctatgcactctgacctggatgatgagattctaggtctccatggccaagtcaggcaattgaaaaatattgctcaagaaattgggtcagaagcaaagtctcagagggacttcttagatgaactgcaaatgacattgatcagagcgcaagcaggggtgaagaacaacataaggaaactgaacctaagcataatccgtagtggtaacaaccacataatgcacgtagttcttttcgcgctcctcctcttctttatcctctacatgtggtccaagatgttcaaaagatagatagagagactcatggcatacttgtgttaccccccaaaaaaaaacccttgatgaatgttggataagttgtagaaaatatcctctagattacaaacattttgtggttcttctcgttaaaaaaaaaaaaaaaagnnnnnnnnnnnnnnnnnnnnnnnnnnnnnnnnnnnnnnnnnnnnnnnnnnnnnnnnnnnnnnnnntgtcctaa

SEQ ID NO: 129017 - DNA, 464 bp, Arabidopsis thaliana
  unsure (1)..(464): unsure at all n locations
cnttcttccaaccgcgtcatcaatttatatttagacaacaacaaaaaaaaaaagccagagcctctccggtaatttttcattttcccgagcgatcgtccatggcggacatcgacatcggaaccgcagcaacaacaggaggaaacgaaggaagaggaggcacacgagaacgtctaataaaccgagaaaacaagttcacacgtagcgtatctcacgcacaagacgagctccacagtttccggaaatatctccgatggatgtgcgtagatcagtcgagtccttggacggcggttctatcatggtctatgttcgttgttttcacgctcgttgttcctgccacgtctcacttcatgctcgcttgctctgactgcgatagccatcactctaggccgtacgattccgttgttcagctttctcttagcagtttcgctgctctttcgtttctttgtctctccagattcgttagc

SEQ ID NO: 129018 - DNA, 659 bp, Arabidopsis thaliana
  unsure (1)..(659): unsure at all n locations
atgatcttnnnnnnnnnnnntctgactacctaatgggaagacacgcacgcctgcaggtgccggtccggaattcccgggtcgacccacgcgtccacccacgcgtccgatttcaatagaagacgaagaacgtttcagaatcatcaaccaaattcagaaaatttcagccatgacaggatcacaagaagaccaacctaagatcatcattgatcaagagcaacccaaaactctagaaacagagcaccaaccagaaccttcttcatcgtctccggatcagaagaaatggggtactcacgtgatgggagctccggcagctccagttgctcatcccgataaccaacaggcggcggcgtgggtcgctggagataaccagcagacgcagtaccaaccgtacgtcatctactctcctgtcgaacatccaacaactaacaaccctctcgagccagtcatcggaatgttccatacctggagtcgcaaggcagaaaccgtcgcacgtaacctctggcacaatctgaagacaggaccgtctatgtcggaaacggcgtgggggaaggttaatttgacggccaaagcgataacaaaaggaggattcgagtcgcttttcagacagattttcggaacagagccaaacgagacgctgaagaaaactttcgcttgttatc

SEQ ID NO: 129019 - DNA, 546 bp, Arabidopsis thaliana
  unsure (1)..(546): unsure at all n locations
nnnnnnnnnnnnnnnnnnnnnnnnnnnnnnnnnnnnnnnnnnnnnnnnnnnnnnnnnnnnnnnnnnnnnnnnccacgcgtccggttgaatttccgtgataaacaagggtggactgctcttcattgggcagcatactacggaagggagaaaatggtggctgctcttctctctgctggggcaagaccgaacctggtgacagactcgacgaaggataatcttggtggatgcatggcagctgatttggcacagcaaaacggatatgacggtttagctgcttatcttgctgagaaatgtttggttgctcagtttagagacatgaaaattgctggaaacatcactggcgatctggaggcttgcaaggcagagatgttgaaccaaggcactctaccggaagatgagcagagtctcaaggatgctcttgcagcatacagaacagctgcagaagcagcggctcggattcaaggtgcgtttagggaaaaagcgctaaaggcagcacggtcaagcgtgattcagtttgctaacaaagaagaagaggccaagagcata

SEQ ID NO: 129020 - DNA, 837 bp, Arabidopsis thaliana
  unsure (1)..(837): unsure at all n locations
atgattctccaggtctactacgactcactattgggaaagctggaccgcctgcaggtaccggtccggaattcccgggtcgatccacgcgtccgaagaaagcaagaagtcggttattcgacttgttgacatggaatctgcgtatctaaccgctgagttcttccggaaacttcctcaagaaatagaaagaccagtaaccaacagcaaaaaccaaaccgcttctccttcgtctgcaacattagaccagtatggagacggacatttcagaaggatagcatcaaatgtatctgcgtatgttaatatggtttcggacacacttcgtaacaccattccaaaagcttgtgtgtactgtcaggttagacaagccaagctcgcattgctcaattacttctactctcagatcagcaagagagaggggaaacagttgggacagttactagatgaagatccggcattgatggaccggagactagagtgcgcgaagaggctagagttatacaagaaagcaagagatgagattgatgctgttgcttgggtaagatgataaaacctaaaagtgtgtttctggtgatggttttagagaactataaattcgtctgttgtttaagttcgttgactatgtctttgtatgtatgtatatgatcatcagaccctattgagagagacttgagacgttttgtaataaacttatcattactatttaaaaacgccatagcgtgtaaaaaaaaaaaaaaaagaagggcggccgctctagaggatccaagcttacgtacgcggtgccatgcgacgtcatagctcttctannnnnnnnnnnnnnnnnnnnnnnnnnnnnnnnnnnnn

SEQ ID NO: 129021 - DNA, 549 bp, Arabidopsis thaliana
agctcactacgactcactatttggaaagctggcacgcctgcaggtaccggtccggaattcccgggtcgacccacgcgtccgcccacgcgtccgcctaactaaacccaacgccggcctctctttctctctctccccgcttctctcgtcgatcgctgaccatggccaaggacaaactcaagcctcttctctcctctgatgctgcaggtgatatcgctgatactcctctccgagagaagaagcataagaagaagagcaagaagcgagctgaacctgaacctgatataccctctacacgagattccggtcttgatgaagatagagatggagtattggtagatgatactctaaatgagccaacgataggtgataaacttgagagtcttgacttattaaatggcgaaaaggttaacagtgaggagagtaatagagattctgctcctggcgatgataagcctcctactgctgcttctgttaacgttcttctgagacaagcattgcatgccgatgatcgttctcttctactcgactgcttgtacaaccgagatgagc

SEQ ID NO: 129022 - DNA, 513 bp, Arabidopsis thaliana
  unsure (1)..(513): unsure at all n locations
nnnnnnnnnnnnnnnnnnnnnnnnnnnnnnnnnnnnnnnnnnnnnnnnnnnnnnnnnnnnnnnnccacaggtccggcgtcacgaccaagtagcattagttccatacgcaagagtcgacgaattcatcatcggagaatgctcaaacgcagagtgccctacacgattccacatcgaaagaggaagaaaacgctctcgaggcagtctcaaagagtacaagagcgacgagtatttggaatatagactgtattggtgttcatttggtcctgagaactatggagaaggtggtggtgtgttacccagtaggaaatatcgtctcaacactagaaatcgagctgcgagacctcaatctatgagaggatgtacatgtcattttgcgggtaaacgactctatgctcgtccttcacttgcgcttcttatgtacaatgagagacgacctgtcaacaaagctgggtgcgtttgtcatggaccccttgatagagatgcgattggggcctggggctaaaaagattcctt

SEQ ID NO: 129023 - DNA, 403 bp, Arabidopsis thaliana
accacgcgtccgcaacatcaacgacttattcgagagaaaatgaatcggaatcttagaaacgccattgtcgcatttcttgctccacttccttctatcgtattctacctcacctttctcagtaattactcttcatcttccgattcagagctctcttctattcaatcatggtgtttgaatcatcctcttctattagcaaaccttctcttcttcttaaacgtcaatgtgctcttctgggtcatcggtttactccaatctagccactggatgatcgatgtgtattggacagtgatacctgtaatgctggttcattacttcgcttcgcatccattgtcacaggacaataagctgagatccatgattggcataactctgacatggatttggagcattaggttgactcata

SEQ ID NO: 129024 - DNA, 591 bp, Arabidopsis thaliana
  unsure (1)..(591): unsure at all n locations
aaacgtttancngttcccccnttttgggnccggantctggggggccccntaanggnaaaagttttttnccccnanaancggcncttatggntccntccgggnngggttacnaagtccccggggccgggncctttgggggggaagtttgacccattctttttctcctacgcccccccggggacagctttccgacagggtttggtccgcaatgtggagaactgcagcagctgcaagaaagctccccaaatatctcaatgcgcttaggaggtgatcttacaaatcgcatccgttgctatgatcggagtcatggcggtgttgaagcaaacgacaatgtcgaatgtggctagaattgcagtgcttgtggcggctgttttaagttttgcagcttcaaagtggctatcacacttcatctacaagacattccattaccatgactacaaccatgctgttgtttgaaatgtatattggtgtttgtacttcgtatatatactcatcggatgtattcagtccacatggtgttgtacataacagttatacagaaactaattcttgaatctataccgcttaaaaaaaaaaaaaaaagggcgaaca

SEQ ID NO: 129025 - DNA, 565 bp, Arabidopsis thaliana
  unsure (1)..(565): unsure at all n locations
atgatacgtcagctctcnnnnnnnnnnnnnnnnnnnnnnnnnnnnnnnnnnnnnnnnnnnnnnnnnnnnnnnnnnnnnnnccacgcgtccgcactcgtgaaagaaagaccagagagttttctcctgatccacacaacaacaacaacacagagatcccaaatccggaagatatcttcttctctcataactcagtttactcagattcactgaaacatacaattaagttaaccgtcagtctctcacctgcagcaaaattcactcttctgctaataatgttctccacagagattcatctattgatcattttgactttttcaggtaaagtaaatttttatttctcttttcggtctagtaaagttttactcaaacatagaaagttacgattttttttttgttttgttttccatggaaaaattctcggcatgcaaaaacttttttttttttttttcctaaaaaagtatttaccttttcctttttttctccaactctttttcttaaagtgttaattttttttcttcttgtaagcacgcgagcgagaagaaaacaaaaaaatgaatagagtagt

SEQ ID NO: 129026 - DNA, 783 bp, Arabidopsis thaliana
  unsure (1)..(783): unsure at all n locations
atgatcctgccagctannnnnnnnnnnnnnnnnnnnnnnnnnnnnnnnnnnnnnnnnnnnnnnnnnnnnnnnnnnnnnnnnnnccacgcgtccgaccaagctcacattaagcctagctcatacaccactgcttggcctcagagttacaggcagtcgattgatctttatagtagtgtaccgtctcccggtatcggttttcttgggaataattcgatgacgagattcggaagctctttcttgtcttctggtttgataagaagacatactccggaatcattacctactgttacaaaacctttgttagaagaacaagcagatgaacaagcactaccaaaacatagacttagctctcagggcttactctctcctattccttcgaggaggggttcgatgcgaaaggatgagaaatcatccatggtgtctcatgagattccaatgtctcgtaatagctcatacggacaagctgtactaaatggtcagttcatcttaatgcttgagttaaaatatcgtgtcttctcttcgttaaaagtggttaaatagttttaagagattctctgatgcttggcttgatgagagtagtaacgatggtagagctaattgctgctttcctagaactatagagctgcaatattgattgcaattgtgttcattcaccgttaaatactaatgaaaatatgtcacctttnnnnnnnnnnnnnnnnnnnnnnnnnnnnnnnnnnnnnnnnnnnnnnnnnnnnnnnnnnnnnnnnnnnnnnnnnnnnnnnnnnnnnnnnnnnnnnnnnn

SEQ ID NO: 129027 - DNA, 1061 bp, Arabidopsis thaliana
  unsure (1)..(1061): unsure at all n locations
atgatacttcaggtctctacgactcactatatggaaagctggtcacgcctgcaggtaccggtccggaattcccggtgaagaagaaggtgtgtggtgataatgacaactttgttgtcataaatcagaagggtattgacccaccatcattggatcttcttgctagagaagggattattggtcttagaagagcaaagaggaggaacatggaacgtttagttttggcctgtggtggagaagctgtgaattctgttgacgacttgacccctgagtctcttggatgggctggacttgtctatgagcacgttcttggggaggaaaagtacacctttgtggagcaagtgaagaatcctaattcatgtaccatcctcataaaagggcctaatgatcacactattgcccaaattaaggacgctgttcgtgatggtctgagatcggtcaagaacaccatagaagacgagtgtgttgtgttaggagcaggagcttttgaagttgcagcaaggcaacacttactcaatgaagtcaagaaaaccgttcaagggcgtgcccaacttggcgttgaagcttttgctaatgcccttctcgtggtgcctaagacacttgcagaaaatgcaggtcttgatacccaagatgtgatcatttctcttacgagcgagcatgacaaagggaacgttgtgggactgaaccttcaggacggtgaacctattgacccgcagcttgctggtatttttgataattactcagtgaaacgccaacttatcaattcagggccagtgattgcgtcgcaattacttttggtggacgaagtgattcgtgcaggcagaaatatgaggaagcctactgcttgaagtcctttgcttttaacttggtttctaatttgtaagcacctcaaattttgtttcttggtgtaaatcctgaatattgtgaaacatatgttttttttttctttttggcaatgaaaaacatatttgaatctgaaaaaaaaaaaaaaaagnnnnnnnnnnnnnnnnnnnnnnnnnnnnnnnnnnnnnnnnnnnnnnnnnnnnnnnnnnnnnnnnntcccc

SEQ ID NO: 129028 - DNA, 500 bp, Arabidopsis thaliana
  unsure (1)..(500): unsure at all n locations
tnnnnnnnnnnnnnnnnnnnnnnnnnnnnnnnnnnnnnnnnnnnnnnnnnnnnnnnnnnnnnnnnccacgcgtccgctctttttttttttttttttctttcgcgtgtgattattaactcgaggtaatttctctaatcccagttaatatcacacgcggaatatcaaagatctgattttttgtaaacattgtaccaaaatcatcagaagattataagtggagtctttcgaagaagaacaaatttgtaacacgcgtctccatcaatcttctagctggcaatgagatccattctttagcttctttcttctctgttttttcttttttgaagaaaaaaaaaatggcaccaaagtttgaatggtgggctaaaggaaacaacaacaacactcgtaaaggaacaccagtcgttgtcaaaatggaaaaccctaataactgggcaatggtggaacttgaatcaccttctcatgacgatttcctcgtaagaactcatgagaaatctcgtaac

SEQ ID NO: 129029 - DNA, 572 bp, Arabidopsis thaliana
atgattctccagctctctacgactcactatatggaaagctggtcacgcctgcaggtaccggtccggaattcccgggtcgacccacgcgtccggtcggaggataaaaagcctcaagatccaaatcccagatttgcttgcgaaggttgcagcgttctgctcgacatcaacgatggtgaccgtctcgtcttcgctcgtttatctagtggcgctatattaaaaattgggaataagaattattctttaaagccattgatcggagctccgtttggatctctgttccaagtcgaaaccggagaagatggttctttcctctctcgcattcttcccattaaacaagaaagtaacagtaataatgttatggacgattcgagagataatcgagaaatcgtcgacaataatgaagctcagaatcttactggtgaagaaattgaagctatgcggagagagggtgcaaaaggggatgaaattattgaagctctaattgcaaacagcaaaacttttgataagaagtttcagttgtctcaggaaaaatataagcttaaaaagcagaagaaatatgcaccaaagctgct

SEQ ID NO: 129030 - DNA, 883 bp, Arabidopsis thaliana
aggtctctacgactcactattgggaaagctggtccgcctgcaggtaccggtccggaattcccgggtcgatccacgcgtccgcgacgctatcattacccagtataatccagttgagggtcgtcatgctttagtttatgacattgcaacaccttctgagacatgggaatgggttagactctcagagatatctcctggggatatagagtggataggagaggatcctgggcttggtaatcgatataatggacaaggtcatggactgaatagaactaccggacccaactgtgttccacaacgaggaagcggtttggagaagaacactatcagaaagggtttcagaacatcacagaatggaactggaaaaaagaaacatctcgatatacgaatccgccaaacagatgtcctaatcagagaggtggagagagttcttcgttcacacaatccagatccttacgaagttgaaagggctaagagagttttggaggagcacgagcatgcacttgtgggcgcaattgcaaagcttggagatatttccgatggagaaaacgaaggtgcatttcgtcggtagcttatgtttgaatcaagcaattttgccaaggcacagtgcaatgtgtggtccatgaggagtcagtgaagaagagatcgaaggtcagagtctcaacttctttgatgttacccttttcttgggtatctgactgtaatttttgctgacactagagattagctcaacctggatctccgttttgttggatatatatgttcaatggaatagtttgggtaaaaaaaaaaaaaaaaaaaaaaaagaaaaaaaaaaaaaaaaggacggccgctctagaggatccaagcttacgtacgcggtcatgcgacgtcaaagctcttctat

SEQ ID NO: 129031 - DNA, 1334 bp, Arabidopsis thaliana
tcgactcactctagggaaagccggtacgcctgcaggtaccggtccggaattcccgggtcgacccacgcgtccgaggaagttaaaaaggcttaagcgggcaaggagaatttcaacacatatcagtcagaacgatcagaggcagagcaaattcaatttcgaaacagtgactattacgagaagcgaaatggatacgtcgcttcttcttccgatcatcgatctttcttcgccgggaaaaatctccactgctcaattgattcgtcaggcatgtcttgaacatggattcttctatgtcaagaatcatggaatctcggaagaattaatggaaggggtttttaaggagagcaaaggcttctttaatctcccattagaggaaaagatggctttactccgccgtgatttgctcggttatactccgttgtatgctgagaaacttgacccgtccttgagctccataggtgattccaaggaaagcttctattttggctctttggaaggtgttctagctcaacgttacccaaatcaatggccttctgaaggtatcttgccatcatggaggcaaaccatggaaacttactacaagaatgtcctgtccgtgggtagaaaattgcttggcttgattgccttagcattggatttagatgaggacttcttcgaaaaagttggagccttgaatgatcctacagcaggttgttcgcctcttacgctatccaggtgaagtgatttcgtcagatgttgaaacgtatggtgcctcagctcactcagattatggaatggtcactcttcttttgactgatggagttccaggacttcaggtttgtagagaccaatcgaaacaaccccacatttgggaagatgtccctggaattaaaggggcgtttatcgtcaacattggtgatatgatggagagatggaccaatggattgttccggtctacattgcccagagtgatgccggtgggaaaagaacgttactcggtggtgttcttcttagatccccatccagattgtaatgtgaaatgcttggagagttgttgcagcgaaacttgtccccctagattcccgcctatcctcgccggcgactatatcaaggagcgtttcaggctaacatacgccccttcctagtcttatgtttgtgccgaaatgtaagaaaataatagtgttcaaacttctacgtaccataatgtttaattagtgaaacttatggaacttgaaaaaaaaaaaaaaaaaaaaaaaaaaaaaaaaataaaaaaaaaaaaaaagggcggccgctctagaggatccaagcttacgtacgcgtgcaggcgacgtcatagactcttctatagttgttcctaa

SEQ ID NO: 129032 - DNA, 792 bp, Arabidopsis thaliana
  unsure (1)..(792): unsure at all n locations
atgannnnnnnnnnnnnnnnnnnnnnnnnnnnnnnnnnnnnnnnnnnnnnnnnnnnnnnnnnnnnnnnnnnnnnnnnnnnnnccacgcgtccgtgaagataggagaagggaacggagatgatccctacttattcactactaacaacttcgccggacgacaaacatgggagtttgatcctgacggaggctcgccggaggaaagacactccgtcgttgaggctcgccggattttctacgacaatcgttttcatgttaaagcaagcagcgatctcttgtggcgcatgcagtttctgagggagaaaaagtttgagcaacggatagctccggtgaaagttgaagactccgagaaggtaacctttgaaacggcgacgagtgcattacggagaggtattcatttcttctcggcgttgcaggccagcgacggtcactggccggcggaaaatgccggccctttgtttttccttccgccactggtgttttgtctttacataacgggacatcttgatgaagtgttcacttcagaacatcgaanagagattcttcgatacatctactgtcaccagaaggaagatggtgggtggngattacacattgaaggtcatagcacaatgttctgtaccacgttgaattacatatgtatgcgtatacttggagaaagtcctgatggaggtcatgataatggcgtgtggacgagcccgggaatggatccttagtcatggtggtggcacctacataccttcttggagtaaaacttggctttcgatacttggtgtatttgactggtctggaagc

SEQ ID NO: 129033 - DNA, 661 bp, Arabidopsis thaliana
  unsure (1)..(661): unsure at all n locations
tgnccgnncggattccgggngnccanggnccgttaaccactattcggagctttccgaagcaactacaaagcatggtgctaggttcgctccactcgccgtcggtggcgacatggactccatcgccgttcaagaattcagcagaacactcttcaatatgcgtcccgacatagctctctccgtcggccagaccattttccaaagtgacatgagacagatcttaccttttgtcactgttccgtgtcacattctccaaagtgttaaggacttagctgtaccagtcgttgtctccgagtatcttcacgccaatcttggctgtgaatccgtcgtggaggttattccttctgatggtcatcttcctcagcttagctcaccggattctgttattcccgttatcctccgtcacattcgtaatgacattgctatgtgattataagagatttaattagttaactattaaacgatgtaagaaaaaatgaaaataaatatctgatgtgatatgtctgtctagtctattgagaacattatttcgttgtcgtttggttctgattcgtttatcttgagtaaaaaaaaaaaaaaaaaaaaaaaacaaagggcggccgctctagaggatccaagcttacgtacgcgtgcaggcgacgtcatagactcttctatagttgtc

SEQ ID NO: 129034 - DNA, 507 bp, Arabidopsis thaliana
  unsure (1)..(507): unsure at all n locations
nnnnnnnnnnnnnnnnnnnnnnnnnnnnnnnnnnnnnnnnnnnnnnnnnnnnnnnnnnnnnnnnnnnnnnnnnnnccacgcgtccgcccacgcgtccgggtaagcgaacggagctccaaggagaagaagagaagcagagctcggagcgaagattcttcatcttccgattacgaagagaaagttaagaggcatcgaggaacagagaaagatgatgaaaggagaagtaggagaagtgataagaaggataagaaatctcacaagcaccacaaatccagtacatcaaagaagtccaaggatgataagccgaaaaagaaacatacggaaagcgaccacaagctaaaagagggaattccagagctatcaatggaagactacttctcgaaaaacaacgagtttgctacatggctgaaagaagaaaaacgtacttactttaatgatctcacgaccgaagctgcacgaggactgttctcacgatttgtcaagagatggaacagaggaaaactcgag

SEQ ID NO: 129035 - DNA, 831 bp, Arabidopsis thaliana
  unsure (1)..(831): unsure at all n locations
ccggcannnnnnnnnnnnnnnnnnnnnnnnnnnnnnnnnnnnnnnnnnnnnnnnnnnnnnnnnnnnnnnnnnccacgcgtccgtgacgttgtagaagaatttgagaaggataagcaagaagttctaaatcaggaagttcctgaaccggaaaagccggttctagttcctggttggggacaatggaccaatgtccaaaagaagagaggtttaccttcatggatggttagagaacatgaagatgcaaataaaaagagaaagctagatctcaaaacaaggaaagactatcgtctcagaaatgttatcatatcagagaaagtcgataaaaaggctgacaaacttcatacaacgactctacctttcccatatacatctaaggaagttttcgaacacagcatgcgcatgcctataggacccgagtttaatcctgcgactattgttggagctctcaaccgacccgaggttgtgaagaaagctggtgtgataattaaaccggtcaaatttgaggaagtgaatccaaacgagaaagcagatgacgaaaaccctcgaagccatcaaaaacaaagacccaaaaagggtagtaaaaccagtaaaggtcaaggcaaaaacaagtacaagctaaagaccaaagcttagctctcaagatttctgtattctcaaaacttgtttagacacaaattttgatccaaaagaaaacagttttgctttgtaatttgtcttatttataaaagaaacattttgtttgcttcaaaaaaaaaaaaaaaaagnnnnnnnnnnnnnnnnnnnnnnnnnnnnnnnnnnnnnnnnnnnnnnnnnnnnnnnnnnnnnnnnnnn

SEQ ID NO: 129036 - DNA, 559 bp, Arabidopsis thaliana
agctctctacgactcactatatggaaagctggcacgcctgcaggtaccggtccggaattcccgggtcgacccacgcgtgcgcggacgcgtccgcccacgcgtccgctctttctctctgctttcttggtatggctgctgacgtcagctctctcgtacggatactgagtaggttcaaggatgatcggacggttgtaaaagattccaccggaccaagatccacggtggcgctcatgacacgcgatctcctcggaatcggcggttgtgtgggtggaggaggaggaggagactaacagtcgctggagcttgaccttgacgtccaagtccctaacggatgggaaaaacgtctcgacttaaagtcagggaaagtgtatctgccacaacaatgctgttccacgagctcggcatcatcgtctcatcatcatcatcatcatcacgaagaccagaccaagcagacagttccaagatttcaagatccgaatgagccaccgattaccgataagtttgcggcgacaccattgttatgcctcttagacgatgacgacgacacaagcctcgaact

SEQ ID NO: 129037 - DNA, 680 bp, Arabidopsis thaliana
  unsure (1)..(680): unsure at all n locations
nnnnnnnnnnnnnnnnnnnnnnnnnnnnnnnnnnnnnnnnnnnnnnnnnnnnnnnnnnnnnnnnnnccacgcgtccgcgatcttcttcttcgatcttcttcctctcgtcaggtttcgtgtggttcgttctaatcgcgttgtattctttctccaaggaagatggctctaaaggaacagctagataaattcaacaaacagcaagtgaaatgccaatctactctttcgagcattgcttcttccagagaaagaacgagttcttcgaggcagaatgtgcctttgcctgcggcaatcacgcagaagaagcctgatgcagctcctgtcaagttttcaagcgataccgagcgacttcagaacattaacaacattagaaaagctcctgttggagctcaaatcaagcgtgtcattgatcttctctatgagagaaggctagccttgacgccagagcaaataaatgaatggtgtcatgtagatatgcatgctaataaggctgttttttataggtttagggaggatcccgaaagcgcatttttgattggaggagggtccctttctaagggttcggncggtgtttatggttaggccccccttttttcgttgggtggaaaaccccttatcgggttcggggggttgccctaagcggttccntangnatgggggnttaagggcctnggcctnagnga

SEQ ID NO: 129038 - DNA, 941 bp, Arabidopsis thaliana
  unsure (1)..(941): unsure at all n locations
ctatacgactactatgggtaagctggtacgcctgcaggtaccggtccggaattcccgggtcgacccacgcgtccgggaagtagaagaagatgggtaaggaagatgaccgaggagaagagtacctgttcaagattgtcctaatcggcgattccgctgtcggaaaatcgaacttgctgtctcgattttcgcgggatgagttcgacacgaactcaaaagcgacaatcggagtggaatttcagacgcagctggttgaaatcgaagggaaagaagtgaaagctcagatctgggacactgctggtcaagagaggtttagagctgtcacttctgcttattacagaggtgcttttggtgctctcatcgtttatgacatcactcgaggtgacactttcgaaagcgttaaacgttggctccaggaactcaacactcattgtgacacggcagtggcacaaatgctagttgggaataaatgcgatttggaggatataagagcggtgagtgtggaggaagggaaagctcttgcggaggaagaaggattgttctttatggaaacatcggctctggacgccacaaatgtagacaaagcctttgagatcgttatcagagagatcttcaacaatgtcagccgcaaacttctcaactctgatgcttacaaagcagagctttccggtaaccgggtcagccttgtcaacaaccaagatggctccgagagctcttggcggaatccgtcttggtgctcccgatgatttcaatcaatcttgtttttaccagagaaagctttataaggttataattatcatttatgaagtcagacttataataagatacttgcaatcnnnnnnnnnnnnnnnnnnnnnnnnnnnnnnnnnnnnnnnnnnnnnnnnnnnnnnnnnnnnnnnnnnnnnnnnnnnnnnnnnnnnnnnnnnnnnnnnnnnnnnnnnnnn

SEQ ID NO: 129039 - DNA, 536 bp, Arabidopsis thaliana
  unsure (1)..(536): unsure at all n locations
nnnnnnnnnnnnnnnnnnnnnnnnnnnnnnnnnnnnnnnnnnnnnnnnnnnnnnnnnnnnnnnnnnnnnnnnnnnnnnnnnnnccacgcgtccggtggagacatggatgaatatctgaataagctttctcgtatacttactttctttttattttccgggaaacatgtaatcaataaggtgagaggcaaacgaatgaatctgcctataaaatgactgtttcttctacaatgtaataatagtaaaactcttgagtacaatagagtggagacatggatgaatatctgaataagctttctctcaaaaaaaaaaaaaaaaaaaaaaaaaaaaaaaaaaaaaaaaaaaaaaaaaaaaaaaaaaaaaaaagggcggccgctctaaaggaaccaagcttacatacccataacataaggggccgtaggcttttaaggatccaaatttacttcccttcactggccggggtttaacatttttttgattggaaaaaaccaaataataccgcccttagtggcccagcgttaaaaccggaaaaccccgga

SEQ ID NO: 129040 - DNA, 724 bp, Arabidopsis thaliana
agacaagtacacaagatcggacaagagtggagttacattcattagcagtggagctcttacgcattcggtgaaagcactagacaatatctctgaagatcgatacagagttggctctcgaggtgggaagaaggaccaaacgagcatagagaacatcgtcttcctcgtatacttactttctttttattttccgggaaacatgtaatcaataaggtgagaggcaaacgaatgaatctgcctataaaatgactgtttcttctacaatgtaataatagtaaaactcttgagtacaatagagtggagacatggatgaatatctgaataagctttctctcaaactttctgcgttttttatgtacatagaatttgcagaaacgttgggaagcattctctaatacatatgtttattggttcaagctacagtgatctcgctccctcctcctctttccgccatgaaactcactcgtttcaaacgggatttgactcctcttgtggcggtggtggtggcggtggcggtggccgtggtggcgggctcgtcctgtcgtgtgttctgatatgcctcctcttgcctctgtttggccataaagagagcagcgatcttctgcgtagcttcggcttcggtggctccttctttaacgagcttttcaagctcagctttgggaatcctcaccttcaccctcctcaccgctccttcttcttcctccgtcgtccatcctcctggtggttt

SEQ ID NO: 129041 - DNA, 1038 bp, Arabidopsis thaliana
  unsure (1)..(1038): unsure at all n locations
atgatactccagctctcnnnnnnnnnnnnnnnnnnnnnnnnnnnnnnnnnnnnnnnnnnnnnnnnnnnnnnnnnnnnnnnccacgcgtccgcatgaattgaagcacatcaatatcttggtcgaaagattccccctttcaggagcaaaaactctgattttggagtatccttagtgttgttctcttcccatattgtaaaaacgacttcgtttaattgaaggaaaaagcttctttttggtttaaagtctctctgctcaacctaagagatgaaaatgtataatccatctttcattatgtttttgttcgatttccttctctgtttttgtagtcaaaatttggtgtggttatttgcagaatgaaggcaaatgcaggagcacttaccaatttcgagttgcttgacttcttaaactcaagaggtgcttcaaaagatactacaagagttattgctccaattgctagatcagaatacaaggtctatgattatttggtggagactgctgcttccactcaaacacgagagagcgttaacaaatccgcagacaagtgtaaagatttcaaactcgctaaagctgagattctcaatatcatcaatctctggccttcttctatagtcgaactgttaccgatcatagagaaccttgatgatcgagaaatcgacacagatgggatattagagcttgtgaaggatttgctacctcctctgcctacagctgaaagtcctaaagataatgatgaagaagaagaaacagagaatggtgaacagtcgtgacttgcaacaattttccccttaaatcgttattttttgtatcggtgcgattttaccgttttggcggaaaaaggcaagtctccgatttttacaatttttgcagaaaaatgtaatttctcaatttttcttaaaaattatgatttatgatttatcaataataacaataataaaatgggctgaccaaaaaaaaaaaaaaaaaaaagnnnnnnnnnnnnnnnnnnnnnnnnnnnnnnnnnnnnnnnnnnnnnnnnnnnnnnnnnnnnnnnnnnnnnnn

SEQ ID NO: 129042 - DNA, 393 bp, Arabidopsis thaliana
cgcactgcgccgccaaaaaacccttctttaaaccctttcctcctcgcgccgtcatgcaagccaccatcttctctccacgcgccactctcttcccctgtaaacctctcctcccttcccacaatgtcaactctcgccgtccctcaatcatctcctgctccgcccaatccgtaaccgctgatccttcaccacctatcactgacaccaataagctcaacaaatacagctcaagaatcactgaacccaaatcccaaggtgggtctcaagcaattcttcacggtgttggtttatcagacgacgatttgctaaaaccccagattggtatctcgtcggtttggtatgaagggaacacttgtaacatgcatttgctgaaattgtctgaggctgtgaaagaag

SEQ ID NO: 129043 - DNA, 525 bp, Arabidopsis thaliana
  unsure (1)..(525): unsure at all n locations
nnnnnnnnnnnnnnnnnnnnnnnnnnnnnnnnnnnnnnnnnnnnnnnnnnnnnnnnnnnnnnnnnnnnnnnnnnccacgcgtccgcccacgcgtccgcccacgcgtccgcccacgcgtccgaaattatttcaactattccaggcaacagcatcgcaactgctacagccccgacctctgaacggacaactgaccatagccaagtcctacagcatggttcctcatttcatttgtcttcaaatcaagctccacttcatccacctcttgaacactttgtttcaggtcttggttataatatccaggagcaagaactgcctaaaaattctatgaatctcaatcctctttttgctcagcaactacttccagttcctcatgacacatcattacctcctggttctcacgtccctcgaccaccggattcgttcccttttagcctttccaacacaccaaggacctattctgtgactttgcctccatattctggcagtcagatacaaccaataggaccacgttctactgtgaggccg

SEQ ID NO: 129044 - DNA, 782 bp, Arabidopsis thaliana
  unsure (1)..(782): unsure at all n locations
atgatctannnnnnnnnnnnnnnnnnnnnnnnnnnnnnnnnnnnnnnnnnnnnnnnnnnnnnnnnnnnnnnnnnnnnnnnnnccacgcgtccgattcaaatggcgcttagaggagtttggcagctcaagaaactcgttgtgagctactgtaattggggtggtagcagtagaggcatcagagcctttatggaatcagaattgcctgctctaaaggagaaaaacccgcagctcgaagtaattaccgagctttcacggggacaacatccttatttgaagggcatttacaggaatagaaatgaaagggtagtgtgtgtgaagaacatggatcctgaagaagtgcttttgaatgcaacgaggctgaggaactcgcttggacggaaagtggttaaactgaggaccagacatgtcaccaaacaccccagtgttcaaggcacctggacaactgctgtcaaattctgagactttcctgctaaattgtttgcaggttttcatcttctagctgttaaatcgaatgttgcaagtatcaggattggtcgtttatctgtattgcaaccccaagttgtttgtaccgtctgtgacttgggacaaagatgtagtcttcaaatgttttgcagtttttgcaatgtttgaattttgtcttgtccttctggttgagtctataataagattacacaagggtttaaggttaaaaaaaaaaaaaaaaccaaagnnnnnnnnnnnnnnnnnnnnnnnnnnnnnnnnnnnnnnnnnnnnnnnnnnnnnnnnnnnnnnnnnnnnnnnnn

SEQ ID NO: 129045 - DNA, 716 bp, Arabidopsis thaliana
  unsure (1)..(716): unsure at all n locations
nnnnnnnnnnnnnnnnnnnnnnnnnnnnnnnnnnnnnnnnnnnnnnnnnnnnnnnnnnnnnnnnnnnnnnnnnnnnnnnnnnnccacgcgtccgcaactggttaccatgaagaagctccggggaggatgagtgctatttacacggcggggcttttggctcgtaaccgtgaagatggtgaaactgacgtttttgttcacgacgttaaccgtccggtggaagatgagttctcggcgactttcttgtgtaaaggttatatgagggagcaaaatgggagacttagacattttactattcctagtcatcgggctcgtgctggacgacctttttgtccggtggaagttgatcgccgccgttaattttgtggtgggagatttatttagttcaccgtcgttggtcggtcaacggactcagggctggtaaattgttttacctagtggacattgaaggacttgcttagctggcattttgtatttgttttgttttgtttttgcttgatttaaatacgtttttcaagattttagtgcatttactgaaatcgatacatactagtattcgcatgattatttgtgatttcattatcccttttgattaatgaataccaataaggtatttatctgaaaaaaaaaaaaaaagnnnnnnnnnnnnnnnnnnnnnnnnnnnnnnnnnnnnnnnnnnnnnnnnnnnnnnnnnnnnnnnnnnnnnnnnnnnngaatcg

SEQ ID NO: 129046 - DNA, 521 bp, Arabidopsis thaliana
  unsure (1)..(521): unsure at all n locations
nnnnnnnnnnnnnnnnnnnnnnnnnnnnnnnnnnnnnnnnnnnnnnnnnnnnnnnnnnnnnnnnnnnnnnnnnnnnnnnnnnnnccacgcgtccggttcaacgtgacgatgaagaaagagaagaagccgacccgtcgttcaaatcatccttcgttcctcaacaacattaaccccaaacctaaggttagggttttacctttatctcttcaatttcttcattcctctcatcgattcgcgacaacatgtctctaccggattctctcccatcttcttcttcttctccgcctgtgacccgtgaagaaaccggctttcatcgctttgaacatcacggcaacgattccggttttgatcatcgtgatcgtccaccgtggaatcgttctgagtacgattatcgccatggaagcgttgttgcatctgagaacgtcaggaacaattccacttctgaagacccttggtcttgcgttgtcgtcgttgctaccttctgtatctttgtgtcgatgactttgattctggggctttat

SEQ ID NO: 129047 - DNA, 627 bp, Arabidopsis thaliana
cagctacaattctactcacatttatggaaagctggtacgcctgcaggtaccggtccggaattcacgggtcgacccacgcgttcgaaaaaaatgagagagaggtggcaaagatgaagtggaggtgagagacggaaagcaaaaacaatagtcacgagaatcaacaccaactcttaaaccaagatagaccaagaaaccaaacagagtaaataaatggtggccttgacaacattgaaatccccaaaaatctcaactttttagggttttcgagctctgaaatctctctatctttcttcttcagatttctcacttttttcttcttcataagatcctcgtgattccactttataacgtacgcctcctttcaagaaaaatctctctctatattatctacgtttgctctcgccttgtctccttttgaggttccatttctacttctctccaaaattcgaaacttttcccactctctctctctctctactagtttgacatgaacagcgaccgtggttggcttgacggctccggtgaatctccggaagttaataacggtgaagctgcgtcttgggtcagaaacccagatgaagactggttcaataacccaccaccaccacaacacactaatcaaaacga

SEQ ID NO: 129048 - DNA, 625 bp, Arabidopsis thaliana
  unsure (1)..(625): unsure at all n locations
gatctgccagcactaatacgactcacataagggaaagctcgtcgcctgcaggtaccggtccggattcccgggtcgacccaccgtcgtggttacaaccaaggaggacctaggaattacaatccacagggagctggaaactttggtcctgcatctggagctggaaacttaggtcctgcacctggagctggaaatcctggctatggtcaggggtattctggaccaggacaagagcagaatcagacattcccacaggcagatcagaggaatcgagactggaacaacaataatccagcaggccagcccgggtctgaccaatttccacagggaagaaggtactagacagagagcatgctgcagtgaattgagctgaataaggagagaagtgtcaaaggccttttattaagttttacagtaaatagtatttagtcatctttctactttgtaagacaatagttagtccttttttctcttaagttgagcttgttaacgttgttggttgcgcttgtgaaattgaaacactctttctagacaaaaaaaaaaaaaaaacaaaagggcgacaannnnnnnnnnnnnnnnnnnnnnnnnnnnnnnnnnnnnnnnnnnnnnnnnnnnnnnnnnnnnnnnn

SEQ ID NO: 129049 - DNA, 522 bp, Arabidopsis thaliana
  unsure (1)..(522): unsure at all n locations
atgatcctgccnnnnnnnnnnnnnnnnnnnnnnnnnnnnnnnnnnnnnnnnnnnnnnnnnnnnnnnnnnnnnnnnnnnnnnnccacgcgtccgcccacgcgtccgcccaaattctccacttgttcacttaatctttctcactacctgatcgtggaaatggcgattggaccatcaagtgtgatcattattgttgggataatcttggcgttgacttatcagtcaatcttgaaacctcctccaccgaatctatgtggctcccccggtggtccaccgatcacagcaccgcgtataaagctgcgagacgggagacatttggcatacaaggagtatggacttccaagagagaaagctaaacacaaaatagtcttcatccatggatccgatagttgtagacacgacgccgttttcgccactcttctttctccggtacgttcttaccaactcttggaactaaggttcataataatttcttgatctgttttcactttataggatttagttcaagaacgaggcgtgtatatg

SEQ ID NO: 129050 - DNA, 745 bp, Arabidopsis thaliana
  unsure (1)..(745): unsure at all n locations
tacggtaatgtttcagcagaaactgctcagggaaagttcccattgaaaaccgctgcagtgatgcacattgttgccttgcgaacagaagcaaccattactagcggtgaaatgccacctaatcttggtcaagccttcaagaaccatatgagtgagatgtttgcataccatgcaaccatgatgtcaaacacccttggaacttcaactgttgtcttcaccagaaccggtttcatggccatattgttaagtcactatcgtccttccggcacaatctatgccttcacaaatgagaaaaaaatacaacaaagattagctttgtatcaaggtgtatgccccatatatatggagttcacagatgatgcagaagaaacttttgctaatgctttggctacattactgaaacaaggaatggtgaagaagggagaggaaatagcaatcgtacagagcggtacacagccaatctggcgatctcaatcgacacataacatccaagtccgcaaggtttaaagcttcttttaagatgggatgtctttaatatgtagaccctcgtttttggttataattttcgttgcatgtctctcttctcttgtactattcacacttgttgtttgctgcatcttcttcttcagtttgctttgcttaaaaaaaaaaaaaaaaaaaaaaaaaaagnnnnnnnnnnnnnnnnnnnnnnnnnnnnnnnnnnnnnnnnnnnnnnnnnnnnnnnnnnnnnnnnnnnacacgaaatcca

SEQ ID NO: 129051 - DNA, 735 bp, Arabidopsis thaliana
aaaagttcccattgaaagctgctggagtgatgcacactgttgcattgcgaacagaagcaaccattactagcggtgaaatgccacctaatcttggtcaagccttcaagaaccatatgagtgagatgtttgcataccatgcaaccatgatgtcaaacacccttggaacttaaactgttgtcttcacaagacccggtttcatggccatattgttaagtcactatcgtccttccggcacaatctatgccttcacaaatgagaaaaaaatacaacaaagattagctttgtatcaaggtgtatgccccatatatatggagttcacagatgatgcagaagaaacttttgctaatgctttggctacattactgaaacaaggaatggtgaagaagggagaggaaatagcaatcgtacagagcggtacacagccaatctggcgatctcaatcgacacataacatccaagtccgcaaggtttaaagcttcttttaagatgggatgtctttaatatgtagaacctcgtttttggttataattttcgttgcatgtctctcttctcttgtactattcacacttgttgtttgctgtatcttcttcttcagtttgctttgctacgattgtggtttttggagacattatagctcattaactgtttgtgaaaaaaaaaaaaaaaagggcggccgctctagaggatccaagcttacgtacgcgtgcatgcgacgtcatagtgtaatatagtgca

SEQ ID NO: 129052 - DNA, 645 bp, Arabidopsis thaliana
  unsure (1)..(645): unsure at all n locations
atggngggnttncnccagcaccttgtgccaacccccttgggcttcactttgctcccccagacccggttcatggccaattgtaaggccctacgccctccggcacaatctatccctcaaatgggaaaaaattcccccaaagattagctttggatcaaggtgtatcccccctatatatggagttcccagatgatgcagaaagaaactttttgctaatgctttggctccattcactgacccaagcaatggtgaagaagggagaggaaatagcaatcgtacagaccggtacacagccaatctggcgatcttcaatcgccccataccatccaagtccgcaaggtttaaagcttcttttaagatgggatgtctttcccccccacaacctcgtttttggttataattttcgtggcatgtctctcttctcttgcactattcacacttgttgtttgctgtatcttcttcttcagtttgctttgctacgattgtggtttttggagacattatagctcattaactgtttgtgagcccaaacccaaaacccaaagggcggccgctctagaggatccaagcttacgtacgcgtgcatgcgacgtcaagatnttgtagaggtcaccacaagccccccccntcttttacccccccccagcc

SEQ ID NO: 129053 - DNA, 847 bp, Arabidopsis thaliana
  unsure (1)..(847): unsure at all n locations
taggtgcactatagaagagctatgacgtcgcatgcacgcgtacgtaagctcggaattcggctcgagcgagagctggtgttgaaggagagaggcattgatgagcccgagcatcacaaattggatcaaccgacagataggatggtcctcaaaccgattgaaagagttccagagcatgcaagtcaaaggccagtgagttctccacgtgacatgagaacgaggaaattcgaccaaaaggatgggcgaaatgtaagcgacattgccagatccgaaactcagaggagaaactggcgtgaaaatgaaaacaagagcgcaagacagcaacagcagactcaggagaagacaagacatccatcaccagagacatggcgaaagccggttccccagaaactggattcaccaaatggaacagggattcgtcacggaaaagcagcttctgctcttgagctagctcaagcctattctcctttctctgaccctaaatctggaattggaagcagcaacagttttaacaaaagccgcaacaaccaaacgcagcagcaacccttctctcggttggtaggatcgacaacaacaggaagacagattaatgggtactgagtcatcgttcgtttgttctctcgaattggttttagtcccgattaattggatcttaataacacatcttatgtggtttgggatcgttattggagatttgaatgtgatatgttcccttaagaacggggtcgggttacataagccagatatgattacactgtgttcttcaaaaaaaaaaaagaaaaaaatatagggcggccgctctagaggatccaagcttacgtacgcgtgcattcnacgtcagtgctnnnnn

SEQ ID NO: 129054 - DNA, 580 bp, Arabidopsis thaliana
  unsure (1)..(580): unsure at all n locations
gtgcaaaaaaagacacttcttaagcttcaacaagaaagaaatagtattcgcatagtattagaagatggattttttcaatcaagctaaagccgtaaggatgcgtaacgtccatgataagtatctaacagcggatgaggacgaggaaacggtgactcaagacaggaatggttccgacaagagagctagatggattgtcgagccggttcgtggttcctttgaagtgatccgtttaaggagctgctacggtaactacctcaccgcttcgaatgagcggttcttgctcggagccactggacgtaaagtggtcttgtctaaaccggctcgactcgactcctccgtagagtgggaaccggtgagagaaggttccaaaatgaagctcaagactagatacggaaacttgcttcgagccaacggtggacttcctccatggcgtaactctgtcacgcatgacacttctcatgtattggattcttccttgtgggatgttgatgtggttnaaattttgggtggacgacggttccggtgcaagtccantncgggcaaatnctcgcaaanngggccgtgnnnggtttccggtttg

SEQ ID NO: 129055 - DNA, 879 bp, Arabidopsis thaliana
  unsure (1)..(879): unsure at all n locations
nnnnnnnnnnnnnnnnnnnnnnnnnnnnnnnnnnnnnnnnnnnnnnnnnnnnnnnnnnnnnnnnnnnnnnnnnnnnnnnnnnnccacgcgtccggcagggttttgggcggtcccttctgaagcgaaagttgccatggttggacgatggaaggtaggacctggaaagtcattatttgatgccatttccaaaggcgttgggaagatcaaaatcatagctgaagatttgggagttattactaaagatgtagttgagctgaggaaatctatcggagcacctggaatggccgtcctccaatttgcttttggaggaggcgccgataacccacatttacctcacaatcatgaagtaaaccaagttgtatactctggaactcatgacaacgacactattcgaggctggtgggacactctggaccaagaagaaaagtctaaggcaatgaaatacctgtcgatagctggagaagacgatatatcatggtcagtcatccaagctgcattctcttcaaccgctcaaaccgcaatcataccgatgcaagacattctaggacttggaagttctgccaggatgaacactccagccactgaggtggggaattggggttggaggattccaagttcaacgagctttgataatcttgaaactgaatctgacagactcagagatcttttgtcattgtacggacggctttgaggaaaacatttgacgtggaaaagaagaagaatctttggttttcttatcttttttgtaactttgctaatggtaaaagcaataaagtaagcagaagccggaaaaaaaaaaaaacaaaacanaaagnnnnnnnnnnnnnnnnnnnnnnnnnnnnnnnnnnnnnnnnnnnnnnnnnnnnnnnnnnnnnnnng

SEQ ID NO: 129056 - DNA, 509 bp, Arabidopsis thaliana
actcgactcactttatggcaaagctcggccgcctgcaggtgccgggccgctctacccgggtcgacccacgcgtccgaattccttgaacttcttcttctgagagttttaggaaaaaatgtcgtctttgagcagagagttagttttcttaattctccagttcttagatgaggagaagttcaaggaatctgttcacaagctagagcaagaatctggcttcttctttaacattaagtactttgaagagaaagctcttgctggagagtgggatgaagtggagaagtctctttctgggttcactaaaggcgacgataatcgttactctatgaaaatcttctttgagactaggaagcaaaagtatctcgaagctctagatcgaaatgacagaccaaaagctgttgagacattagccaaagacttgaaagttgtcgctacattgaacgaggagctttacaaggagactactcagctgcttactctggagaattttacggaaaatgagcaactgtcta

SEQ ID NO: 129057 - DNA, 491 bp, Arabidopsis thaliana
  unsure (1)..(491): unsure at all n locations
gcttcaaagagataagatggcctctcttctctctcccgccacccccaccgccacctccgccgcatttcattcctgctccaccgccggattctccactcccactcacatttcatcccagaacagcagcctgtccctcctcagccgccggggttgtatgatgagatgcagtttttctccgcaggacattcctgttgattccctctctcatctccctcctttccttgactttcagaactccctcgccacattttcggatacccagaaatgggggttctttgtctccgccggaatcgtctggttttacctcacggcgaggcctggtgttctcatcggcgccattgacgcctaccttctcgctcccctccagcttggcctcgacactctgattggaaggaggttgaagaggtccgatttcttggtcacttagaaactcggggaaggctttttttgggggggcggtttttccgggggccaattcccaanatttatac

SEQ ID NO: 129058 - DNA, 504 bp, Arabidopsis thaliana
  unsure (1)..(504): unsure at all n locations
nnnnnnnnnnnnnnnnnnnnnnnnnnnnnnnnnnnnnnnnnnnnnnnnnnnnnnnnnnnnnnnnnccacgcgtccggggggaaaaaacacaaggaaaaaaatggctcaattggctgctttgtcgggaaagcaagctgatgagtacttgaacgcaaggccgaaatatcctacaatatggtacaaagtgttggctggtcgaaccagcaaccataaggtggcttgggatgttgggaccggcaacggtcaggctgctattggggtcgctgagtactaccagaaagtggtggcaactgatataaatgaatcacaactccaacgtgcaatgaagcacccaaaagtcacttactatcacactccatcatcaatgtccgacgacgatctagtgactctactcgggggagaaaactccatagatatcataatagccgctcaagctcttcactacttcgacctaaagagattctaccccatagtgaaacgtgttcttcgtaaacaaggcggtat

SEQ ID NO: 129059 - DNA, 554 bp, Arabidopsis thaliana
cagaggatagcgaatgagactgttgagttacaagaccttgttgagattgttcctgagccagttgataagtggcaagatgttggacctgaccatttcaatatattggatgctttctactctgagcctcagaggtatgcttatactttccagaactatgtgtttgtcactcggctgatgcaggagaaagagtctgcttctggggttaaacctctcaggttgatggaaaggagtgtcttcagtgaccgaatggtgtttgtgcgtgcggttcatgaagcgaaatggatgaatgagatggagatcagcatttacgactcttggtttgatccggttgtctcttctttacctggacttgttcctgatgggtttatatacttaagggcgagtccagacacttgccacaagcgaatgatgctcaggaaacgagcagaagaaggcggagtctctctgaaatacctccaagatttgcacgagaagcacgagagctggctgcttccctttgagagcggaaaccatggtgtattgtctgttagtagaccatctttacacatggacaa

SEQ ID NO: 129060 - DNA, 466 bp, Arabidopsis thaliana
gcgaaaaggagtctggtgatggaaaggggtatgcatttgtaacattcagaagtaaggacttagctgctgaagcaattgatactctaaataacactgacttcagaggtaaaaggataaaatgttcgactacccaagcaaagcatcgtctctttcttggtaatgtccctagaaattgcatggagtcagacattaagaaagccgcaaatagaattggtccaggcgttcaaattgtcgaactcccaaaggaaccacaaaatatgggccggaatcgcggatttgctttcatcgagtattacaaccatgcatgtgctgaatactcgaaacaaaaaatgtcaaatccgagttttaagcttgatgataatgccccaactgtaagctgggctgaatcaaagaatggaggaggaggaaattcttcagctttccaggtcaaggcattgtacatcaagaacttacctagagatataac

SEQ ID NO: 129061 - DNA, 392 bp, Arabidopsis thaliana
catcttcttcctttcctgaataagttttctctacgcgttcgctggtgatattcttctaaacgcgtctctgatttgtttgaatcgatcatcgttccttcttctggattttccatcgatatttgatttttctagggtttgcttctaaattgcatcgatggctttttatgttcatgcgatttacttttccctctgttattctagattgttgttcgatgatttgatcgttcagggatggatttgatggatcttatgttttcacggggcttctctatgctgctacgtcttcagggggtgttcttcttccttacgcgtctctgatttttgttttcttctctacgcttcttagtcgtctcgactcgcagtttttttggaagctaattatgatccgatca

SEQ ID NO: 129062 - DNA, 641 bp, Arabidopsis thaliana
ggaaaacaggaagagaaagctggtcatcatttccgaattgtgcttaaaagctctgcaactactgatccttctgtcctcggaggaagagatgttccacacaatgaggctaataaggaggaggagagacaaggcacaatagctgatgcccccgcggccgatgcagctgattcttctgaaagttcccagaagccttctcttggttccatggttggtaaaacacgagaaggtgaagagaaaaattgtgatgatgttagtaggaaaatcagtacgaggaagaacaaattccaaaaagaaacagctgatactggtgccagtggagctctaggcctgcagactctagaccatatggattctaaagtgtcagggagctctgcgtctcagatctctggaggttctgaacttaacaaaatgacaccgagcagttcacttcctgatgatcacaaaccgcagtctgttgaaatggtatcagagggaataagtagtggcaatagagacagagctatcgaattaaaacgagaactggtggtttcagaaactgaaaaagatattcaggaaacaaagcctggatctgttttatttcaagagccatcaaagccttgcagacctattccgcatacggtttcaggaaatggtaggcctaa

SEQ ID NO: 129063 - DNA, 557 bp, Arabidopsis thaliana
  unsure (1)..(557): unsure at all n locations
cagctcccnnnnnnnnnnnnnnnnnnnnnnnnnnnnnnnnnnnnnnnnnnnnnnnnnnnnnnnnnnnnnnnccacgccgtccgaaacccaaaacctcaaactttttgaatccgaaacgagaaaacaaactatgttacagtccattcatcttcgtttttcctccacaccatcaccttctaaaagagaatctctcataattccatcggttatttgctcatttcctttcacctcttcttcgttccgtccaaagcaaacccagaaactgaagcgtctggttcaattttgcgctccttacgaggtcggaggtggatacaccgatgaagaattgttcgaaagatacggaactcagcaaaatcaaactaatgtcaaagataaattagatccagctgagtatgaagctttgcttaaaggaggcgaacaagtgacttccgttcttgaagaaatgattaccctcttggaagatatgaagatgaatgaagcatctgagaatgttgctgtagaattggctgcccaaggggcttttggggaaaagggttgatgaaatggaatcagggttt

SEQ ID NO: 129064 - DNA, 415 bp, Arabidopsis thaliana
accacgcgtccgtcttctctctctctcgcttctcttcattgtttgtgtgtgattacagcgaagaagagagaatccttggagcattccatggattcgcttcgatttctccggattcttcttctatcatcttcgattttactcttatctctccgttctacagtcaccgccggtgatattgttcatcaagacaatttagctccgaagaaaccaggttgcgagaatgacttcgttttggtgaaagttcaaacgtggattgatggtgttgagaatgaggagtttgtgggggttggcgctagatttgggaagcggatagtttccaaggagaagaatgcaaaccagactcaccttgtttttgcaaatcctcgtgattcttgtacaccgctcaagaacaagctttctggagatgttgttattg

SEQ ID NO: 129065 - DNA, 501 bp, Arabidopsis thaliana
caaaatcagagatctggtctgactaaaccagacgaagaaccaatttcaacctcctcgccggcaaaaatggcggaaggaaaagaagctacgacgagttcgctgagtcaaggactcactcctcaccaagaccccgacgatgctcccaagtctcctcccaactctccaaattcttctactcgcaaggcttgttatggggttctacagagttgggtgtctaagaagtttatgactggatttgtcgtactctttcctgtagctgttacattcctcatcacttggtggtttatccagttcgttgatggtttcttcagtccgatatacgagaaccttggtgttgacatatttggacttgggttcattacatctgtacttttcactttctttgtcggaatatttgcttcgtcgtggttgggttctacagttttctggccttggggagccagtttataaggcgaatgccctttgtcaagcacatatattcagcttctaagcaaattagca

SEQ ID NO: 129066 - DNA, 445 bp, Arabidopsis thaliana
cggacgcgtgggtgggatttagggtttaagaaatcttccgagaaaacagagagacagaaaaatggtgatgatgaagaagatgaagggaagccaaagctttagacaaagacttcttctttcaacactttcttcaacacctatctcgattgatgagattcgtgccgacgaaacgattcctggtctccgacctcacgaggttaatcttctccgcctcttagaaattgtcaccgacgacgccgtcgttgatattaacgagaccgggactcgattaaagtacaagcctggaactatagtgggagggaagaacttggttcacagctgctcgctgagtcgatccattggctattatcttgagccattgcttttgttgggattgtttggaaagaagcctctttcgattaggctcaaaggaattacaaatgatccagagacggtagcgttgaca

SEQ ID NO: 129067 - DNA, 463 bp, Arabidopsis thaliana
cccacgctcgtccattactcacctttcagtttcagatgcccaagcaaaaagctccaaggaagcagctcaagtcctataaactcaaacacatcaacaagagtattcaagagggagatgctgtgttgatgcggtcgtcggagcctggaaaaccgtcgtacgtagcgagggtagaggcgatcgagacggacgcgcgtggatcgcacgcgaaagttcgtgtgaggtggtattatcgccctgaggaatctatcggagggaggagacaattccatggagccaaggaggtttttctctctgaccacttcgattttcaaagcgccgatacgattgaaggaaagtgtaaggttcacagtttcagtagctacaccaaacttgactctgtttggaaacggccggcttcttctgtcggtttcgagtacaaattccactaccggcgcgttttatcccttcagagtgcacctgtgtt

SEQ ID NO: 129068 - DNA, 739 bp, Arabidopsis thaliana
  unsure (1)..(739): unsure at all n locations
cggtcgaccacgcgtccgcggaaagcggtagatcgctngtggattttttgaatgctctcacggacggagctaagacgacaggagcgaagctttatgcactgtagtatgcatctaatccatgcgagcaattgctcagttagatgcttccagacttcatcgatctgtctggacatcaatctttcgctcttcgggaaatcctgaaagttcgtgagtgatcaaaatcatgaatttccaacgttcgggaatgagatcatgtcggatccgaccaattagctttgagtttcgacatgggggcttggatccgagccacaggtagtacctctggaatggtcacgaagagccaaacatctatcttattcgagctcgaattcgcagccgagacctgcgtggcagcctggtaagccggcgtggacgcatcaacctgcaccgaagcagagtgcgatccgttctgagatcgggagtggaccgacttcaatggggggtgatattcatggtaagacgtgggggtcagcttcgggatcgggttcgggtattgggattgtgaataaggatcctagtttgtttggagatttggttggttctgcgataggtcaaggtaaatctagtagaaacgtgccgttgaagaatgcaccgcctgtttcggcttcaggttcgagtaagagtccttattctatggggaatttgggtgattcgttgcctaaatctggtaattcgatgaaaactggtggtggtatgggtt

SEQ ID NO: 129069 - DNA, 544 bp, Arabidopsis thaliana
gctctatacgactcactatatggaagctggtacgcctgcaggtaccggtccggaattcccgggtcgacccacgcgtccggttctattgtcggtggagcttgcaagtagtgaatcatcctccactaaatctggatctgtttccagtagcggaagtgtttctaccaagtcgaaagaatcgagtagtagtggaagttctgccagtggaagtgttgctaccaaatccaaaggatccagcggtggaagtgctgctaccaaatccaaagaatctagcggtggaagtgctgctaccaaatccaaagaatctagtggtggaagtgctactacaggtaaaacttcgggcagtccgagcggaagtcctaaggccagcccatctggttcagttagtggcaaatcatcttcaaaaggaagcgcaagtgctcagggaagcgcaagtgctcaaggaagtgcaagtgctcaagggagcgcaagtgctcaaggaagtgcaagtgctcaaagaagagaaagtggggcaatggctatgtccaagagcagagaaacaaagaca

SEQ ID NO: 129070 - DNA, 567 bp, Arabidopsis thaliana
cggacgcgtccgcccacgcgtccgcccacgcgtccgtgcaagtagtgaatcatcctccactaaatctggatctgtttccagtagcggaagtgtttctaccaagtcgaaagaatcgagtagtagtggaagttctgccagtggaagtgttgctaccaaatccaaagaatccagcggtggaagtgctgctaccaaatccaaagaatctagcggtggaagtgctgctaccaaatccaaagaatctagtggtggaagtgctactacaggtaaaacttcgggcagtccgagcggaagtcctaaggccagcccatctggttcagttagtggcaaatcatcttcaaaaggaagcgcaagtgctcaaggaagtgcaagtgctcaaagaagagaaagtggggcaatggctatgtccaagagcagagaaacaaagacatcgagccaaagacaatccaaatcatcgagtgaaagttcatcttctagcacaaccaccacaacagtgaaacaagtcgagagtgagacttccaaagaagtaatgtcattcataatgcaactcgagaagaagtatgcaggaaa

SEQ ID NO: 129071 - DNA, 802 bp, Arabidopsis thaliana
agttctagatcgcgagccggccgcccttatatctttcccagcagcactaacaaagacttctttacagacatgggcgcgtatattatctccactgggaactcttcatcattcgtgtttgatgctgttccatggggtctggaaggtgttcttcagcatataaagcatcgctataacaatcctccaatctacattcttgaaaatggttcaccgatgaaacacgattcgatgctacaagacacaccaagagttgaatacattcaagcttacattggtgctgtcctcaacgctatcaagagtggatcggacacgagaggttacttcgtatggtcgctgatagatttgtttgaggtacaggttggatataaaagcagcttcggaatgtactatgtcaattttagcgatcctggtcgcaagaggtctccaaagctctctgcttcttggtacactggtttcctcaatggtactattgatgttgcttctcaagatactattcagttgcagagaaaatgctcaggctcttcgtccttgtaatctatttaactaaatcatcctagttttgtttggttttcatttcatctatcgtatgaaaaaaaactcagtggtttgataagatttggatatgaataatgaaactgtcttgtgatttttgtcggtcatcataagatttggatatgaatattgttttgttattttccgaaatttgtttttaaactacaaccgaaccattatgatgtgttacctatattggcaatttggcatgtaggtacagtcagtacatggcaaggattactcacttcaacag

SEQ ID NO: 129072 - DNA, 513 bp, Arabidopsis thaliana
atgatactccagctccctacgactcacttagggaaagctgctacgcctgcaggtaccggtccggaattcccgggtcgacccacgcgtccggtggattgttttcatcggcgataagtctcttctcctctgggattgaggttggtggtgtgaggtaaagcttcggtagttagagatgaatgcgtccggcttaactgttactccgcccagatttcactttcgatggcgttctgatcgttttggtacatctcagagaagctctcaagcttttactgttcttagcaaattgaataatcgaaattccgcttggcctgttcttaaaagttctcgtttggcgcttcctacacaaagaagaaatgctatgatcactcgtgccatgagtgcttcctttggtgatatggcagacgattcagctgctatcttccctcggatcaatgtcaaagacccatataaacggcttgggataagccggatggcctcagaggatgagattcaaggagcgaggaactttctcat

SEQ ID NO: 129073 - DNA, 468 bp, Arabidopsis thaliana
ctgagttcatggcaccagaattatatgaggagaactataatgaactcattgacgtatattcctttggtatgtgctttttggagatgatcacctctgagttcccgtatagtgagtgcaaccatccggcacagatttacaagaaagttgttgggggaaagctaccaggagcattttacagagttggagacatcgaggcacagaggttcatcgggaaatgcctcgtgtctgcctcaaagagagtatcagcaaaagaactattgcaagatccaccttcttgcctccgatgagtcctggatggtatacacgagcggctgctgcggaatccaaagcccttcttgaacgagaatgaaatggacacactgaagttggaagatgatgagttaaggaccgagatgtccatcgctgggaagctgggcgctgaagataacaaaatcgatctggaagtacaaatcgcatatgataatggtc

SEQ ID NO: 129074 - DNA, 619 bp, Arabidopsis thaliana
  unsure (1)..(619): unsure at all n locations
cctcatcccattcgaccctctctttctctaatggttcttaatctgttttagcattttgatcatctaaaactttcaatttctctcttgatcctcacttgaattttttgttgtttctctcaaatctttgatcctttcctttgtttttcatttgacctcttacaaaaaaatctggtgtgccattaaatctttattaatggcacaacttcctccgaaaatcccaaccatgacgacgccaaattggcctgacttctcctcccagaaactcccttccatagccgcaacggcgcagncangcaaccgctggacctcaacaacaaaacccttcatggatggatgagtttctcgacttcttagcgactcgccgtgggactgaccgtcgttctataagcggctccatttggttttccttgaaccaccttccttccggngtcggaaacaccacttcggtaggtttgacggcgggcaattcatgtccatgttaacggcggcggtcaaaacaatancccaattatnataatnatnaaagnattaacgggaatttgggccacggnttaatcttcaaaactttanggggccgtnaaattggctttgggnggggaanananggggccncgcnttc

SEQ ID NO: 129075 - DNA, 825 bp, Arabidopsis thaliana
  unsure (1)..(825): unsure at all n locations
nnnnnnnnnnnnnnnnnnnnnnnnnnnnnnnnnnnnnnnnnnnnnnnnnnnnnnnngggtcgagcaccacgcgtccggaagattatccatcgccatgggacaagtctttaacaagctccgaggtaaagagtggagacataagcaggtacaagcgatatgtgatcgtgttttcgatcggttcaagatgcaaaccggaagagccaatcttacgtttgaagagttatacatcgctgttcttctcgtttacaatgacataaacaagagattgcctggtcctcatttcgatccaccttctaaggatctagtcaatagcattatgacggactgtgatatcaacttggatggagaacttgatagggaagagtttgtgaagtttattgagcagattacggctgagacgtttaacgtggttagtcagggtttgatcatagctttgattgttgctcccactgtggctattgcgacgaagaaagccacggaaggtgtccctggagttggcaaagttgtgcagaagctgcctacttcaatctatgcttctcttgtgactcttgcaggttatgtgggtgaattctgattaaagttaagcttctcatattgtcaccataataaatgtgtttataactcaactgctacgaaaatatagaaaccaacgcacggattggttgaacggttggataataactattttttctgagtaaaaaaaaaaaaaaaaagggggccgttttaaagatcagcttactaccgtgctgggaagattagtttttttatgggccctaatttatatcctggcgcgcgttaacaggggggatggaaaaccccggttcc

SEQ ID NO: 129076 - DNA, 517 bp, Arabidopsis thaliana
  unsure (1)..(517): unsure at all n locations
tgatcctnnnnnnnnnnnnnnnnnnnnnnnnnnnnnnnnnnnnnnnnnnnnnnnnnnnnnnnnnnnnnnnnnnnnnnnnnnccacgcgtccggggacacgccacgagtctctctcacttcctcatcctctcttcctccaggttctctcgtctcgggtctctcactagattactctccaaacccacctctctctccggctctttttcttccatttcggtcaccggacaagggttccgatgctgttgctccgtcgccacagatgacacttctccttctgtaaagaaacgtgtggtctctggtgtccagcctacaggttcagttcacttaggcaactatctcggggctatcaaaaactgggtcgctcttcaggatacatatgaaacactctttatcatcgtagaccatcacgcgataacacttccatatgatacacgtcaactaggaaaggcaacaacggataccgcagcactttatctagcatgtggtatagacgtctctaaggcttcagtatttgtgc

SEQ ID NO: 129077 - DNA, 788 bp, Arabidopsis thaliana
  unsure (1)..(788): unsure at all n locations
atgatcttnnnnnnnnnnnnnnnnnnnnnnnnnnnnnnnnnnnnnnnnnnnnnnnnnnnnnnnnnnnnnnnnnnnnnnnnnnnccacgcgtccgctatcaggtgcttcgagccaatgaagcggagtttgaagttatttctcatgaaggaaacaacattgtggatatcaggaaccggtgttgtctctgtcggggttggcagttatatggtttaccttgtgcacacgccgtggcagctcttctttcttgtagacagaatgttcatagattcactgagagctgttttactgtggctacttataggaagacatactctcagacgattcatccgattccagataaaagtcattggagagagctttctgaaggagatccaaacgtgaataaagctgctcttgatgctattataaaccctccaaagtctctgagacctcctggtaggccgaggaaaagacgggttagagctgaagatagaggacgagtgaagcgggttgtgcattgtagccggtgtaaccagaccggacatttcagaaccacttgtgctgcacctatttgatttgcaacggcagcatgctctctttatgtttcaccagnacaatacttgcggnctcaactgagttatcggaaagaagccaaaaactctgctcagtgnctataaaactttgatcttncttgatcaattctagattcagnaattcctgggnccattttcaatgcctgttgtgnaccttcctactattaantccnagttggnagtcngtaacnttnntntntccgaacagttttttnt

SEQ ID NO: 129078 - DNA, 534 bp, Arabidopsis thaliana
  unsure (1)..(534): unsure at all n locations
atgatcctgcaagcatcnnnnnnnnnnnnnnnnnnnnnnnnnnnnnnnnnnnnnnnnnnnnnnnnnnnnnncttctttagtcccacgcgtccagtttaggaaagctctgaaattagggtttttcgtctgcgatcacgatccttcaattactttgcgataatggagaagataagacaaccaacacatgcaggctcttggtataccgataatcctacaaaattgtcatctgatcttgaagaatggcttaatgcaactggtttgaccaaatctcctgatgtacgaggcgtcattgcaccacacgcaggttattcgtactccggtcgtgcagctgcttatgcttttgcaaacatagatcctactaacatttcacggatatttcttcttggtccatctcaccacttttatactccaaaatgtgccctttcgactgcaacagtttataaaacccccattggaaatctacctgttgatgtggagatgattaaggagatacgagctatgggaaaatttggaatgatggatctacgggtcgat

SEQ ID NO: 129079 - DNA, 456 bp, Arabidopsis thaliana
cggacgcgtgggctcttgtcctcttctccttcttcttcttcaacaacaaacttccattgttcttaatacctagctagctcttccccggtttgagattatcccaaaataacaccggttctcgggtaaccggtcggtttttccggagcaaccaacccttttacttctctttatcattgtctcagatcttctgttcttcaaaggcaaaaatgggcataaaccaaagatcattgtgaattagggtttcactgtgtctccaaaatggaagatatacttggagaagaaaatcaaatcacgaaaatatattgatcagtgccttgaaggaaaccaaagttgacaactccaaaaatccatttcgttattaatatctaactgagtgatcatagtcaatcatccataacaatgtaccatccaaacatgtttgagagccatcatatgttcgatatgaccccaaagagt

SEQ ID NO: 129080 - DNA, 649 bp, Arabidopsis thaliana
  unsure (1)..(649): unsure at all n locations
tcnccccgcncaaggccccttagacccccctntttngttcctggaacccctggttaagtcggtgccggcccttctcccccggncagttaagcttggttgatcccgccttttccccgttcatggaagggttccaaactgtactcaatggatttctttaagtgcgacattactgccgaacgtccccaaactatcagcatggattgaggaaattaacaagagcgatggctatgcacagacgaaaatggatcctaaggagattgtggaggttttcaagaaaaaattcatgtaactgtaagcaagcacgaagcagtaaagtgtatgagaccaaaccaccttgtacgaacaggtggtctttggatatgaagaaataagatgtgtacttgaacctgatgatgcaataagatttgtactttaagcagcaacagcttaatctgtattctagtgttgatcaaattatcaaccattgacattgttaatatattactgtatgatagtaatactatcaaaatctcacacattaagaaccagatgatgcaataaggataaggtgtatagttaacttgcnnnnnnnnnnnnnnnnnnnnnnnnnnnnnnnnnnnnnnnnnnnnnnnnnnnnnnnnnnnnnnnnnnnnnnnnnnnnnnnnnnnnn

SEQ ID NO: 129081 - DNA, 538 bp, Arabidopsis thaliana
  unsure (1)..(538): unsure at all n locations
nnnnnnnnnnnnnnnnnnnnnnnnnnnnnnnnnnnnnnnnnnnnnnnnnnnnnnnnnnnnnnnnnnnnnnnnnnnnnnnnnnnccacgcgtccgcccacgcgtccggagtaatccagattctgcattgttgatcgaagtacacaatggcaatgttccaaatatatctgatttgtcatacaaaagcgttcctgtgcacagcgtagaagttggatcctatgttttggttggaactggtgagattgtgcctgtagattgcgaagtctatcaaggtagtgctacaattacaattgagcacttgactggggaagtcaagccgttggaggcaaaagctggagatagagtgcctggtggtgcaagaaatttggatggcagaatgattgtaaaggctacaaaggcatggaatgattcgacgcttaacaagattgtacagctgaccgaggaagcacattctaataaacccaaacttcagagatggctggatgagtttggcgagaattacagcaaggttgtcgttgttttgtcacttgcaattgcctt

SEQ ID NO: 129082 - DNA, 396 bp, Arabidopsis thaliana
tcctttggcctcttttgaggcaatcatctaccctggttaatgatgtcaggggtgatggtttctatgagggtggtgacaatggagatgcactcgaggcacacgaatggaaatgtgttcgttcaatcaatggtgtttggatttttgaagatgttgctaacttcaaggctggtcgaggagttcttgtgaaagccgttgctgtagttgaagcaagtgcggataccgtgttcgaagtacttttgaacattgacaaacatcaaagatacgagtgggatgcagtaacaggtgattcggaaaagatagactcatacgagggtcactatgatgtcatttattgcatatacgatcctaaatatctttcgcgatggcagtcaaagagagattttgtgttctctagac

SEQ ID NO: 129083 - DNA, 513 bp, Arabidopsis thaliana
acgactcactctagggaaagctcgcacgcctgcaggtgccggtccggaattcccgggtcgacccacgcgtccgatacgatattgtgcctgaagcttgcgaaatcaagatttcagttgaagcttcgaagaaaaattcgaatatcaacattcgtagtcttttcgaaaagagatatgctcatcaacttacaatcggcattggtttgatgcttctgcaacagttatgtggaactgcaggaataagttcttacggaagcactctatttaaacttgccgggtttcctgctcggattgggatgatggtgttatctcttatcgtcgtaccaaaatctttaatgggtctaatcctcgtggatcgatggggaagacgcccacttcttatgacttcagcgttggggctgcgtttaagctgcatcacattggcagtagcgtttggagtcaaagatgtcccgggaatcggaaaaattactccaattttctgtttcattggaatattgtcgtttacgatgatgttcg

SEQ ID NO: 129084 - DNA, 656 bp, Arabidopsis thaliana
  unsure (1)..(656): unsure at all n locations
accacgcgtccgcccacgcgttcgcccctacggtctcatcaaccaaattcgctttcgccgcctttccacaagcaatcatggtgctccaaaacgacatcgatctccttcatccgccacctgagcttgagaagagaaagcataagctcaagcgtctcgtgcaatctcccaactccttcttcatggatgttaagtgtcagggatgcttcaacataaccactgtgttcagccattctcaaactgttgtggtatgtggaaactgtcagacagttctgtgccagcccaccggtggtaaagcgaggctacaagagggatgctctttcaggaagaagtgagattgagatctcacgaatcattcatccgttcgcagatgttttgctttagtagttttgatatctatgacgtttttctgcttatgagaagattttgaatgcatgataaaactactagctgagtaattgttcagaacttggtcttgttgaaacagaatatgctttcattttaagtttaaatctttctcggattgcatctaaaaaaaaaaaaaaaaaaaggaaaaaaaagcggccgctctagaggatccaagcttacgtacgcgtgcatgcgacgtcatcatcttctatagnnnnnnnnnnnnnnnnnnnnnnnnnngagagtatcat

SEQ ID NO: 129085 - DNA, 580 bp, Arabidopsis thaliana
  unsure (1)..(580): unsure at all n locations
attccgtatcnaaaagccggagaacctcagatcttaaaggcatcgatgtaaancgcatgtatctccgtcaaacgacgcgttcgtgatggaancgtggaggaaagancttggaattaacgatgaggtaatgttgctatccgatggaaatggcgaattcacagggaagcttggtgttgaattggatttgagggataagcctgtgggacttggagttaggtcaaggagatatgcgattttggctgatgatggtgttgtgaaagttctgaatcttgaagaaggaggtgcttttactaatagtagtgctgaggatatgcttaaagctctctgattcttatgattttctcatcaatttcgtcttcttctctgttttgaattttctttactctgttttgtgttgctgtttctttaaatctacgaatcattatcggatttgtaatggaataatgaagttagaggttctgtgttcgcagatgttttgctttagtagttttgatatctatgacgtttttctgcttatgagaagattttgaatgcatgatnaaactactagctgagtaattgttcagaacttggtcttgtt

SEQ ID NO: 129086 - DNA, 516 bp, Arabidopsis thaliana
  unsure (1)..(516): unsure at all n locations
ccggcannnnnnnnnnnnnnnnnnnnnnnnnnnnnnnnnnnnnnnnnnnnnnnnnnnnnnnnnnnnnnnnnnnccacgcgtccgggatctgttctataggctcgtacctctgtttccttgatttctaaggagacaggcccttaaccctggttgatgaaccatggccgtgcgatcagagcgtgattgacggctacgatcgtcttaggacgcatctggtgctgtagaggatcgttactcggctcggttctaccttgccggggtggttgcacggcggtctgacaggttccattttttttcactccttatattgtcttgtgggatgttttgagatgaccaccaaatttgatattcgagcacgatttttaaaattttacagtaatgtgggtatttcgtcccaagtcaaccactttatatgtacaactctacattccctctacgaagatagtgcatcccaataatgagcagactatgagaagctagcagagatattcttctttttttggtttaaagaaaagc

SEQ ID NO: 129087 - DNA, 744 bp, Arabidopsis thaliana
cggcactaatacgactcactaagggaaagccggtacgcctgcaggtaccggtccggaattcccgggtcgacccacgcgtccgctgaggttcattttcgtgacatacggggtttctatgtgattactgagaactttgcctttcgcgccggttctcgttgattttttttttcgatttaggtatttccatgtgagactaacatttgtggctcgtttactcgcagatcaaagggacagagaacgtgtctgggccacctactaggatggataacagttctgatgaagagtcagagatcagtgagtctgagatagatgtctattatgaaaaaccttacgagaaactgatgaatggggattacaaggttaaggtgaaggacacattcaggtgtcccttttgcgctgggaagaagaagcagcattacaagtataaggagctacttgctcatgcgtctggtgttgccaaaggatctgcgagtagaagtgctaagcaaaaagcaaatcactttgccttggctaaatacatggagaacgagcttgctggtgatgctgatgtcccacgcccacaaatcccctcttcctcaacggtgcagtctcaggcagttgtggatgacatttatgtctggcctttggatggggattgtcatcaaccctgtgagaagaactgataacaagaatgtgctccttgatttcaccctactggttgaagaagcttcactaggttcaattcctcatgataagaaaaccctt

SEQ ID NO: 129088 - DNA, 413 bp, Arabidopsis thaliana
cgtatctcgcggggaagaagaagaaaagactgctttttctcaaaaccctaaaatctctctctccggatccatttctcgaacatggcgtctattgttcaaccatcgcctactttcccggcgctaaatctccggcgttcttctctgattcgtccgccttcttccgttcgatttcctcttaagtgtaacgcggcggatccgtacaagttcgacggcggaaactctgccggtttccatctgcttactggcgacaccgttccggctagcttttcgaggacacgtttggaagattcgatttatcagaacaccacacgacttcgtatcttttccggcactgctaatcctattttggctcaggagatttcttgctatttgggtctggaccttgggaaaatcaagattaaactctttgctga

SEQ ID NO: 129089 - DNA, 640 bp, Arabidopsis thaliana
  unsure (1)..(640): unsure at all n locations
tgatcctgccagcatctatactgactcactttagggaaagctggtacgcctgcaggtaccggtccggaattcccgggtcgacccacgcgtccggtaaaaaccttcacttacaccctgttttaatggcgtggggttacttcccggacaaggaatcttctaacatcagtttcaagggaaattcatatgaaggcgggatcataacatcagtgagcaaagtgttatcagaagattctgaagtcagagcaatcatagagacaccgcaactaggaccaggttcgttctccgttttaactccttggacctctgggcttgacatgaagaaaagaatggctagatactcaagaaccgcgagtctcataaccatagttagagaccgcgggtcaggagaagttaaaaccgaaggcagaataaactacaccgtggacaaaaccgacagagataatctcaaagctgggcttagagagtcgctaaggatactaatagcagctggagcagaggaagtgggaactcacagaagcgacgggcagagactaatatgcaaaggtgtcaatgagaattcgatccaagagtttttagactcggtgagtacagaggaaggagcanagggaatgactgagaaatggaacgtttatagctcagc

SEQ ID NO: 129090 - DNA, 840 bp, Arabidopsis thaliana
  unsure (1)..(840): unsure at all n locations
atacgactcacattagggaaagctcgtacgcctgcaggtaccggtccggaattcccgggtcgacccacgcgtgcgcgcacttgcagcagaaatttcagctttgaaggtgcaaagagagaaggaggtacgatacttcagggatgaaaacaagagtctccagtcacaactaagagatactgctgaagctgttcaagcagcaggagagttacttgttcgatttaaagaagctgaagaaggattgacatttgcacagaaacgagcaatggatgcagagtatgaagcatcacaagcatataaaaaggtggacaagttgaagaggaaatacgaaaccgaaatcagcactgtaaaccaacaacataatgcagagccacaaaatcccatagaatctttgcaagcttcttgtaatgacgatgctatggccaaatatgatgaaccatcagctagtgatggtgataaccaatggagagaagaattccaaccattgtacaagaaagacgaagagttgtcaaagctcgctgaaaccctcttggttctcggggtatggaccgaatgcaaacatataatttcgtttccacaacattatttttcctgtaatgtgtaataggaaaaaaaagaccatgttggggtctgatccgaattctgtgagatatatctgaagcttgtactcttttcattgtatttctaatgtgttacaattaaacatttttttgtactcgtccatctctcatctgaaagaggtctttgtttgattaaaaaaaaaaaaaaagnnnnnnnnnnnnnnnnnnnnnnnnnnnnnnnnnnnnnnnnnnnnnnnnnnnnnnnnnnnnnnnnnnnnnnnnn

SEQ ID NO: 129091 - DNA, 531 bp, Arabidopsis thaliana
ctacaatacgactcactttagggaaagctcgtacgcctgcaggtaccggtccggaattcccgggtcgacccacgcgtccgattgattcctctgcttccggttcaatgtcgctgctaaaccaactcttcaaccgtgggatctttggcgccaaatgcaagacaagcttgaacttggcgatagctcgaatgaaattgctgcaaaacaagagagatatgcagcttaaacatatgaagaaggagatagctcacttcttgcaagctggacaagaacccattgctcgaattcgggtggagcatgtgatcagagaaatgaatttatgggcagcttatgagatattggagctattctgcgagtttatacttgctcgtgttccaattcttgaaagtgaaaaggaatgcccgagagagttgagagtggctattgctagcattaatcttctgctgcctccaagggtgctctgaaggtccccatcttcttcaaataaagaatctgttgtgtacaaaatatggaaaagaatttatcatggttgct

SEQ ID NO: 129092 - DNA, 556 bp, Arabidopsis thaliana
atgattctccagctctctacgactcactattgggaaagctggtccgcctgcaggtaccggtccggaattcccgggtcgtcccacgcgtccggaaaatatgaagcacatacgacacggtcatgggaatttgtaggattggaggaggaagaaaccgacagtgatgttccacgtcgaaaaaatgatgccgatgatcggtttcgtgtgggaagaaattttttgaagaaggcaaagcatggtgatggaatcatcgtcggtgttctcgacagtggtgtgtggccagaatcaaagagtttcaatgacaaaggaatgggaccagttccaaaatcatggaaaggaatctgccaaaccggagttgcctttaactcttctcactgtaaccggaaaattattggagcgaggtattacgtgaaagggtacgaaagatattacggagcgttcaacgctacagcaaacaaagacttcttgtctccaagagatcccgacggacatgggtcccacacagcttctactgccgttggccgtcgagttctcggtgcatccgcacttggcggtttcg

SEQ ID NO: 129093 - DNA, 417 bp, Arabidopsis thaliana
cttccgttcatgggcggaagaaaaccaggggtatatttgtctatttgggagaacataaaggggatggggcctttcatgaaatggaagaacatcatcattcttatcttcaatcggttaaagaatccgaagaagacgctagagcatcgctcttgtatagctacaaacatagcatcaatggcttcgcggctgagctaacccctgaccaagcctctaaactagaaaaattagcagaggttggttcagtattcaagagccatccaagaaaatatgaagcacatacgacacggtcatgggaatttgtaggattggaggaggaagaaaccgacagtgatgttccacgtcgaaaaaatgatgccgatgatcggtttcgtgtgggaagaaatttttgaaaaggcaaagcatggtgatggaatcatc

SEQ ID NO: 129094 - DNA, 586 bp, Arabidopsis thaliana
taaatttttattttgtctcttatctactttagagtttagaagttccatattaaaaattttagttatgaaacaatgggaccaaaaaattgccaagattgttcttgaatcttacttgtgcattgtaaatagagtctgttagcaaactttgaccattgagtattttgtgctttgtgtctagattcttgaatcttattctatggttattggacttcataaatccattttgttctttagtagttggtacccaaatattgatttttcaatagtttcagaaaacagaccaacatggaagatcggtgcttgatcaagaacgatatcactgaattgattggtaacacaccaatggtgtatctgaacaatgttgttgatggttgcgtggctcgtatcgctgcgaagcttgagatgatggagccttgttctagcgtcaaagacagaatcgcgtatagtatgatcaaagatgcagaagacaaaggattgattactcccggaaaggttaatatgaacatttaaagttatcataaaagtttctccataatttataaagaatacatagatggaatttaattgtttttgattatagagtaca

SEQ ID NO: 129095 - DNA, 992 bp, Arabidopsis thaliana
  unsure (1)..(992): unsure at all n locations
nnnnnnnnnnnnnnnnnnnnnnnnnnnnnnnnnnnnnnnnnnnnnnnnnnnnnnnnnnnnnnnnnnnnnnnnnnnnnnnnnnnccacgcgtccgcaaaagtgcaaggatgttggtgctacgctggttatttgccaatggggattcgatgatgaggcaaaccatctattgatgcacaggaatttgcctgctgtcagatgggtagggggtgttgaattagaacttatcgcaatagccacaggcggtagaattgttccaagattccaggagttgaccccagagaagttagggaaggctggcgtggttcgtgagaaatcttttggcacaacaaaagaacgaatgctgtatattgagcactgtgcgaactcaaaagctgtcactgttttcatccgtggaggtaacaaaatgatgatagaagagacgaaacgtagtatccacgatgctctgtgtgtggctaggaatctcatccgcaacaaatcaattgtttatggaggtggggcagctgaaatcgcttgctcacttgcagttgatgcagctgctgataaataccctggcgttgagcagtatgcaattagggcgtttgcagaagcttttggactctgtccctatggctcttgcagagaacagtggattacagcccattgagacactttctgcggttaaatctcagcaaattaaggagaatattcccttctatggaatagattgcaatgacgtgggcacaaacgatatgagggagcagaacgtgtttgaaacattgatcgggaaacagcagcagattttgctagctacgcaagtcgttaagatgattctaaagatcgacgatgtcatctccaattctgaatactgatgtgttgctaccattgtactaccctttggcttcttgggtgttttttgtttgctttctattagcttttgatactcttcgacatcgttttccttaacttgttcccttcgttttgcaaccttttctataagaacatcgtcaggtctt

SEQ ID NO: 129096 - DNA, 498 bp, Arabidopsis thaliana
  unsure (1)..(498): unsure at all n locations
cannnnnnnnnnnnnnnnnnnnnnnnnnnnnnnnnnnnnnnnnnnnnnnnnnnnnnnnnnnnnnnnnnnccacgcgtccgggcattttcttgcccatcatcaagtctctatcgctctcggctggaagtaaaccgaatgattcttcttcgaggaaactaggctcttacttgattcaatctcaattccagtgcgccggaaactctagtgcgcttttcttgactgctgcagctcaaaatttgctgtgtctcaagttagcagaggagcttggagtagtgatctcaaacccgtgggtttcttggtttaaggctgctagtctacctgcaatcatatcacttctttgtactccacttatcctctataagctttatcctccagaaacaaaggacacacctgaggctccaggtattgctgcaacgaaactcaagcaaatgggccctgtcactaaaaacgaatggatcatggtcggtacaatgcttcttgctgtcactctttggatct

SEQ ID NO: 129097 - DNA, 1040 bp, Arabidopsis thaliana
  unsure (1)..(1040): unsure at all n locations
cagctctcctacgactcactattgggaaagctggtccgcctgcaggtaccggtccggaattcccgggtcgacccacgcgtccgcccacgcgtccgcccacgcgtccgattgcaacatatattgttgaaggaggaacaactcgaacatatacagtcataaagaatatgtgccacactgcaccagatgtattgagagctctattatctcatttaaccaaggccattaccgagtatgtggtttaccaagttgagcacggagctcactgcatacaaatattcgattcctggggtggccaactgactccggagatgtgggagcgctggtccaaaccatacattgaagagatcatacatgctgtaaagaaaagatgtccagatacgccgatagttttctacatcaatggaaatggtggccttcttgagcgaatgaaaggaactggagctgatgttattggacttgactggactgtagatatggctgatggaaggaggcgattgggaagcgaggtaagtgtgcagggaaatgttgatccagcttacctattctctccgcttcctgctttgaccgaagaaattgaaagagttgtgaagtgtgctggaccaaaagggcatattctcaatctaggacacggtgtcttggtagggacaccagaggaagccgtggctcatttctttgaaaccgctagaaacttggattaccgaacacttttccaaaatcatgttcctgcagaaaaagctgaacctgaattggttgtctgacaaatggtgactagacaagtgcctacgccgaagaatttgctgtttaagttttgtgagcatatgtctgaatctctttcacttggtccaggaatgagagcaaaagtgccatgtctgacccttaagcgatgctagagttggtaacctgctatgagatatatgcccagctgtccagtttttgtttggcttaaaaaaaaaaaaaaaaacaaaaaaagnnnnnnnnnnnnnnnnnnnnnnnnnnnnnnnnnnnnnnnnnnnnnnnnnnnnnnnnnnnnnnnngtcccc

SEQ ID NO: 129098 - DNA, 519 bp, Arabidopsis thaliana
  unsure (1)..(519): unsure at all n locations
ccnnnnnnnnnnnnnnnnnnnnnnnnnnnnnnnnnnnnnnnnnnnnnnnnnnnnnnnnnnnnnnnnnnnnnnnccacgcgtccgcggacgcgtgggggataatcggttgggcgttgattctggagtataccattggtggctcagctgttgcccgtggcatatcccctaatctggcactgatttttggtggtgaagatggtttgcctgcaattttagcgcgccaccagatcccaggccttgatattgttgttgatccatgtgctgctattcttgtgtttgttgtaactggccttttgtgcatgggaataaaggagagcacatttgctcagggaattgtaactgcagtcaatgtgtgtgtcctgttatttgtcatagtagctggcagttatctcggcttcaagacaggttggcctggttatgaacttccaacagggttctttccattcggagtagatggaatgtttgctggttctgctacagtcttttttgcattcattgggtttgattcggttgcaagta

SEQ ID NO: 129099 - DNA, 723 bp, Arabidopsis thaliana
  unsure (1)..(723): unsure at all n locations
cnnnnnnnnnnnnnnnnnnnnnnnnnnnnnnnnnnnnnnnnnnnnnnnnnnnnnnnnnnnnnnnnnnnnnnnccacgcgtacgcccacgcgtccgtttttttttttttttagccaacaagctttgatatgactttataactggcatcgcagcaccttatcgagtaatgcagttcatatttacacctttcttttacacaaaaccaatcccactccctttctcatcatccacacaaagtagccggtaaagcaaaaaagctcttatacacaaagaaagcaagaattgtcccaaaagaaaactctcatacatcactttgctgtttctttcttaacttcgttattcgtccagactacttgctccagagaattagagagcttcttatagaacttgtgaaattcgagagtgtctcctttcgacttcgatacttgaaccatatgaagacttggcgctacttggaatatctctgtcgctacattgagattcccctttcttccagccttcacattctcaagcctcatccttgtagttctcctttagaacatcgaaaccgggagggtttggaggttcttccaacctccccgntganccattgggntccnctaatggaacctggttccccctaaatccngnntgggtaaaagntccnanggaaggccctggattgaatggnngaggatgntgcgggggggcttccctccgaanaggggcccanggctgaaagnac

SEQ ID NO: 129100 - DNA, 821 bp, Arabidopsis thaliana
  unsure (1)..(821): unsure at all n locations
cagctacaatacgactcactctagggaaagctgcgtacgcctgcaggtaccggtccggaattcccgggtcgacccacgcgtccggtcagttgattatggtaactacaacaatagatcttcttctcatcaatccgcagaagaagtaaaacctggctctgaaaacatagaaagctccaatctttatgggattgaaactgacaatcaaaacgggcagaacaagacatctgatgtcactacaaacaccagtcttgaaaccgtggatcatcaagaggaagaagaagagcaaagacgcggtgattcgatggctggtggtgcgcctgcagaggatggatataactggaggaaatacggacaaaagttggtcaaaggaagtgagtatccgcgaagctattacaagtgcacaaacccgaattgtcaggtgaagaagaaagttgagagatcaagggaaggtcacatcacagagattatatacaaaggagctcataatcatcttaaacctccacctaatcgccgctcagggatgcaagtagatggaactgaacaagttgaacaacaacaacaacagagagattctgctgcaacgtgggttagttgtaataacactcaacaacaaggtggaagcaatgngaccaatgtcgnagaggggatcttcgggattcgagtatggaaccaatctggttcaattcangctcaaaccggggncaaatacgggtcaggtntcctttggttntggttnatcttcttcacaattntttattgttnaggttgagnttntngnggcccatgnagtntttttttgggtccnttnngtggggngtngg

SEQ ID NO: 129101 - DNA, 527 bp, Arabidopsis thaliana
  unsure (1)..(527): unsure at all n locations
tgtcctccnnnnnnnnnnnnnnnnnnnnnnnnnnnnnnnnnnnnnnnnnnnnnnnnnnnnnnnnnnnnnnnnnnnnnnccacgcgtccgcggacgcgtgggcagagactctccttccatctacccttagagggcgcgcctcccgtgcgccttcttaactggttatggaatccaaatgtctcatgttcgtttccattgtatctgtcttcttcatggttgttaatggcgtatcagagaccgaaactctcttgaaattcaagaattctcttgttattgggagagcaaatgctttggagagctggaatagaaggaatcctccatgcaaatggactggtgtcttgtgtgatagaggctttgtttgggggttacgactagagaatcttgagctctctggctctatcgacatcgaggcgttgatgggtttgaattctctaaggtctcttagtttcataaacaacaaatttaaaggtccatttccagagttcaagaaacttgttgctttgaaatcactttacttgtcaaacaatc

SEQ ID NO: 129102 - DNA, 499 bp, Arabidopsis thaliana
atacgactcacttagggaaagccggtacgcctgcaggtaccggtccggaattcccgggtcgacccacgcgtccgagcaaatgcaagaagaagaagaagtgtctctatgtgctctgtctgaatctgctaacggcgttttcaggaactttgcagctgacttctgactacgttcctgataaattcttagtcttcctctctctctcatagtcagaattgtttagtatctctgtcttcgggcatcgtgttagaataattcggataagctttctatctgtttggaatagcttgccgttttgttattgttgtccaccacttgttcgatgaaatgactgtgtgaaggttttaattgcttttcgacggtgttattcgcctctctatggataacgaagttgcatttcttgtcaaattgcaatccagaacaaaaatttgcattcctgcttatgtgaaatcttcagaacccagtaagattatgttgcgaaaaatcaggactgtgttagctc

SEQ ID NO: 129103 - DNA, 506 bp, Arabidopsis thaliana
  unsure (1)..(506): unsure at all n locations
nnnnnnnnnnnnnnnnnnnnnnnnnnnnnnnnnnnnnnnnnnnnnnnnnnnnnnnnnnnnnnnnnccacgcgtccgcccacgcgtccgcccacgcgtccgctgaaaaagagcaagagtttgccagctgcaatcaacgtgctcgccaagtccctagagtacactgtcaagagcaagtcctataagcttaataaggacgaagaagagaggttactaaaagaaaagatagaagtggttctctcggctgagcggggtaatccatccgaccaggaatctagttctgagagccctaagaaagcaagtggagaaaatccaatcctgcttcttgcatacaagctgttcaaaaccgatggtccattgaaggatacaatattggattgtttttggcatagcttggacttctttgagcattgtggctgtgtttactaccgtgacctgatcacacaatggatacttgaaggctactttgatcctgttaggtctgccgaaaaggcgtaccaggatggtc

SEQ ID NO: 129104 - DNA, 505 bp, Arabidopsis thaliana
ccggcactaatacgactcatatagggaaagccggtacgcctgcaggtaccggtccggaattcccgggtcgacccacgcgtccggaacaatcccagaggtggagatacttgcaagattaccgttgagaagcattgcgaggttcaaatcagtatgcaaaagatggaaatcagtaatagaatcggactacttccgacgtctcttcggatcttttcaccgaagctcctctacctcatggtcgatcatgttcagaacagagtatcttcgtgagatgacacaagccataggcttccatggatgcaaaacatgggatcttcccaaatctctagtttcatatatcatgccatttcaagaatatccgaatctccctacctctgaatactactatatagcttcttccaatggattgatttggatcgatgtgcttgtttctcgcatcaagaacaaggtttatagttataaatctttcgttgggaatccagttttacaagaatgggttgagatccct

SEQ ID NO: 129105 - DNA, 565 bp, Arabidopsis thaliana
atgatactccagctccctacgactcactatttggaaagctggtccgcctgcaggtaccggtccggaattcccgggtcgacccacgcgtgcgcggacgcgtgggccagagcagctgctgtgatgcaggtcacagatgacttaaccgggtgtggcatttctgatccagagaggttgtctcggatcaagaaccttctcagaaatgtgcttaagggaagcaacacaccaagggaagctaaaaccgtagtgtctcatggggaggtccacacggataggaggcttcatcagatgatgtttgaggatagagactatgaacaccgtttggtggatgatgattcctctatccaagatgaaaggcaaagaccagatgtttgtgttgataattggctcgataaggattactctgtggtcacagttagatgtaaagacagaccaaagcttctgttcgacacagtctgcactttgactgatatgcagtatgtggttttccatggaagtgttgatactgagggcaccgaggcgtttcaggagtattatgtgagacatatagatggatcccctgtgaaat

SEQ ID NO: 129106 - DNA, 548 bp, Arabidopsis thaliana
  unsure (1)..(548): unsure at all n locations
atgatcctgccagctcnnnnnnnnnnnnnnnnnnnnnnnnnnnnnnnnnnnnnnnnnnnnnnnnnnnnnnnnnnnnnnnnnnnccacgcgtccgcggacgcgtgggcggacgcgtgggcaatttgatggtcactaacaacgaaggtcaacatttccccagttgcaacaccaagagaaccttgtctgtagcatctgagactaatcctcatcccatcgatcagcttctttttgatcgtgtcttatgtgatgtcccgtgtagtggtgatggtactctgcgcaaggctccagacatatggcgaagatggaattctggatctggcaatggacttcatagtctacaggttgtgcttgccatgagaggtttatctctgctaaaagttggtgggagaatggtatactcaacctgctcaatgaacccaattgaagatgaagctgttgttgctgaaattctgaggagatgtggatgctctgttgagcttgtagatgtctcagataagcttccagaacttattagaagaccaggtcttacgaaatggaaggtgcatgac

SEQ ID NO: 129107 - DNA, 530 bp, Arabidopsis thaliana
  unsure (1)..(530): unsure at all n locations
cnnnnnnnnnnnnnnnnnnnnnnnnnnnnnnnnnnnnnnnnnnnnnnnnnnnnnnnnnnnnnnnnnnnnnnnccacgcgtccgatttgtggataatcgattacttgatctgacctgagaaaaagtagaaacctttgagtagagctggttctattacaaagttgtgtttgggagcttgctacaagaccattggatttcttcactttcttcatttgttgagtctgctacaagatcaaggatctgttgattttgggtatttgatcaaaatctgaaattgatcttgtggaagtaaggttgctgtagttgtcaaggtctttggtgaagtttgtttctcacaaagtttgatccttgaagttggtctctattgatcttagatctagtgtgaataaaggaagtccttggaaagcagcagacttgaaaacgctatcacaagaggaattgcttcctgaagagactgtctggattgctgatagatttatatgattcagagaagaactcaccgatgagtatggatttttcacctttgttaac

SEQ ID NO: 129108 - DNA, 664 bp, Arabidopsis thaliana
gattccctcgtccactccagtactcgtcgtccgacccaagtctccttaactgtatcacagcgactgctattttacgagcagagacatttgggatcccgatacctgagtggactaagaacccaaaggaagcagcagaagctgttgacagagtgatagtcccagactttgagccaaggcaagatgcaaagattgtgactgatgagaaagctaccactttaaccactgcttcggtggacgacgctgcagtcatcgacgatctcattgctaagatcgaccagtgtaggcataacttgtcgccagacttcaggatgaaacctattcagttcgaaaaggatgatgatacaaactatcacatggatgtgatagcaggactagccaacatgagggcgagaaattacagcatccctgaagtggacaagctgaaagcaaagttcatagcagggagaatcatcccagccattgcgacttcaacagccatggctactgggctggtctgcctcgagctgtacaaggtccttgatggaggacataaagtggaagcttacagaaacacatttgccaacctggcacttccactattctccatggctgaaccacttccaccaaaggtggtgaagcaccgtgacatggcttggacagtttgggacagatgggttctcaaggg

SEQ ID NO: 129109 - DNA, 835 bp, Arabidopsis thaliana
  unsure (1)..(835): unsure at all n locations
nnnnnnnnnnnnnnnnnnnnnnnnnnnnnnnnnnnnnngtcgattcctcaccatctccattgctnctgaaatctttttcgcgtccgcggagcttttatggctaactgcaatgttaccacaagtgaagccatcgccttgcgatcccacagcagccggaagccactgtgggtcttcgaccgcatctcagctggctcttttgtattccgcatttgcccttatatcgatcgggtcaggcgggatcagaccatgttccttagcatttggagctgatcaactagacaacaaagagaacccaaaaaatgaaagagttctcgagagcttctttggacggtactacgctacctcagatggagaggttctcatcgcgttcacgggtattgtatacattcaggagcatctcgggtggaaaatcgggtttggagtacctgcggtcctcatgttgatcgctgctttgctattcattcttgcgtctactctctatgttacacgtggtgggaccaagagtttctttaccggtttagctcacgcgattgttgcagcttacaagaagaggaagctaagtctaccaaaacatcatgactcctttgattgttattatcaacatgaaaaattctaaaatcaaggctcccaagtcaaaagtttgaggttttttgaaataagtcttgttttaataacttcctcctctaaggagggagattacgggtcaatcattggtttatggcttactaaattctcaatgggaaaggccttattgccctaacctatatccatatatctactaatgattatctcttcatctctcatataattgaatgactacttttttcttgacacg

SEQ ID NO: 129110 - DNA, 759 bp, Arabidopsis thaliana
  unsure (1)..(759): unsure at all n locations
cnnnnnnnnnnnnnnnnnnnnnnnnnnnnnnnnnnnnnnnnnnnnnnnnnnnnnnnnnnnnnnnnnnnnnnnccacgcgtccgacaaagagaacccaaaaaatgaaagagttctcgagagtttctttggttggtactacgcttcctcagctgtggcggttctcatcgcgttcacgggtattgtatacattcaggagcatctcgggtggaaaatcgggtttggagtacctgcggtcctcatgttgatcgctgctttgctattcattcttgcgtctcctctctatgttacacgtggtgtgaccaagagtctcttcaccggtttagctcaagcgattgttgcagcttacaagaagaggaagctaagtctaccagatcatcatgactcctttgattgttattatcacatgaaagattctgaaatcaaagctccaagtcaaaagttgaggtttttgaataaagcttgtttaataagtaaccgtgaggaggagattgggtcagatgggtttgctttgaatccatggaggctatgtacaacagacaaagttgaggagcttaaggcattgatcaaagtcatacccatatggtccacaggtataatgatgtccataaacactagccaaagttcgtttcagttactgcaagcgtcttccatggacaggcgtctgtaccgtcatggttttaagctttaagctccagttggatcatttctttatggtcactattatagtttttagcccttatgtttcattttatttgacct

SEQ ID NO: 129111 - DNA, 499 bp, Arabidopsis thaliana
  unsure (1)..(499): unsure at all n locations
nnnnnnnnnnnnnnnnnnnnnnnnnnnnnnnnnnnnnnnnnnnnnnnnnnnnnnnnnnnnnnnnnnccacgcgtccgaagaaaattccgaaattgtttcgaaaaatcctgaagaagaagaggtctttgaatcaacaacagttccatgttgtgcccaacgtagacaccaagtgtttaccattttcaaacgcaaaagccagttttccggaaacagaggtttcgggtttgttcatctacttctggtggtgaggatgatagattcaaagtagagtacactccttggcttatcgttgggttgggcaatccaggaaacaagtatcatggaacaagacacaatgttggtttcgagatgatcgatgtgttggctagaaaagaaggggtgttgatgaacactatacagtccaaagctctaatcggaataggtgctattgaagatgtacctatcttgttggcgaaacctcagacttatatgaacttcagcggcgaatcggttggatctt

SEQ ID NO: 129112 - DNA, 765 bp, Arabidopsis thaliana
  unsure (1)..(765): unsure at all n locations
gccttggnctttaattcgtganttnnccaagcctttcngncctgnagnncttttntgcgaattcctgtggcncnaantnacccntttgatnccaaggggcaaccccttccaaaccgcccctgggttttggcaatgccaaattngcccccacatnncaccgaaatgngancatagagttttgagggnattcctaaagngttaccccggaggccgataatggatgatccattcatcagaaactacatggaagatctgctgaagaaagtgagaacacaagtgtttctgaagctgatttagccatccacaaagatagggattccgttcatatcaaaggaactgaacgtgccagagacggatgtgacggagttactagtgtcgctgatactcgacagcagaatcgatggtcacattgatgaaatgaaccgttacttactgagaggcgacagtggcaatggaaggaagttgcataaggcggttgataaatggaactcacagctcaagtctctttcttcaaatatcaccagccgagtctgttaacttggaaacctctcttttggatagattttgtgatttggcgttgattctttgtggattatctgtttctcttcacatagctggatttgatggagtttataatccacttcaatgccaagaaaaaggatttgaaactaaaaaaaaaaaaaaaaaaaaaagggcggccgctctagaggatccaagcttacgtacgcgtgcatgcgacgtcatagtaacttctatagtgtcgcc

SEQ ID NO: 129113 - DNA, 523 bp, Arabidopsis thaliana
  unsure (1)..(523): unsure at all n locations
cgtatagccggtttatgaagaacaagctggaggcatatgtggatttcccgctagataatcttgatctatcaagctacatctcctacaagaatggtcagacaacatatcgttacatgctctatgcgattagcaatcactatgggagcatgggaggtggtcattacactgcatatgttcaccatggaggtgatcgatggtatgactttgatgatagccatgtccaccaaatcagccaagaaaagatcaagacctcggctgcttacgttctgttctataaacgccttgtagactaaagaaactgaagcggaaaagccaagaaagaggtatttgcatttttgccgggtttggcttatttaaaaaccatcattggcttgattctaattcactccaaggtcaagatgaaagccagctctccgttgaggctaattttccaggagggggggggnagattttggggggggggcaaagacccgggggcatttttcggggatttttttttcttncaaattnggtctgtnttttt

SEQ ID NO: 129114 - DNA, 667 bp, Arabidopsis thaliana
  unsure (1)..(667): unsure at all n locations
nnnnnnnnnnnnnnnnnnnnnnnnnnnnnnnnnnnnnnnnnnnnnnnnnnnnnnnnnnnnnnnnnnnnnnnnnnnnnnnnnnnccacgcgtccgatgactttgatgatagccatgtccaccaaatcagccaagaaaagatcaagacctcggctgcttacgttctgttctataaacgccttgtagactaaagaaactgaagcggaaaagacaagaaagtggtatttgcatttttgccgggtttggcttatttaaaaacatcattggcttgattctaattcactacaagatcaagatgaaagcagctctgcgttgaggctaatttacagaagagagagagagagttgggaagaagagcaaaagaccgagaggacatgttgcggggaatttattttattcttacaaaaattggtatctgattattttattaaccatattccatttgggaattggaggatagagaaaagcccttttgtgggaaaagggtttaaaatggtggttaggttttggggggcaggtttgggttttggtggcccaaaaaaaattaaaaaaccttttccctattttaaatccaattttttggttttggccaaaaaaaaaaaaaaaaaaaaaaaaaaaaagggcggccggtttaaaagaatccaggctaaggtaggggggcatgggagg

SEQ ID NO: 129115 - DNA, 623 bp, Arabidopsis thaliana
  unsure (1)..(623): unsure at all n locations
atgatactccagctccatacgactcactatatggaaagctggcccgcctgcaggtaccggtccggaattcccgggtcgacccacgcgtgcgctttctcaccgctttcttctcttcattgaacaaaaaaaaaagctcttaacttttttttcttctttaggtaaaatttgacaaaagctctcaactttcaaactctgtttcttcatcatcatcatcatcaccatggacgccctgcttcaagtttcagttgatgggtttagatttgagaacggatctggatcttgctgcaaacccagaaacaatctcgaatctgggaacaatctcttccctgatttccacgagtctcagaatcagtcttcaccaaacgattcacctccaacggtgtgtttggataactctcctggtctgaagtacatcaatgatatgttgatggacgaagaagacttcgtaggtatatctcgtgacgatttagctttacaagccgctgagagatcccttctacgggcataattcaaccagcaatcttccagaatccgtgatccagaccaactaggttcctccttccgnatnaaaaacttccgggtgncccaagnatttnttggttttncccagnancaacaaacag

SEQ ID NO: 129116 - DNA, 507 bp, Arabidopsis thaliana
  unsure (1)..(507): unsure at all n locations
nnnnnnnnnnnnnnnnnnnnnnnnnnnnnnnnnnnnnnnnnnnngggcgcccacgcgtccgatacatcttcatcagtgattttccgcgcggccgtttctctagatcgattttggatttagatctctttgtttctactgcttttcatcgttggatctgcgttttgcaaagggagatacagaaaggaatagctttgaattgacaaggtttctctctaatccaaccgaatctcaagcttccatggctctcaatctccgtcagaaacagactgaatgtgtaatccggatgttgaatctgaaccaacctttgaatccaagtggaactgcgaacgaagaagtttacaagatcttgatttacgataggttttgtcagaacattctatctccattgacccatgtcaaggatctgcgtaagcatggagttacactcttctttctcatagacaaagatcgacaacctgttcatgatgttcccgctgtctactttgttcaaccaactgaatccaacct

SEQ ID NO: 129117 - DNA, 625 bp, Arabidopsis thaliana
  unsure (1)..(625): unsure at all n locations
atacgactcacattagggagaagctcgcacgcctgcaggtaccggtccggaattcccgggtcgacccacgcgtccggcctgccggagctgatctcattttcgaacaaggagacaacattacggggaaggtatcaagagacgaagtagcgcgtatatgcatcgctgctttagaaagcccgtatgctcttaacaagaccttcgaggttaaaagtacggttccgtttagcgagcctttcacggtagatcctgagaatcctccaccggagaaagactacaatgagtatttcaagactctgaaagatggaatcaccggtaaagaagctttagaacagagcactgttgcagtttaaaccaggttttatctacttttgtaactgtgtgttgtctcatcttcgttaaaaatctttccaaaagtaaaaacaacaacaaaagagtcgtgtagaaacatgtttgtatactccatatatcgtacattgtagataagatttacaaaagcttattgacgacaacaataaagattgtaccttttgatccaaaaaaaaaaacaaagnnnnnnnnnnnnnnnnnnnnnnnnnnnnnnnnnnnnnnnnnnnnnnnnnnnnnnnnnnnnnnnnnctgtacctaa

SEQ ID NO: 129118 - DNA, 635 bp, Arabidopsis thaliana
acgcgtccgactaactcttgagttttgctatggagtccgtcgaaatgaacaatcccaattcgcaaacccgagatcaacctcctcctgccgccaacggagacactgctccactcgcattggatcatatgaatcctcagaattcggagtctgtggctttaaacgggtcttctactcctatccccgatactaatggttcatcagcaaagcctgagctcttacgtcctttgctatcggagaacggtgttagcaagacgctgagtggtaacgataaggatcagtctggtggagaggaagagactacaagccggaggaagcgtcggagtcggtgggatcctccgccttctgagtccattaataaccctagcgccgaagggggtactgattccggtactgggactaggaagcgtaagtcgagatgggcagatgatgagccgaggacgcaaattcagttacctgacttcatgaaggatttcactggaggtattgagtttgatcctgagattcaagctttgaatagtaggttacttgagattagtaggatgttgcagtctggtatgcctttggatgatagaccagaaggacagaggtctccttcaccagagcctgtgtatgataacatgggaattaggatcaac

SEQ ID NO: 129119 - DNA, 528 bp, Arabidopsis thaliana
  unsure (1)..(528): unsure at all n locations
nnnnnnnnnnnnnnnnnnnnnnnnnnnnnnnnnnnnnnnnnnnnnnnnnnnnnnnnnnnnnnnnnnnnnnnnnnnnnnnnnnnnccacgcgtccgctcatggtcccttgctattctattgaatcgtttgcatcacttgttaaaccatccatcagtgttgactgtgggattcttcgagactgctatgaatcctttgccatgtactgttttggtagataccttgttgcctgcattggtggggaagaaaggactatcgagtttatggaaagacaagggcgtaagagctttaagacgccactcttagatcacaaggatgaaaagggaatcatcaaacatccttttcctatgaatttattcttaaaaccgtggaggctcagtccctggttttatcaagttgttaagtttggtattgttcaatatatgataataaagtctttaactgccctcacagctctgattcttgaagccttcggtgtgtactgtgaaggagagtttaaatggggatgtgggtacccttatttggcagttg

SEQ ID NO: 129120 - DNA, 569 bp, Arabidopsis thaliana
atgatactccagctctctacgactcactatatggaaagctggtcacgcctgcaggtaccggtccggaattcccgggtcgacccacgcgtccgcccacgcgtccggttcgcttatggccatgggggtttctcttacttcccacaataaccctcttcttcgccacttatctccttcctcttcctgggtttctcgttcctcctctcgcctctcttcttctccactcccttccttcctctttccttgccgtcgaacccttcttcaaaggaaactagcttccactgatggaaatgtcggttattgtactactacagtttgtcagggatttcagcattcggttcatcaacggtcgtcttctgttgtgtttaacggagagtgggaacttcgatcggaatctaacaaggtaaggatggttcctaagattatcaaggttggaaatcagacggaggtagccgaaactcatcaagttcctggaacctgtagtgcttggagggaagaagctaataagcttagagaaagaaatggtcaaattgctagaaaccttgatgacaatggttatttcaatggctctg

SEQ ID NO: 129121 - DNA, 568 bp, Arabidopsis thaliana
  unsure (1)..(568): unsure at all n locations
atgatactccagctctctacgactcactatatggaaagctggcacgcctgcaggtaccggtccggaattcccgggtcgacccacgcgtccccccacgcgtccgctcatctttttgtaccgctccgttgcgcctctctcttcttcccttcctctctctagcggcggagttacattgtcggccgccggggaaaccggcgacagtggattctctaaactcttaaactcgctacgtcgattcttaaaggattcatcgccgataacttttatacctccttcttttccgataggatcgggactcattttgtttccaacaccccggatccggtgatttagggcgctttttgatgcttatcgagtaaaggatttatcgatttagtgatcgtttatggaaggaggtggtggttctggtgagcgttcacggattgcttcgaatactcctcgaagcttgaaggagaagagcgatggggttggtaggactgtgtcttctactgaaactaggcagaattatcagaagagatccagaatggttgttagtgattcggaatcaagtgatgagtntatgaaacca

SEQ ID NO: 129122 - DNA, 493 bp, Arabidopsis thaliana
ccgcctgcaggtaccgggccggtattcccgggtcgacccaggggggcgcggacgcgtgggcggacgcgtgggaaagaagaacacgatgaggaaaccatcgaaaaagagcgaaatcgagttctgcacggtgtgccggtttcatcacgaccaaggctcgcgccacaagtacttccctcgccacaaaagttccctctcttccttactcgatcgattcagatcgaagatagctgacgtcagattcttcctgaagaaccctagcgttctacggccacaagagcagtcgcaaaaccgtgtttggtgtgtcttctgcgatgaggacattgttgagctcggtagctccttcgcctgttctaaggctatcaatcacttcgcaagttccgatcatcttaagaatatcaagcaatttctgtcgaaaaatggcccggcaatggattgcatagacgagttccgaatttctggagctggtgtatgcttatggggagatatgtgtccg

SEQ ID NO: 129123 - DNA, 539 bp, Arabidopsis thaliana
atgatcctgccagctacaatacgactcactttagggaaagctcgtacgcctgcaggtaccggtccggaattcccgggtcgacccacgcgtgcgcgaacttgccgttgaaggtaggatggagactgatgctcggaatcggagccgtaccttccgtgatactcgctatcggcgttctcgctatgccggaatctccacggtggctcgttatgcaaggccgtctcggtgatgccaagcgcgttctggacaaaacctctgattcccccaccgaagcaactctccgtctcgaagacatcaaacacgccgctggtattcccgccgattgccacgacgacgtcgttcaggtgtcgaggaggaacagtcatggagaaggagtttggagagagcttttaatccgaccaacaccagccgtgcgtcgtgttatgatcgccgcaatcggaatccatttcttccagcaagcttccggtatcgacgcggtggttctcttctcaccgcgaattttcaaaaccgccggactcaaacccgatcaccaacagcttcta

SEQ ID NO: 129124 - DNA, 692 bp, Arabidopsis thaliana
ccccctttgaaagcctttgagagcactgcgcacccccctcttggtcgactttatcgataagcttgatatcgaattcgcggccgcgggagatctgaggcaaccctttttctctggttcatgtgactagggattgtgccgtgggtttaggatcatggcaatggggaagtattctcgtgtagacgggaagaagtcatcgggatatggcttaaccattaccatcgttttaattgtttctctatgtttggttggggcgtggatgttcatgtcttcatggtctgctccaactgagtctattgacttctctgcaaacgagaggacaaaagatgtagatactactaagagtgatttcaaaagtgaagaggttgatcgaggttccaagagttttccggatgaaaagaatgaggagacggaggttgtgacagagaccaacgaagagaagactgatcctgagaaatctggtgaggagaactctggtgagaaaacggagtcggctgaggaaagaaaggagtttgatgacaaaaatggtgatggggatagaaaaaatggagacggtgagaaagacaccggaatcagaaaagtgatgaaaacccaagccaaaaaaggaagaaaaacccccaaccctgggaaaagaagaggcctccagtaaagaaaaaaacccaaattccttggaggggattaagttaaattgggga

SEQ ID NO: 129125 - DNA, 748 bp, Arabidopsis thaliana
  unsure (1)..(748): unsure at all n locations
cagctctctacgactcactatatggaaagctggtcacgcctgcaggtaccggtccggaattcccgggtcgacccacgcgtgcgactagatccggatctggaactttctctactctctgctcataaagtttcattctttggggagatctgaggcaaccctttttctctggtgcatgtgactagggattgtgccgtgggtttaggatcatggcaacggggaagtattctcgtgtagacgggaagaagtcatcgggatatggcttaaccattaccatcgttttaattgtttctctatgtttggttggggcgtggatgttcatgtcttcatggtctgctccaactgagtctattgacttctctgcaaacgagaggacaaaagatgtagatactactaagagtgatttcaaaagtgaagaggttgatcgaggttccaagagttttccggatgaaaagaatgaggagacggaggttgtgacagagaccaacgaagagaagactgatcctgagaaatctggtgaggagaactctggtgagaaaacggagtccggcctgaggcaaagaaaggagtttgatgnccaaaaaatggtgnatgggggttgaaaaaaatgggnnccggtnagaaagncnccgggacccgnaagtggtgaaacccaacccaaaaaggggnaaccccacctggnannnagnccncgnnggaaacaaaccttggggatgaattnggcccgaaanatcctggggancctgnngaa

SEQ ID NO: 129126 - DNA, 508 bp, Arabidopsis thaliana
aatacgactcacattagggaaagctcgtacgcctgcaggtaccggtccggaattcccgggtcgacccacgcgtccggtggaaagtgcaattgtattgtcccgttgaagccatggaagtagagagatcgagcaacccaacggctgattcgagattgttgttctctctcaagtttaatcagcttgaaggtgtgatgcagttcaatcacaaagttgtagttagagacaattggatcgatgtgatcgtgaagatagacaacatcagatacgatgtactaaagcttgtaaacgagaaactgatgtcgagaagaggagcaggggagcacgaaaagcatttcccatcaaggatctctctgcaactaactcctactctccaaaccgatttcattagcgtttcggttagcaaatcatcaaacaatccgggaagagagtttgaagtcgagagatctattgaaggctcgttcgatccaccaaactcactaggcttaagagttgctggacgagaagcctc

SEQ ID NO: 129127 - DNA, 380 bp, Arabidopsis thaliana
cggacgcgtgggggcgttctaaatgatccattatctccatttcatcggtgaattttgtttcgccagtgctgttaaagtagttgagtggttctcggagaatctgtttctcaaaagaagcacaatggcgttatcgaagagagggttcgtgatgacctctaatcctagatttcacggcgaggaagaggaattagagttaggattaggatcagtgaggttcacgcgaggattagggaggaaaaggattttgattttcgagttgtgtgcgtgaatctctatctagatcggccgttgagattccggtagtatctgaatcgccgccggtgaagagttcgttgaagagacaacgaagcagaataacaattgtttcttcttcatcctct

SEQ ID NO: 129128 - DNA, 595 bp, Arabidopsis thaliana
  unsure (1)..(595): unsure at all n locations
cagctannnnnnnnnnnnnnnnnnnnnnnnnnnnnnnnnnnnnnnnnnnnnnnnnnnnnnnnnnnnnnnnnnnccacgcgtccgaagaaaacgaagaagagcttagatccagttccagaaaccctaatttcagcaaccgatcaaatcgccggaggaattcaaattctgaagacgacgacgatgagaggagagacaaaaagcatcggcttttacacggattgaattcacacgagggtcgtgattcttctaattccaaatctggcggcggcgatttggactccgatgcacgcaaccgccggaaaattgacggatctgacaatacgggagaaaaggcttcgaaagcgacagacattcttcttcaaagagggtcacttgtggagtctacacctttgccagacaaaaagttgttgttcttcattcttgatagagttcaaaagaaggatacttatggagtgtactctgatccagctgatccagaggagcttcctgattattatgagattatcaagaatccgatggatttcaccacattgcggaagaaattagaatccggtgcatacaccagcttagaacaatttgagcaagacgtattttt

SEQ ID NO: 129129 - DNA, 851 bp, Arabidopsis thaliana
  unsure (1)..(851): unsure at all n locations
nnnnnnnnnnnnnnnnnnnnnnnnnnnnnnnnnnnnnnnnnnnnnnnnnnnnnnnnnnnnnnnnnnnnnnnnnccacgcgtgcggcggttggaaactgaatcttaaacccttcactcacattcatcttcaccgtcaaatctctgaaactgagcttcgacgatgttgggtttacgaagatctgcgacgaccttgttcgacatcagccagtctctgcttcgtaatgttacgtttcatgggttacgagtccaaggaattcgtgtgggaaacgcagaggttccaaacaataagccactcaaaaccggtcttcaagaagtttatggaatcggccgccgtaaatctcaccaggttctctgtcaccttggaatcactaacaaacttgccagagacttaactggaaaagaactcattgatctccgtgaagaagttggccagcaccagcatggtgatgaactgaggaggcgtgttggatcggaaatacagagactggtcgaagtagattgctacagaggtagtagacatagacatggattgccttgcagaggacaaagaaccagtggtaacgctcgcaccaaaaagggcaaagccgttgcgattgcaggaaagaagaaagcccctcgcaagtaaacctgtaattctatctattctctgggattcataagttgtaatccatgtcttattgtttacagacatggctttgtgttatttttgggatgaaactgatcaaataagtaaaacatgatttgtccaaaaaaaaaaccaaaaaaaaaaaaaagaatttaccaaaagggcgaacgctctagaggatccaagcttacgtacgcgtgctgtcgacctcataagtcttctatag

SEQ ID NO: 129130 - DNA, 528 bp, Arabidopsis thaliana
  unsure (1)..(528): unsure at all n locations
nnnnnnnnnnnnnnnnnnnnnnnnnnnnnnnnnnnnnnnnnnnnnnnnnnnnnnnnnnnnnnnnnnnnnnnnnnnnnnnnnnnccacgcgtccgccaaactctcttcttcttcttctgcttttgtctcaaaccattacaaagagaacattttttgtttagtaaagaaaaaacaacaaaaagacatgataacgagagagagtttaacgctgagaagcatcacaatgatgactttagtgacaatcctggtctggtctgcaactctagagacctgcattgccagaagaggaagacattggagacaccaccataggagctcctcctctttgtctgattccttgtccagcaagaaaccagaaagccatgagaacaaccaccaccacatgtcccataagtcaaaaccaaaaccgaagatgaaaactcagccgccaaaatccaacgacggttcacctgttgtgtcacagccaccacaagttcaacaaccaccaccaccacatgtccaaccaccaccaacacctcttccgctgcag

SEQ ID NO: 129131 - DNA, 575 bp, Arabidopsis thaliana
  unsure (1)..(575): unsure at all n locations
nnnnnnnnnnnnnnnnnnnnnnnnnnnnnnnnnnnnnnnnnnnnnnnnnnnnnnnnnnnnnnnnnnnnnnnnnnnnnnnnnnnnccacgcgtccgagaatattaccaagccaagaagttggagttagaaaatgtcaaatcagaagaacttggagtaaaggctttacctcctcttccatgttatactcagaaaacccgactcatgaagaggaaaacgagaaagcgagttgaagagaccgctgatgttacatcctatgcatcaaaccataatctcttctcttattatgattgtcggaaatctttggccgatattgctcttaatgacaactcccgcaacctagataagaagaataagagcgccaaggatgagacagctttctctgaagagacaccgcctctcgagtttagagaaggcgatgcgtacttggaacagatacttttgaaaattgaagcagcaaagtcagaggcccgtaacttgaagatccgcgtacacaagggtttgagtgaaaatccaagtatattccctctggctaacacagtgaatccacttggagctgctgatgtatacaccagctc

SEQ ID NO: 129132 - DNA, 565 bp, Arabidopsis thaliana
atgattctccaggtctctacgactcactattgggaaagctggtccgcctgcaggtaccggtccggaattcccgggtcgacccacgcgtccgctaagcgagaatccaaaaatgagtgaagaagatcacattgcttaggtgaagaagtctccgaagaatctctcaaaactatcttcgtcttctcttacaattccgacgaacagagatttccattctctctccaagtccgacgagttcaagcgtccgatcgatgagttagcttggagctcgcagtctgttcttgagacgattggtggtaagaaatcgatgagatttgatgatcccatggatgagttcaagaggaatcgaaagatggaggaagattcgaagaaggtaatcgatgtgaaagtggctgagagtgataagggattcgcgaaatttggcaaggcagaggttccgtttcatataccgacgttaacgaagcctcaagaggagtataagattttggtagacaatgctaataatccttttgagcatgttttgttggagaagagtgaagacggtcttcggttcattcatccactggag

SEQ ID NO: 129133 - DNA, 529 bp, Arabidopsis thaliana
cagctacatactgactcacataatggaaagctcggcacgcctgcagtgtaccggtccggaattcccgggtcgacccacgcgttcgactatttgaaatcgacaacgagagacacatatagaagaataaattgatgacttgtatgataatcttgttggatgatttcgtagcatcgttgtattgtcaggacggagttagagagctaatcgattacaacgagaaaatatctactactcgatccatgcttgcgtcctaatgctccaccaggatgtcatcgtcagccatatgaaccccgtactccggttaacgtatataggcgtggttgcaccacaatcaaccgatgccgccgagtgcagaatccggcgagatctaatgacatttgttatggacttatgccaccacattactcatattaggtatatggggtccaaaaggctcgtaggattgatgcttcagtattggtgagggctcatgggaggtttagaatgtaaaggattcatgcggtaatgggtacttatggtgtagcaacga

SEQ ID NO: 129134 - DNA, 515 bp, Arabidopsis thaliana
  unsure (1)..(515): unsure at all n locations
nnnnnnnnnnnnnnnnnnnnnnnnnnnnnnnnnnnnnnnnnnnnnnnnnnnnnnnnnnnnnnnnnnnnnnccacaggtccgcccacgcgtccgcggacgcgtgggcgcgaacagtcttgttgggttttgggttttgagagacagagaggttttggcttccgggtcgttagtgtttgatcatcttcgtatctcagaagggtgaactttgttgttttggcttttgcgtactgttgaatcagcttttccagatgcctcgaagaccatcatcaggaagaagagtgttaaagcatcagcctttaacattttcaccgtttatgcggttactttcctttgcttcaatggctaggcgtgatttgtctcatcctgaagattgtcaatgttctgatgaagatatatcttttgatgaaaagcaaaagatccctaatttaccaagaaaagggaaagaagaacaagtctcggactcgtctgatgaagaagattctcaggaagatgtccaagcagactgtgagttcttt

SEQ ID NO: 129135 - DNA, 536 bp, Arabidopsis thaliana
atgatccgcccagctacaatacgactcaccttagggaaagctcgtacgcctgcaggtaccggtccggaattcccgggtcgacccacgcgtccgcggacgcgtgggccgcaaccttcgattttcgtttattcgcatccatcggagagagaaaacaatcaataagcgaccatgttggtgtaccaagatcttctcaccggtaagctcaataattccttaatctcggtatgaactgtgtagctatcgatctttttcttccgatcggaataaatcatgttatcgaattgttagatctgtcatcgcatcataggtttttcgttgatttgctgctctttgcattgataattcaaatcttaggggattagtttatgtgatttggttagatctgtgattcattagtatataaacgtcctttaattgagcttaccgattcgttgtagattggattttagggtttattcgcttgtatcgattaatgtttgggatcttatgagtaatgactaaagagtctgggctattgatttacaggtgatgagctt

SEQ ID NO: 129136 - DNA, 523 bp, Arabidopsis thaliana
  unsure (1)..(523): unsure at all n locations
nnnnnnnnnnnnnnnnnnnnnnnnnnnnnnnnnnnnnnnnnnnnnnnnnnnnnnnnnnnnnnnnnnnnnnnnnnnnnnnnnnnccacgcgtccgtacactcacaccatctcacaaccctaatctctcccacacaagagagatagagagaaacaatgaaactttttcttctccttctttttcttctccacatttctcataccttcaccgcaagccgaccaatctccgagttccgtgctctcctctcactcaaaacctctctcaccggcgccggagatgacaaaaactcgcctctctcttcctggaaagtctcaacaagcttctgtacatggattggtgtcacgtgcgatgtatctcgccgtcacgtgacttctcttgatctctccggtctcaacctctccggtactctttccccagatgtttctcatttacgtcttcttcagaatctatcactcgctgaaaatctaatctccggtccgattccgccggaaatctcgagcctttccggtcttcgtcacttaaatc

SEQ ID NO: 129137 - DNA, 570 bp, Arabidopsis thaliana
  unsure (1)..(570): unsure at all n locations
atgatactctcnnnnnnnnnnnnnnnnnnnnnnnnnnnnnnnnnnnnnnnnnnnnnnnnnnnnnnnnnnnnnnnnnnnnnnnccacgcgtccggaagatgacgtggaggatttggagatgttgttggaggcatacttcatgcaactggatggaatgcggaacaagattcttacagtgagggagtacattgacgacacagaagactacgtgaacattcaactggataatcaacgaaacgaactgatccagctgcagctgacgctgaccatagcctcgtttgcaatagccgcagagacattgttggccagcttgtttggaatgaacataccatgtccattgtatagcatacatggcgtctttggttactttgtgtggagtgttactgcactttgcattgtgcttttcatggtcactcttggttacgccaggtggaagaagctgctaggctcataatctccctctctcttacaaaccatgtgccacttgtgtaataatttatacatatgttactggacagagttgtttcactcatatcttgtccagtgaagacgttagtgattcatatatgtt

SEQ ID NO: 129138 - DNA, 1180 bp, Arabidopsis thaliana
  unsure (1)..(1180): unsure at all n locations
ggtgacaaaactgaaccgtgggctgatcaacttgtattctctctggatctctggagggatcaagttcagtattttgtagaagaggttatcggtgagcctgtgtacattgcagggaactcacttggagggtatgtagctctctactttgcagcaacccatcctcacctggttaagggtgttaccttgcttaatgcaacacctttctggggtttcttccctaatccagtaagatccccaaagctagcacgtctctttccatggcccggagcattccctctgccggaaagagtgaaaaaaatcacagaattggtgtggcaaaagataagtgatcctgaaagcatagctgagatacttaaacaggtctacacagaccattctatcaatgtggataaagtattctcacgtattgtggaggtcacacagcatccggctgctgcagcatcgtttgcttcaatcatgcttgctcctggtggagagctatctttctccgaagctttatctaggtgtaaggaaaacaatgttcagatatgtctcatgtatggaagagaagatccatgggtgagaccgttatggggaaagaagataaagaaggaaatccccaacgctccatactacgagatcagcccagcgggtcactgcccacacgatgaagtccctgaggtggtgaactatctgatgcgcgggtggatcaagcacctggagtctggtggttttgaagcgctcccgcttttggaggacactgaagaagattgggaggagtccaggattggtagagaaattgagttcccgagagatggttggaaaaaagcagtgaatctgtggttatatgggtcaaactatacgtactggagaggagttagagaatctttcagatccagttttataagggtgtttggagggaagtctgcatagaagaagcatggaacagtcgtctagtgtaaattaattgtaatctatgttgcatccgatgctagctatataatgttgtctgtagaatcaagtttctaaaatgttcaaaaggaaaagttagaaaaatatctacttgatagttagtcacctaaatcgaaggaactcctttcttgcattgttgtatataaaaaaagaaaaaaaaagnnnnnnnnnnnnnnnnnnnnnnnnnnnnnnnnnnnnnnnnnnnnnnnnnnnnnnntaaacgannnnn

SEQ ID NO: 129139 - DNA, 523 bp, Arabidopsis thaliana
  unsure (1)..(523): unsure at all n locations
tcnnnnnnnnnnnnnnnnnnnnnnnnnnnnnnnnnnnnnnnnnnnnnnnnnnnnnnnnnnnnnnnnnccacgcgtccgggctttaacatgccttcactccagttcaccgccgttgtcttctctctcaccgacggcttaagttttatctgtcggagtagtttcaatgcggagtgggaagaagagagctcgctcagaacctggatccacaaagcaaccccgaagcaaatactccgacaacccaccggattttgcctcgttagcgtctctttacccatctttcaagccctttgttttcttctccggtagtcgagctcgcatcgactggaccgattacaacgcaacccgagagctcactcgtgtcctccttctacatgaccatggcgtcaactggtggattcctgatggacagctttgcccaactgttcctaatagatcgaattacattcattggatcaatgatcttttgtcctctgggatcattcaaagtttgggtggtgatggaagtaaagtaaagggctttgac

SEQ ID NO: 129140 - DNA, 585 bp, Arabidopsis thaliana
  unsure (1)..(585): unsure at all n locations
tcnnnnnnnnnnnnnnnnnnnnnnnnnnnnnnnnnnnnnnnnnnnnnnnnnnnnnnnnnnnnnnnnnnnnnnccacgcgtgcgatcatttctctttaacttcgcaaacttctcctcgataaaatttctctctctaaaaaaaaacaattagaatcttgccttttacagagtaacactacatgccgacaatggggaataagaattcgatgtgtgggttaaaaaggtttccgaactacaagaagtctccgatcggttcatttgcgaaaaactcatcatctcacgacggtattaaaacaatcgaagctgttaacagttgcagtttttctagaaaagcagatctttgcatccgtatcatcacatggaacatgaatggaaatgtttcgtatgaggatttagttgagcttgttggcaaagaaaggaagttcgatttgcttgtcgttggcttgcaagaagctcccaaagcaaacgttgatcaacttttgcagacagcttcatctccaactcacgagcttcttgggaaggcgaaattgcaatcggtccagttatatttgtttgggccaaagaattcacatacattagtaaaaga

SEQ ID NO: 129141 - DNA, 966 bp, Arabidopsis thaliana
ccccccaaggttttcccgctaattggcccccggtttcctctgcttaaaccgccctatattttgtgcccaaaaacatactgggcccccgctaaaatgtcctttaagcgcctccattatatatagggaaaccaagggtttttcgcgccggtctttgtttctaaaataaaaagtctaaaaattaaacttctcgggaattctctccttcaaatttcaaacccaatcccagattccaaggggacctgggaattttcaaaaaaagggcggtggggctcttcaggggagggccaagctttggaaaacaatgtttttttaaaggtttaaagggttttgggcccacaaaaaagggtctataaaaaattgtgtctaaaagttttaaaacatttcttttgtggcatataaaattaaacaagtttaccctttgggccatttttttttctcgggtggtcaggggtttacccctttcacattttgggggaaaattctgggtaaattagttcaaaccagaggcccacatttcttggaatggaatcccatgttttcaccgtgatgaaaatgcccaacggtatgcagagatgccaaaggaagaaaggtccaagttttcccttagggccaagttcttaaccagtggggaattctcactttaaggagcgtgcttatgtgttccaaccaaatgatggtcccatttaaaaagacccagaatcatctctccatgttttctgcgtttgaagaatgagccaccaatcactcaccagattctggatcttattctaagctcctttgggaaaattgatattgtaactttttttttcctcaaatacaagtagaaaccatggattgcaagaaataatatatttgtatcgttcgtgttgttaaaaaaaaaaaaaaaaaaaacggacgcgtgggtcgacccggaaattccggaccggtacctgcaggcgtaccagctttccctaagagagtcgtatt

SEQ ID NO: 129142 - DNA, 1000 bp, Arabidopsis thaliana
  unsure (1)..(1000): unsure at all n locations
atagaagagctttgacgtcgcatgcacgcgtacgtaagcttggatcctctagagcggccgctctcgatctgtaactagggcggcgaaagcagcggtggttttgccacggccggtgacgtttgtgactggaaatgctaagaagctcgaagaagtcaaagctatcatcggaaattccattcctttcaagtctctcaaactcgatttgcctgagctccaaggtgagcctgaggatatttccaaagagaaggctcgcttggctgctcttcaggtggatggaccagtgcttgtggaagatacatgtctctgtttcaatgctttgaaagggcttcctgggccatacataaagtggtttctagagaagcttggtcacgaaggtctgaacaacttactgatggcctatgaagataaatcagcttatgcattgtgcgcattctctttctcgcgtggtccaagtgctgaacctcttacatttttggggaaaactccgggtaagatagttccagccagaggaccaactgatttcggatgggatccagtgtttcaacctgatggatatgaccaaacgtatgcagagatggcaaaggaagaaaagaacaagatatcacataggtacaagtctttagcattggtgaaatctcactttaaggaggctggctatgtgttccagacagatgatggtaccatttaaagagaaccagaactcattcatcattgtcttctgcgtttgaagaatggagcaccaatcactcaccagattcttgttcctattctaagctcctttgggaatattgatattgtaactttttttttcctcaaatacaagtagaaaccatggattgcaagaaataatatatttgtatcgttcgtgttgttcattaaatactcgcggtgagacttatatgaaaaaaaaaaaaaaaaaaaaaaagnnnnnnnnnnnnnnnnnnnnnnnnnnnnnnnnnnnnnnnnnnnnnnnnnnnnnnnnnnnnnnnnnntgtaccta

SEQ ID NO: 129143 - DNA, 557 bp, Arabidopsis thaliana
  unsure (1)..(557): unsure at all n locations
nnnnnnnnnnnnnnnnnnnnnnnnnnnnnnnnnnnnnnnnnnnnnnnnnnnnnnnnnnnnnnnnnnnnnnnnnnccacgcgtccggttcaaacatgtccatggagagtatgcagacgagtaacgctggaggatctgtctcaatgtctgtggataacagtagcgttggttccagcgatgctcttattggccacccgggtttgaagcctgtacgccattactcactctcggttggtcaaagcgtgtttcgcccgggaagagttacccatgcgttgaatgatgatgctttggctcaagcactgatggataccaggtatccaactgaagggctgacgaactatgatgagtggacgattgatctgaggaaactcaacatgggtcctgcctttgctcaaggggcttttggtaaattatacacagggacatacaacggtgaagatgtagctatcaaaatacttgagcggccagagaacagcccagaaaaggcacagttcatggaacaacagtttcagcaagaggtgtctatgcttgctaatttgaagcacccaaacattgtgag

SEQ ID NO: 129144 - DNA, 521 bp, Arabidopsis thaliana
  unsure (1)..(521): unsure at all n locations
cnnnnnnnnnnnnnnnnnnnnnnnnnnnnnnnnnnnnnnnnnnnnnnnnnnnnnnnnnnnnnnnnnnnnnnnccacgcgtccgcacgcttcctagtgttttgtttagctataatgattcacttgagatcttgaaactcaagtgtgctatcgatttagactttccttctcgggtttgtttgaagtctcttagaaagctataccttgaccaagtacatttcaaagacgaagaatctgtttgcaatcttttatgtggctgccctagtcttcaagatttggtcgtgcatagatatagcaatgccgatgtggcgactttcacaattgcgtcgccgtcattacaaagattgaccatagaagatcttagacaagaaggaggttatggaaatggaagctatgtgataaatgcccctggtttgaaatacttgaacatcaacggggttattgatattgagtcttgtttgattgacaaggcactagagttagaggaggcaaaaatcagtaacgtttctggtataaccaatga

SEQ ID NO: 129145 - DNA, 739 bp, Arabidopsis thaliana
  unsure (1)..(739): unsure at all n locations
tgatctnnnnnnnnnnnnnnnnnnnnnnnnnnnnnnnnnnnnnnnnnnnnnnnnnnnnnnnnnnnnnnnnnnnnnnnnnnnnnccacagctccgtgctgctggggttagtagtagtagtagtaggccaatagataacttttctagtgagagctctataccggcattgcatctactcagccttctggatcctcgcctgaggtcaacgactcccgctgaccaacacggaaacactaaatttactaaaagacattttccgccagccaaccagtccaaagagtttatagagcttcaaacaggggactctagtaagtcagcctactcaactaagcagataccttttgatctatacagcaagagattcacacaagagccttcccggaagagtttccccatcactccacctattgggacgtcttcactttcatttcaaaatgcttcatggagtcctcatcatcaagagaagaaaaccaagagaaaagacacctttgctcctgtttacaatactcatgaaaagccggtgtttgcaagcagcaacggccaagcggaagttccagcttgctgggngcatcggaattccatgatgctttcctttgaaaatttcacattgncgggttaanggaaaggaaccaaaagggggnanngncagggnggctgcaattaacaaatgnccttttggggggnccctntgnagggccagtttttgggcccntttnttgttnangggcaaatngganccnt

SEQ ID NO: 129146 - DNA, 814 bp, Arabidopsis thaliana
  unsure (1)..(814): unsure at all n locations
cnnnnnnnnnnnnnnnnnnnnnnnnnnnnnnnnnnnnnnnnnnnnnnnnnnnnnnnnnnnnnnnnnnnnnnnccacgcgtccgcggacgcgtgggcggacgcgtgggcggcggcggaatattctcgccggaaaatggggaaagctagaggagttaacagcggcggcggagagagctctctcggttatctttttggttccggcgagtctgttcccaaaccaaacaagcccaacgctaaaaccggttttaccaccaccacgaccaccacaacaacaacggatggagctggaggtagacccaagaccacgaccacaactacaacaaccggagataaaaacaagacagaggagaactcggctggtgtgagaggaagtcctaataattactacagatcagatggacaaaactgtggcaacttcctcacggaacgaccatctacgaaggttcatgctgcaccaggtggaggatcttctttgggttacttgtttggatctggtccttgtggatctgacaaatgatttctatttccacgacaaacatctcatgcatttgaccctttgaaaaaatgtaaaaattgttctaaactttattctttatccttacaaactggttttgaggattgttttgaatttggccatttcttgtgttcttgaaaaagctacgaagctttctcaatcttgagatctccagaatgtgtttccagcaaaagaaaatcattttaccacaaaaaaaaaaaccaaagggcggccacaaannnnnnnnnnnnnnnnnnnnnnnnnnnnnnnnnnnnnnnnnnnnnnnnnnnnnnnnnnnnn

SEQ ID NO: 129147 - DNA, 946 bp, Arabidopsis thaliana
  unsure (1)..(946): unsure at all n locations
nnnnnnnnnnnnnnnnnnnnnnnnnnnnnnnnnnnnnnnnnnnnnnnnnnnnnnnnnnnnnnnnnnnnnnnnnnnnnnnnnnnccacgcgtccgcttggtttacaaagatctagatgaagctcccagtggagagctccctgatggaggctatacaatggtagcagttgttggaatcaaggatccagtacgtccgggtgttagggaagccgttcagacttgtcaagctgccggaatcaccgtccgtatggtcactggagataacataagcacagccaaagcaattgctaaggaatgtggcatatataccgaaggaggcttagctatagaaggttcagaattccgggacttgtctcctcacgaaatgagggccattatccccaaaattcaggtaatggctcggtctctgccattggacaaacatactttagtcagcaacttgaggaaaattggagaggtagttgcagtgacaggggatgggacaaacgatgcccctgcgttgcatgaggcagacattggactagcaatgggaatagctggaacagaggttgcgaaagagaatgctgatgtgatcataatggacgataacttcaaaacaatagtaaatgtggctagatggggacgtgctgtatatataaacattcagaagtttgtccagttccagctaactgttaatgtggttgccctgatcatcaactttgtctctgcttgcatcacaggatctgctccactcactgctgtgcaactcctttgggtcaacatgatcatggacacacttggtgcattggctctagcaacagaacctcccaatgaaggtttaatgaaacggtgcaccaatagctagaaccgccagctttcatcaccaaaaccatgtgggggaacatcgctggtcaaagcgttttnccagtttgnttgttttagggattntncaatttcgnagggaaatca

SEQ ID NO: 129148 - DNA, 521 bp, Arabidopsis thaliana
  unsure (1)..(521): unsure at all n locations
nnnnnnnnnnnnnnnnnnnnnnnnnnnnnnnnnnnnnnnnnnnnnnnnnnnnnnnnnnnnnnnnnnnnnnnnnnnnnnnnnnnccacgcgtccgcgcttcgattcaaagacaggttttttcttttgttccctgagagatcgaatcgaagaaatcgaaatttttgtacttcgataaaaatctgtagtctctatagaaatcggagaagatggacaacaaaaacgtcgtcgtttgcgacaacggcaccggttatgtaaaatgtggatttgctggagagaatttcccaacgtctgttttcccctgtgtcgtgggaaggccattgcttcggtatgaagaatcactcatggagcaacaagtcaaggatatagttgttggggagacttgctctgagctccggcatcaattggatataaattatcctgtccacaatggtattgtgcagaattgggatgatatggaacatgtttgggatcatgctttctataacgaattgaaaatcaatccatctgactgtaagatattg

SEQ ID NO: 129149 - DNA, 693 bp, Arabidopsis thaliana
  unsure (1)..(693): unsure at all n locations
cnnnnnnnnnnnnnnnnnnnnnnnnnnnnnnnnnnnnnnnnnnnnnnnnnnnnnnnnnnnnnnnnnnnnnnnccacgcgtccggccacgcgtccgcccacgcgtccgcccacgcgtccgaaaactgttaattgattctgtctgaatattatttttattaacggaccaaacaaaaaaaaacttgcagaagaatgaaagaaaaagcaataaccctccaaaccaaattctaaagcctcaaatttggaatattccctttcttcttcattcccttttttttttttttaatttgccatttactcattattgatcttatgtgagacgacctcctctgtttctttcttcctcgtaacagtaaagggtcttcctttttaatctgaatttaccaatctgattcttctgttttttggtttttttatttggctatcttttaaactatttgaaatctaaactttgtttggttcttcacgatttttaatctccgatgaatcaaattcatcaaaagattcatcttttagatctggttacgtaattcgatttgctctgttttttgtttttcgttttgaattctttattaagtaaccaaatttggggaagaaggaggagtgtgggtgataatggatttggatgatttccgatcggttatggataacgcaggtgttgatgtttggacatttatccgtaccgggattcttgt

SEQ ID NO: 129150 - DNA, 748 bp, Arabidopsis thaliana
ggtcgagcacgcgtccgcaccacacgtccgcggacgcgtgggcggacgcgtggtcaaaaatggctctccgatctgtcaaaacgccgaccttgataacttcggtcgccgtcgtctcctcctccgttaccaacaagcctcactctatcagattctctcttaaaccaacgtcggcactcgtcgtccataaccatcagctatcgttctacggttcgaatctcaagctgaaaccaactaaattccgatgctcagcgtcggctcttacgccgcaacttaaagacacgctggagaaactggtgaattcggagaaagtggttctgtttatgaaaggaacgagagacttcccgatgtgtggattctccaacactgtggttcagattttgaagaatctgaatgttcctttcgaagatgtgaatattctggagaatgagatgttgaggcaaggacttaaagagtattcgaattggccgacgtttcctcagctttatatcggcggtgagtttttcggtggttgtgatattactcttgaggcgtttaagactggagaattgcaggaagaggtggagaaagctatgtgctcttgatcctgatttcaatacttggtttttgtgatgatggaatttgatcttatctatctatctatcacctgggaaaaaaaatgtgattttgatgtttcagagtttgtggttgtaacattaagagacatatattgtatgatggatttaggtatacaacagttggagttgcttgg

SEQ ID NO: 129151 - DNA, 1042 bp, Arabidopsis thaliana
  unsure (1)..(1042): unsure at all n locations
gaaacagtgggcccacgttatgttgttgtaaaacttgaaactttggaagcaaactcatttttataacaaaaggaaatcttattttatacattacattaaagcaacatgaaagacaattcaagctggtcttgttcttgttcttggtcttcgtggaaaatatgtttgttgtctgttctctttctcaccgagacgatcaccgccgtgaagctgccgccaaaattgattattccggctgtaatcgctttcggagactccatcgtcgacacaggaatgaacaacaatgtcaaaaccgtggttaagtgtgattttcttccttatggtatcaatttccaaagcggagttgccacggggagattctgcgatggacgagtccctgccgatttgctagccgaagaactgggaataaaatcaattgtaccagcatacctagatccgaatctaaaatcgaaagatcttttaaccggtgtatcgtttgcgtccggaggttctggttatgatcctataacaccgaaacttgtggcagtaatatcattagaagatcaattgagttatttcgaggagtacatagagaaagtgaagaatatagttggggaagcaagaaaagacttcatagtagccaacagcttattcttattggtcgcaggcagcgacgacatagccaatacatactatactctacgtgcaagacctgaatacgacgtcgattcatacactactcttatgtctgactctgcctcagaatttgtgactaaactatatggatatggagtgagaagagtagctgtgtttggtgcaccaccaatttgggtgtgtaccatcacagagaaccgttaggnanggaggtatccttgaagagatttgtgctgntaattacancgaaggagccaaacctttttaattccaaagncctcccccaaaatttggatccgntgcggnaaaccctaccngggngccaacccgntcncattaatanccaagnnccccctttttgncancaccaanacccgnaaatnatggggttaagngcacnaagggccnnggg

SEQ ID NO: 129152 - DNA, 718 bp, Arabidopsis thaliana
  unsure (1)..(718): unsure at all n locations
aanggggttggggctttttncaggggttttccattggggnaangnntggcncttnatncagnattttgncttcttnttttcaattacccctcggccattcattccgcgtgcctttcctcccccctcaacaaggaaggaggcacaaagtttctctgcaggggattgcctcccacccggttcacgagtgctggttcgatcaacaatactagaaaacctcccaaatactgcaaggaaagctaacaagacaggaagcttctcttttgcacctatcgtacacaacaacatcaacaacagaacaccaaataagagatcaaactctcctatgagattccctctcttacgttcaggatctctactgaaacgttcaagctccccaagccaaccaaagaaaccgcccttagcgttaccggaacctcaaagagctatatctgtgtcgagaaatacaaagatagtggagataaagcaatcttcatcgcgaaaagggaagaagattctgatgttcaaggcattgatgagtatgagcaagtcgagaaactaaaatctctccttgtatttgataaatgaaaagatttggacacaactaatgtgaaataagagagagagatgcttattttgttggaanaaaaaaatannannnanannaannaagggcggctgctctagaggatccaagcttacgtacgcgtgcatggtacgtcatagtaatnctatagttgtc

SEQ ID NO: 129153 - DNA, 412 bp, Arabidopsis thaliana
acaaaacccatcaaagatcttttttttttctcaattattgtgataatgaattcgatgtttagtgccttcgacgccatgtgtgcagagattatgggaaagaaagtcaccgctgcttcttatgtctaccgctctgaacgcaattctgcttcttcttcttcttccgtcggcggtcaaaacgcgtctttgtctctcaagaaagatgaaaaagcttcaaagaacatggatttaccaacgaagacaccgaggtttgctcttgagctcgatggtcttcattgcttcgagactatagttcgttcttgatcaatatcaagattaccaatttttgctgagtttttttttctttttcttgttttgttctgtttcgattccttttatgtaaatacaattttggaagatttaatttcttgattag

SEQ ID NO: 129154 - DNA, 548 bp, Arabidopsis thaliana
  unsure (1)..(548): unsure at all n locations
ctgaantncctgggtcngcccactgtgtcggcacaacctccggcgaaaatggacgtgcgtgaatcaatctcactgcaaaaccaagtctccatgaatctcgcaaaacacgtaatcaccaccgtctctcaaaactccaacgtcatcttctcaccggcttcaatcaacgtcgtactcagtataatcgccgctggatccgccggcgctaccaaagatcagatcctctcgtttctcaaattctcttccactgatcaacttaattcattctcttccgaaatcgtctccgctgttctcgctgacggtagtgctaacggtggtcctaagctctcggtggctaatggcgcctggttcgataagtctctctcctttaaaccttcctttaaacagctcttggaagattcgtataaagctgcttcgaatcaagctgatttttaatcgaaggctttggaggtgatttcctgaaggggaatttattgggctgnaaagggggcaaaatgggntaatactnngggttnttccngaagggncanctggnagnttgccaactnntc

SEQ ID NO: 129155 - DNA, 430 bp, Arabidopsis thaliana
agaccgttaagagtagttgatggttctaacaatggaagcgctaagtactttgattacttattctacattgattttgaagcctccatggctgatacacgtgctcagcacgctcttggccatctacaggaattcgcaagtttcatccgtatcctcgggtgttatccaatggatctagtcagataaccgagcaactcttcaattgatttcatgttaccataccgtgaagaacatgtgaatatacccaaacagaagaacagggtttgtggctttggtatacttcaagaatcttctttcaccattttctcattttagaactttagcttcaaactcttcattgttgagacagatacaattgatgtagcattttgttaagaatatgttctgtacattaaacaagttttttcagttaatatcaatgaataaggttgtt

SEQ ID NO: 129156 - DNA, 473 bp, Arabidopsis thaliana
  unsure (1)..(473): unsure at all n locations
cttctttctctctctctcatcgattaacaaaatcgaatcgaaaaaaaaaattagggttcttctctcttccgtctctcgttatcgatttcgttttgatttcgcgccacaaagaagaagtttcattaggcgcgaatctgaaacctaggttcgatttagttctgtccgaattactgtccgttgtcttgtccgttagtcgattcgatctgagaaagaaagaaagagaagaagaaaaaacgatgtcacgatatttcacatccccaccgcctgtgtatgcgaggaactgggcgaacggtcaaaacttggtcgaatggactaaggtcgaaagaccaatagttgattctaaaaagctgcatcggaaagggaggagggggaaaagganggaaaggaattaaggaagngaggattccnttnaccanaggttttcccacccagggnagtnttatttgatnccgccagntttggaattttttttc

SEQ ID NO: 129157 - DNA, 911 bp, Arabidopsis thaliana
  unsure (1)..(911): unsure at all n locations
gttctnggtggtgtcgacacatcggttaacgcatccnaattcgccatggcagagattgtgagcagaccggaagtgttaaacaagatccgactagaacttgaccaagttgttggcaaagacaacatcgttgaggaatcacatttacctaagcttccttacctacaagcggttatgaaagagactcttaggcttcaccctacgcttcctcttcttgttcctcacagaaacagcgaaacctcggtggttgcgggatacactgtgcctaaagactccaagattttcatcaacgtttgggcgattcatagagatcctaagaattgggatgaaccaaacgagttcaaacctgagaggtttttggagaattcgcttgatttcaatggaggtgattttaagtacttgccttttgggtcaggaaggaggatttgtgcggcgattaacatggctgagagacttgttctgttcaacattgcttcacttcttcactcttttgattggaaagcacctcaaggacagaagtttgaggttgaagagaagtttggtcttgttcttaagttgaagtctccacttgtggctattcctgttccaaggttgtccgatccaaaactctatacagcttaagtaagtaagaaggaaatttggtttgagcttatgagaggaagttgaattgagttttcttgtttaaagtttatttttctttattcgtgtttggagtttgatgctttgtaaaaaaagatgtgtcaagttaaatttaattttcttatatataataaaataaagttttagtcacaaaaaaaaaaaaaaaagggcggccgctctagaggatccaagcttacgtacgcgtgcatgcgacgtcatagtattctatagtgtannnnnnnnnnnnnnnnnnnnnnnnnnnnnnnggcaaaatc

SEQ ID NO: 129158 - DNA, 609 bp, Arabidopsis thaliana
  unsure (1)..(609): unsure at all n locations
nnnnnnnnnnnnnnnnnnnnnnnnnnnnnnnnnnnnnnnnnnnnnnnnnnnnnnnnnnnnnnnnnnnnnnnnnnnnnnnnnnnnnnnnnnnnnnnaccacaaattctcatttcttcaagaatttttgataaataagacagagaacttgagagatgaaaagaaaaaaacacaaaacctggtgttttttctctcgtcgtcgtttggtcgtgtcctaagacaagaaccggcgaacgaagaacaaactttttgaatctaacatccgaaagaaagagagaaaatgtcgtttacaggaacattggataaatgcaaggcctgtgacaaaaccgtgtacgtgatggatttgttaacattagagggtaatacttatcacaaatcatgtttcagatgcaccccattgcaaaggcactctcgtgggtatttctcttttcttcttcttcctccattgttactctgtttttcgacaatgctccattgttttaaaagaccacatcttttcttaacacagttaagcattactcaccatgggtggngtccttacngnaagccaacttcgaaagctttccaagatnggnattnagcaganttcagggggaanccggagccatgtnt

SEQ ID NO: 129159 - DNA, 417 bp, Arabidopsis thaliana
agattttccgctctctacgactcactattagggaaagctggtacgcctgcaggtaccggtccggaattcccgggtcgacccacgcgtccgcggacgcgtgggtgttttttctctcgtcgtcgtttggtcgtgtcctaagacaagaaccggcgaacgaagaacaaactttttgaatctaacatccgaaagaaagagagaaaatgtcgtttacaggaacattggataaatgcaaggcctgtgacaaaaccgtgtacgtgatggatttgttaacattagagggtaatacttatcacaaatcatgtttcagatgcacccattgcaaaggcactctcgtgataagcaattactcatcaatggatggagttctttactgtaagccacacttcgaacagcttttcaaagaatctggcaattaca

SEQ ID NO: 129160 - DNA, 557 bp, Arabidopsis thaliana
  unsure (1)..(557): unsure at all n locations
ttataacaagcgaatcaatcacacgcttcttccttcctcttccatcttcttcatatctcccttagtcacctctactctactctgcaggcaaaaatagttatggcgacttcttcgatcactatcccgaccattagaactccgattcatcgatcaaaatttctaggccaaacacatcaattttcaactgtaaaccggtcggttttcccgcctccaaaacagcagtcaaaactgtatcaagtaaaggccatgggtaaattcaatctatgggaagtgatgggaggaagaggattatgcaacggagagaaaggtattgagaaggagctccagaggaacattgaagacgagcaagagacatcaaaggctgagaacaacgagacagagagagagagcgatgacagtaacttgtcttttaaagtacctgaagatggtttcgagaaagagatgatgggtctcacaggaggatttcccggtggcgaaaagggtttaaaacggttttggaaaaatccccccctttttnncntccnccccttaaancangggggggttntccgggtttt

SEQ ID NO: 129161 - DNA, 533 bp, Arabidopsis thaliana
  unsure (1)..(533): unsure at all n locations
nnnnnnnnnnnnnnnnnnnnnnnnnnnnnnnnnnnncaattcatttgatattccttctaaaaatggggcaacaacaatcgcagtccacggatgagatgctgtttcaagaagtgagtaacaacaacgtcgaaggtatcaaatcacttcaccatgaaggagcaggactcgagggggtggataaattagggagaacaccattaatcttagcttgtacgaacgacgatctatatgatgtagcaaaaactctgcttgagttgggctccaatgtcaatgcttatcgttctggttgcaatggtgggactcctctgcaccatgctgcaaaaagaggtctcgtacacacggttaagttacttctgtctcacggtgcaaatccattggttcttgatgatgatgttaagacagctctcgaggttgctagagatgaaggttacagtaatgtcgtacgcgcaatcgagagtcatatctgcttggtctctggttggatgcgtgagtattctggcttcagcttgctaatttatttgctcctcaacttg

SEQ ID NO: 129162 - DNA, 504 bp, Arabidopsis thaliana
gcagtgacacgaaccacagcgggaaccctacacaacgaagaaccaggacgaaaaaagaactagcagggagcacagcttaagaactagacaacggggtttctgttgccacgtccagatttcaaacgcctcttctgccttcctccatatagactggtgggtgaaaactgtgggcgtatttcacaagcactccatatccatgataactatgctatggtttcaagcagtagagtcaacctctgttagacagaagaagctggagaagaagataaatggtgatcttagtttatatgaagaagcgtctatatgaaaatctcaagtaagtagccaactaagtgttttgatggattgttagacccatgattttgcagccatagattttttttcgtttttttttccattcaactatgtttttgattactataaagctaaatgctaatgtaagatcaaagctctagttacaattaaaggatctattaatcaagattcctcagggaagctctagtt

SEQ ID NO: 129163 - DNA, 462 bp, Arabidopsis thaliana
ggcaattattagggacttgctgtcacacacacttttgttctcggctcacctgctgaaggcagttaactttgttgcagaacttgattgcattttatcgttggcttgtgtagcccatcagaataactacgtaaggcctgtcctgacagtagaatcattgcttgatattcgaaatggaaggcatgttttgcaggaaatggctgtagatacttttatcccaaacgacactgaaatcaatgataatggacgaattcatataattaccgggcctaattactcaggaaagagcatatatgtaaagcaggtggcgttaattgttttcctatcccatattggaagctttgtaccagcagatgcagcaactgttggtttaactgacaggatcttttgtgcaatgggaagcaagttcatgaccgcggagcaatctacattcatgatagatctgcatcaagtaggaatgatgct

SEQ ID NO: 129164 - DNA, 464 bp, Arabidopsis thaliana
ggaagcttttcgcttccaacgttctcatctctgggatgcagggccttggtgttgagattgccaagaatattattctagctggtgtgaagtcagtgacccttcacgatgaaaatgtggttgagctatgggacctatctagtaactttgttttcacggaggaggacattggtaagaatagagcacttgcttctgttcacaagttgcaagaactcaacaatgctgtggctggctcaactttgactggggaagttaaccaaggagcaagctttctgatttccaggttgtggtatttgtggatatctcttttgagaaagcgacagagattgatgattattgtcacagtcatcagcctcctattgcattcatcaaggctgatgttagggggctgtttgggtctttgttttgtgattttggacctcatttactgtcttgatgttgaggggaggaacctcactctggcatca

SEQ ID NO: 129165 - DNA, 752 bp, Arabidopsis thaliana
  unsure (1)..(752): unsure at all n locations
gcaaaaggttggagaaggaagatatgtcactggtcgactacgacgattcttcatccgacgacgatgttttagccgccgaggagaaacctctcccacagacgcaaaagcgtctggtttctccagctcaatcttttcctccaaagaggcagagatttgagcaggacgagagtgttgagaagctaccagatgctctgcttcttctggagtcaccgacactcgctcaggtgactggcggagaccatgcttccgttgttgcagctgcaatggctgagagtgcattaaggaagagagacttgagtgggaatgcttcttctcttcctcgtcgtcccaagctaccaagaggaaatttgcctcattcaaagaattatcctgaaactttgggtaatgtgcttgtgcctcctcagctcaagggaagaagcaatgttgctaccaaggatatgagctggctttttgtaaaaaaacggcaagagtcctcccaggcaaaatctccagatcaggaatagtttggtcaaatatgaatgcctttatttctcggactaatgacgtaacattttgagcaccataatagtggtattttagcaataataccaaagcatgcgactctttttgatatgtcagtaaattggtcctatttatactaaagatcccaaaagagttccttataaaaaaaaaaaaaaagnnnnnnnnnnnnnnnnnnnnnnnnnnnnnnnnnnnnnnnnnnnnnnnnnnnnnnnnnnnnnnnnnntgtccta

SEQ ID NO: 129166 - DNA, 376 bp, Arabidopsis thaliana
  unsure (1)..(376): unsure at all n locations
nnnnnnnnnnnnnnnnnnnnnnnnnnnnnnnnnnnnnnnnnnnnnnnnnnnnnnnnnnnnnnnnnnnnnnnnccacgcgtccgaagcaatcgccgcaagtatcagcagaggaaagctagtttccggcggtgaatccgtcgctcacggcggagcaaccaccaacaccacaaccctagccgttcctgcattcgcgaatccaaggtggatcgaaatcaaaactctctcgaaacgatcaatgctcaattcacgaagacaaccagagctattcggaatcagaatcgcctctgttgttatcaccggattcattctcgccaccgtgttctggcgattagataattcgcctaaaggagttcaagagcggttagggttcttcgcc

SEQ ID NO: 129167 - DNA, 602 bp, Arabidopsis thaliana
  unsure (1)..(602): unsure at all n locations
cnnnnnnnnnnnnnnnnnnnnnnnnnnnnnnnnnnnnnnnnnnnnnnnnnnnnnnnnnnnnnnnnnnnnnnnnccacgcgtccgcggacgcgtgggcggacgcgtgggcaaatatctccgttgccggcgaaatcactttgctcactctctcaactttgaaaggagactcaagtttctcactttctctcttccatggctttctcatactctttaacttctccgtcaccaaattcgactctctcctattccagtacccatcaatttctcaacccgtcttcttcgtttcccgtctcgttatcagtctcatctccgaagaatacccgccatcttcgtctcctcatcacctccgctttgaatccacagacgggacagccgacgaagaaggcctccaccggtagtgataagagtagtacgaacaagaaacgtaagaaaaaggggaaaattgcgaaacctgtggaggattgggaattgagagattcagaagacgcttttgaggaagatgatgatgccgattattcttcttcgtcgagttctctagcaacttttaactctcctcctaccatgaccaaaccacctgctgggtttgtgattaatgaaactgg

SEQ ID NO: 129168 - DNA, 766 bp, Arabidopsis thaliana
cactatagggaaagctggtacgcctgcaggtaccggtccggaattcccgggtcgacccacgcgtccgagctgtttgtgcccttcaagaaatcgaaagagagcttctttcccccattttctgcgattcacgatatttcttcttctataggacaacgtttttttacacattgaggctaaaagagagatggctgatgatcagagttcaagtactgaccgtctcgtgaaacctgaaagtttaaactcagatagaggatccaatcaatctattgaatcttctggagagagttctagagctcagggttccacaagcctgtctactactaaatctatggatggtaagaaaaccgaggaagaagagacaacggaacaacgcgatgttgatgatgaagaggaaccgctcatccaatcggttgaatgtcgtatatgccaagaggaggattccgttaagaacctcgagtccccttgttcttgtagtggcagtttgaagtatgctcatcgtaagtgtgttcaacgttggtgtaatgagaaaggcgagaacctgtgaaatatgccacaagtcttatcaacctggatacaccgctcctcctcctcctcccgctgatgataccattattgatatcggtgaagattgggggcatggtgttcacttagatttgaatgacccacgcattttggcaatggcggctgcagaacgccatttctttgatgcggactatgacgaatacgctgattctaactctagcggagctgcattctgtcgctctgc

SEQ ID NO: 129169 - DNA, 675 bp, Arabidopsis thaliana
  unsure (1)..(675): unsure at all n locations
aatacgactcactttagggaaagctggtccgcctgcaggtaccggtccggaattcacgggtggacccacgcgttcgctagaccgaggtcgaacaagaaacacatttgtccgaatttcatcttgagagctgctagagcccttcaagaaatcgagagagagcttctttcccccattttctgcgattcacgatatttcttcttctataggacaacgttttttttctcattgaggctaacagagagatggctgatgatcagagttcaagtactgaccgtatcgcgaaacctgaaagtttaaactcagatcgaggatccaatcaatctattgaatcttgtggagagagttctagagctcagggttccacaagcctgtctactactaaatctatggatggtaagaaaacctaggaagaagagacgacggaacaacgcgatgttgatgatgaagaggaaccgctcatccaatcggttgaatgtcgtatatgccaagaggaggattcccttaaagaacctcgagtcccccttgtccttgtagtggcagttttaaggtattgctcatcgtaagttttgttaacgttggtttaatgggaaggcgggacctttgaatttgcncagttttttaacctggttnaccgtcctctcttcnccgttgtgaaccatttnantggtaagttgg

SEQ ID NO: 129170 - DNA, 507 bp, Arabidopsis thaliana
  unsure (1)..(507): unsure at all n locations
antcgncggatccggcgcccaccgccggacggatttttggggttcggaactcctgatnggnttttngggttcttccccgaagcgacncgggggccaacagtgattgacaatgacgctacctccaggtctttactccggcaccagctctcttgctctggtggctcgtgcttcggcttttgggttgggtctcgtctatgggaacatgaagctcaaggtccttaagatcaaatcgatgtcacagaagaaggttgaagccaccgctcatcattaaaccactcttctttctttacaataagatgccaaaagctgggggtgatgtctccccggttagtttgatttcttctttcatgattcatcctttagcataagaaggaacaaatgtgtttttgaaaagcatattatacggttttaagacctttttggagccataattgccattggcttaaaacccgagtcaagaacatctttccatttgttgtcatccaataacaccgttcacattcacat

SEQ ID NO: 129171 - DNA, 678 bp, Arabidopsis thaliana
gaacgatttcgctgagattggttggagattcaggactgggatttcgaaactatctgggaacttacctgtgtctgagttcacaaagatcgcttcgaatttcttacaattgagttcagaagatgtggatccgaaagattacgacgtaatcggagttacagaggaattagttgcgtttgtgaaggatcttgcgatgcatcctgagacttggttggattttcctttacctgatgacgacgatagctttgatgactttgaattggccgatgctcaatacgagcacgctttacctgtagaaaggctagcaccgagcttggcttctttgaggattgagctttgccctgaatatatgactgagaattgcttctggaggatttactttgttcttgtgcatcctaaactcagtaaagaccatgccttgcttctctccactcctcaggtactcgaagcaagatcaatgttatctcaggaactacagaaacaaaacaaattacccgtagaagcagggagtattgaagctaatactgtcattgtggaacctcttactgtgcctccttatgaaccttcaccagaaacagcagctgttaaaatcgtaaatccagtcgagtcatctgacgttgaaacagacaagcaccctattgagagcaaagagatacaaattgttgacaaatctgtcattga

SEQ ID NO: 129172 - DNA, 861 bp, Arabidopsis thaliana
  unsure (1)..(861): unsure at all n locations
tacgcctgcaggtaccggtccggaattcccgggtcgtctcactctctccagagcaacaatggctgcgactgcttcttctcttacaatcgcgtcgtcattctccgaaccacggactcagatccattcctcgagacgtttgaatctccctcttcaatattcaatcccgtacaaggtgttacggagtaggagtagaagattaggactcgtcgtcagttctgtttcagctcccaacgttgagctccgtactggacctgatgatctcatttctaccctcctctctaaggttgcgaatagtgatggaggtgtgacgctaagccctgagcagcacaaggaggtggcacaagtggccggagagcttcaaaagtactgtgtcaaggagcctgtcaaaaatcctctcatttttggagattgggaagtggtgtactgttctagaccaacctctcctggtggaggctacagaagcgtgataggccgtctcttcttcaaaacgaaagagatgatacaagccatcgatgctcctgatatcgttaggaacaaagtttccattaatgcttttggttttctagacggagacgtctccttgacagggaagctgtaagcgttggacagtgagtgggtgcaggtnatattttgagcctcccggaaatcaaaggtttggntcttttggagttcaaattacggggttcggaaagcgaagttnaagnttccggttcacatancgttgatgngaaacttaggtttgggtttgggtntaaaggntccattnntccgcnttagaaggcgncaaaattnancggtttcccctgggnantacccntgaanccctccggaaaaagggccacctttngggccncgggnttt

SEQ ID NO: 129173 - DNA, 442 bp, Arabidopsis thaliana
gcgctgtcctggctattgagtccattcataagcacaactatattcacagaagtatcaatcctgattatctgctacttgacaaagacggccacatgaaattgtcagattttggattatgtaaaccattagactgtagtaatcttcaagagaaagacttcacagttgcaagaaacgttagtggggctttacaaagtgatggtcgccctgtggcgacaagacgcacccaacaagagcaattactaaactggcagagaaatagaaggatgcttgcttattccacagttggcactcctgactatattgccccagaagttctgttgaaaaaaggatatggaatggaatgtgattggtggtctcttggcgccattatgtatgaaatgcttgtggggtttccgcccttttagtcagatgacccaatgacaacttgtaggaagatagtaaa

SEQ ID NO: 129174 - DNA, 484 bp, Arabidopsis thaliana
cggacgcgtgggctttcttcttcttcatttcctctttctttcttcttccttctccattttttctctaatcgttggacaaaaaagattgagcctttttctgggttttattttctataaaggaatcgaaagaagcaaggacagattttaaaaaaaaaatcttgggttttcaagaaaaagtagagacattttaaagaatcaatagatttgtgggggtgaagtaaggaacatggaggaaacaatggcagctaggtattggtgtcacatgtgttcacaaatggtgaatccagtaatggaatctgagatcaaatgtcccttttgccaaagcggattcatcgaagaaatgagcggtaatggcggtggaggtggtggcagaggcataagagatgttcaagattcagaaaccgattttggaacagaccgtgcattgtctctatgggcaccaatcttgcttggaatgatgagtagtcctcgcagacgaagaagg

SEQ ID NO: 129175 - DNA, 610 bp, Arabidopsis thaliana
  unsure (1)..(610): unsure at all n locations
accggaatggaccgggtccgagcccacgcccgatccgaatctcttctttctttttttcaaccgccgcgataattttctcgtatctcgattatacagaatggcgaagggaaccccagttcgtgttcttgttacccggagctgcaggacacaatcggatactgctcttgttcctatgattgcaagggggataatgcttggtgctgatcagcctgtgatcctccacatgcttgacatcccttttgcagcagaagctttgaacggtgtgaagatggaattggtcgatgctgctttccctcttctaaagggtgtggtggctacaactgatgccgttgaagcgtgtaccggtgttaatgttgctgtcatggttggtggtttcccgaggaaggaaggaatggagaggaaggatgttatgtccaagaacggttccatttacaagtctcaaagcttctgccttggagcaagcatgcctgcaccaaactgcaaggttctggtttgttgcaaaccctgcaacaccaattcattgatccttnaggantttnaccatngtcccagngagnccattnttnttgccaggttnccnaaaaggattggcaanttttanggtagggnc

SEQ ID NO: 129176 - DNA, 445 bp, Arabidopsis thaliana
acagtataactgtataaggtctcattttcgtgtgctctcgtcgcgattactctctttgagctctctctctctcttctaacatcggtcttgtattggtgcttattggatatctccggcgaaggaaacgagtttcgcggttagatttttctttatcgcttaccggcgaggatgatcgtttcttcggtaaggtcgattaatcggttctgttttcgaagatgttgttgttagagttagatccgcatggttttggtgatcgttttggatcgaagacgtggttccacagacgcaaaaaatgccgtcgtctcttgctttgagatttggcttctgaaatctttcctctttcgttctcgttgaatcctaatttttgctttggcttttttagaaatttttggtctttctaatcctggggataggttacagtctccgattgtaaatagaaatttgc

SEQ ID NO: 129177 - DNA, 657 bp, Arabidopsis thaliana
  unsure (1)..(657): unsure at all n locations
nnnnnnnnnnnnnnnnnnnnnnngagaagaagaaatagaaatgagagctctcttgtgctcacaccgtttactaccattatcatctctctcaagaacaaccgtcaaaaccaaatctcacaatccaaaaaccctatatcctaacaacaaaccaagatgggaatccaagctccacgctggacctaaagggtttcaatcttctagaacctctgaaaaacccggccggccagacccggacccggaagacgatcccccgatacctcaagaagtgttcgagaggatgatggggaggattgtggtgtctgtgggaacaccactgggcttgggagtggcgatcttgaaagtactcgaagttttgaaggatagaaacgtctgggacgtgcctttgtgggttccatacttgaccacactcgtgacctttggttcgtcggctcttgggattgcgtacggaagcttgtccacaaacctggacccggccaagactaactctctttttgggctcaaagaggcaaaggggaattgggtaaaaatttggaaaagggcataatgggaatggttaatggaaaaaactttgggggcggaatttttnnanccngggggccccantttttnaggggnncnccggggggngnccactttntccccttnganggggaatnt

SEQ ID NO: 129178 - DNA, 991 bp, Arabidopsis thaliana
  unsure (1)..(991): unsure at all n locations
nnnnnnnnnnnnnnnnnnnnnnnnnnnnnnnnnnnnnnnnnnnnnnnnnnnnnnnnnnnnnnnnnnnnnnnnnnnnnnnnnnnccacgcgtccgccttgagcttttagaggcttgtgctatgaattgcgagaaggttttctctgaagttgcttctgagaaagttcttgatgagatggtttggttaatcaagaacggagaagctgattccgagaacagaaagcgagcttttcagcttattagagcttggggacaatcccaagatcttacttatcttcctgttttccaccagacttatatgagcttggaaggcgaaaatggattacacgctcgaggtgaagagaattcaatgccgggacaaagttctctggagtctcttatgcaacggcctgttccagtgcctccacctggtagctatccggttcctaatcaagaacaggctcttggggacgatgatggtcttgactataactttgggaacttatcgataaaggataagatagaacagattgagattacacggaacagcctcgaattgctctctagcatgttgaatactgaaggaaagccaaatcacacagaggacgatctaacggttagcctgatggagaaatgcaagcaatcgcagccattgattcaaatgatcatagagagtacaacagacgacgagggagtcctgttcgaggctctgcatctgaatgatgagctccaacaagttttatctagttacaagaagcctgatgaaaccgataagaaagcctccattgtggaacaagaatcatcaggaagcaaagatactgggtccgaaccaacagaacatgaagaacaagagcctgtaaagaaaacgggtgctgatgatgacaaaaacattcagaagcatcaagatcctccaccaaaaccgtcaaaaaaaaaaaaaaagnnnnnnnnnnnnnnnnnnnnnnnnnnnnnnnnnnnnnnnnnnnnnnnnnnnnnnnnnnnnnnnnnnnnnnnnnn

SEQ ID NO: 129179 - DNA, 453 bp, Arabidopsis thaliana
gagtttagagagaaagaagcacgaaaaccaaatcaatggcggtttcagtttcaatcctcaccgtcgtcactgctcttcacctccttgctttcgtcttcgccttcggtgccgagcgtcgccgtagcaccgctgtgccggttccggatcagtacgatgagaagactatttgtaagtacggaactgaggcgtcgacagtgtacggtatgtcggcgtttgggttgcttcttgttagccaagcggtggttaacggtgttactaagtgtctctgttttggaaagggtcttgttactggtacttcttacactgtctgggctattgtcttcttcgttgtttcttgggtaagctttttaggagctgaggcgtgcttgttgggtggatcagcgaggaacgcgtaccacactaaaagtgaaggcatttacaaagggaaagagctttcgtgtgccgcctacccgt

SEQ ID NO: 129180 - DNA, 1217 bp, Arabidopsis thaliana
ttcgccgtaccggtccggaattcccgggtcgacccacgcgtccgcgttatccatgcggacttgaaaaattatccttaggagatttttcctgacctatcctcgcgtcgcgccttcttgtcttctctctcaatccagcatattcctacgcaaatcccttatcgttttcatgtttgtcctggtttaaatcttcaatctcctacccggtcttttcatcctccgatggcattccttgttcgttcgccggagatacccaccgtctcggcgagaatcttctccgatgcgaattcgagtgttattagtcatgtgtttatgaggaggaaggctacggtttcggcgattgacgccagagatttgcctggtgttaagaatccgaaatcgagattgtactggcaattctcagctccggtgaaagaagactacaagattagcagagaggaggaagaagaagaagaagaagataagcagagttactacgtgaatatgggtcacgccgttcgtagtatcagagaagagtttcctttgtttgttctacaaagagcttaatttttgacatttacagggatgatattgttttcaaagaccctatgaacactttcatgggaattggtaactacaaatccataatttggggccttacggttccatggaaggttcttcttcagagccctaatgtgtgggcattgttagtgtttggcaacccacagagaacactctgatgatacgatggactgttcatggaattcctcgtggtccgtgggagactcgtggtcgattcgatggtacttctgagtataaattcgataagaatggcaagatttatgagcataaagtcgataacatagccattaattcgcctccaaagtttcaaatgctcactgttcaagagcttgttgaagccattagctgcccttcgactcccaagcccgacctactttgagttcggagattgattcatcatcatcgtctgaaacatcatgctggtgttatgtatactagtagtcttttgtgtggttataaatagagtggtactgtaatatagatgaagaaggaacgatttaaaataaacccaatagcatgaatacattacacgctttttttgcgtataataatcaataaaacgcgctatatgtaaaaaaaaaaaaaaagggcggccgctctagaggatccaagcttacgtacgcgtgcatgcgacgtcaagatactctataggtcaccta

SEQ ID NO: 129181 - DNA, 566 bp, Arabidopsis thaliana
  unsure (1)..(566): unsure at all n locations
atgattctccaagctccctacgactcactatanggaaagctggcacgcctgcaggtaccggtccggaattcccgggtcgacccacgcgtgcggtagatcggcagagaaaggcggtgcgatttgttattacaagcgcagggcttgttggatccgatggtccagtgcagtgtggagcttttgacatagctttcatgtcatccttaccaaacatgatagccatggctccagccgatgaggatgagcttgtaaatatggttgcaactgctgcttatgtcactgaccgcccagtatgtttccggttccctagaggctccatcgtcaacatgaattatcttgtccccactggattaccaattgaaatcggaagaggaagagttctcgtagaaggtcaagatgtggctttacttggttatggagcgatggttcagaattgtcttcatgctcactcgcttctctcgaaactcggtttgaacgtgactgtagctgatgcaagattttgcaaacccctagacatcaagcttgtgcgtgatctttgtcagaaccacaaattccttatcactgtcgaa

SEQ ID NO: 129182 - DNA, 534 bp, Arabidopsis thaliana
atgatctaccaagcatcaatacgactcaccttagggaaagctcgtacgcctgcaggtaccggtccggaattcccgggtcgacccacgcgtccggctgccacgaattggcgtattttagattgatacgtcaaagctcctcctcgcgcacgttagctaaaggaatgtcttgtactctttttgttgttgttgttgattttttgaacaaagaaagaaactaatcaaaaagacgaagaggaagaagaagctcaccgtttctatctctcattttaaccactgatcttcgccgattgcgtcttgcttctcgtcgtgtgcttccgatctctctctggattttctcaatttcgtacggagtaggtgaattgtgtacaaaggagtttagttgatcattgttttggacatgtgggatgatgatgcgtactgttgcgttaccattgtcccatgatctgaatgttcataagatccatgaagcttctggattccataatagtgctgctggtaaaaatcgtgtgtatctgactcggactggtctttcat

SEQ ID NO: 129183 - DNA, 602 bp, Arabidopsis thaliana
  unsure (1)..(602): unsure at all n locations
atgatctnnnnnnnnnnnnnnnnnnnnnnnnnnnnnnnnnnnnnnnnnnnnnnnnnnnnnnnnnnnnnnnnnnnnnnnnnnnccacgcgtccgtacggctgcgagagacgacagaaggggatttctgaaattaagtgaatctgaaggtgaaagcaaagccggaggaagaaataagaatcacagaggtaaaattgtgatggagctcgaagatccaacaatggcagattccacgattaagctaacagtcaaattcggaggcaaatcaataccactttcggtatcaccagattgtacagtcaaagatcttaagtctcagttacaaccaatcaccaacgttcttcctcgtggccagaagctcatcttcaaaggttttggttgaaacgtcgactttgaaacaatctgatgtgggaagtggagctaaactcatgttaatggcttctcaaggtctgcatcaaggggaaggtccaatacttaaggaagctagtataaggccaatctctagaactgttgtatctgataaagtagatcagagaaagcctagtgtacttgtagacaagaaccgcactgatcgatggaaagccacaggagttattgctttagct

SEQ ID NO: 129184 - DNA, 537 bp, Arabidopsis thaliana
  unsure (1)..(537): unsure at all n locations
cnnnnnnnnnnnnnnnnnnnnnnnnnnnnnnnnnnnnnnnnnnnnnnnnnnnnnnnnnnnnnnnnnnnnnnnccacgcgtccgggttcgccgaagcttcttcaatggcgatttctctcgccaccggctatatctcttcatggtttacaccggaatcgtctaattccgcttcaccatcacgaactctttcctccgtacgattaccttctcagattcgccgattcggaagtgggcaatcgccggcttcgtctactcgcttccctccactcactggaagagcagcaaagaagccaactttcaactcttttgatgatttggtggaaaactttgattaacctggacttggagaactctatggttcttggggggggtcatggtaacttaagggtccttttcctaatggaggggagggaaccattgaaggatttatttgcggttgggaaaatggatattggagagtacccaattcttgctaacaaataccagattgaggctttgcccacattcatcttattcaaagacggcaaactctgggacc

SEQ ID NO: 129185 - DNA, 793 bp, Arabidopsis thaliana
  unsure (1)..(793): unsure at all n locations
gtttcgccgaagcttcttcaatggcgatttctctcgccaccgcctatatctctccatgttttacaccggaatcgtctaattccgcgtcaccatcacgaactctttcctccgtacgattaccttctcagattcgccgattcggaagtgttcaatcgccgtcttcgtctactcgcttcgctccactcactgtaagggcagcgtagaagcaaacgttcagctcttgtgatgatttgttgcagaactctgatcaacctgtacttgtagacttctatgctacttggtgtggtccatgtcagcttatggtacctatactcaatgaagtgagtgaaacactgaaagatataattgcagttgtgaaaattgatactgagaagtacccaagtcttgctaacaaataccagattgaggctttgcccacattcatcttattcaaagacggcaaactctgggaccgtttcgagggtgccttgccagcgaaccaactcgttgagcgtattgagaattctttgcaagtgaaacagtaggtttgagaaaccaagactacttgtcatctatgaacaatctgttgtgacataagccattgttgattgtttgctcggtataatcatctacctattcatatatggcatctgccatttttcttaaaactcttgctcatttttaaaagtttttcctcctttgggatgctcaatacatacaaacgtatccgaccaaatgataagtttaagttactccgattgtaaaacccaaactctatgttaatcaataatatgagatctacnnnnnnnnnnnn

SEQ ID NO: 129186 - DNA, 768 bp, Arabidopsis thaliana
  unsure (1)..(768): unsure at all n locations
nnnnnnnnnnnnnnnnnnnnnnnnnnnnnnnnnnnnnnnnnnnnnnnnnnnnnnnnnnnnnnnnnnnnnnnnnnnnnnnnnnnnnnnnnnnnccacgcgtccgaatatccacaaaccacaaccaagcaaattctttagctttctcacaccatccatattcactatcacttgtatgcatagatatgcatatagatgtacatagatatcttacttcctagttctaatttgagttacaaaaatgttgaaatttccactttgttgcagtgagttatctttagaaccgaagattctagcttttgaaagtcagcttgtttcggggcgacgcgatacaatcaaagtttctgcgggaaaaatcggaaatttctctcttggttcgatattcaaaagttgtgagacttgtggagccaaaggagcaattgaatgtcccggttgcaagggaacaggtaaaaataagaagaacggaaatatgtttgagaggtggaaatgttttgattgtcaaggatttggtatgaagagttgtcctaaatgtggcaagggaggcttgacgcctgaacagagaggggaacgatagacttatactatttgtttttcctacataagttaattttgtgatacaaacatgtctctattcctataacatttcagtcgtataatttgcatgtaaaaataaaaatcattaataaaaaaaaaaaaaaaagnnnnnnnnnnnnnnnnnnnnnnnnnnnnnnnnnnnnnnnnnnnnnnnnnnnnnnnnnnnnnnnnnnnnnn

SEQ ID NO: 129187 - DNA, 542 bp, Arabidopsis thaliana
  unsure (1)..(542): unsure at all n locations
acgcaggtaccggtctgngattcccgggtcgacnacgcgtccggatccgtttcaatatccacaaaccacaaccaagcaaattcttagctttctcacaccatccatattcactatcacttgtatgcatgtacatagatatcttacttcctagttctaatttgagttacaaaaatgttgaaatttccactttgttgcagtgagttatctttagaaccgaagattctagcttttgaaagtcagcttgtttcggggcgacgcgatacaatcaaagtttctgcgggaaaaatcggaaatttctctcttggttcggtaagatttcactatacatccatatacaatatgatatggttatcatcgtcaatgaaggagttttgttaattcctccaaaggttttttcaaacagattttcaaaagctgcggggcttgtggggctaaaggggcatttgattgtcccggttgcaaggccctaattggggttcattactagatactatgtaataaaactaataataacttcaagtgagtctatttctttagtatat

SEQ ID NO: 129188 - DNA, 749 bp, Arabidopsis thaliana
  unsure (1)..(749): unsure at all n locations
tatcgtggatagatctgcttcatccgatgattcagattattatagaagttacagtagtagaaagaaaagatcagagaatgattacaaaagccatcacagggagagaaagcaagtgcatagtaacgatcctgtttcagagaaaagtcagaaacagcattattcggagtctggaaagattcagagagtcgagaaagagcatagatatgatgagagaagacacagatacgtcgatatggagtctgaaaatcgtaatagatccgagaagaaaccgagatatgatgatcgtgattctgagaagcatcacaggagtgtgaagggcaaagaaaagcatgtgtatgaagcatctgatgatcctgaagagttttctgacagatacagaagcacaaagaaaactgaatctgattcggaatcaaaccgtagaagtagaaagaagaagcatgagttgtcttccgaagaagaagaaggggagtctcgtaagcatcgatacagcactaatagaaggagaaactgagtctatgctatgtcaattgtcctggaccaagagttatggttccggtctgaatgagattgcgagataatgtagtaatgtacgattgttttttttttttggtctatgtatactgggtttataaaagcttaatgagtccatgactctttttattaaaaaaaaaaaaaaaagnnnnnnnnnnnnnnnnnnnnnnnnnnnnnnnnnnnnnnnnnnnnnnnnnnnnnnnnnnnnnnnnnnnaac

SEQ ID NO: 129189 - DNA, 365 bp, Arabidopsis thaliana
  unsure (1)..(365): unsure at all n locations
ggaacttaaacagatatttcataaggaaaatgaagggtgagtttttcacattgatggcaataatgtctctcctcttagccttctcgttagtccatggaggaggagagtctggaacaccttctaatgcagccgctaccccgactagcccaaccgaaggatccagtggttcaagtggttcagctcatggacctaattggggatatagttggggatggggttcagccccgggaggtggttatggctatggttctggttcgggttcgtcaccacatggaggaggaaaaggggctggattcgggtttggttcggggtcaggttcaggaactggatttgggtctggctcgggaggangangagccacagac

SEQ ID NO: 129190 - DNA, 817 bp, Arabidopsis thaliana
aattctgcggccgccaataacaagagaagaagaagtaggttcaagaattaaggaagagagcttctccgttaaagtatagtgagagaatatggaagtcaccaatgggcttaaccttaaggacacagagcttcgtttgggattacccggagcacaagaagaacaacaactagaactttcttgcgtcagaagcaacaacaagcgcaagaacaacgactcaacagaagaatctgctcctcctcctgcaaaaacacaaatcgttggatggcctccagtgagatctaaccgtaagaacaacaacaacaaaaacgtgagttatgtgaaagtgagtatggacggagctccatatctccgtaagatagatctcaagatgtacaaaaactatccagagcttctcaaagcactagagaacatgttcaagttcacagtaggtgaatattccgagagagaagggctacaaaggatctggatttgtacctacttatgaagaccaaagatggagattggatgttggtcggtgatgttccatggggcatgttctcttcatcttggtccaaaaactcaggatccatgaagggttccgaagcttcctacttgccttattggacccattggttctcaaaacccctttttgggtcggggcaaaaacaaattctactttgtttagataaaaaaaagtttggtgtaaagaaagaaaaagcaatagggttacaaatacgttatatagatgtaaactagctttggttaattctgtaaaagatgagttttgattatacgaagtttatatgtatgctcaagatatttgatactaacataatcc

SEQ ID NO: 129191 - DNA, 387 bp, Arabidopsis thaliana
aaatctagtttcccttatatactaggacaagcagtgctttcagctgtcgtcttctggaagaacttcacagcttattcgatgactaagaagctgtttccggccggggtttttgctgtcatcagtgcttgcatgttgtgtttctattcatatgtggtgctctctggaggaaacccccctccaaagaaattgaaaccatctgcgactagtccttcatactgaagggactttacataggtttagatttaaaaaagtggagatcttctctcttttgataactctggtctgttggattactggtgtaattttatactctttacgaattgatacacttggttttgtttgtgacctgttctttccaccgtcataatctaaagttttgattttctt

SEQ ID NO: 129192 - DNA, 761 bp, Arabidopsis thaliana
  unsure (1)..(761): unsure at all n locations
cgcctgcatgtaccggtccggaattcccgggttgacccacgcgtccgagcaccttcagctcttgaatttttttcgtttcagactaacggatcgaaacttctcagccaaatcagccgcatctaacctcacgcgccgccgcaatggcaactccaccgacgctacctgtcaccaatcagcaagctgttcaatctcagcctccaatcaacacacctgcttttcgtactttcttctcacgtctctccacctcgatccgtgatggcttgtcacagcgtcgtccatggacggagctcatcgatcgtagttccatggcgagacctgaatctctcaccgatgccttgtcccggataaggaagaatctcgcttacttcaaggttaactacgtcgccatcgtctccctcgtactcgccttttcgcttttctctcatcctctctccctccttgtcctcatcggactcctaggcgggtggaggtttctctacctcttccgtccctcagatcagccactggtcgtcttcggtcgcactttctctgatcganagactctgcttgctcttgtgctgtctacgatcgtngtcgtgtttatnacgagcgttggatctctcttaacctccgcgcttatgattggngttgcaatcgtttgcgtacacggtgcgnttgtggttccggatgatctcttcttggacgngcaagagcctgcnaatgctnggattactctcaatcctttggaggtcttgctaaccnaagctngctgaannttnttt

SEQ ID NO: 129193 - DNA, 647 bp, Arabidopsis thaliana
cggacgcgtgggctctttttctaattttttaaaggttctttcatcttcttcagatccgaattgtcgccgcgaaattcgtcagtgcagcttcttcttcttcgcgtactttattcgatcggctgtctgaagaacatgaagccgatgatcgtagttgctgctagttacggcggattgatgtttggatggacgcagaaattttgatgtgggtttagtctaaaaggcgaagaacaatgctcgggaatcaatccgcggattttagtgagaagggggaagatgagatcgtcagacagcggtgtgctaatgggattggcgtgaaaacaactgaagttgaagcaaaccttgatgaaggaaatattcaagaagctgaatcttctttgagagaaggattatctctcaatttcgaggaagcaagagcacttcttggaagattggaataccaaagagggaatttagaaggcgcacttcgtgtctttgaaggtatcgacccttcaagcagctatcccaccggttacaggtcttccgtgcctcttgagaaaccggctactaagaaaaactcgccccgctgaaccgcagcaatcactttctcagcatgctgcttacttggtccttgaagctatctacttgaaagccaaatcccttcaaaagct

SEQ ID NO: 129194 - DNA, 433 bp, Arabidopsis thaliana
gaacaatgctcgtaaatcaatcctcagatcttacttatattgggcaagattagatcatcagaggggtgtgtactaatggcatgggggtgaaaacaactgaatctgaagcaaacattcatcaatgaaatattcaagaagctcaatcttctttgagagaaggattatctctaaatttctaggaatcaagagcacttcttgtaagattgtaataccacagagggaatttagaaggcgcactccctgtctttgaatgaatccacccttaaccatctatcccaccgctacaggcttccaatgcctcttgggagaccggctactaataaaaaccgtcccccttaaccgcagcattcactttctcagcatgctgctaacttcctccttgaaactatctacttgtaaaccaaatcccttcaaaaactttggagaataactt

SEQ ID NO: 129195 - DNA, 507 bp, Arabidopsis thaliana
  unsure (1)..(507): unsure at all n locations
nnnnnnnnnnnnnnnnnnnnnnnnnnnnnnnnnnnnnnnnnnnnnnnnnnnnnnnnnnnnnnnnnnnnnnnnnnnnnnnnnnnccacgcgtccggagaatttgcgcgacaacaacgatcgatcagtcgtcgtcttctcagatcttgttcttcaaaggattctatgccgcaagagcttcgattgtatcctctctgaggattgggtaatacccaataccatggataacaatagcgagcgcaaaggaaaacgaatcgataaggataatattcgtgtcaagcggaaaactttgcaagctttgctcaatgattgccagagagccctcgagttattaaacttagccgaagtcagttctgaagacgatgaagatgataaaagcaccggcgagggaagtgggtcacaagagagcaggggagaagtttcttcttccgatcgagaagatcctgaagctgatgaattatatgatctcatcaaatccagggttgaatgtgatgacttccttgaaaagat

SEQ ID NO: 129196 - DNA, 588 bp, Arabidopsis thaliana
atgatacttccagctctcactacgactcactattgggaaagctggtcacgcctgcaggtaccggtccggaattcccgggtcgacccacgcgtccgcccacgcgtccgaatttattttccatttttctgtacagccagtcctcgtcttgctggcctgcaataataatgtctctgatcggccgcctcaatcttggtcggcgcttctgcaccgccgtgccaagaagatcggaagacataatgtcaaacccagattgccgcccttctgatctatgcttgagggtctcgtacttgatcagatgcgttggggatctcgacacggcggcgaagtacgctcgtttggctgttttcaccagcatcaaatcggagtcaacaacaacaatatgtcaatccatcatcggaggcatgttacgggataaaaggctcaaggacgcttatgatctctacgagttcttcttcaatcagcataacctcagacccaacagccattgctggaactacatcatcgaatctggtttccaacaaggtcttgtcaacgatgctctgcatttccaccaccgatgcatcaattccggtcaggtccacgactacc

SEQ ID NO: 129197 - DNA, 528 bp, Arabidopsis thaliana
ccagctacatacgactcacattagggaaagctacgtacgcctgcaggtaccggtccggaattcccgggtcgacccacgcgtccgcaggttaatcgttaattaccctctgattcccaagatatcccaccgggtttgtagtaacagtagtagtaagctcagggagttactatgattcttcgtcgatcataaaatatggcggaatcagcgatgttgttggtaagaagcaggagctttttctaagtgtttcggtgaaagcagtggaagacaaaggtaacaatggaggtggaagcatgagtttctcgggtcaaagctgggatcctagttccgagattgaagttccttcagaccaaagacccgtgaatgagtattcgtctctaaaggaaggaatgttgtattcatggggagaattgggtccaagcgaattctttattcgtctaggtggtctttggttggtcactttcactgttcttggagttcctgttgcagctgctagctttaatccttccagagagcctttgagatttattc

SEQ ID NO: 129198 - DNA, 537 bp, Arabidopsis thaliana
  unsure (1)..(537): unsure at all n locations
atgatcctgccagctannnnnnnnnnnnnnnnnnnnnnnnnnnnnnnnnnnnnnnnnnnnnnnnnnnnnnnnnnnnnnnnnnnccacgcgtccgcagctctttcgaagaaatagcttagcaatggcttggggaataaggatgaagatagctctcggagccgccaaaggtttagcttttctccatgaagcagagaaacctgtcatctacagagactttaaaacctctaacatattgttagactccgactataacgccaaattatctgacttcggtctagccaaagatggacctgaaggcgaacatacgcatgtaactacccgagtgatgggaacacaaggttatgctgcgcccgaatatatcatgactggtcatttgacgacgatgaatgatgtatacagttttggagtagttttgttagagctgataaccggaaaacggtcaatggacaatacccgaacacggagggaacaaagcctagtggaatgggcgcggcctatgttaagggaccaaagaaagttagagaggataattgaccc

SEQ ID NO: 129199 - DNA, 537 bp, Arabidopsis thaliana
  unsure (1)..(537): unsure at all n locations
atgatcctgccnnnnnnnnnnnnnnnnnnnnnnnnnnnnnnnnnnnnnnnnnnnnnnnnnnnnnnnnnnnnnnnnnnnnnnnccacgcgtccgtctctctttccgtcttcatcgtcctcccggcttctgcgattttgtttagtagcgccggaccggagtagttaaaaccctagcccagtctatttaaagattcaccgagtagtcttctagtcctgcgtatacttcttcttcttcgtttatacttagaagatgaattgtgcaatttccggcgaagttccggaggagcctgtggtttctaagaagtcgggtttgctttacgagaagcggctaatccagacgcatatatccgattatgggaaatgcccggttactggtgagccacatactcttgatgacattgttcccatcaaaactgggaagatcgtaaagccgaaaccattacacacagctagcatccctggattgcttggaacgtttcagactgaatgggacagtttgatgctatcaaattttgctttggaacaacaactgcatact

SEQ ID NO: 129200 - DNA, 514 bp, Arabidopsis thaliana
  unsure (1)..(514): unsure at all n locations
atacgactcactatagggaaagctggtacgcctgcaggtaccggtccgggattcccgggtctacccacgcgtgcgngggtttggtttgatcggaagagttgttggaaccaaatcatcacgattatccacggcggcgcgattgattccggcgcgatggacatcaacaggatcagaagcacaatcgaaagcttcaaccggcggcggaggagcgagtctgaagacttttcagaggtatcgatggaatccagataatcctgggaaagccagagcttcaagattacaaaatcgatctcaaggattgtggtccaatggttctagatgctttgattaagattaagaacgagatggatccatcgctcactttccgtcgctcttgccgtgaaggtatttgtggttcgtgtgctatgaacattgatggatgtaatggtcttgcttgtttaacgaagattgaatctggatctaaagagacgacgattacgccgttgccgcatatgtttgtgattaaggatttggt

SEQ ID NO: 129201 - DNA, 485 bp, Arabidopsis thaliana
  unsure (1)..(485): unsure at all n locations
ctccgagaaaatggcgtttggtttgatcggaagagttgttggaacgaaaccgtcacgattatccacggcggcgcgattgattccggcgcgatggacatcaaaaggntcagaagcacaatcgaaagcttcaaccggcggcggaggagcgagtctgaagacgtttcagatctatcgatggaatccagataatcctggaaagccagagcttcaagattacaaaatcgatctcaaggattgtggtccaatggttctagatgctttgattaagattaagaacgagatggatccatcgctcactttccgtcgctctttgccgtgaagggtattttctnggttcgtgtgctattgaaccattgatgggatgtaattgggcctttccttgttttaccgaagatttgaattcttggatcctaaaagaggccgccgggtttcccccgtttcccgcataatgtttttgtanataaaggaattncggttttttggat

SEQ ID NO: 129202 - DNA, 403 bp, Arabidopsis thaliana
  unsure (1)..(403): unsure at all n locations
ccgaggaaaaaaatggcgtctggtttgatcggaagattggttggaacgaaaccgtcgaaattagccacggcggcgaggttaattccggcgagatggacctctacaggagcggaggcggaaacaaaagcttcctctggcggcggaagaggatcgaacttgaagacttttcagatctatcgatggaatccagataatccagggaagccagagcttcaaaattaccagatcgatctcaaagattgtggtccaatggtattagatgctttgattaagatcaaaaacggaatgggtccatcttttactttccgtaggtcatgccngtgaaagggatcttttggttcaaagtggctatgnacattgatggntgtaancggncttnctttgtttgncaaangttnaagnt

SEQ ID NO: 129203 - DNA, 1007 bp, Arabidopsis thaliana
  unsure (1)..(1007): unsure at all n locations
nnnnnnnnnnnnnnnnnnnnnnnnnnnnnnnnnnnnnnnnnnnnnnnnnnnnnnnnnnnnnnnccacgcgtccgcccacgcgtccgaaagaagaaacctgggaagaagtgagaaactcatctgatcgccatgagtgaagaaactccgaagcttttcaccaataaacccaagaagaaggccattatcgctcagcttaagcacgttgaagccaatttcaacaatcccaccgttcctccatcatctaaaccgtctccagctgcagcagcggcggcttcgtatacgatgggtggtggttctgttcctcctccgcctcctcctaaggaatcattcgctcgtaggtacaaatatgtctggccgcttctccttaccgtcaatctcgccgtcggaggttatctgttctttagaactaagaaaaaggacctagatcctgtagttgaagagacggctgctaaatcgagttcagttgcagctcctgttactgtggaaaaaactttgtcttccacagtggttgcagagccagtggtgatcaaggcacgtgagccaattccggagaaacaacaacgtgagctcttcaaatggatgttggaggagaaaaggaaagtaaatccgaaaaacgcagaagagaagaaacggaatgacgaagagaaagcgattctcaaacagttcatcggctccaaaaccattcctactttctgattcattaaagtgcagattctgttgatttttagtttggtttcacttcttactttgtggatatcacatgttttgcttttggaaaaattgttcgtttcattgttgaaaccagtcactttggtatcttcagttccaacattgatccattgtccggtcttgtgtttctgtgtcattgtgaaacgttgaatgctagagaaaaaggttcgactttttatgggctaaaaaaaaaaaaaaaaaaaaagnnnnnnnnnnnnnnnnnnnnnnnnnnnnnnnnnnnnnnnnnnnnnnnnnnnnnnnnnnnnnnnnnnnnnnnn

SEQ ID NO: 129204 - DNA, 431 bp, Arabidopsis thaliana
gcgtcgcgggttttttctttcctccaaaatttttaaacaacttctgtgtctgtggatttctacttggacggcgatggcgagaattggggctaaacccagaaattgaggatttgaattctgctgctgcggcgtctctgtggtggtttggtttctcgtttctgaaaatctacggtgtagtaagtcggagttgcagttgagatttagcactcggccggcaggataaccttccggttcaaccggataaacctccgaagagtctggttcgtcccattttaaacctggaaacaacttcgtcttcttcatcctcttcctcctcctcaccggaacttctacggcatttgcaagccgctttcaaacgccatcgcccactcagtaaaatgcagacgaccagtatcgggcctcgacgaagtgttgctccacaaagacaagct

SEQ ID NO: 129205 - DNA, 542 bp, Arabidopsis thaliana
  unsure (1)..(542): unsure at all n locations
caagggncctgccacttatggacttcagcaattcatgccacctccatgggaactccgaaggccgaggaagaggcggttttatgggcgccctcgtggtggtggttttgccggtggtaatttcagaggtggcaggggagctagaggacgtggtggtcgtggcagtggtggaagaggacgtgatgaaaacgtatctgcagaggatcttgatgctgaattggacaagtaccacaaagaggcaatggaaacaagttagaaaggggagattaaacctattgcatgtctacatgtattccttcctttagtgccgatatgcttttgtattagtatgatctttagattgaatgtcaatgggtctgacattttcgagctttagcttttgttttttcttctcttggtgagcttcttagctttttgcagttgagttcagagaaacaagcattgtgtgtaccgtggaactcaaaactcttctaaaatatcaattcagaacacaattctatctannnnnnnnnnnnnnnnnnnnnnnnnnnnnnnnnnnnnnnnnn

SEQ ID NO: 129206 - DNA, 560 bp, Arabidopsis thaliana
attcgatcacacaagaaaaattacaattcttcttaatcctcattattatatatataaataaacttcaatctaagcttcttcgtaatttctctttcggccagtgcgacccgtttagatctcgaacaaaacaaagtctccagaagaaaaaaccaaattccatggcgtctaaagcgaagcagcatcttcgttatcagccgcgaaaatctgtgtcacgatcaacacaagctttcacggtgcttatacttcttctcgtagtgattctgattcttctgggtctcgggattttgtcactacctaatgctaatagaaactcttccaagacgaatgatttgaccaacattgtacgaaagagtgagacgagttctggagatgaagaagggaatggtgaacgttgggttgacgttatttcttgggagcctcgtgctgctgtttatcacaatttcttgactaatgaagaatgtgagcacttgatcagccttgctaagccgagtatggttaagtcaaccttggtagatgagaaatccggtgtttgcaaagatagcatagtgagaactagctca

SEQ ID NO: 129207 - DNA, 546 bp, Arabidopsis thaliana
atgagatggcaggcaagaccaagactcatatagtaaaaatgttttgacaatcaaaggccaaataagcaaagagatctctgactctctatctgaaatctcaaaacggagaacgcgagggaacaagagattaaagcatagtgagaccctaagagagagagctttaggtctagaggggatcttcacaattcacacaacaactacgagataggatcgtgcgcgtcaaaagaagctggtactgctgattccagccgaagattagtctccgcttctggttgttccggtggagactcgtcggaaatgagaggtcttttcaaatccaaaccgcggactcccgctgatattgttcgtcagactcgcgatctcctcctctacgccgatcgatccaactccttccctgaccttcgagagtccaaacgcgaggaaaagatggtggaactaagtaagagcatacgagatttgaagttgattctatatggaaacagtgaggctgagcctgttgctgatgcttgtgctcagttgactaagagttctttaaggctgatactc

SEQ ID NO: 129208 - DNA, 496 bp, Arabidopsis thaliana
tcttctctctttctctttttttttttttttattttcttctcttccatgtcacttccttgacgaattctatatacctagttcgttttttcttcctcaaatatatctttttcaatttatttggtttttctttgggtgcaacttcacctcacaaaattttctctctttttttatattaatttgagttaggcctttttgatttcatagatgagtcgtctagtcgtctggatttgatgtggttatagtcttacagagacctttgattgaaataagaacaaaagcaagaatacatacatcctcttcatcttacacccatccttttttacttttctagggttttatttttttttaatttattttttttctttgatttttatattctctctctctctcaaatctttactcatctgggtatggaagaataccagcatgacaacagcaccactcctcaaagagtaagtttcttgtactctccaatctcttcttccaacaaaaacga

SEQ ID NO: 129209 - DNA, 381 bp, Arabidopsis thaliana
ccggctccagctgagcttgagaagagaaaacacaagctcaaacgtcttgttcagtctcccaactcctttttcatgaaatatggaattggatactcaaaacttggttcaaatataatattctgaatcgattgaccagtaaggaaaacttgactcatgtgcgtgataagatggttcaactatttggagcttataaaagaaccacatgcaacattgcagcaagcacttctcaatcttcacgaaaggatatcccatttggatatgatgggttttactcttacttttctcaaagaaatggaactggaaaatcaccattagatatgtacttggaagagcctgtgttagatatggtctcttttagagatatggatgttattgcatatt

SEQ ID NO: 129210 - DNA, 822 bp, Arabidopsis thaliana
  unsure (1)..(822): unsure at all n locations
ncnnnnnnnnnnnnnnnnnnnnnnnnnnnnnnnnnnnnnnnnnnnnnnnnnnnnnnnnnnnnnnnnnnnnnncttttttttttttttttttttttgttaacaaatgtcgcattttattattaccgtaattcagccattgaaaacataaatttaggtaaaataccaatcccgttttccaaataatacaaattacaatgacatccacaagaaacctacttgtctaatccatgctctggatgagtgcactctcaaacaaagaggtaaacattaacagacattgacacacgatagtccacaagacatagagtgttatggcatatgtcttcgattagacacataatgctgacagtaaacgacgagatccacagagactggcggcattctcagaagcagcattcctccaacaaacagcaacagcaaagagcagcaagacagccacggatgaaagagaagcaaccagagtcagaatcttggtaatggtgatgatcatgatggcagtggtcgtaattttgcggcgaagaagaaggtggtggtccgtgatgctgatgaggataacctcctccggcgaagtagccttgataaccgccttcgtaaggacgtgaagacggtggtggatatcctccgtaaggctgaggtggaggatatccttcgtgatgcgacggaggagaaggatatcccggcggtggcggtgctgatggataacccggaggtggatagtgagattggtatcctggaggaggatacgattccggtgggactctgtcgtagctcattttttttttgtcaaaatcaacggacgcgtgggtcgacccgaaaattcaa

SEQ ID NO: 129211 - DNA, 514 bp, Arabidopsis thaliana
acgactcactatagggaaagctggcacgcctgcaggtaccggtccggaattcccgggtcgacccacgcgtgcgtacggctgcgagaagacgacagaagggaagggacagtccttttgggaacgctgcgcttcttgctgacgtgggtaggtacgaaacaatgcgatccctttggatgtcgtcttgtgaagtaacactcggtggctgcaagaggctcgcgcagaattcgccacggcttaacgtagagatcatcaacgagaatgagaataatgggatggaacagaatgaagaagatgaaagagagaaggttgataaactttacctctaccgaacagtggttgggactagaaaagatgcaccaccatatgttaggattctttagtctctttgcaccttcatgtgttttcaaacttttctttgtactagtttttgccttttatcaaacttggaacaaatacaaatgtcgcattttattatcaccgtaattcagccattgaaaacataaatttaggtaaa

SEQ ID NO: 129212 - DNA, 388 bp, Arabidopsis thaliana
ctttcgcagcgctcatagccgtggccaaaaactggccaaacttcatccggttcaggctatgcattctcgagccacacaaacctgaccacattacatttcaatcactggacgagggctttggtgcaatcgtacaagcttgcaagggtctaagacggctctctgtctccggtctcttaaccgatcaagtctttctctacatcggtatgtacgcggaacagctcgagatgctttcgatagcttttgcgggggacactgacaaaggaatgctctatgtgttgaatggatgcaaaaaaatgaggaagctggagataagggacagtccttttgggaacgctgcgcttcttgctgacgtgggtaggtacgaaacaatgcgatccctttggatgtc

SEQ ID NO: 129213 - DNA, 426 bp, Arabidopsis thaliana
  unsure (1)..(426): unsure at all n locations
ctgtaagctctccactaccatggcgtgtcctagagtgatttttctgattctgatcacgttcttcattttacagactgctttctcaagttcttggcaaacattgagtgggaaacctccggctgtgattgctcgaggcggattctctggtatgtttccagattccagtattcaagcatatcagttggtgaatataacaacttcaccagacgtaatgctctggtgtgatcttcaactaacaaaggatggtgttggaatctgctttccaaatctgaagcttgacaatggttctaacgtcataagaattgacccacattacaaagaaaggttgtctgttgatttcacatggaaggaactctctgatgtgaaattggcacanggtgttgtctcaagaccatatatattcgatgatgtatcctcgatattggc

SEQ ID NO: 129214 - DNA, 441 bp, Arabidopsis thaliana
ttctcacctcttttcctttaacgaactatttgaatctaaattcaaattgatttgttaagggaaacctgagctagaaaaaccatggcaaagatctccttcgtacttttcgttgtggcccttatcgcctttctccacgcttatgaagctcgcaaagtagtaaatctcggtgaagcatttgaaaaagacttacataaagccgaggccatgatcgcggaagaattaaaggctaagaaaacgaacattcaaggtttgaaatctgaggtgaaaacgttgagcaaatcagaagtgatgttgaaggaacttggaaatgcttacaagaaggatatggacttaaggccttacgaaaagaaactcaaaaacttcagcaggatcgtagccctcaagaaagcacctatgaaaaacaacaacaagaaacctgtatccataatccaatcgattttg

SEQ ID NO: 129215 - DNA, 419 bp, Arabidopsis thaliana
tcgcggacgcgtccgcccacgcgtccgggataccaagaaacttggttttaaaactggtactactaagtcatccgaaaaacggtttacacaaaaaccttttggcaggcaccttgtgtaggtcaagttgataactgaattccaggatggacatttttccggcggtttacttgaaactgccgatatccgttttcgacggattgaatgccgttctggacaaaccgtgcacgtcaagactaataaacgatacattaaattttccggttacatgtcccatacccaaccttagagaacatgtgtagcctttagcttaggcttccttgtgtgctgttatattgagtatatatgaggtaatttttgcctcttgtgttgtaacacttgtatttttgttcctttaacatttgatgtagagatttttccta

SEQ ID NO: 129216 - DNA, 732 bp, Arabidopsis thaliana
gcttgagcaaaccagaggctagctgttctttgcaggcgtttacagcgattgcgttgaccagcctcccgccgaggttgatctcttcagctacaggcagtagcctctcgcaggagtgaagaacagtgatcgaattcgatatgtcattgaaaatggagtctttcaggtaggcctctgttctcgcctcgaggttcttctctgacaagtcttctgtcatctccaggtaatgagccacgcatcgcagcgccgcaatgctggacgagttatattggacgccaacgccgtagcagaactttgcagcaagctcgaacgattctgagccgcctggaacagcggctaggttcagggaaaaggtcgcagagccgacttcaatggttaagtcactcgtaacgtccgagacaggcctggaacaacagagagatcagcaacattttgaggaaagaagagatgagttagtgaaagagtaccattgaggagtgtgtctgatactggaacttggacgaaacgcttttttagcagcaacactttgcttattagactcaggaacagtaacaacacccattggatcttattataatatatctcttctccccaaataaagttgtaaacctctttttgtgttactgcaaatatgtttttgtgtttctcccaaaaatgttccttaaaaaaaaaaaaaaaaaagggcggccgctctagaggatccaagcttacgtacgcgtgcatgcgacgtcatag

SEQ ID NO: 129217 - DNA, 628 bp, Arabidopsis thaliana
  unsure (1)..(628): unsure at all n locations
agaactttgcagcaagctcgaacgattctgagccgcctggaacagcggctaggttcaggttcgtgtcttttgattccagaacaagtttccggattcttccactccgagagacgagaggaaactgcaaaagagaacgagtttgtgtaaagcagtttctcttttttcttctgagtttattgaatttggttcccttgtgaagggaaaaggtcgcagagccgacttcaatggttaagtcactcgtaacgtccgagacaggcctggaacaacagagagatcagcaacattttgaggaaagaagagatgagttagtgaaagagtaccattgaggagtgtgtttgatactggaacttggacgaaacgctcttttagcagcaacactttgcttattaaaatcaggaacagtaacaacacccattggatcttattattatctatctcttctccccaaataaagttgtaaacctctttttgtgttactgcaaatatgtttttgtgtttctcccnnnnnnnnnnnnnnnnnnnnnnnnnnnnnnnnnnnnnnnnnnnnnnnnnnnnnnnnnnnnnnnnnnnnnnnnnnnnnnnnnnnnnnnnnnnnnnnnnnnnnnnnnnnnnnnnnnnnnnnnnnnnn

SEQ ID NO: 129218 - DNA, 380 bp, Arabidopsis thaliana
attctattttctcaattcatcttctaagacttgtggtttctccttccttggagttcacagagaattgggatttatcctcccttgtccggtttctatgtggccttccacatcacctagattcaccatcaccacaccttatccacacccacgcgccgcctcttctttcttacaggtgaaagctttccaacgcggcgactttgaccgtttggctgataacgttaagtcaggtaaagcatggagagacgcgtggagaagcgctaacgatggattcgagcaattcgtttttgaggctaagaaaaccgctgagcgaattgatcgccaatacgctgtttctcgccgctttagctccgctgctagctcagccgctgaccgtgctcgtg

SEQ ID NO: 129219 - DNA, 891 bp, Arabidopsis thaliana
aatacgactcactttagggaaagctcgtacgcctgcaggtaccggtccggaattcccgggtcgacccacgcgtccgcccacgcgtcaagagaaaactaaagaagctagaagatggagaaaagtaatgatcatgacaaggctagccacggcggctccggtggtggtgccacggagaagtgggaggagactagcctcggaatccgaactgccgagacaatgctccggttagctccggtgggcctttgtgttgcagcacttgttgtcatgcttaaggactctgagactaatgagttcggttcaatttcttactccaatctcacagcctttaggtacttggtgcacgcaaatggaatatgtgcaggctactctcttctatcagcagccattgcagcgatgcctcgttcttcttcgacaatgcctcgtgtttggaccttcttttgtctcgaccagcttctgacctacctggttcttgctgctggagctgtatcagctgaggttctatacttggcttacaatggagactcagccattacttggagcgatgcatgtagctcctatggcggtttctgtcatagagccactgcttctgttataatcacattctttgtggtttgtttctacatcgttctctctctaatctcctcttataagctctttactcgctttgatcctccttccattgttgactccgccaagaatctcgaagtcgctgtcttcggaagttagatcctccatttgctcttcaagtacatctagtttgtcatgtttcaaatgttgtgtgtttttaactttggtcaagagaaagaatgcttatgtgtttgctaaaaaaaaaaaaaaagggcggccgctctagaggatccaagcttacgtacgcgtgcatgcgacgtgatg

SEQ ID NO: 129220 - DNA, 656 bp, Arabidopsis thaliana
aatgatttaggtgcactatagaagagcttgacgtcgcatgcacgcgtacgtaagctcggaattcggctcgagctgagtcttgggggagcaatgaattaaaagatatattgacaggctcgcaagaggcaactggttcaccacttgttgttgctggtgatgagcgcgaaggggctcttaaggattctgataaagcatctgggaatgttaaagccacatcttcattaggaaatgagttcaaatctggagaaagacatggcggaacactcagttcgatgaatgctttgattgaaagttgtgtcagatactctgagacaaatgcctctttggctggttcggatgatgttggaatgaatcttcttgctagtgttgctgctgatgagatgtctaaatcgcctgttgcatctccctcagtatctcagcctccaaattccgtgatgaatgaaaattctactgtagggaacaatacaaagctaatggcttcggatggcttgcctcacgagcaacatcaagctgtttgtacctctgtcagtactgagcaaggtgagcaacatgttagcagtagtggcacacagttggagtcagaaataaaaaatgaatctaagaccggagatcgtgataagagctcgaattcaaacactgaagatctgcaaaggttg

SEQ ID NO: 129221 - DNA, 893 bp, Arabidopsis thaliana
  unsure (1)..(893): unsure at all n locations
ctggacaataaagaaagaaaaaccattttaaggggctttttatactaaaactccacagatctcccattctgagatgcagagtgataataacaacaattgagaccaaagcaaaatccgaaactgtcaccgttttcctttgtcttcttctctgccaaaatctttcaatctttatcttcttcctttttcttgtttttctaaaactttctccatcttgaaaaccaaaacaacccaagattaataatatacaccaatgggtactggttggcgacgagccttttgcaccaccgcccctagaaacagcgacgcaacagcgccagatctcgacaagcaacgcaccggctataatcttaccccaagtcctagcccaagaagctgcgtgaagctagcttttctatccggaggaagtaatccttcaactccccgaccaacttctagtcctagcctacgttgtcggactacagatgctgaaactcccacggcggaacaaacttccgacgccaagatcggcgactaagagtccaagactgtctttggccggctatctctaacccttcttcggcctcggtcacccgttaaaaccttttctcttgttccgcaaccagcttcaaattcagaagtacttttgggatatggtttgaaccagtgtgaaaccaggggcaaagggnccggcggaattatacggnggggggtnttcacacggattttaaattttccttgtattcgccggcctatgttnggnaaacagggnaagcttttttncccnngtttgaaatccattttgaaancggttttttccttnntccctaanaagnttgaactnattnccctnggggggtttttccgaatncagggggggggttttttnnggttttccnggaaaccagcaaagngga

SEQ ID NO: 129222 - DNA, 359 bp, Arabidopsis thaliana
ccctcgcgtccggaaaaattgaaaacctctctctgtctcattttccctttttttctctttatctcaagctcattcttcttcttaataactagatctctctttctttcttcttatttttctcttctcttctttagtttcgcttatctcgcggctctgaccagctctcaagttgttcgtttctggttaatggatattgaaccctcttgggatcttgggggggtggttatttccttttcgaaattgcatggccacatcaaatgaccaaaccaatactaaatcatcacattctcgtactcttctccttctcttcatcttcttatccctccttctcttcagtagccttacaatccccatgactc

SEQ ID NO: 129223 - DNA, 356 bp, Arabidopsis thaliana
tcggtttgttggaagagacattagggcttataccaggaatggtgaattacagagttgaagatctaccagaggaagttgtatttgaagatttggactctgctttcccaaaggctttataccaaatgagtcttgctttacctcgcgcctctgctgttttcatcagttcctttgaagagttagaacctacattgaactataacctaagatccaaacttaaacgtttcttgaacatcgcccctctcacgttattatcttctacatcggagaaagagatgcgtgatcctcatggctgctttgcttggatggggaagagatcagctgcttctgtagcgtacattagcttcggcaccgtcatg

SEQ ID NO: 129224 - DNA, 696 bp, Arabidopsis thaliana
  unsure (1)..(696): unsure at all n locations
nnnnnnnnnnnnnnnnnnnnnnnnnnnnnnnnnnnnnnnnnnnnnnnnnnnnnnnnnnnnnnnnnnnnnnnnnnnnnnnnnnnnccacgcgtccgcccacgcgtccgcttcgataaggattttactctccagagaaagaaaaaaaaaacctcctctgcttttgtgatcctttaaggaaaaagacgaaatggcaacggaatcgtacgaagccgccattaaaggactcaatgatcttctcagtacgaaagcggatctcggaaacgtcgccgccgcgaagatcaaagcgttgacggcggagctaaaggagcttgactcaagcaattcagacgcaattgaacgaatcaagaccggttttactcaattcaaaaccgagaaatatttgaagaatagtactttgttcaatcatcttgccaagactcagaccccaaagtttctggtgtttgcttgctctgattctcgagtttgtccatctcacatcttgaatttccaacctggtgaggcttttgttgtcagaaacatagccaatatggttccaccttttgaccagaagagacactctggagttggcgccgccgttgaatacgcagttgtacatctcaaggtggagaacattttggtgataggccatagctgctgtggtggtattaagggactgccgttcaggtgtctcccacnaagggctnntgaattgggggc

SEQ ID NO: 129225 - DNA, 551 bp, Arabidopsis thaliana
  unsure (1)..(551): unsure at all n locations
ctctgcctcatcatcttcaaactgttaccacgtccatagggttgtcgaagagctaggaagagccttaccaagtgcttcttcttcccctaacatttaggttggtaggagaagcaaaggaagagatcatttataatggctcctgcattcggaaaatgtttcatgttctgctgcgctaaaacctccccggaaaaagacgaaatggcaacggaatcgtacgaagccgccattaaaggactcaatgatcttctcagtacgaaagcggatctcggaaacgtcgccgccgcgaagatcaaagcgttgacggcggagctaaaggagcttgactcaagcaattcagacgcaattgaacgaatcaagaccggttttactcaattcaaaaccgagaaatatttgaggaatagtactttgttcaatcatcttgccaagacttcagacccccaaagtttctggtgttttgctttgctctgcattcctcggagttttnnccatcctnaaaatcttgaatttcccancctnggtnaggnttttntttntcagaaacattagccaat

SEQ ID NO: 129226 - DNA, 397 bp, Arabidopsis thaliana
gggtctggcacaacaacggagtcaggttgtcggttccaagagccgagtcttctataaacatcactatgggttgtacgcttcagcgtgggatagcaaaaagcttaagtcaggaaaacctagtggagttatctgatgaaaatgatgatctatgtcctgtggagtgtgtcactgagttcaagacagatgatgaattgcttagcgttcttgaaaagtcgaaagaaactaattctttggttgtggttgatttttatcgcactgcatgtgggagttgtaaatacatagagcagggcttctcaaaactgtgcaagcaatctggtgaccaagaagctcctgttatcttccttaagcataatgtggtagatgaatatgatgaacaatctgaagtcgcagaaaggct

SEQ ID NO: 129227 - DNA, 560 bp, Arabidopsis thaliana
  unsure (1)..(560): unsure at all n locations
cnnnnnnnnnnnnnnnnnnnnnnnnnnnnnnnnntacgcctgcaggtaccggtccggaattcccgggtcgacccacgcgtccgcccacgcgtccgcccacgcgtccgcccacgcgtccgggaagatgatggagaacactgttcggagattgaatctccgccgtctcttggaactcataggagattgatttctttgcttctgtggttgtttccgaaagaaggaagaaggaagagaatattggaggagcagttgaattcgtcgttgaggattaagaagactaatcaacggttgatgctctttcaacctttgtttaattatcgtaaacccaacgaccaattttcattactctcttaagatttttcttttctaaaagaaacaacagtttgaagtttattatacacacttgtgcaagttgcttaacaaagtcatagaattttattccaaaaaaaaaaaaaaaaaaaaaaaaaaagagnnnnnnnnnnnnnnnnnnnnnnnnnnnnnnnnnnnnnnnnnnnnnnnnnnnnnnnnnnnnnngnnnnnnnnnnnnaggatatccgcaa

SEQ ID NO: 129228 - DNA, 537 bp, Arabidopsis thaliana
ctctcattctctctcataaatgaaagatcacattggtgtgagttgttggcgtagcgggtgtaaccgaatcttgtgtatgtgcgagattactatctcgactatggaattgcaaattcattgatgtttacggttagaaactcatagaatgagaacttttagtagatatagaactttgagagcgacaagacgatttctcaagcatgtggttgataggagaaaccgttaaccgtgagacctccatcaacacaaatggtttgacctgtgatataagaagctgcaggtagacacaagaagaccactagtgatgaaacttcattcggctctccaacacggccaagtggagttctactcaacaatccctcctttttactgacgtcttcaagaaacgattgagactgggcagtcttgacaacattaggtgcaacagcattggctcttatgccgtcttttgcccattcacatgccaagtttctagctaattgatttagagctccttttgttagaccataaatggatccacagtcaattagtgataca

SEQ ID NO: 129229 - DNA, 541 bp, Arabidopsis thaliana
taggtaccactatagaagagttatgacgtcgtacgcacgcgtacgtaagctcggaattcggctcgagctcactttctctctctctctctagaaaaagaaagaaagaagaaaaacttattgttattcccatttcgcccctatccgaaaaatggttgaagctcaatcatggacaacgcggcggatgagcaatcctagattcgacgccgccgcaaccgccgcaccaaccatcgtagacatccccggaacaccaccacactcctccgcttcttcaccactcaaacccttcttcctctcttcccccaccgtatcaccaacaatcctcacggcggctataatcgccgcctggtttggctcaaatataggagtcctcctcttaaacaaataccttctcttctactacggtttccgttacccaatcttcctcaccatgacacacatgttatcatgcgccgcctatagctccgccgtaatcaatatcgccggaatcgtgccacgtcagcacatcttatctcgccgtcagtttctaaagatcctctctttg

SEQ ID NO: 129230 - DNA, 734 bp, Arabidopsis thaliana
gtttattcttgggtctctctctatctctcttatccagatttatcatcgtcattacatataaacatcaaacttaacttttcaatattctcattcactttttcctcttgtgctctaattcttatccggatccgatttctctcatacaaagattctgtttttcttcttgggttattgttcttgctctgtttccgtatctcaaagtttcagctgctgaattgaatttgcattgatcgtagatgagaccaatcattaggttatcatctctcagtagaattagatgggctctaaggaacaatcaagaacgttattcttcaactttctactccaaaagccgcaaacttttgatcggtgtcaatcaaaatcaagctctgctgaatacaaacactgataattcaagtttgtattcaaggtcaagtatctttagaggcttatcagcagaagcagtagaagcagctgatcctgctactactagggtcaccgtctcagatgtgaatagaacaggtcctcttgttgagtatgagagaagaatcagtaatggtgaactcatgactggtgatatctgccaaattagtgcattgagagagcttcagagactatatgatgagcttgtggattcagtagatacatgtcgtttagatcggtataatacttctgataaatcctcaagaagtcgttggttttggtctcggctcatgccacagacttcttactcacccgtcaaaggattatacctt

SEQ ID NO: 129231 - DNA, 469 bp, Arabidopsis thaliana
agagagagagagagatagttggcccagcggatcgacgtcgacgatgatgatgatgatgatcatttgattcttaagctaaaagctttcttcttcttctctctcccatcccatggagttcgtgatttagtctctcctcttagatttttctctctttccgctccttatttttagtattattatctcagcagaaaaacaaaaacacttttcatttctttatttttctttctcatttcgcataaatctttgtcgccgagacgatttgtgtctgagaaactgagaagaggaatgggagaaacagttcattgtggaagcttcttgtcctcaatgagggatctaagtgaagatatttccaatacttgtagctattcaatgtattgtggaggtgataaaactttgccttatgggcagtatcagaatggtttctcggcgagacctccaacggattcttacgagagagattttttgaaac

SEQ ID NO: 129232 - DNA, 470 bp, Arabidopsis thaliana
tccacaactctaacaaaccttcccgattcatcctctttgactcccttcactcgatctcatccgcaatggaatcaaagacaacccaaaacggatccgaagtcgtcgaactcacagagttcgagaaaacccagaagaagtatcaagatttcatcgctacacttccaaagagcaaaggctggagaccagatgagatcttaacccaatacggtggacactggtggcaagaatgtctcctcgaaggtctttttcacgctaaagaccatttcgaagcacgaccaactgatttcctcgtctgtagctacccaaaaaccggtacaacttggctcaaagcactaacttacgcaatcgtcaatcgttctcgttacgacgacgccgcaaacccactcctcaaacgaaaccctcacgagtttgtcccttacgttgagatcgcacttccgttggaccccccctttgatgttcttcaagacaga

SEQ ID NO: 129233 - DNA, 369 bp, Arabidopsis thaliana
ccctcgcgtccgcggacgcgtgggcgacactttctagaccaaaaaaacaatacgtatagagattgtaccataaataattaaaccatagtaagagatgtactttaagagaatttttttgaagttttcaaaattaatcgaaccaaacctaactagttagttattatgagtgtggctttttagtgactggatttgatgtcaagtgattttactataaattgatcttaaattgttttggaaaatcttaagcggactaatgggattttatctcagatttggagaattcatttttgaggcaattaagtttttctgatattagtatattgctgaaaaaatgaaaaacaataattataaaaaaggaaactataagtt

SEQ ID NO: 129234 - DNA, 497 bp, Arabidopsis thaliana
cggacgcgtgggcggacgcgtgggtgcttcaccaccagagagatacatccaaaaattcatatctttccttcatttttattggcgtttttaagaaaacaaagcttccccaattagggttttgtattagaacaatgggattgtggaatggaaaaggcaccggaggatttatcctctaccttctcgtggctttctccgtcgccgtcttctctgtttcttacgtcggagacacaacaaaccctattcatcatcatctctcttctctctctgccaccgaaaaaatttggccggatttgaagtttagctggaaacttgtgttggctacagtgatagcgtttctacgatcagcttgtgggactgttggtggtgttggaggtggtgggatttttgttcctatgctcactcttatactcgggttcgatacaaaatccgcagctgcaatatcaaaatgtatgataatgggagcatcagcatcatcagtttggtacaatgtacgagtt

SEQ ID NO: 129235 - DNA, 525 bp, Arabidopsis thaliana
  unsure (1)..(525): unsure at all n locations
cctaatttgacatatgcaaaggatttggttgatgtcatgtatcgggccaatggaccggatttcggagcagcaagtgatggtgatggtgacagaaatatggttttaggaaacaaattctttgtcactccttcagactctgtagctatcatcgcagccaatgcacaagaagcaattccatatttccgtgctggtcctaaggggctggcacgttctatgccgacaagtggtgctcttgatcgtgttgccgagaagttgaagcttcctttcttcgaggttcccactggatggaaattttttggaaatcttatggatgctggaaaattgtcaatctgtggagaagagagctttggcacaggttctgatcacatccgtgagaaggatggaatatgggctgtgttggcgtggctttcgatccttgctcatcgcaacaaggacacgaaaccaggggacaagttggtgtctgttgcagatgttgtgaaagagtattgngcgacatacggaaggaactttttttcaagatacgac

SEQ ID NO: 129236 - DNA, 788 bp, Arabidopsis thaliana
  unsure (1)..(788): unsure at all n locations
gtctcccgtcgtctctctttcgtcctctccatcgatttcaaaatctctcttctgatctatatctctctccgcccatatctctcgtgaatgttctctgagaattctctagatcttcaatcaaaagttatctctctctctcacctattgtaaaaatcaccagtttcgtatataaaaccctaattttctcaaaattcccaaatattgacttggaatcaaaaatccgaatggatgtgagcaaagtaaccacaagcgacggcggaggagattcaatggagactaagccatctcctcaacctcagcctgcggcgattctaagttcaaacgcgcctcctccgtttctgagcaagacctatgatatggttgatgatcacaatacagattcgattgtctcttggagtgctaataacaacagttttatcgtttggaaaccaccggagttcgctcgcgatcttcttcctaagaactttaagcataataatttctccagcttcgttagacagcttaatacctatgtaatcttcttccctttcccttcgccttttttttttacttcatcatttctcgattttatggattttgttccattaatgttgttcccatggttgctttatgtttctgagcagaggagttttgtatccattagaatcgatagttagtttcatgagtatgctttttagagactactttatttgcaataaaaaaaaaaaaaaaaaaagnnnnnnnnnnnnnnnnnnnnnnnnnnnnnnnnnnnnnnnnnnnnnnnnnnnnnnnnnnnnnnnnnnnnnnnn

SEQ ID NO: 129237 - DNA, 422 bp, Arabidopsis thaliana
cttcctgacttcccagttcccatttcagcaatctacataaacgaccttactggggaaattgtaaccgctgctggaactgtccttgcggtttggagcatcaatggcgattgccttgctgtggctaacacatcgcagttaccatctgattcggtattatcagtaacaggctcaacatcttccgactggcttgagacaagctggtatgtaactggtcatcagagtggagcagttaaagtatggcggatgattcattgtactgatccggtgagtgccgagagcaaaacaagtagtagcaacagaacaggagggctgaatttgggtgatcaagtgccagaatacaagttgattctacacaacgtgttgaaattccacaagcaaccagtcaccgcgctccatctcacaagcgacctgaagcagttact

SEQ ID NO: 129238 - DNA, 510 bp, Arabidopsis thaliana
acgactcacttagggaaagctgctacgcctgcaagtaccggtccggaattcccgggtcgacccacgcgttcggccacgcgttcgcggacgcgtgggttcgagaggaccgggaaggacgcaatatataggatactagatagagagtgactgaaggagagaaaaacaaaaatggcgattggttccgtctctaactcttttctcactttcaattctccctatctgtctccgatttagccgaagaagattctctgccatggcttcttcaactactggagtgagagtcgctgaaggagaaggcaatttgccaaaacttgtccttacttctcctcagaacagcgaggctgagatatatctccttcggaggctgcattacttcttggaaaggtgcgagcggttaagatcttctttttgtcagaccagatgctgtcttcaataagattaagcccattagcggagggattccacattggttttcaaaatttggacctgggcttattcaacaggatgggt

SEQ ID NO: 129239 - DNA, 531 bp, Arabidopsis thaliana
cagctctcatacgactcactttaaggaaagctggtacgcctgcaagtaccggtcccgaattcccgggttcgaccacgcgtccgcatttatgggagaaacacttgaagacttaatggggaaaaatccttggaccttctgctcacatagaatggcaatgctatctatcttctccatatcatctcgattctcctcatcacaaaactagtcatcttggtttggccaaaatcatatctcttatgcgatcgctttcatccattttttcgagatgatgatcataggaggagatatccatcttcaatccctcttgactctaccatgaacttctacctatccctcgaaacaggtcgcttttggtttccagctcaagtttacaaccgtgagaatggacatgtagggttcatgttgtcatgctatgatgctgagctcagctatgacactgacactaatacttttcaagctaggtatccaccacatggtaaaagagcaattgcggttgaaaaagacgtgacatgggagaggataagagcagct

SEQ ID NO: 129240 - DNA, 956 bp, Arabidopsis thaliana
  unsure (1)..(956): unsure at all n locations
nnnnnnnnnnnnnnnnnnnnnnnnnnnnnnnnnnnnnnnnnnnnnnnnnnnnnnnnnnnnnnnccacgcgtccgctcaattcaaatacataaataaatatcaataaaatggcgggccgcgacacattccagctgcgttttgcagcagtcgcggcatccgccgccgtattgatctttctcatggctggtcaagtcgcggagtcgcgtatgatcaatatctgctctcacaccgcgtatccatctttgtgccgacctctggtgaaacgtgtcacgagccctagaaaagccacgcaccgaaccatccaagctttggaggctaagacgaaactagctctagccgaaacagctaggttcaaaaacggtaaccaagcggtcagcacgtgttacgagacattgggcgacgcggtttacaatttggcaagcgcgagaaagagcataaggaaacgtgatgtgccggcgatgaacacgtatctaactgcggctgtgtctgattacggtgcatgtgtggacgggttcatttaaacacaacaggttaatgcgatccaaaatgcagtggttgacttgagaaaaattagcagcaattgcttggcgttgtctacattgattagatgatcgatttaagagaacaattgatttaatttttctcaaaacaaaaactaattaattgaagaaataaaaaatctcaagcaattaaaatttgggtttctttttgttgtttttgttctgaaaaaaaagtttgttgttgatccatcattcgtatgtaacgcccctgggtgtaactaattaaatttgaatttcgtgtaattaaaaatcgctagtagattttttcatattccnnnnnnnnnnnnnnnnnnnnnnnnnnnnnnnnnnnnnnnnnnnnnnnnnnnnnnnnnnnnnnnnnnnnnnnnnnnnnnnnnnnnnnnnnnnnnnnnnnnnnnnnnnnnnnnnnnnnnnnnn

SEQ ID NO: 129241 - DNA, 410 bp, Arabidopsis thaliana
atcgtaatccgaatttaaaaccagaagagctcttaaccggtgtaacatttgcttctggtggtgctggttatgttcctttgacaaccaaaatagcgggtggaatacctttaccacagcaattgatatattttgaggaatatatagagaaattgaagcaaatggttggagaaaagaggacaaagttcataatcaagaatagcttgttcgttgttatatgtggtagtaacgatatcgccaacgacttctttactctccccccggtccggctacactacaccgtcgcttctttcaccgctcttatggccgacaatgctcgttcttttgctcagacactctatggatatggagcaagaagaatacttgtatttggtgcaccaccaataggatgtgttccttcgcagagaaccgta

SEQ ID NO: 129242 - DNA, 698 bp, Arabidopsis thaliana
  unsure (1)..(698): unsure at all n locations
tctaatacgactcacttagggacaagctggtacgcctgcaggtaccggtccggaattcccgggtcgacccacgcgtccgtacggctgcgagaagacgacagaagggggggaatcgattgctcttcttcgtagtcgcctttgaattcgcagagtgagaagcaatgaaggtgagatcatctgtgaagaagatgtgtgagttttgtaaaacagtgaaacgtcgtggacgtgtgtatgttatatgctcttccaatcctaagcacaagcaaagacaagggttcagttcctttgcttatgaaggaattacaccttcccctttgtttgctgagccgattgctagtcaggagttggtgaggctgcctggtcagggggtatcagccggactggcatcacttttacacaaaaggcctatgccaacagcgtatttcggatggaggtctggtcttgcatccattctcttcaaacaaggaaattaggatgtcagcatttccctttttattcttcagatttgtaatcgcagttttcttccaattcctatgaaacattattgtatatctctccacttttaccttggtcagtcgtatgctccttcgagacctgtttgnnnnnnnnnnnnnnnnnnnnnnnnnnnnnnnnnnnnnnnnnnnnnnnnnnnnnnnnnnnnnnnnnnnnnnnnnnnnnnnnnnnnnnnnnnnnnnnnn

SEQ ID NO: 129243 - DNA, 415 bp, Arabidopsis thaliana
cccacgcgtccgcggacgcgtgggcggccatagaagacatacgcgagaacgagattctcttcagaggttcatcccccgagttactgatgttggatcaatccggatatctacagattgtagacttcagattcgccaagaaattgtccggcgaacgaacatttacaatctgtggaaatgcagattatttagccccagaaattgttcaaggcaaaggccatggttatgcagctgactggtgggctcttggagttttgatctactatatgctagaacgagaaatgccattcgggtcatggacagagagcgagctcgacacgtttcagaagattgcaaaaggccaactaactttccctcgagttctaagctcagaagctgaagatctcatcacaaagttgcttgaagttgatgaaaacct

SEQ ID NO: 129244 - DNA, 882 bp, Arabidopsis thaliana
ctgcagtaccggtccggaattcccgggtcgccccacgcgtccgcgatggggtcatcacagtcttcgcaattactcgatgaagaagaagaagaagaagatgaagcagagagcgaaggtgaagaagtagaagaagaagaagatgaagcagagagcgaattgaataacagaagaatcgagctggataatctcttggtcaagaaagttctcgagcaagagcctgagatgcttccttgtcacgcctctgcttctccactctctcctcagctctcttctcttggaactcctcgaatcggaccttccattaaagtctgggatccttacaacgtcctcgcgccacctcctccttcttctccgcctcttttctctcgtatctcctccgccgcggaacacgatcgctccgccgtgacggaagtctatttcatcagccacggcgagtgtgatctcaatctcaggcctgatctgattggaggtagatgccacgtggctactctcacacccaacgggaaacgtcaggcgagagctcttgccgtatttttaaactctgaaggtgttcgattcacctccgtcttctcttcgcctctggatcgagctagatccatggctgtgtctgtttgccaggaaatgaattctcctgaggagcatttgcaagtctcggatgctgtggtcggcatgagtttaggggactgggaaagctgccatcggtcagagatttacacagcctgaaactcttaggttgattgaaagatgccaacctgatttctcagctccatctggtgaatcactcagacaagtagagtttcgtatggttcagtttctgaatgggacaggttcacgtctttcggagaagcttaagccagacctttttgtattttcacagctcac

SEQ ID NO: 129245 - DNA, 474 bp, Arabidopsis thaliana
tttgcttccgttctttttaaaatacaaaaaataaaacttattaagcaattctttattaggtttctcgtggcgatggagaattcttacgactcaagcaagtggtctgattctacaactccatatatggtctcgtggtcactacaatctgagtcctctgattctgattggaaccggtttaatcttggcttctcttcttcctccttcggtggtaatttcccggctgatgattgtgtcggtgggatcgaaaaagctgagtcactttcaagaagccaccgtctagcggagaaaagacgccgtgaccggataaattctcacctcactgctctccggaaacttgtccccaattccgacaagttagacaaagcagctctattagcaacagtgattgaacaagtgaaagaactcaaacaaaaagcagcagaatcaccaatcttccaagatcttccaacagaagcagatgaagtaactgtacag

SEQ ID NO: 129246 - DNA, 792 bp, Arabidopsis thaliana
  unsure (1)..(792): unsure at all n locations
cnnnnnnnnnnnnnnnnnnnnnnnnnnnnnnnnnnnnnnnnnnnnnnnnnnnnnnnnnnnnnnnnnnnnnnnccacgcgtccggggttaatgtggtggattgattttacaaagctgaaaggaattaaagtacaagggaaaggtgttattgatggaagaggctctggttggtggcaacaagattctcctttcattgatagtgataccaaactcatcgtccctttgaacaattctgctaaccaaaaccctcctatgccgatcagaagtgagcttgatgagagaatgccaagcattaaaccaacggcattgagattctctgggagttttggtgtggaagtgacgggtataacgatacaaaacagtcctcagtgtcacctcaaattcgacgactgcgtaggggttgtggtgcatgacatagccgtttcttcacctggtgacagtccaaacactgatggaattcacctccagaacaccaaagatgtcctcattcacagcactactctcgcttgcggagatgactgtatctcgatccaaacgggttgctcgaacgtntttntncacaatgtgaactgtggaccgggtcacgggatcagcattggtagtctcggcaaagagggtacaaaagcctgcntctcgaacataacagtacgngacgtagctattgcacaacacaatgncaggtgtccgnatcaagnatggcaaggaggagtaggntcantnaagggttattttttcaaacattagnttnaccaagtcnaattccntaacggtaaccaattttcttntgcccttg

SEQ ID NO: 129247 - DNA, 804 bp, Arabidopsis thaliana
cttttgtttttccacttctacggtaagtgaaagagagagagagagaggaaaaaaaaggggaaagcttaagatattggagagtaacaatgccttcaaattcaggagatgataatgttcttcaagttctcataaagaactttgatgtccttgctctcccattggttacactcgtctatcctctatatgcatcagtgaaagcaatagagacaagatcattaccagaagatgaacaatggcttacttactgggttctttacgcacttatctctctctttgaactcactttctccaaacctctcgagtgggtttcctatatggccatacatgaagttgtttgggatctgttggttagtgttaccacaattcaatggagcagaacatatctacaaacatttcattagaccattctacagagatcctcaaagagctaccaccaaaatttggtatgttcctcacaagaaattcaatttcttccctaaacgcgacgacgacgacattctcactgctgctgaaaaatacatggaacaacacggtaccgaagcgtttgagcgaatgatcgttaagaaggatagttatgaaagaggtaggagtagtagaggaatcaataatcacatgatctttgatgatgactataggtactaataagttcttaaaccggtttaattagctactttcagtttataagtttgctatgtgacaatatattgtctgtttctatggttgttataatttgcgtggattatgtataagcccttatttaggactgcttatttttgtgaaaaatcaaataaacattttctctcc

SEQ ID NO: 129248 - DNA, 517 bp, Arabidopsis thaliana
accgtttcaccatgtctgggttttggccttcgggagtcctaacgaagcttctctccggcgaatcgccggaagttacaacgattctcgaatcagcttcatcagctcaaactacgatttcaaatactatggaagattccagatcgcgcttcaaacagaagcagatctggtttatatcctcgacgatgatatgattcctgggaagaaaatgcttcagatgctctcacacgtcgccggaactgagaaatacgaaaactctgttttgggaagtatcggaaggattttacctttccggcaaaaggatttcacgtttccgagctataggaagtttagatctaaggaagctggcctttacttgcctgatccagcttatgacatcaccttagatcggattcttcaggttgatttcttatcaagctcgtggttcttatcggcggagctcgtgaaagcgttgttcatcgaaaaaccattcacattctctaccggtgaagatcttcatctcagttatcagcttcagaaa

SEQ ID NO: 129249 - DNA, 472 bp, Arabidopsis thaliana
aaccggcgatgaaaacagtgaaatgatcattgtctatgaatatatggagaagggaacgcttaaggaccatttgtatgacttggatgataagccgaggttgagttggagacagaggcttgagatatgcgttggtgcagctagagggcttcattacctccacacaggttccacaagagcaagcatacaccgcgatgtgaaatctgcgaacattctattggatgataattttatggctaaagttgcagattttggattgtctaagacaggtcctgatcttgatcaaacacatgtgagtaccgcggtcaaaggaagctttggatatcttgatccagagtatctaacaagacaacaattaactgagaaatctgatgtttactcttttggtgtggtgatgcttgaagtagtatgtggtagaccagtcattgatccatcactaccgagagagaaagtgaatttgatcgaatgggcgatg

SEQ ID NO: 129250 - DNA, 534 bp, Arabidopsis thaliana
  unsure (1)..(534): unsure at all n locations
agttcgnaagggaacntgnaaccctggggtnaaaggccccccccncaggttcctggncgcaatcatacgaaggctaccgccactanccgcctttccatcagggaggcatcaccccggtggtgatacccnatcgcaatccccacctgttgtgatccaccaccacctgcgaagcacgttgagagggaaaaattcttcaaggagaataaaggtgacggtgccttgggtttaccaggtcatatgcgaggcctttctttgcatagccgtgatggcagcagctcacgcagtggaagcgtagacttcagtgactgaaacaaccaaagctctcatcatcatatatatgtattctttcacgcttgtttctttaggttttgttaatttacagatgggaaaaagtttgtgttgtgtgttgctgttatttctctctctctctctctctctttctctctccttctacgtctctagtgttgtgaatttagaatgtagcacgatgagatctcattatgtatacgagtaaaaggtacttcctttcactat

SEQ ID NO: 129251 - DNA, 1206 bp, Arabidopsis thaliana
  unsure (1)..(1206): unsure at all n locations
ggggcctgctactactcagcagcgagaatctcaatctgtctctccttcgagtattttacaaaaggctagtactgcattagaaattttgaaggaagtgcttgacgcagtcgattctcaaaatcctgagggggcaaaagatgagtttactcttgatcttgtcgagcaatgttcgtttcagaaagagcgcgtaatgcacctcgtcatgacatcgagggatgaaaaagcagtttctaaagcaatcgaattgaatgagcaacttcagagaattctcaatagacacgaagatttgctgtctggtagaatcactgttcctagcaggtctaccacatcaaatggatatcattccaatctcgaacctgtccgtcctatctcaaatggtgaccagaaacgcgagctaaaggcttctaatgcaaacaccgaatcaagcagcttcatttctaaccgagcccatcttaagcttgaggaagaagatgaggaagaggagcctgagcagttattcagaagattgcgaaaagggaaagctagagcaaggcctgaggatgaagaagagccatcacctccacaaggattgcctggatcagcaatacataacgaaagacttaaccgtccacttatccgtcctttaccatcagaggaggcatcacgcggtggtgatagccattcgcaatccccacctgttgtgattccccccccccctgccaagcccgttgagagggaaatattcttcaaggagaataaaggtcccggcgcctttgggtttcccaggtcatatgcgaggccgtttctttgcatagcccgtgatgccaacagctcccccactggaagcgtagacttcagtgtcttaaccaaccaaagctctcatcatcataaatatgtattttttcccgcttgtttctttaggtttggttaatttcccgatgggaaaaagtttgtgttgtgtgccccccctaaatcacgaactctctctctctttctctccccttatacgtttctagtgttgtgaatttagaatgtagcccgatgagatctgattatgtatacgagtaaaaggtacttcctttccctatgttccaaaaaaaaaaaaaaaaaaaaaaaaaaacctaacccaaagggcgaacgctctagaggatccaagcttacgtacgcgtgcagtctacctcataaaacttgcgagggcggtaaacaancgagccccccccccccccc

SEQ ID NO: 129252 - DNA, 439 bp, Arabidopsis thaliana
ggtggtggtggtgatttttgggaattttgaagagccgttaaaccctagaacggacggagaagaaaaccctagaccggcgaagaagataaatcagattcgatgtcggataataaagaccgtgattccgattccgatgctccggaggaattaacccaggagcaggcgaagctggaagaggaagcactgtggaaaatacagagagagaataagaatagggtttcccgtgagaagaaagagaggcgcaagcttatggcagagcaagtaactctccgaaaatctcgaaagattgaaataattgaggatgtagtagaagaagaagaacctgaggaaaactctgaagctcttgcaaacaagggattcctttccaaagacatcatagactttcttgcggagcgagaaaaacataaagctgagtcagattttgaagaagaagagatca

SEQ ID NO: 129253 - DNA, 585 bp, Arabidopsis thaliana
  unsure (1)..(585): unsure at all n locations
atgaaaacagaaactcgggtttgtatcgttctcgttatctcttatcaaacccaaagggtcctgaatttagagaacaggtcctaaaactctccgcttaaattctttcattttcgagttgtctttttgcgttgttatatacaattcatggttatcacttatcagcaactgagtgatcagtgtaatgttgctggatagattacagttttcagtgtagtgtctgatcttaaccatacgagtcacagatgagcagacccttctttgaattgaaaaaagtaaattatgaagatttgtcaaatatctgaaaatacaaaccaatgtttatggaaatataaatctatagagattttaatgaatggagagagtaaggttatccttcttctgctacttcttcttcttcttcggcttgaaagacatcatctgagattaaagcgaataaatgggaaatggaacgagagagtttgaagccgaaagatctnttctttgtcttcatcccctcctgcaggagaatatgtcgcaagaagtggagattatgagaaacgataaagcttggattatcacaaaaatggcagcatttgtccggacgcg

SEQ ID NO: 129254 - DNA, 623 bp, Arabidopsis thaliana
cccacgcgtccgaagacatctttttaattcactcccttgcaaaatggtggatcatcatctcaaagctgatcgtgtagttgctcgggtagagaagtcggtcaatttggttataggtcataggcaaacacaaaggcaggccggctcaagggagtatgaaggtgaatcaaagcagaagtacacaactaagaagatcccaaaatggaagcataatgattcagagagaaagataggtcaaaagcaaaacaatgaaacaccaactatgattgtcgctggtggatgggtcaggccaaatcgagccatgtgggcttcacctccaaattcctcgagctccaagccacaaaagaataattaattattgagagaagctggtggtaacatatataagaactcaaattaaatgttcaagttgggaagtagacaactgttgagcgagaacaaggccagtcgtttcaaaacatccattaaaaactcagccatggagggtgtggtggcatatatatgtgtgtagactctagatgggtgaattttataagtttattacatgtaatattacatcatggaagttgatatgtctatatatatatactgtatattgcgtgcctttgtaatatatagaattcaat

SEQ ID NO: 129255 - DNA, 454 bp, Arabidopsis thaliana
  unsure (1)..(454): unsure at all n locations
tctggaactttcgagcttctgttttgcggtgctctcaaagcttatatcggatctcgaatcgtgaatcggactcagaacctcggatcttcgaaaatcgacgaacatgtcttctcctggcgaattctataactcacttccacctataaccaaggcttatggtacgttgtgctttttcactacagtagccacgcagcttggcttagttgctcccgttcacattgctttaattcctgaacttgtacttaagcagttccagatctggaggctgataacaaacttgtttttcctcggtggtttctctatcaattttggaatacgtcttttgatgatagcaagatatggagttcaactcgagaaagggccatttgaaaggcggacagcagactnnttgtggatgatgatctttggatccttcactctattggtattatcagtcatacccattttctggaca

SEQ ID NO: 129256 - DNA, 352 bp, Arabidopsis thaliana
gcgtccatgtctctcgagtgctgtgaagattcgggcagatgaattaagcaaaggggatttcacaggctctaagtggttggttcttagatatgctgttcttaatttacaagtaattcaagcagccattcgatttgccaagcaagaaggtctttctgtttccttggatttagctagttttgagatggtcaggaattctaaatcagagcttcgacagcttctggagtctggtaacatagatctttgctttgctaacgaggacgaagcagcagagctccttaggggtgagcaagaagcgggtccggaggcagctcttgagttcctacgcagacattgcagatgggctgtggtaact

SEQ ID NO: 129257 - DNA, 541 bp, Arabidopsis thaliana
cccacgcgtccgcggacgcgtgggctccaatcgtcctccctcgtcctgaatccatccatcatccactctcctcttaaaaatcctatctttgtggtttgcaatctctcccacgacgcgcttcatcattcatggctatttgaatctctcttctctctctctatcaaatatgcaaaacccttcaacggtaacccaggaatcagccgcaccggtctttgatttcttcccacggctcagaggtttaacctctagaaatcgatccccgtgttcgaattcagatgggtatgctctctcatcgtccaatgccttgtacttcaatggtttccggactttaccctcccgaaggatgggaaaaaccctagcttccttgagcttcaacactaagagcagtgctggttcgagtctccgtaggtttatcagcgattgcaatagctttattaggtttcactgcgataaagtggttccggagagctttgcctccgtcggaggagtcggattatcgagtgatgagaatgggattagggaaaatgggactggtggggtt

SEQ ID NO: 129258 - DNA, 577 bp, Arabidopsis thaliana
  unsure (1)..(577): unsure at all n locations
atgannnnnnnnnnnnnnnnnnnnnnnnnnnnnnnnnnnnnnnnnnnnnnnnnnnnnnnnnnnnnnnnnnnnnnnnnnnnngccacgcgtccgaaagaaagaaaaatgtcaacgttagtatcgtaggttagctttgctctcttatgcagtgatcaattattcacataaatgttttgtcaaatatttaagtggacttcatgaattaaattagtgaagtgagcattgctcaaagttgtatatattaagccatgagctttcctcatgactcataatatctcagtaaaacaaaataacatacaaatggatagcatttggattctatcacttctcttcttcatcatctttcttcttctggccgccttcaaacgcaaaaatcatgggaaacatcgacgaataccatctcctcctggttttccaatcatcggaaacttacatcagctcggagaattacaacatcagtctctatggaagctctcaaagaagtatggccctgtgatgcttttgaagcttggaaaagtccccacactcatactttctttatcagaaacagcaaaacaagctctaagagactatgatc

SEQ ID NO: 129259 - DNA, 714 bp, Arabidopsis thaliana
  unsure (1)..(714): unsure at all n locations
ggagaaaaacattattccgcaggttgctctatttgatttattgaagaagtttgatggagaaactgtgacagaggtggttcggcctaagctggccagaatgagataccgtgtaatcaaatctcctcgttacttgatgttccatatggttcggttcaagaagaataacttcttcaaagagaagaaccctaccttggttaacttcccagtgaaggacatggagctgagggattacataccatcattgcctagagcaccagaaggggagaatgtgtgttcaaagtataatctaatcgctaacattgtacatgatggtaagcctgaggacgggtacttcagagtctttgtgcagcgcaagtcacaagaactatggtacgagatgcaggatcttcatgttgcagagacacttccccagatggtagaactatcggaagcatacatgcagatatatgagcagcaggaagaatagagccctggaaagaaactgacttcatttggtttaagagtaaaagtgaccagttttatcttggaatgagattagagatttgtttcacaactcttttggaaaaagatttttggacccctttaaaggatagagagcctgttgttgctatggatttatcataatgaaaaacctttggtaaaaaaaaaaaaaaaaaanaaagggcggccgctctagaggatccaagcttacgtacgcgtgcatgcgacgtcagg

SEQ ID NO: 129260 - DNA, 576 bp, Arabidopsis thaliana
  unsure (1)..(576): unsure at all n locations
gggtctacccacngcngtcctgnagaacgtaatggtacgagatgcaggatcttcatgttgcagagacacttccccagatggtagaactatcggaagcatacatgcagatatatgagcaggaggaggaatagagcactggaaacaaactgactccatctggttttaagagtaaaagtgaccagtttaatcttggattgaggaggaatgagattagaactcaaaaaggggattcttgaacctcttttttaaggatagagagagagcctgttgttgctagtgattcatcataatgaaaaaccttggtaaaaaaacgcatattgtatgagttttgggaagagcttttggtaaaaagtcttcaaattctgcaacttttgaaattttgtagtaaaatacacatttgacttttgagtttccatttccaaaaaatatcttataaaaaaaaaaaaaggggggccgcgctagaggggccagcttccgncgcgtgatgggcggcataccctncaaagggccccnaatccatcncggcgcggttaaaggcggnngggaacccngggtnccacttanccctgagaatgc

SEQ ID NO: 129261 - DNA, 562 bp, Arabidopsis thaliana
gccagctctatacgactctcttagggaaagctggtacgcctgcaggtaccggtccggaattcccgggtcgagccgacgcgtgcggtacaataaaatcccagaacgaaatctctacgtcgaaaccatgtccagtttcttccctttgccgccagccatcgggaaatccagtaagatgatttctcgaaattaattggttgtttatgatatcatctttctgcgaaggtggtgggggatttatatgtctatgatcgatcttgattagatctaacttgatatctttttcgtaacattagctggatgtggagtgcgtgatgaatcacaatcattagttgtatgggccattgaggactactcaatccctgaaagtatcgatcctgatatgatcaacttgaaaatcgaaacagctattgtcaaaaaatttaatttaaggtcgtcggcggtagtgacaacctggattttcggttctgctgagaatggctgggtggctaaatccaaagtaaactttggaatccgagtttagagtctctctccaaaagggggggataacggcccgataaacatg

SEQ ID NO: 129262 - DNA, 415 bp, Arabidopsis thaliana
attcacaaagtccctcatcagccaccggttctatataatcccagaacgaaatctctacgtcgaaaccatgtccagtttcttccctttgccgccagccatcgggaaatccactggatgtggagtgcgtgatgaatcacaatcattagttgtatgggccattgaggactactcaatccctgaaagtatcgatcctgatatgatcaacttgaaaatcgaaacagctattgtcaaaaaatttaatttaaggtcgtcggcggtagtgacaacctggattttcggttctgctgagaatgcatggttggctaaatccaaagttaaactttgggaatccgagtttagagtctctctccacaaagggggggatatacgtgccagattaaacatgatgttagcagacgtcatttattatgtatgg

SEQ ID NO: 129263 - DNA, 840 bp, Arabidopsis thaliana
cggaatggaagggccgggccagcgcgacccgacacgaaccaaagcttcgaaaatcagacaattcaactaacaaaaaaatgtcagtagcttcaccgattcaatgtatcaggattctaaatccatcatcttcatcttcttcttcgacagcttcgtcgtcttttagattctcaacaacgactaagccatgtgtcttcatcatcagatgctctcagacagaaggtcctttaagaagaccatcggctcctcctactctccgggagcctcaaaaacctgttcctccatcacagccatcttcctctcctcctccttctccgccgccgcagaaagctgtagctgttgatgggaagagtgtaactacagtggagtttcagagacaaaaggctaaagagcttcaagagtactttaaacagaaaaagcttgaagctgctgggtcaaggtcccttttttggtttccaacccaaaaatgagatctccaatggaaggtgggctatgtttggtttcgcagttggtatgctcacagagtatgcaacaggatcagaccttgttgatcaagttaagatccttctctcaaatttcggattctagacttggaataataagagtgttgttgttatatatacccagatccttttctctcttctcttcgattcctcttcttgttgtttcttcatattcttcttcctggatgtgtatctgtttcatacagggccatttgtgtattcaatcacctttatcttcaaagtggtatagattcgatcttgcatcattggttctagaattgcaaaggtcggccgctctataggatccaagcttacgtacgcgtgcatgcgacgtcaagct

SEQ ID NO: 129264 - DNA, 580 bp, Arabidopsis thaliana
  unsure (1)..(580): unsure at all n locations
gaaccaaagcttcgaaaatcagacaattcaactaacaaaaaaatgtcagtagcttcaccgattcaatgtatcaggattctaaatccatcatcttcatcttcttcttcgacagcttcgtcgtctttnagattctcaacaacgactaagccatgtgtcttcatcatcagatgctctcaaacagaaggacccttaaganggccatcggctcctcctgctctccgggagccgcaaaaacctgttcctgcatcacaaccgtcttcctctcctccaccaaccaccgccgcaggaatcagtggctatttgatggtaagggtgtaacttcagtgggggtttcagaggcaaaaggctaaagagcttcaaggatactttaaacaggaaaagcttgaagctgcttggtcaaggtcccttttttggggttccaacccaaaaattgggtctccaatggaaggtgggctttgtttggttcggagttggatgcnacagggttnaacaggtcanccttgtgacaagttaggccctnttgnattnggatntnggcttgntaaanggnttttgtttttgnagcccttntntgcntngc

SEQ ID NO: 129265 - DNA, 865 bp, Arabidopsis thaliana
  unsure (1)..(865): unsure at all n locations
ttttaggtgcactatagaagagctatgacgtcgcatgcacgcgtacgtaagctcggaattcggctcgagaaatccaccaaaaacaatcggcgagaaaaagggggaatcagtttcttgcaagtttcaacaaggacgatcagaagaaatcttagagaaatcggaaaattctcttactcgggttttgcatcggtgaatatgaattgcgaagtttgtcagctaaaggaactggaagtggaatccttcgagatacgcgaagttttgcgctgcattctacatacgattgtctttcatcgtgcgcttggtcttatccgccctaaagatattgatttggagctttttgagatcacttatgttcaatgcggtgaaattgaagtggagaagaaaatcgatgaaaagattgagcagttcattaactggattgagaaacacccaaacaaaaagagtcagatttgtctatcgttctatgaagtcaaaagcaaacagccttctttggttcaccaaaatcgaacggttgtactgggaacaatggtacatcaatctgaatgtccttcagcccactaaggccccctgtcggaaagtctcaccattcctaaactggttttggcccctggagaggcatcggaggagagaagttctcgtaggacactgcttgagcaatcccttcaagaagtcttgttccaaatcataaaattcggtgnaattaggaggaggntcatgttccctccccttaaacggtggngtaatttactnnccctttgnggncactttnccaaggttattgggcntttcctttggggtnggtnttttcaagngggttcttcanaaggggcccnccctnaatgncgggaaatnccatttnccctna

SEQ ID NO: 129266 - DNA, 487 bp, Arabidopsis thaliana
cccacgcgtccgatattctgaaagcagccaaaggaaagtttgtttgataaacctgcgtttcattcccggacggagctctaatctttcagtctctatacctctttctctatctctgagaatctatggcggtggctgcagcggcgatgatcgggttgccacaggcgtatctggaacggaaggacgtgaaggagacgagttcgttggttactgaactctgccgtcacttttatactcaaggttgggtgtctggcactggcggtagcataacgatgaaagttcatgatgcttcgattcctaaaccggagcaacttatcgtcatgtctccttcaggtgttcaaaaggagaggatgcaacctgaggatatgtacatcttatctgctaatggatccatcatatctacaccctctccaaagccatacccaaataagcctcccaagtgtaccgattgtgctccacttttcatgaaggcatatgagatgcgaaatgc

SEQ ID NO: 129267 - DNA, 579 bp, Arabidopsis thaliana
  unsure (1)..(579): unsure at all n locations
nnnnnnnnnnnnnnnnnnnnnnnnnnnnnnnnnnnnnnnnnnnnnnnnnnnnnnnnnnnnnnnnccacgcgtccgcccacgcgtccgctagaaacatctttcatgcgttatcttctccaaaagctctgattctgattctgaatcatcctgaaaaaaacctagaaaaattctatcccacaaaatcttcaaagatccatggccgtaattatccctcgttcagatccaccgtcacgaatccatccggaaccaccacaaaccctagaaatcgaccatttcgatcatcttcctgactcaatcctcctcctcgttttcaacaaaatcggcgacgtcaaagctctcggaagatgctgcgtcgtttccagaagattccattctctcgttcctcaagtcgataacgtcgttgttcgtgtcgattgcgtaatctccgacgacgattcgtcatctttgtcatctatcaaatctcgctccggttcttccgctggttcgttctccgctatatttcgtcttgttgttgggggcattgttaagcccgtacaagctttaggtcaattccttggtacgaagaaatcatcatcatca

SEQ ID NO: 129268 - DNA, 796 bp, Arabidopsis thaliana
  unsure (1)..(796): unsure at all n locations
nnnnnnnnnnnnnnnnnnnnnnnnnnnnnnnnnnnnnnnnnnnnnnnnnnnnnnnnnnnnnnnnnnnnnnnnnnnnnnnnnnnccacgcgtccggaaaacagagaaacatctgtttttttgtttagtttgatctgttgagagatgacgagcggtggcgacgataaaaacagatctgtggtgacagatcatcaacatcaacaacagcctcctcctccgtttcaaggcgtctctaactatccaccgcagcagcagcctcccgccaccggttatcctcagcctgctcagccctacgcccaaggttatgttgttaatggagtaagaccaacagaacacggtcgttgttgcggtatcggcattggctgggtattattcatccttggtttcttcttcgctttgccctggtacatcggtttcttccttctattattctctaggaacccgcgtgagagaccaggatatatagcttgcgcagttggggctgtttttgctaccattatcgtcatctttggaaccgtaagaggatcaggggtgtggtcatgaaggtgaagatgtcaacaatctgaatccgttgagattttgtttcagaagaagatcgatccataatgtttgtttacataatgtgtattgtctctagattacaaaacagtactgtatatgtttctttgaaaagttcttcttttgnnnnnnnnnnnnnnnnnnnnnnnnnnnnnnnnnnnnnnnnnnnnnnnnnnnnnnnnnnnnnnnnnnnnnnnnnnnnnnnnnnnnnnnnnnnnnnnnnnnnnnnnnnnnnnnnnn

SEQ ID NO: 129269 - DNA, 497 bp, Arabidopsis thaliana
gctccatacgactcatatagggaaagctgctacgcctgcaggtaccggtccggaattcccgggtcgacccacgcgtgcgcggacgcgtgggcggacgcgtgggcggacgcgtgggcggacgcgtgggaccgtttcttcactcctaaatccaagccacaccatattgattctcttcactggtgcttgcttggagctaagttttaacctcacggaaggaatctttattctgcaatcactgcaaagagaaggagtctatattttggtggagaatgttgttggacgataataaacatatgatttcagtgcaacgcggctttaagagtcgtggtcagatgaaatatctgagttaaagattgatcaaatggctatcgctggtctgcaaaatattttggtgatcgattcatctttccgtcgggactctgaggttcaggcgactagacaaagggaaaatgagggaaggtcaagcgtccgggcatcctcactcctacagatgtgga

SEQ ID NO: 129270 - DNA, 500 bp, Arabidopsis thaliana
  unsure (1)..(500): unsure at all n locations
ntcgtttttttttacccttttgatttgatcttctcttctcggttgaaattagggatttctgtaaaattgtaatgtgtttctcagtaaatcatgagcaagcccgaagaaacttccgacccgaacccaaccggacccgatccgtctcgatcttcctccgatgaggtcaccgtcaccgtcgccgatcgggctccgtctgatctcaatcacgtttctgaggagctaagtgatcaattgaggaatgtgggtttggatgattctgcgaaagagctgagtgttccgattagtgtccctcaaggtaatgtagaaacggattcgagggcattattcggcagcgatcaaaaggaggaagaagaagggagcgagaagagaatgatgatggtgtatccagtgagacctgattcagaggattgttcgttttatatgagaactggaagctgcaaatacggatcaagttgcaagttcaatcaccctgttcgcaggaaacttcaaattggtaggga

SEQ ID NO: 129271 - DNA, 561 bp, Arabidopsis thaliana
  unsure (1)..(561): unsure at all n locations
nnnnnnnnnnnnnnnnnnnnnnnnnnnnnnnnnnnnnnnnnnnnnnnnnnnnnnnnnnnnnnnnnnnnnnccacgcgtccgcttatcttcttcctcttttgcttttctaatctctcaatggctaccttaaaacacaaacctgtaaatttggtattttacgtttataatttgattattatattctcctcccatagttccacggcggagctccgcaggctactgcagccatcaaaaaccgatggtacagtgagctttctcgttatcggagactggggaagaagaggctcctataatcagtcccaagtagctcttcagatgggagaaatcggagagaaattagatatcgattttgtgatttctactggagataatttttacgacaatggtttaaccagcttgcacgatcctctatttcaagattcttttaccaacatttataccgctccgagcttgcagaaaccttggtatagtgttttaggaaatcatgattatagaggtgacgtcagggcacaacttaggccctattgctcagagctcttgggcaacagnttgggtttcaat

SEQ ID NO: 129272 - DNA, 497 bp, Arabidopsis thaliana
  unsure (1)..(497): unsure at all n locations
cagctannnnnnnnnnnnnnnnnnnnnnnnnnnnnnnnnnnnnnnnnnnnnnnnnnnnnnnnnnnnnnnnnnnccacgcgtccgaacttgcatgccttgctaaggaacaggggaagaacaatgttgcctttctttgcttatttacgctgggtagattggaagattgtctgcagttattggtggagagtaaccggataccagaagctgctctgatggcacgttcttatcttccaagcaaagtttcggagatagtagctctatggagggaagatctcagcaaggttaatccaaaagcagctgaatctttagctgatcctgaagagtactcaaatctttttgaggattggcaagttgctctttctgttgaagcgaacactgcagagacaaggggagtttataccgctgcagaaaattatccatcccatgccgataaaccttccattacccttgtggaagcctttagaaacctgcaagttgaagcagaggaatcacttgaa

SEQ ID NO: 129273 - DNA, 502 bp, Arabidopsis thaliana
  unsure (1)..(502): unsure at all n locations
cagctacnnnnnnnnnnnnnnnnnnnnnnnnnnnnnnnnnnnnnnnnnnnnnnnnnnnnnnnnnnnnnnnnnccacgcgtccgacaagattctgcaatatttggagattatgttactcctgaaaccggggcagacgagggtcgtgtggacatggaaactcttgatattgtacaggaggaaggcaccaccagttcatatgtgcaacatactggaaagttgcaaccaaaacctagattactcgagactgtggttgaagaacctgagcctcattactccgctggtgatactggttattttccaatgggtacgaacgagtctgagtttatggccaatgtggaatcaagaaacggtttcagtacttatgaagatcttcaagaagaagaacttaatattcctgaagcccccagagaaacggttggtgagatggaggcgcaaaatgcttctggcggatgggaacaagaagaacagggtgtatcgccttgcattaacaatacagttacag

SEQ ID NO: 129274 - DNA, 510 bp, Arabidopsis thaliana
  unsure (1)..(510): unsure at all n locations
nnnnnnnnnnnnnnnnnnnnnnnnnnnnnnnnnnnnnnnnnnnnnnnnnnngagaccaccaaccaaagagatttccccgcgtccggaaaaatgttgaacttatgagctaaaaaagcttctcctccttaccaaagactcgacggtctaccggaaaaaatggctgccaatttctggaattcatctcactataaacagcttttggatccagaagaagtcgacgtagttcatgatctcgataaagaacgtggaatctcaattgatgattttaagctcatcaagttccatatgtctaatcatattatgaaattggctcagcacattaaagtgaggcaaagggttgtagctactgcaattacgtatatgagacgggtttatatcagaaagagtatggtagagtttgagcctcgacttgttgctcttacgtgcttgtacctggcatctaaagctgaagaaagcatagtgcaggccaggaatcttgttttttacatcaaaagattgtatcctgatgag

SEQ ID NO: 129275 - DNA, 621 bp, Arabidopsis thaliana
  unsure (1)..(621): unsure at all n locations
nnnnnnnnnnnnnnnnnnnnnnngaaagcagccacgcctgcaggtaccgggccggaattcccgggtcgacccacgcgtgcgcccacgcgtncgcccacgcgtncgacggctgcgagaagacgacagaaggatacggctgcgagaagacgacagaagggcacggctgcgagaagacgacagaaggggaaaccaaagatctctcttcaaagcttccaccatgtttctccgatcactcaatctctgtacaatactactcttcctagcgatttcatcacaagtttctcaatctctccacttcgaattgcaatctggtcgaacaaaatgtatatcggaagacataaaaagcaattcaatgaccgtcgggaagtacaccgtcgttaaccctaacgaagctcatccttctcctcaatctcacaagatctccatcaagtgacatcgagttacgggaacacgtatcatcacgcggaagatgtagaatcgggacaattcgcgttcacggcggtggagtctggagattacatggcttgttacacagctgttgatcataaacctgaggttacattgagtattgatttcgattggagaactggtgttcaatctaaaagctggagtagtgttgct

SEQ ID NO: 129276 - DNA, 640 bp, Arabidopsis thaliana
gacatctgcaatatttatagaggatgtgagaagagaagtgaaaatactgcgggcgttatctggacatcaaaatttggtacaattctatgatgcgttcgaggacaatgccaacgtttacatcgttatggagttatgtggaggtggtgaacttcttccccgcgtccgcggacgcgtgggaaaatactctgaagatgatgcaaaagcagtgcttatacagatccttaacgtcgtagctttctgtcatctccaaggagttgttcatcgagatctaaaaccagagaacttcttgtacacttccaaggaggagaattctatgttgaaagtcatagattttggcttatcggactttgtcagaccagacgaaagactaaatgatatagtgggaagtgcatattacgtagcccctgaagttctacacagatcttataccacagaagcggatgtatggagcataggagtcatagcatacattctcctatgtggaagccgtcctttttgggcaagaactgaatcaggaattttcagagcagttctaaaagctgatcccagttgtgatgaacctccttggccttcgttatcctttgaggcaaaagattttgttaagagattattgtacaaggaccctcggaaaagaatgact

SEQ ID NO: 129277 - DNA, 890 bp, Arabidopsis thaliana
gctacaatacgactcactttagggaaagctcgtacgcctgcaggtaccggtccggaattcccgggtcgacccacgcgtccggcatggtcttatgctgttcttgggcaagtggagcgacctttctttgccaatatatggaatactttaaccaccttggaggagcaaaggctttcagaacagtatagggaagatgtcatgtttgcttctcaggtgtatcttgtgaatcagtgcttgaagcttgagtgcccccaccttcagttgtcactttgtcaagaactcgaagaaaaaataagccgcgcaggaaaaaccaaaagattcaatcagaaaataacctcatcgtttcagaaagaagttggacgccttcttataagtacagggcttgattgggctaaagaacatgatgtggatggctacaccgtggatgttgctctggtcgagaagaaagttgctttagaaatcgacgggccaactcatttttcaagaaactctggactaccattagggcatacaatgctgaagcggcgatatgttgctgctgctggatggaaagtggtatctctgtctcttcaagagtgggaagaacatgaaggcagtcatgaacagctagaatatttgagggagattctcaccggctgcatatagagaagacaagtaaccaaacatgtaatgtgttgtcattttaaggttgttaatcaagtgttcttttccgttatgtatatagctaagattcttatagtagattgatggtctatgtttagagcaataatcaccattgaaatccatttaaattttacaaaaaaaaaaaaaaagggcgaccgctctagaggatccaagcttacgtacgcgtgcgtgcgacgtcatagtcttctatagtgtacctaatagaatcg

SEQ ID NO: 129278 - DNA, 496 bp, Arabidopsis thaliana
  unsure (1)..(496): unsure at all n locations
nnnnnnnnnnnnnnnnnnnnnnnnnnnnnnnnnnnnnnnnnnnnnnnnnnnnnnnnnnnnnnnnnnnnnnnnnnccacgcgtccgttccaatccaaagccaataaccaacagcaacgtaccacttcaagatgaaaagaagcaggatgcatcgagaaccctagctatttttcagctcacaatcagaaatggcatccctttgtttcaatttgtggtcgatgataacagcagcagcagcaggagcattctcggggctacaatgaaaagctcagattcatcgttcaaagatgattctgttcagtactgcacattctactctgttaatgaagtcaaaaagaaaaaaagtggaagctggctaatccatggacacagagagaaacattgcgggttcgtctacaacataatcggtcaaatgcagctgggaaactcaatgagcgtagatatatcagagcagaaatctttgatcacagagtcagttctgtttgacgaatcagagca

SEQ ID NO: 129279 - DNA, 753 bp, Arabidopsis thaliana
caacttaatttccggttcgacccacgcgtccgcagaaatgtttcttcaggttaccggcacggcgactccggctatgcctgcggtagtgtttctcaattcatggagacgaccacttagtattcctctccggagcgtaaaaaccttcaagcctctagcattcttcgatctcaaaggaggcaaaggaatgagtgagttccatgaggttgaactcaaagttcgtgattatgaattggatcagtttggtgttgtgaacaatgctgtttacgcaaactactgtcaacacggtcgacatgagtttctagagagtatcggtatcaactgcgacgaagtagcacgttctggggaagccttagcaatttcagagttgacaatgaagttcctttcacctttacgtagcggagacaaattcgtggtgaaagcgaggatatcggggacatctgctgcgcgtatttacttcgatcatttcatctttaaacttccaaatcaagagcctatattggagggcaaaggaatagctgggtggcttgacaacaagtaccggcctgttcgcatcccatctttctataccgtctaaaattggtcactttcttcccccaagacgacgcccggtttggtttcaaccttaattcacccccacaaatggaaatcttaccttaaaatgagggcctcggtgctttttacccccccttaatttttttcttatcaaaacatatagaagaacatagggggtcttagtttgcgggggataccaaa

SEQ ID NO: 129280 - DNA, 454 bp, Arabidopsis thaliana
ggccacacactcactcactcgtagtttcgacgctatctctagaacattccgataaaccacaaagaagaagcagagcaaaagtaaagaagaagaagaaaacaaacatgtcgtggcagacttacgtcgacgatcacttaatgtgcgatgttgcaggcaaccgcctcaccgccgccgcaattctcggccaagacggtagcgtctgggctcagagcaacaattttcctcaggtgaagcctgaggaaattcagggcatcaaagacgattttactacacctggaacacttgccccaacaggattgttccttggtggtaacaagtacatggtaatccaaggagagcctaatgccgtcattcgaggaaagaagggagctggtggtgttaccatcaagaagaccaccttagctttggtatttggtatctatgatgaaccaatgactcctggacaatgcaatat

SEQ ID NO: 129281 - DNA, 522 bp, Arabidopsis thaliana
  unsure (1)..(522): unsure at all n locations
atgannnnnnnnnnnnnnnnnnnnnnnnnnnnnnnnnnnnnnnnnnnnnnnnnnnnnnnnnnnnnnnnnnnnnnnnnnnnnccacgcgtccgaaatacaaaaaataaaaatccttaaaaatatatccttatcttcaaccaagaatgggagaggtccaagaaggtcccaaagttgaacaagagaagaagccggctgccaccgtagtcccagttgagactactgacggcaagccaaagagcggcggaggagattccgcggcagcagcagcaccaccggtcgccgcggttgtctctgcctttgtttacaaagtggatatgcactgtgaaggctgcgctaagaagataaagcgaatggttaagcactttgatggagtgaaagatgtgacggcagatactggtggaaataagcttttggtggtcggaaagattgatccagtgaaactccaggagaagttggaggagaaaaccaagagaaagggtggttctcgcgattccaccgtcaaaggtagagggacctgttgct

SEQ ID NO: 129282 - DNA, 518 bp, Arabidopsis thaliana
  unsure (1)..(518): unsure at all n locations
nnnnnnnnnnnnnnnnnnnnnnnnnnnnnnnnnnnnnnnnnnnnnnnnnnnnnnnnnnnnnnnnnnnnnnnnnnnnnnnnnnnccacgcgtccgctctgtgtaggtttttgaagcattaggcaatatgaaattcccttacgtttatcctgatccacaaagtcgtagacttcgtgatgcactggctcaagactctggtttggagtctgaatacatacttgtaggctgtggtgctgacgaacttattgatttgatcatgagatgcgtgttagatcctggggagaagattatagattgtcctccaactttctcaatgtatgtgtttgatgcggctgtgaatggagcaggtgtcattaaagttccaagaaaccccgatttcagcttgaatgtagaccgcatcgctgaagttgtagaactagaaaaacccaaatgcatattcctaacttctcccaacaatccagatgggagtatcatcagcgaggacgatctgttgaagattctagaaatgccaatactttgt

SEQ ID NO: 129283 - DNA, 920 bp, Arabidopsis thaliana
  unsure (1)..(920): unsure at all n locations
cgcctgcaggtaccggtccggaattcccgggtcgacccacgcgtccggcggagacctgttgacttcaaataattttaattagtttcttctgtgcgatagagatcgatcgagagatgggtgcttcatcatcatcatctgtgtcggagaaatcaatccatcaattcaccgtcaaggatagctccggcaaggaggttgacctaagcgtgtatcaagggaaagtgctgctcgtcgtcaacgtcgcttctaaatgcggattcacggagtccaattacacccagctgacggaactttaccggaaatataaagatcaaggttttgtggtattggcgtttccttgcaaccagtttctgtcccaagagcctggcaccagcgaagaggctcatcaatttgcttgtactcgctttaaggctgaataccctgttttccaaaaggtgcgtgtaaatggacaaaacgctgcaccagtctacaaattcctcaaatctaagaaaccctcttttcttggaagtcgtatcaaatggaacttcaccaagttcttggtcggcaaagatggtcaagtcattgatcgttatggcacaactgtttcacctctatccatccagaaagacatcgagaaagcccttgcacaagaattgtgaacacgcacagagatatttgactcctttggaagaaacttctctcatactctcggtcatgcagtcaagtttctacatttcccattgcaccttccatatgggccttgtattcatcttatgtgtaactctactagccatttcttttgtgaaatttgatcaaaggtgattccaataagttgatttgaacccataaaaaaaaaaaaaaagggcgaaaagcaannnnnnnnnnnnnnnnnnnnnnnnnnnnnnnnnnnnnnnnnnnnnnnnnnnnnnnnnnnnnnnnnnnnn

SEQ ID NO: 129284 - DNA, 647 bp, Arabidopsis thaliana
  unsure (1)..(647): unsure at all n locations
agctccatacgactcacttagggaaagctcgtacgcctgcaggtaccggtccggaattcccgggtcgacccacgcgtccgagctgtaatgctgctgcgagataaaatgaacaatgaagaagcggagacctgttgacttcaaataattttaattagtttcttctgtgcgatagagatcgatcgagagatgggtgcttcatcatcatcatctgtgtcggagaaatcaatccatcaattcaccgtcaaggatagctccggcaaggaggttgacctaagcgtgtatcaagggaaagtgctgctcgtcgtcaacgtcgcttctaaatgcggattcacggagtccaattacacccagctgacggaactttaccggaaatataaagatcaaggttttgtggtattggcgtttccttgcaaccagtttctgtcccaagagcctggcaccagcgaagaggctcatcaatttgcttgtactcgctttaaggctgaataccctggtttccaaaaggtgcgtgtaaatgggccaaacgctgcaccagtctacaaatcctcaaatcaaagaaccccctttcttggaantggncaaatggancgccccaagttttgggggcaaaatggcaagccttaccgatgggaacgttacggnccccg

SEQ ID NO: 129285 - DNA, 511 bp, Arabidopsis thaliana
  unsure (1)..(511): unsure at all n locations
nnnnnnnnnnnnnnnnnnnnnnnnnnnnnnnnnnnnnnnnnnnnnnnnnnnnnnnnnnnnnnnnnnnnnnnnnnnnnnnnnnnccacgcgtgcgctggatttcctcttctccacgttctcagagttagttacacagctttcaacgatgaatcagctcgcgctttcaagatccggttacaccgccgccgtgaggtttctccctatgctttccgcagctgttccgaagatcttatcatctctcgccgccgcatccaccgtccgcaacttcagctctaccggaagtcctctcaccagctaccaaatcaataaaccttcgccgtcaaaatccttcacttccaggcttctccaccaatcctcctccgccggtactcctccgcaacaacttttcggcgcccgtagcttctcatctcccagcagtgatttcaacagctaccacattaatccgccgtctaactggggaatccgaatcgtgccggagaggaaagcttgtgtgattgagcggtttggtaat

SEQ ID NO: 129286 - DNA, 518 bp, Arabidopsis thaliana
  unsure (1)..(518): unsure at all n locations
nnnnnnnnnnnnnnnnnnnnnnnnnnnnnnnnnnnnnnnnnnnnnnnnnnnnnnnnnnnnnnnnnnnnnnnnnnnnnnnnnnccacgcgtccggtgatgatcagtttctgctatgatgaacatcacagaaacatatggtttaagcaaaaagataagctggcaaggagatccgtgtgctcctcagctttatcggtgggaaggtttaaattgtagttatccggactccgagggatcaagaatcatatccttgaacttgaatgggagcgagttgacaggttctataacatctgacatatccaagctaacactgttgacagtattagatttatcacataatgatttatcaggagatattccaacattttttgctgagatgaagtcgttgaaactcataaacttaagtggaaacccgaaccttaatctcacagcaattccagactctcttcagcaaagggtaaacagcanatctttaacactaaatttgggtgaaaacctgactctgactnccaaaaaagaga

SEQ ID NO: 129287 - DNA, 494 bp, Arabidopsis thaliana
atacgactcactttagggaaagcacgtacgcctgcaggtaccggtccggaattcccgggtcgacccacgcgtccgctggtgttggattatacaattggtggatcagccattgcccgtggcataactccaaatctggcatctttttttggtggtttggacaatcttcctgtgttcttagctcgacaaactatacccggggttggtattgtggttgatccatgtgctgcacttttgattatgattgtcacgatactactatgttttgggataaaggagagttcaacagtacaagcaattgtaacatcagtgaatgtttgcaccttggttttcatcatagtagttggtggatatttagcttgcaagactggatgggttggatatgatctccccagtgggtactttccttttggactaaatgggatacttgccggatctgctgtagtattcttctcatacattggatttgatactgtaactagtacggctgaggaggt

SEQ ID NO: 129288 - DNA, 506 bp, Arabidopsis thaliana
  unsure (1)..(506): unsure at all n locations
tgatactccnnnnnnnnnnnnnnnnnnnnnnnnnnnnnnnnnnnnnnnnnnnnnnnnnnnnnnnnnnnnnnnnnnnnnnnccacgcgtccggtgatgctggttacttatccgagtcctatgtattctacgaagcaatactcactagggagtacttcaaagatggattgtttcaggatctcaatattgcaaacaagcagcttcggtttcttgcaaggtttcttatggtgtgtttggttcttggccgccgtgagatggtgcatcaactcgttgatcagtttaaacggttgattgatgaatgcaagaggacattccaggaaaccgattttaaggaatggaaggtggtggcgcaggaaatagttagatttctgaaatcggacactgcattcatgaacattagacctctaagatacagtcttgtattggatcctaatctggatgctggtactccgcgtgcaagtaggtctttaaggttgacggatgctatcttgagcagntattactgtaa

SEQ ID NO: 129289 - DNA, 423 bp, Arabidopsis thaliana
cggacgcgtgggcggacgcgtgggtgctgaccacgctccggttctccatttctttcccttttgacttttcacttccaatttttcggtatcagatctggacgatggcttcacaaatctctcagcttgcttgtttctcatccaccaatcgccaatttcacttccaaagccgatcgtttccatgccctatgattcgtccccagtcttttgtagttaaaagtgttgatgggaatagctctgaaacaccagcttctctaagctatacagctgaggtttcaaaacctgttgttgagaaaacatccaaaccgtattccactgttgatgaaactgctaccaataaagagagcatcacagagccagtagaggaagatgttgccacacaaccaataagagcagcaaagatccacgacttctgtttcggcattc

SEQ ID NO: 129290 - DNA, 647 bp, Arabidopsis thaliana
  unsure (1)..(647): unsure at all n locations
nnnnnnnnnnnnnnnnnnnnnnnnnnnnnnnnnnnnnaaaaccgcattagtcaggcacgggatttcccttacaaccctcattgccgcgcggccgagctgattttaaagagatggagatactagacgcagataaaggagaaagattggagagttcgagcgggcgattggcttcacgagacattgttcagtttgtggcactacgagatgtccaatatggagagatctcagtggtacaagcgcttctagcagaattgccttcgcagtttttgacgtatatgagaatccgtaatatgaaaccgattcctccatgaatgatctcgtctcgtgtgtaaatgaagtgtgtacatattatacattacataaaccactgcggcggttaaaaatcgctgtcgttttgcgcgattacataagctttttccatttttataataaaaatgtctgaatgtgggatgtaagtttcgaatgaagaggctgatgtacacatttgtcttgatttcttttacatcaatacttggaatttggggataaaaaaaaaaaaaaaaaaaaaaaaaaaaaaaaaaaaaaaaaaaaaaaaaaaaaaaaaaaggaaaaccaaagggcgaacgctctagaggatccaagcttacgtacgcgtgcaggtgacgtca

SEQ ID NO: 129291 - DNA, 600 bp, Arabidopsis thaliana
  unsure (1)..(600): unsure at all n locations
nnnnnnnnnnnnnnnnnnnnnnnnnnnnnnnnnnnnnnnnnnnnnnnnnnnnnnnnnnnnnnnnnnnnnnnnnnnnnnnnnnnccacgcgtccgcttcttcttcttcttcttcttcttcttcttcttcttcttcttcttcttcatattttccctatgatttggatctctaaaatcttcaatccccatgttctaatttaaaaaatcacaacactctctttatcatataccctattataaaccaaactttgatcctcgaatatattttattaaaaagataatattcgtgtttctcatgttggagtcataataaagaaacctttgtgttttaatttaatcccctccaagaaacctgaagattctaagaagctgccattaaaactaataaaggaagagagtccaaagaagaagaagaagaagagaaaatgtcacgtcttgacgacataccttcaagcccaggcaaattcaagatggagaaatcttcctacttgcatcgtctcagattccaatcttctctcacaaagtttgcatttttctccttcttcctcctctggctcatctctctactcttcctncgatctccaccgtccattaacccttct

SEQ ID NO: 129292 - DNA, 534 bp, Arabidopsis thaliana
  unsure (1)..(534): unsure at all n locations
atgattctgccagcgnnnnnnnnnnnnnnnnnnnnnnnnnnnnnnnnnnnnnnnnnnnnnnnnnnnnnnnnnnnnnnnnnnnnccacgcgtccggaaaattctcaccaagtcctctgttgaacatgacgattaagcctaaatcgccggcgagattcaagctaggtaggcagtcttcgcttgcgccggaatcaagaaccccgattgatacgttaacggaagatgaggacgacgacttggctgcggcggctacagctgggatcggggatccgacgattcgtttaatgtatttagccaacgaaggtgatatcgatggcatcaataagatgcttgattcgggtactaatgttgattaccgtgacatcgatgcccgtactgctcttcacgtcgccgcttgtcaaggacgaaccgatgtcgttgagctgctgcttagccgtggtgctaaggttgatacgaaggaccgatggggtagtacgcctcttgcagatgcagtgtattacaagaatcatgatgtgattaaacttttggagaaacat

SEQ ID NO: 129293 - DNA, 582 bp, Arabidopsis thaliana
cagctacaatacgactcactttagggaaagctagcgtacgcctgcaggtaccggtccggaattcccgggtcgacccacgcgtccgaaacattcaattcccaaaccaaacagagcagaagaacaacaagttttgattctaaaaaaggaagcttcccaagtatggatccgtcggagtattttgccggcggcaatccttccgatcaacagaaccagaagcggcagcttcagatctgtggtcctcgtccttcacctcttagtgttcacaaagactctcacaaaatcaagaaacctccaaaacaccctgcgccgccgccaaatcgtgaccaaccgccgccgtatattcctagagagccggtggttatctacgccgtatcccccaaggttgtacacgcaaccgcgtctgagttcatgaacgtagtccagcgactcacagggatctcctctggtgttttcctcgaatctggcggcggtggagatgtttcaccggcggcgaggctagcgtccacggaaaatgctagtccaagaggaggaaaagaaccggctgcgagagatgagacggtggaaatcaacacggctatggaa

SEQ ID NO: 129294 - DNA, 521 bp, Arabidopsis thaliana
atacgactcactttagggaaagctcgtacgcctgcaggtaccggtccggaattcccgggtcgacccacgcgtccgggtcttttcatggaacaggttcttcgtttatgtctgctaaggactactatagtgttcttggagtgagtaagaatgctcaagaaggtgaaatcaagaaggcttattatgggcttgctaagaaactccatcctgatatgaataaagatgatccagaagctgagacgaagttccaggaagtctcaaaagcatatgaaattttgaaagataaggagaagcgtgacctttatgaccaggttggtcatgaagcatttgagcaaaatgctagtggtggatttccaaatgatcaaggcttcggtggtggtggtggtggtgggtttaacccatttgatatctttggggagcttcaatggcgatatttttaacatgtaccggcaagatattgggaggtaaagatgtcaaggttttggttgatctttctttcatggaagctgtttaaggatgctcca

SEQ ID NO: 129295 - DNA, 497 bp, Arabidopsis thaliana
  unsure (1)..(497): unsure at all n locations
cnnnnnnnnnnnnnnnnnnnnnnnnnnnnnnnnnnnnnnnnnnnnnnnnnnnnnnnnnnnnnnnnnnnnnnccacgcgtccgctgttaattaactccggcgattgatcactccgtcttctttgtaacacagccggagaaaaatcgaaagtttcgtttttttcttctccttcgtagctaattcgccgtcgattttataattcggcagccatgagctcggttttgcagggttttacgaagtcacttgctatgacctttgtatcggagattggtgacaagacgtttttcgctgcagcaattttggctatgcgttatcctaggagacttgtgttggctggttgtttatcggctctgattgttatgactatcctctctgctactcttggatgggctgctcctaatctgatctctcgcaaatggactcatcacataacaacattgctgttctttggttctgggctatggtctttgtgggacggtttcaaagaaggaggagggg

SEQ ID NO: 129296 - DNA, 648 bp, Arabidopsis thaliana
  unsure (1)..(648): unsure at all n locations
cagctcnnnnnnnnnnnnnnnnnnnnnnnnnnnnnnnnnnnnnnnnnnnnnnnnnnnnnnnnnnnnnnnnnnnccacgcgtccgaacgaagtcaaaaccatttataaacccaaaatcttcttcgatctctccataattctcgtttgcgtcattcattcatcacatatcaaccaccacagagacagaggaatagtctcaaaactttctcagaaatggcaggcagtaatattctccataagattaagttgaaggctgggttctgtggatctgctcctgacatgggaagaggcaaaagcaagatgtggaagaacatcacccacggttttcactgtgtgaagggcaagtccagccatccgatggaggactatgtagtgtctgaattcaagaaacttgaaggtcatgaattgggtttgtttgctatctttgatggtcacttggggcatgatgtggctaaatacttgcagactaatctctttgacaacattcttaaaggggagggtttttgggcttacacagagggatcctttaaggattccctccaggtncaacaagttcccggggntttcangngnccctaagnttggnaaggngggccacccntttaacnggntntttttttggaaaacctntttttcaatttttggcccc

SEQ ID NO: 129297 - DNA, 511 bp, Arabidopsis thaliana
  unsure (1)..(511): unsure at all n locations
atgatctnnnnnnnnnnnnnnnnnnnnnnnnnnnnnnnnnnnnnnnnnnnnnnnnnnnnnnnnnnnnnnnnnnnnnnnnnccacgcgtccgtcaatgaattggctcaaaggtacccgggactaatgtcgttgcgaagcgtagatctttccccggcaagttggatggcggtagcgtggtaccctatttaccatattccaatgggaaggaccatcaaagatttgtccacttgtttcctcacttatcacactctttcatcttctttccaagatatggagccagaagaaaatggcggggaaaaggagaggatccggaaggaaggagaaggtgtaactttgcttccttttgggttagccacttataagatgcaaggcaatgtttggctctcggaagacgatcaaggtcaagatcaagagcgagttctttcgcttctaagtgttgcggattcttggctaaaacagctaagagtccaacaccatgacttcaactacttctcaagaatggctcaccgtg

SEQ ID NO: 129298 - DNA, 526 bp, Arabidopsis thaliana
  unsure (1)..(526): unsure at all n locations
nnnnnnnnnnnnnnnnnnnnnnnnnnnnnnnnnnnnnnnnnnnnnnnnnnnnnnnnnnnnnnnnnnnnnnnnnnnccacgcgtccgctgatttcttccggcgagaaaacaaacgaaagagtgaaaaaaaggcgacttttttcttgtcccgggttataaagatgtcagctttgtgtcctgtctgcaatctcacgcttcctctctccctaatccaaagccatgtgaattcccacttcgaagacgatgaaatcaatccacaaatcgaaaccgatcaccacttggctctgcaactcgcttctgatgatcattcttctgatgatccttcttcgtcttcctctgcttcatcatctaacaacgttgcctccttggtccagttacagactaagagtcaattctatagtgtaggtcatggtggtttgattcgtttgctgaggaactgtctggagtcagaactgaaattgaagtcgaaacctttagagtgtagtactagtttactatcaggctttgttgatcattttcaatcttcg

SEQ ID NO: 129299 - DNA, 499 bp, Arabidopsis thaliana
  unsure (1)..(499): unsure at all n locations
agctannnnnnnnnnnnnnnnnnnnnnnnnnnnnnnnnnnnnnnnnnnnnnnnnnnnnnnnnnnnnnnnnnnccacgcgtccgtttgaatgcagagatccgcgagggtttgggttcgttcaatttatggaccctgctgatgctgctgatgcaaaacatcacatggatggttatcttcttcttggccgtgagttgactgtcgtgtttgcagaagagaacagaaagaaaccgactgaaatgagagcaagggagcgtggtggaggaagatttcgggatagaagacgtactccacctcgttactactcgcgctctcgttctcctccccctcgacgtggtagatctcggtcacggagcggtgactattattctcctccccctagaagacatcacccaagatctatctcgcccagggaagagcgatatgatgggaggaggtcatactcgcgctcacctgcctctgatggctcaaggggtcgcagtttaactccagtcagaggtaa

SEQ ID NO: 129300 - DNA, 645 bp, Arabidopsis thaliana
  unsure (1)..(645): unsure at all n locations
nnnnnnnnnnnnnnnnnnnnnnnnnnnnnnnnnnnnnnnnnnnnnnnnnnnnnnnnnnnnnnnnnnnnnnnnnnnnnnnnnnnccacgcgtccgcccacgcgtccggagaaaataacttttaaactttagcttctaagagatattcaggatgaccggaggaggatttgcgacttcggcgaacggagtagagtttgaggcaaagataactccaatagtcatcatatcttgcatcatggctgctaccggcggcctcatgtttggttacgacgtcggtgtctccggcggagtgacatcgatgccggactttctcgaaaagttttttcccgtggtttatcggaaagtagtagctggcgccgacaaagacagcaactactgcaaatacgacaaccaaggactacaacttttcacatcatctttatacttagccggtctaaccgcaacgttctttgcttcatacacgacaagaacgctcggaaggaggctaactatgctcatagcccggcgttttttttaaatcaanggttttggcttttnaacgngggggcttaagacctngccaatgcttatttnnaggaaggnntattnctttggtttttggagtttggggtcgnnaataaagcccttcccgttntnttttcggantt

SEQ ID NO: 129301 - DNA, 429 bp, Arabidopsis thaliana
cccacgcgtccgcacatatcttggctctacagggaatgcaacaagtgataaagaagtagagaggttattgaaagatgcagagagctacactttagcaaaccatatcttctggggactatggggaatcatctcgggacatgtgaacaagattgagttcgattacatggaatatgcaaggcagagatttgaacagtactggcttagaaagcctttgcttcttgaaggatgaagcagattcgcattgaaaagccgatatacaactaaaagtttctgcaattaggtccaaagaaaaaaagaaaatttagtagactatatgttgctattgttactctcaccagtctgtgtgtttcttcccttctactataaaggtttgttaactctcccaccagttaaattgagcaaaatcaaacaaaaaaaaaaaaaaaaaga

SEQ ID NO: 129302 - DNA, 493 bp, Arabidopsis thaliana
ctctaatacgactcctttagggaaagctcgtacgcctgcaggtaccggtccggaattcccgggtcgacccacgcgtccggcttctcttttgattctctcgctctctctttcttcatcgcctcttcgagcttcgatggttgggaatattctggtgaccggtggtgctggttacatccggaagtcacacggttcttcagcttcttctcggaggctataacaccgtcgttatagacaacctcgacaattcctctctcgtttcgatccaacgcgtcaaggatctcgccggagatcatggacaaaatctcaccgtccaccaggtggaccttcgcgataaacccgcacttgagaaggttttctccgaaacaaagtttgatgcagtaatgcattttgctggattgaaagcagttggtgagagcgtggcgaaaccacttctgtattataacaataacttgattgcgactattacacttttggaagtaatggctgcacacgg

SEQ ID NO: 129303 - DNA, 1088 bp, Arabidopsis thaliana
  unsure (1)..(1088): unsure at all n locations
nnnnnnnnnnnnnnnnnnnnnnnnnnnnnnnnnnnnnnnnnnnnnnnnnnnnnnnnnnnnnnnnnnnnnnnnnnnnnnnnnnnnccacgcgtccggagctgctggcaaggcagtaaaagttgagcattgtgagagagttcatgtgattgtagctaccaaacgaatttgcatcgccaattgccgtgaatgtgtgttctttttgggagtcaatcagcgacctcttatagttggttataaccacaaactacaggttgctccatataatacattttactcacacttggaggagcacataaccgaggtaggaattcagccaactatcaacaaatggaacgaatccttggcgctcggagcaattgatccgcatgactcactatcacatccgactggtgcctctgataaacaagctgaaccggcttcttgtgtggaccctgaccagttcactacctttttgatcccaaactggtttgcgggtgaggcgattggttccacgaaagacaatccatttccattggcagatgcatataaggcagtgcagcagacaaaccttaagaacttagaggaaacaagacaatccttgtgagaaacacctttcgaagaaaaccgataacgagaactcactacagcgttccacatgtatttcaaagactggctatacgcgacgggaaatattcggcaactttactgcctacaaggcgattaagaccaatggcgagtgaaaatgtcagtgtcactggggagttctcttgttccggtccttctcagagatttgctagcacggtttgacatcagaatttaactgcacagcacgctctctaactcctaaagctctgtttttttgtgtgtaggtttctctctggcttttatccgtatttattagtcttaaatatccacgtttttgtccttgaaaaacattaagccatcttgtcttgttgttgatttctttcaattgttataacaacttttctcaataccatatatataaatcttttagtaactaaaaaaaaaaaaaaaagnnnnnnnnnnnnnnnnnnnnnnnnnnnnnnnnnnnnnnnnnnnnnnnnnnnnnnnnnnnnnnnnnnnnnnnn

SEQ ID NO: 129304 - DNA, 545 bp, Arabidopsis thaliana
tactactcaccttagggaaagcacgtacgcctgcaggtaccggtccggaattcccggtgtcgacccacgcgtgcagacaaggatctccttcaaacgctcggaagtttccgctttggattcctgtcaccggcgatttcgtgggatgataacgacgccgagctatatttcgtgactgaagcaaagtgatgattcttcgattgaaagaccaaacgctcatcaaaatcaattcaactcgttcgtacttatcttccttagttttccgacgagattctcactcgcaggctcggacaaaacccgatcacgaccgccggagaagaggatacgagagggatgtgagaatcgaggagaagaaggaacacgatggattgtttctgtgcaagagcaaaggccaacaccttcttaccaacactagaatcctcgactccattgttcgaagctccgatatcaggccgactgatacagtcttgggaaatcggacctggccctggaaatctcacgatgaaacttcttgaagctgctcagaatgtcgtagccgtcgagctaga

SEQ ID NO: 129305 - DNA, 515 bp, Arabidopsis thaliana
ttctgactcactttatggagagctcgcacgcctgcagtgtaccggtccggacttcccggtccgacccacgcgttcgccgacgcgtgggtccggttatacgattcgtcggtaccaaaaccctccgagaagtgtttcaggtgggaaggtatctctgtctacacgatgtccggcgaggaagaagccaccgtgagggagccactagatctgattaggctgagtctcgacgagagaatctatgtcaagctccggtcagaccgcgaacttcgcggcaagcttcacgcgtttgatcagcatttgaatatgattctgggtgatgttgaagaaactatcactacagtagaaatcgatgacgagacatatgaagagattgttcggactacaaagcggacgattgagtttctattcgtgagaggagatggagtgattttggtgtctccaccgctgaggacagcagcctgagttcaactctatttcttttgggtgctccttttcgcaaaggggaatttggtaacttt

SEQ ID NO: 129306 - DNA, 705 bp, Arabidopsis thaliana
  unsure (1)..(705): unsure at all n locations
tggggggganccttaccnccaagccctttnngantttcccttgngnggtcccttcccccgttccncaaggccntncccacaaggnccccttaaaatgtgaanaaggttgcccgnaatntttaanggcnctggtcccctctgaatttgtngctnaggatctgntgttaatggaattttgncancaagaaggtctggctaacgattatgtgaaatttggatacaatgctgcaaccggcaagtatgaagacctgatggctgcaggcatcatcgacccgacaaaggttgtgagatgttgcttagaacatgccgcctcagttgcaaagacgttcttgatgtctgactgtgtggttgttgagatcccagagccagagccagttcctgctggtaacccaatggacaactcaggttatggatactaagatagaccgaccaggtttgctcgtaaagctgagagataggcaaaattccgaagcgagagtagctcactgggatacggattcctttagcttgcaaacaaattttctgtgcaagtgtagtgatttttgaaccagagaataatgtgttcactagatatcatatttgaaatcattttgaataacttaaaaaaaaaaaaaaaaaaaaagnnnnnnnnnnnnnnnnnnnnnnnnnnnnnnnnnnnnnnnnnnnnnnnnnnnnnnnnnnnnnnnnnnnnnnnnnnnnnnnncg

SEQ ID NO: 129307 - DNA, 805 bp, Arabidopsis thaliana
taatacgactcacattagggaaagctcgtacgcctgcaggtaccggtccggaattcccgggtcgacccacgcgtccgctggatttggagagcgcaagagccaataccttgacgatattgccattctaactggagcaactgtgatcagagaggaagttggtctttctcttgacaaagctggaaaagaggttctgggtaacgcttccaaggttgtcctgacaaaggaaatgacaacaattgtgggtgatgggaccacacaagaagcagtgaacaagcgtgttgtacagattaggaatcttattgagcaagcggagcaagactacgagaaggaaaaattaaatgagagaattgcgaagctctctggtggagttgctgtaattcaggttggagctcaaactgagacagagctcaaagaaaagaagctgagagtggaagatgctcttaatgctacaaaggctgctgttgaggaaggtattgtcgttggtggtggttgcactctgctccggcttgcatcaaaggtcgatgccatcaaggatacccttgaaaatgatgaagaaaaggttggagcggaaattgttaaaagagcactgagttaccctctgaaattgatagctaagaatgctggtgttaatggaagtgttgtcagcgagaaggtgctggctaacgataatgtgaaatttggatacaatgctgcaaccggcaagtatgaagacctgatggctgcaggcatcatcgacccgacaaaggttgtgagatgttgcttagaacatgccgcctcagttgcaaagacgttcttgatgtctgac

SEQ ID NO: 129308 - DNA, 467 bp, Arabidopsis thaliana
  unsure (1)..(467): unsure at all n locations
tgttgacgcgtgggcacaaaagctatctccgaggttagagcaatggcagctgtgaactgccatttcttccagctatcacgacatctcaaaccttctaggccttctttttcctgctctgcttctcaaccttcacaaaacaacattaaggtaatcataaatggagctgctaaggaaataggtagagcggctgtggtggctgtgactaaggctaggggaatggagttagctggtgctgtcgataatcattttgttggcgaagatattggcttgctgtgtgacatggaggagcctttagagatacctgtagtgagtgatctaacaatggtgttaggctcaatatctcagggaaaagaagtcggagttgtgatcgactttacagacccatcaacagtgtatgagaattgttaaaccaggcaacggcatttttggggttaangantttggtgnattgtnccncgggttaagcc

SEQ ID NO: 129309 - DNA, 513 bp, Arabidopsis thaliana
  unsure (1)..(513): unsure at all n locations
nnnnnnnnnnnnnnnnnnnnnnnnnnnnnnnnnnnnnnnnnnnnnnnnnnnnnnnnnnnnnnnnnnnnnnnnnnnccacgcgtccgcttcttctaaagttcggacacttaggatttatcgccggagttttgaacatggatgggattcttgcagctgttccatctgcagtgtgtgtctctctacgcatttcttgtcggaatctggataatgctgaatccatctatcattttcccggcaaatccttgaatcgagtttcagtgcttcaaactgggaactacgtctctcgtaaaggcaattcgttgcttaaaaaccgacattgtggtgaaatttcccgtgtgatcgtaaaatccgccgcttcttcagttggaaatgcagaggactacgctgaagaaacggctacaagtgtaaagtttaagagatcagtgacattaccgggttgttctagcccgttgtctttgctcggcactgggtttagggagaaaaagtttgctatcatcggtgtcaaagtctatg

SEQ ID NO: 129310 - DNA, 497 bp, Arabidopsis thaliana
  unsure (1)..(497): unsure at all n locations
nnnnnnnnnnnnnnnnnnnnnnnnnnnnnnnnnnnnnnnnnnnnnnnnnnnnnnnnnnnnnnnnnccacgcgtccggaggagtcagaatatcatcagccgcctctttcacttcaaccctccttaaacctcatctctttcctactccgccgctctctccgtcgtctctcccgttactccatttctctcgacccctccaggtgaaaatggctgggaagtcgaacaaatcgaaggccaagagagcggctcagagcactaccaccaattccactactgatgttaaatccgatgctcctgctcctcctgttgctgctactgttcctgctactgctccggttactgctgctgctgctccggttgctactgctgctgctccggttactgctcccgataatggcaccctcactgctgttgactctgcggtgcctgaagccaatgaagttgctcctacgattcctaaggctgacgaaagtgagtcacaagttgaaaataacgatgc

SEQ ID NO: 129311 - DNA, 760 bp, Arabidopsis thaliana
  unsure (1)..(760): unsure at all n locations
nnnnnnnnnnnnnnnngacttacttagggaacgctggtacgcctgcaggtaccggtccggaattcccgggtcgacccacgcgtccgcacacgtctttctccgaaactcgtctgagagaggctctgagattcgatgtcgttcgaggaagaagaagaggaggaaacattcgagcatacacttctcgtggtgcgtgaggtctccgtttacaagatcccgccgcgaaccacatccggcggatacaagtgcggcgaatggcttcaatccgataagatctggtctggtagactccgcgtcgtatcgtgcaaggatcgatgcgagatccgcctcgaggattcgaattccggtgatcttttcgcagcttgttttgtggatcctggacgtagagagaactctgtagagccgtctctcgattcgtctaggtatttcgttctcaggatcgatgacgggagagggaagtatgcgtttatcgggctaggattcgctgagaggaacgaagcgtttgatttcaatgttgcgtaatcggatcatgaaaagtacgttaggagggagaaagaaaaggagacaggggaaacgagtgagagcgataatcatattgatatccatcctgccgttaatcacagattgaaggaagggtgaaccataagaatcaacgtgaagccgaaaccaccaacanatggcacttggatgctttcagctgctctttcaggaacggggaagccaaacctctagcacttgcccacccccaaagcttgccgagtac

SEQ ID NO: 129312 - DNA, 895 bp, Arabidopsis thaliana
  unsure (1)..(895): unsure at all n locations
nnnnnnnnnnnnnnnnnnnnnnnnnnnnnnnnnnnnnnnnnnnnnnnnnnnnnnnnnnnnnnnnnnnnnnnnnnnnnnnnnnnccacgcgtccgtttcagaaaaaaaataacaacaacaacaataatggcgtcttttgcaacccatcttgttgttgttgttacaatgttgtttgtagccatggcctccgcggagatgcttcaagatgtttgtgttgctgatttgtctaatgcggtcaaggtcaacggatacacttgcaaggactcaacacaaataacaccagaagacttctacttcaaaggcttagccaacattgccgccacaaacacctctaccggctcagtcgtgaccggagccaacgtagaaaagctaccgggactcaacactctcggcctctccatgtcccgcatcgactacgccccaaacggcctaaacccaccccatgtccacccacgtgcctccgagatcattttcgtccttgaaggtcagctctatgttggctttgtaccaaccgctggaaaactcatcgccaagaaccttaacaagggagacgttttcaccttccccaagggactcatccatttncagaggaacattgccaacagtccagcatctgtactcgcagccttcgatagccaattgcccggaacacaatcacttgtcgcctctctctttggagctcttcccgatgacattctggccaagtcattccagctcaaacacaaacaggttaagaagatcaaactgagatacgcacccaagaaaatgacgtttgtttttgtttatattgtaaacacttagcaaagaagaatgaatcaatataaacgtttgcaacttttaaactatctatgagatgaaactaaagaactgattanaaaaaaaaaagggggcggccg

SEQ ID NO: 129313 - DNA, 518 bp, Arabidopsis thaliana
  unsure (1)..(518): unsure at all n locations
acgataaggttatcgaggtctttncagacatggaagagctgaaggtnagcccagacgaagactctgcnaggagagtggcacgagcnttcagggaactcaaccaagaagaaaatcgaaaactgatccttagaaggtacctctctgaatacaaatacatctacttcaatggtgagcgggttagagtcaaaagatatttctctgaagatagttgatttcattcttatgaacacacacaaccacacacatgtatatgtagaagttacccccaagttttttacccttgattgtaatttctaatttgtgaattcatcaagaagatggtaaaatgaatctccatttataaagttatcttttattctcgagaaaacaaacgaattgtcaaatgttcaatgacactcatgctttatagtgttcatgattccttgcaaaaaaaaaaagaaaggccggccgctctagaggatccaagcttacgtacgcgtgcatgcggcgtcatagtcaactagtagtgcagcctaaat

SEQ ID NO: 129314 - DNA, 480 bp, Arabidopsis thaliana
  unsure (1)..(480): unsure at all n locations
tancaggaatttttnngaacccaaaggattaaagggaaccccnacacgacgcgtggggcagtgtacaggagaacgggtcagggttcatcctatggtgcaggtgtgaaactcggtttggtccgagctgagtatgctgtagatcacaacaatggaaccggtgctctgttcttccgatttggagagaggtattaaggtaatgtgagaagcaggctcatgttatccaccttagtcttttcattttctctgttgaggatctgctatttttctcttttttccttttcttttgtgttttctttttttttttctacttctttttcaataattgtttaatgttagtgtttgatgacgttgctgagttgtgctgagaatcgggaaagagtttgttcttcgtaatatgtctagacttttgtaggaaaattttgaaactttcaagtttcaaaaaatcgtatgaatagttgacaaatgaaaatttatattggt

SEQ ID NO: 129315 - DNA, 646 bp, Arabidopsis thaliana
ggagataattcatttggaattctctttaaaagtttagtgatcggaggcttctcgattttctctctcttctctcacttgaatttttcagagaaagaaaaagcgattcatggcaagactccgtccaacatcgttcggcttctttaacgacgatggttggttcgtttccagcatcaattggcttctttagtggtggtggctggcttttgtatccggacgtggtccggctttgccgtcttatctcgccatcgttgctgttctggagaaatttagatcaaatataaactctggatattgtggagcagagagtcagatttacaagcgtgatgagattgtcgtagaggaaatggtgggttatcggatttgatggtggtgctgggagataacgatgaaacaatcatcggcgtaagagaaaagtcacatccacggtgtcgtatgttgctttgacttgtttttattaagcgctgtactctttactacaaggggtttagttgtaccctttatgggtttttgaaatactttgatgactgggcttttggggcgtttggtaacccataatttgaataaaaagaaacttatgaacaaaaaaaaaaaaaaagggcggccgctctagaggatccaagcttacgtacgcgtgcatgcgacgtca

SEQ ID NO: 129316 - DNA, 556 bp, Arabidopsis thaliana
cagcttcactcactactttggaagctggccgcctgcaggtccggtccggaattcccgggtcgacccacgcgtgcgcccacgcgtccggcaccgtctccattggcgggtttcagttctctaattcctagaacgcttctgaaacgcgccgttagtagcgcaacaagaaatctaacggcgccgttagcttctatttcagcagcaagaaatctcttcattggaggaggatgtgacgaaaattatggtgagccaggagtgttttctcattccaatggaataagaaagtacaacaccgttggtaatgctggcgcactaactggtccatttcatcatcttcttggggtcaaccagacaaacaagcccgcctttttaagggtccaatctatgagctatcagtttgtcgctgattctcattcatctcctaaacgtattgtgaagaatgaggatgaggaagatttttctgattcatcaaagaagggaaacgctgaaaaccctaggaaacatcaacattggggagaacatacccaagaaggataaaataaagtttcttgtgaacact

SEQ ID NO: 129317 - DNA, 1124 bp, Arabidopsis thaliana
tcgagagagaaaattttctgcaaatttggaatcttaaagttaagaaaatttattttcttcgaaaggtgaatctattcctctgtcgtatcgtctaagtgctgaccgcgaatttaatctcaaggttaaggtggtgtggaatcagccttaggggatggcgaagtactttgacattgatgacatacttatagaggaagagtttgtaccggttttattccataaaacagcaaacggagtgactattgatccaagtgcagaaacaaattgtgctgaacaaggctctaaagttgaacttcccttctggcttgctcatgagttgcatctgaggcaagctgttaccataaaccttcctccctgttttgaccaaaagacgaggcttgaagttcaggctgatgctgcatacgtcgatcttagatcgcgatgtccatacttttatgaatttggatgcaagatagagccactggtcacagatagaacactgggaatcttgctatcgactgcgtttaagatcagatacaaagaggcactgacaaaagtatacacagcagctcacataacagcttccaatgtatgaagcagctcacttgtcgatgacagccttcaagaagtggagaacaggtggtcctagattccagagagcttcaatactcggaagaaaacgcaaggattctaattaagttccctataactctttcttatcataattatccaatagggtgattgtagcatataacaatctcaaaatgatgtaactgggtaacatacatttgattatggttgagtcaaattgcaaatccttttgtgttatgttctcttcaggaaactcaaaatcatatccagatggtgttatcagttatgccatatgatccagttacgttcaaaattgatcattcgttctttataatcttattcaattcttcaaaagtattgaattatagattaaccaaaattttccacttcaatttatggaatcattctcttctgcttagttgaaaattataatatttactttgcccgggacagattcatatttatatcaccaaatccaacacaacaaataaaaggaagtatcttgtgtgagggctcattttaagtgtaacttggaagggccgtcatctagggaaatg

SEQ ID NO: 129318 - DNA, 869 bp, Arabidopsis thaliana
  unsure (1)..(869): unsure at all n locations
nnnnnnnnnnnnnnnnnnnnnnnnnnnnnnnnnnnnnnnnnnnnnnnnnnnnnnnnnnnnnnnnnnnnnnnnnnnnnnnnnnnnccacgcgtccgcttttcttcgatctattcttcgtttgtgagtaaagaccgcgaatttaatctgaaggttaaggtggtgtgaaatcagcgttaggggatggcgaagtactttgacattgatgacatacttatagaggaagagtttgtaccggttttattccataaaacagcaaacggagtgactattgatccaagtgcagaaacaaattgtgctgaacaaggctctaaagttgaacttcccttctggcttgctcatgagttgcatttgaggcaagctgttaccataaaccttcctccctgttttgaccaaaagacgaggcttgaagttcaggctgatgctgcatacgtcgatcttagatcgcgatgtccatacttttatgaatttggatgcaagatagagccactggtcacagatagaacactggggatcttgcntatcgnctgcgtttaagatcagataccaaagagaggctctgacaaaagtatacacagcagctcacataacagcttccaagtacttgtcgtttttaacaaaagaagaaacaaacttgtatgaagcagctcacttgtcgatgacagccttcaagaagtggagaacaggtggtcctagattccagagagcttcaatactcggaagaaaacgcaaggattctaattaagttccctaaaactctttatcctcatccttaccaagagggtgattgtgttatattagttataacatgtcaaaatgatgcaatggcaacatattatggtctgaatcaaattgcaaatccttttgtgttg

SEQ ID NO: 129319 - DNA, 527 bp, Arabidopsis thaliana
  unsure (1)..(527): unsure at all n locations
nnnnnnnnnnnnnnnnnnnnnnnnnnnnnnnnnnnnnnnnnnnnnnnnnnnnnnnnnnnnnnnnnnnnnnnnnnnnnnnnnnnccacgcgtccgcccacgcgtccgggaaagaagaagaggaagaagaaaatggcgaatcttaactcagctattgattcagtgttttgggatcagaacgtttcttcacctcaaacccttgaaggcactgctcgctctgttcccggtgagccatttcccttagacggagcacgagcaagccgctctcaccggattcaacagctctctctgcttcgcgaaggctttcctcttggaatcattccttctttggctcctgcttctgacaagagactcggctctttctctctcaattctctcttgctcagtccttcctctaacaactggtggttaggtttagttgggcagttcaaaccaaagaagctctttgctgatatcaaagcagatattagcaatgcagaagagtgggatttgcaagttgtaaaggatacagcaaaacacattgttgaca

SEQ ID NO: 129320 - DNA, 493 bp, Arabidopsis thaliana
  unsure (1)..(493): unsure at all n locations
nnnnnnnnnnnnnnnnnnnnnnnnnnnnnnnnnnnnnnnnnnnnnnnnnnnnnnnnnnnnnnnnccacgcgtccgctctgatctcgatccagattctctctacttctcttatcttcgatagagaaatttgtatcttcagatttattcgaggaggaagacgaaccctacttgattgatttaggaggtggagagatctttctgaacaagtttgattctgttggtaattgatctgaaatcctaggttttagccgtagatctgctgcttgtttcgatcgatttgggataccgtaggtattgattccatagaatttctcgctcgaggaaggtgaagaatctgcccagattccggagatttttagttagtcttggtgtgcttgttgcttcggtaatgttagatcataaaagtcttccattgtgaggaatcggaggttgctaagagtgtttgtggaagctgcttcttctggtattggattagaatcgggactatggaagt

SEQ ID NO: 129321 - DNA, 514 bp, Arabidopsis thaliana
  unsure (1)..(514): unsure at all n locations
tacgactcacttagagaaagaacgnacgcctgcaggtaccggtccggaattcccggttcgacccacgcgtacgcccacgcgtccgtacggctgcgagaagacgacagaaggggtcagaggaaagttgctacttccttgaaattaatcaatgacacacttgatgatttgattgcaacatgcaagagaatggtagaagaagaggagttgcagtttcacgaggagtatatgaacgaaagagatcctagcatccttcactttcttttagcttcaggagatgatgtctctagtaagcagcttcgtgatgacttgatgacaatgcttatagccggacatgaaacatcggcggcagtattaacatggaccttttaccttttaacaacggaaccaagtgtagttgccaaacttcaagaagaggttgattctgtaattggagatagattcccaaccatacaagatatgaaaaagctgaaatacactactcgagtcatgaatgagtcattgagatatttccaca

SEQ ID NO: 129322 - DNA, 468 bp, Arabidopsis thaliana
tttgacgcgtgggcggacgcgtgggcggacgcgtgggttaaaaaagaaatgaggccaaaagcagtgtgggagcctgagtatcacagagtgtttgttgatttatgtgtggagcaaacgatgctagggaataaaccagggacacatttttcgaaagaaggttggaggaacacattaatatcgtttcaggagcaaacaggcgccatgtacgatagaatgcagcttaagaaccattggggatacaatgagcagacagtggaaaatatggcgtagactcgttgaaactagttttatgaattggaaccctgagagcaacaggtttcgtgcaactgatgatgactgggctaactatttacaggagaatcctgatgctgggcagtatcggttgagtgttccgcatgatctcaagaagctagagattctctttgcgggttgtaatgtagaggtgaaaaatgatgaagtctcgggtgt

SEQ ID NO: 129323 - DNA, 412 bp, Arabidopsis thaliana
caaaaatcttttttttttttttgttgtctttcttctcgagagagataagtgaccaaagggtttcgatttctggaaatagtttgaataaaaaagtaatttttatgtgattattggcaaagaaaagttttagttttttttagtttgtgagagatgtctggttctgtatctggttgtggttctggtggttgtagtattgtatggtttagaagagatcttagggttgaagataatccagctttagcagcagcagtaagagctggtccagtgattgctctgcttgtttgggcaccagaagaagaaggacactatcatccaggcagggtttctaggtggaggctcaagaacagtttggctcagcttgattcttctcttagaagtcttggtacttgtcttatcaccaagagatctactg

SEQ ID NO: 129324 - DNA, 663 bp, Arabidopsis thaliana
  unsure (1)..(663): unsure at all n locations
ttgcctcgggntaatggccncccatnncggntggatcccccgaagnccggaaagacttgtttncgggataccggcttcaagnngccggtccccttgggncaagcccctagngactggggttaaagcctccaggcattttgggggggccccaagaatgcttctccaactatagtctcccccaaaacagtacaagagggaggtttagaaaggccatgacccacttattttctcactgttcctgaccccgcgtccgcggacgcgtgggaaaagaaaccatttttcatcattcttttgttcactgattccaatttgttcttctcaaataaaaagggaaattggttaacagacacatataatataatacaggttcgaacctgactgattgatttatcttttttttttttttggtgtgttggtttctctgagttctggagaattgtatattgtaattatcggccaaactaaagccccccaaatttaaagaaaaagaatactaatgatttgcctttttctcnnnnnnnnnnnnnnnnnnnnnnnnnnnnnnnnnnnnnnnnnnnnnnnnnnnnnnnnnnnnnnnnnnnnnnnnnnnnnnnnnnnnnnnnnnnnnnnnnnnnnnnnnnnnnnnnnnnnnnnnnnnnnnnnnnnnnnnnnnnnnnnnnnnnn

SEQ ID NO: 129325 - DNA, 510 bp, Arabidopsis thaliana
gtattaaccaccaaatcagtttcgttgtcccaaatccaaaattcctccttcttcttcgctgtaacgctttatacctaatcggagataaaacaatgcaatcgtcgaaaggacggcggaaagttggctccacaaccgccggagccggtatagattcggcggagaagctcgacgagctcttgatatcgtctgccatttgtaacggtgaagatttaggaccatttgttcggaaaactttcggtacagggaaaccagagactcttcttcaccatctcaagtttttcgcacgatctaaggaatcagagatcgaagaggtatgtaaagctcactatcaagactttatccacgccgtagacgatcttaaatcgcttctctcagatgttgaatcgcttaaatctgcgctttccgattcaaactctaaactccaatctgttgcggcgccgcttctttcgtctctcgattcgcttgttgaggctcagactgtgtctaagaacgtcgatctggcgattggag

SEQ ID NO: 129326 - DNA, 507 bp, Arabidopsis thaliana
  unsure (1)..(507): unsure at all n locations
cagctannnnnnnnnnnnnnnnnnnnnnnnnnnnnnnnnnnnnnnnnnnnnnnnnnnnnnnnnnnnnnnnnnnccacgcgtccgctctcaagatcaaaagagatgtcatcaatagcttctggcacagtttcaacaaccagatcgacactttgtttcagaaaaatcccaaagtctgcaactgttttatctatgcttcatcgatcttcttcttcttctccacgaatgttattattgttgtcttcttcatcagctaactctgcaaaactactgaactctaacaatggtctcttaatttcctcttctcctaaacctttcagacccgttatgcaatggcaagacgtcacggtaaagatggtggtggatgcaccagcttccgtggcttacaagttatacgcagatcgagaaatgttccccaagtggatgccatttttgtcatctgttgaggcaatggagggtagtccagacctatcgcgttatttggtaaaactcgagtcttttggacaaaat

SEQ ID NO: 129327 - DNA, 855 bp, Arabidopsis thaliana
  unsure (1)..(855): unsure at all n locations
cgatcaaccatggaagctacctctctaagctctgcagcaccaatcatcccctcctcatcttccccactctccatattctctccaaagaagcgaacagactcagcacctcccccgagaatcgtccgtctctcgaacaagaaggaagacaaagattacgatccgcaacattccgaatcgaactcatcaagcctcttccggaatcgaactctctccaatgatgaagcaatgggactggtgttgagtgcagcttcggttaaaggatggacaaccggttccggtatggaaggaccgtctctaccggctaaaaccgatacagacacggtttccacatttccatggtcattattcactaaatcgcctcgtaggcgaatgcgtgttgctttcacttgtaacgtatgtgggcaaagaactacaagagctattaatcctcatgcttacactgatggcactgtcttcgtgcagtgttgtggatgtaatgtgtttcataagctggtcgataatctcaacttgtttcatgaggttaagtattatgtgagcagctcgagcttcgattacaccgatgctaagtgggatgttagcggcttgaatcttttcgatgatgaggatgatgataatgctggtgatagcaatgatgtctttcctttgtaaagaacctttctacaatatctttgttatatatctgtatatagctaccttgtcatatcatcttggtgtgaataacatttggaagtaataaattggtcatatagctcatgttctgaaaaaaaaaaaaaaaaaaaggacgagggcggacggtttaaaagattccaggttacggtagggtgcattccaagttataggttgnnnnnnnggaat

SEQ ID NO: 129328 - DNA, 603 bp, Arabidopsis thaliana
  unsure (1)..(603): unsure at all n locations
acatggctgtttnatcanccggtaaggtggcaccgtccggttggaggccgcntaccgctaaaccgatcagcccggttccacattccatggccattatccactaaatcgcctcgtaggcgaatgcgtgttgctttccacttgtaacgtatgtgggcaaagaactacaagagctattaatcctcatgcttacactgatggcactgtcttcgtgcagtgttgtggatgtaatgtgtttcataagctggtcgataatctcaacttgtttcatgaggttaagtattatgtgagcagctcgagcttcgattacaccgatgctaagtgggatgttagcggcttgaatcttttcgatgatgaggatgatgataatgctggtgatagcaatgatgtctttcctttgtaaagaacctttctacaatatctttgttatatatctgtatatagctaccttgtcatatcatcttggtgtgaataacatttggaagtaataaattggtcatatagctcatgttcctaaaaaaaaaaaaaaaaaaaaaaaaaaaaagcggccgctctagaggatccaagcttacgtacgcgtgcatgcgacgtcatggtcttctatag

SEQ ID NO: 129329 - DNA, 528 bp, Arabidopsis thaliana
  unsure (1)..(528): unsure at all n locations
nnnnnnnnnnnnnnnnnnnnnnnnnnnnnnnnnnnnnnnnnnnnnnnnnnnnnnnnnnnnnnnnnnnnnnnnnnnnnnnnnnnccacgcgtccgcggacgcgtccgcccacgcgtccggcgatgggtcaaattctgtagtctctagatttctaggattaaacccgactaaagacctcggttcgcgggccatcagagggttcacaaattacccggacgaccatggattccgacaagagtttataagaatcaagatggacaacgtcgtaagcggacgacttcctataactcacaaactcgtcttttggtttgttgttttgcgaaattgtccccaagactcaaacttcttaaaaaatcaagaggatatcgcaagattggcactagcatcagtccgcgaattctcagaagagtggaaagagatgctgaagaattgtgatatggactctttgtatatcaaccgtttaaggtaccgtgctccttgggatgttctgtctggaaaattccgacgtggcaccgtgacagttgccgga

SEQ ID NO: 129330 - DNA, 994 bp, Arabidopsis thaliana
  unsure (1)..(994): unsure at all n locations
atgatctagccagcatctatactgactcactatagggaaagctggtacgcctgcaggtaccggtccggaattcccgggtcgacccacgcgtccgcccacgcgtccgcggacgcgtgggcttgatttctgacactaccctcatcgggtctccaagaggccaagaaagacctctttctcggcttctaggagtctcatcattctcttttttcacatttgcttcctccacacgcaacctccaaaaagccctaaatttattaaaacaaatggattccacggagctgaaccgtgtgttccaaatgttcgacaaggacggagacgggaagatcactacgaaggagctgaacgagtcattcaagaacctcggtatcataatacccgaagacgaactaacacaaattatccaaaagatcgatgttaatggtgacggttgtgttgacattgaagagtttggagagctctacaagacgataatggtagaagatgaggacgaggtaggagaagaagatatgaaggatgcgttcaacgtatttgatcggaacggagatgggttataacggtggatgaattgaaagcggttttatcttccttgggactcaagcaaggtaagaccttggaggaatgtaggaagatgataatgcaagtggatgttgatggtgatggtagggtaattacatggagttagacaatgatgaaaaggggcgctttttagctctttgactgatataacttttttcttctttttaccttctctgggtttattttggtatttgctaaccatttctcttgggtctaattgaaatacatgtcataactaatatttatcttaagaatgcagagccattgaaaaactgaggtgtttatgttaaattgatgaggtgcttgttcatcacaaaaaaaaaaaaaaaaaaaaagnnnnnnnnnnnnnnnnnnnnnnnnnnnnnnnnnnnnnnnnnnnnnnnnnnnnnnnnnnnnnnnnnnnnnnnnnnnnnnnnnn

SEQ ID NO: 129331 - DNA, 323 bp, Arabidopsis thaliana
agcagagaccacaacaaaaaatctcgagacaaagatacaatggcgagccgaaacagagcactcttctctgtttccactcttttcctctgtttcatcgtctgcatctccgagcaatcgaacaatcagtcttctccagtcttcgcctgtgacgtcaccggaaacccttctcttgccgggcttagattctgcaacgcggggttgagtatcaaagcccgagtcaccgatcttgtcggaagattgacgttggaggagaaaatcgggtttttgaccagcaaagctatcggcgttagccgccttgggattccgtcttacaaatggtggtc

SEQ ID NO: 129332 - DNA, 784 bp, Arabidopsis thaliana
  unsure (1)..(784): unsure at all n locations
acgccaactctatacgacttacttagggaaagctggtacgcctgcaggtaccggtccggaattcccgggtcgacccacgcgtccgccccctcactgtctgctctaggtcgagattttttagggtttatctccggatttgggttagcgaaatcgagctcacggggttgtctcgattattcctttttaggttgcttgaatctgaagctaatcttgggttaattggattgttagaatcgagacctaaatccttcgattggatcagagaaaatatgtcgcgcgttctcacttgcccaccgcttgtgtttgcaagaaaccacgttggcgttcaaaacttggtcgaatcgactaaggttcgttgagctacagatctggtttcttgcttcagttttttttgtgtgattgatttctacggatttcgtaaaacctgattttggattcgtttttggggaaacttatttcaatgtagtaatctttgaatttgggttacacttcttgtgggtatggctatattttcataagtcgtatttttttctctctgaaaccctatcatgtataaatctatataagctaattatcatgtgattatcattaacactatataaagagttgcatattagttntcaataatctcatcatgtgttcactgtatcagcaatcattaggagtgaatcaggtaagttgcattgttttcctttctgtaagtttgattttgtaggtctagatatgtatatgattaagcttgtaggagcttctttgtttattggaatggggttttgacattgag

SEQ ID NO: 129333 - DNA, 402 bp, Arabidopsis thaliana
  unsure (1)..(402): unsure at all n locations
cactcctaagggaaggctgccccctgcgtccggcccgattccggtcgaccagcggcggaaaagacatgtctgggttggcagtaatgcttttgcttctcttctttgcaaatcccggggtgcttctatactaacattgtacgtaagaaggaaaaaaaaagaacgctgcatttctcgaatgtgtaagaatcccggtttcaaggaggttttagggtgggtttattatgaatcaaaattccgtttgggggtatgtgatgatggttttagcttgataagatgtgtttactcttctaagtgattcatatgtttagatgaaggtgtttgtaatattactagcaatagtacttaggaatgttgtaatcttttagtattagtatcatattattattgttggttcanaaaaaa

SEQ ID NO: 129334 - DNA, 574 bp, Arabidopsis thaliana
cagctacaatacgactcactttagggaaagctgcgtacgcctgcaggtaccggtccggaattcccgggtcgacccacgcgtccgtatggatcctggagaagaagaaacagagcaattaaagaaagagtatgtaactttcatgaaaggagttgtctctgctcctctaaatctaccaggaactgcttatcataaagctcttcagtcacgagcaacgatattgaagttcattgagaggaaaatggaagagagaaaattggatatcaaggaagaagatcaagaagaagaagaagtgaaaacagaggatgaagcagagatgagtaagagtgatcatgttaggaaacaaagaacagacgatgatcttttgggatgggttttgaaacattcgaatttatcgacggagcaaattctcgatctcattcttagtttgttatttgccggacatgagacttcttctgtagccattgctctcgctatcttcttcttgcaagcttgccctaaagccgttgaagagcttagggaagagcatcttgagatcgcgagggccaagaaggaactaggagagtcagaattaaat

SEQ ID NO: 129335 - DNA, 518 bp, Arabidopsis thaliana
  unsure (1)..(518): unsure at all n locations
atgatactgccnnnnnnnnnnnnnnnnnnnnnnnnnnnnnnnnnnnnnnnnnnnnnnnnnnnnnnnnnnnnnnnnnnnnnnnccacgcgtccgcttcattccagtagcagtagcctgcgtgttttaccagagatattacacaccaacagcaagagaactgtcacgcatgtcaggagtagaaagagctccaattctccaccatttcgctgaatcgcttgctggtgcaacaacaatacgtgcttttgatcaacgagatcgcttcattagctcaaaccttgttctaatagatagccattcaaggccatggttccatgttgcatcagcaatggagtggctttccttcaggttgaatttgctgtctcatttcgtctttgctttttctttggtgttacttgtgactctccctgaaggtgtcatcaatccaagtattgctggtcttggggtcacatatggcttaagtctgaatgttctacaagccacagtgatatggaatatatgcaatgcagaaaacaagatga

SEQ ID NO: 129336 - DNA, 674 bp, Arabidopsis thaliana
  unsure (1)..(674): unsure at all n locations
accnnnnnnnnnnnnnnnnnnnnnnnnnnnnnnnnnnnnnnnnnnnnnnnnnnnnnnnnnnnnnnnnnnnnnnggccgggcgtcctacggcttcnataatacaacagaagggggtacttcgtttctttggacagtgtacctccacgtattcgtctctggtgatttaatcaaagcctctggagaagatctgtaggtacgtacaaatgtctgaacatgttatggttttgggtaaaggtaacaaaggaatcagcaagaattcttcagtcaatccatatgaatcagcttggttaggtcgttggactcagtcaggtagtgaagtgaagtttcatgatggtgagaccaattgctctaagcagttgataagacctgaagatgagaatcatggagtcgaggtcttgccgtttcctatgttcaaggtttctcaaaagagagagactactactactactactactaaaccgtctttccatgaagatgttggttcaagctcgagagctatggttaatagaatgccctggatgtatccgcaaggagagaacttcagttctagtaatcgtcttgacttcccnnnnnnnnnnnnnnnnnnnnnnnnnnnnnnnnnnnnnnnnnnnnnnnnnnnnnnnnnnnnnnnnnnnnnnnnnnnnnnnnnnnnnnnnnnnnnnnnnnnnnnnnnn

SEQ ID NO: 129337 - DNA, 507 bp, Arabidopsis thaliana
  unsure (1)..(507): unsure at all n locations
cagctannnnnnnnnnnnnnnnnnnnnnnnnnnnnnnnnnnnnnnnnnnnnnnnnnnnnnnnnnnnnnnnnnnccacgcgtccgcggcaaacgcagagtagcttgaagaaatccgttgctcattctcttctccgatcgtttttttcttcgcatcccaaggtctctcagttacagaagatggagaaaacgccgttcgttctctgtttctcagtttctcggaatcaaattccagattacaatccggacgaagcgaattggagtgagaaaattctggatcatgtgggtgatttcaaaagtctggaagaagtggtgtctaagctgacagagaatctgaatctgaccgagtctcagattgcgagtatttggaagtcattgattaaggcagaagaagaagctcaacaagttccaccaccaccaccaccaccgagtgctgcagatgtaagtagtaaatcaacgaggaagaagatgaagaaacaagcctctaagctgcagagtaaacttcttctc

SEQ ID NO: 129338 - DNA, 522 bp, Arabidopsis thaliana
  unsure (1)..(522): unsure at all n locations
nnnnnngatgctccaggtacacacgactcacttagggaaagctcgcacgcctgcaggtaccggtccggaattcccgggtcgacccacgcgtccgcggacgcgtggggatgaatgtttctggagaatgtgtaggccgtgaaagatgcgaggaattagccaagtcttcttcgttttaccggaaagtttactcggaggatgtgccatatatgtttacactagaatggtcaacaagttcaagattgaaggatgtaatgcaccaattccaaaagcatttggactatcttcaagaattttggtctgtcttggacaatatcgataaatctctatgtgttgttgatgtcaagcaaccagctcgtgcctctgctattcgccggattgatgctgggaatgattgtatcatcattgttcatatcgacttcaaagaccctaaatccctaccagagtcccggtttattggtcctgtgccttcagctacgcatatgaacaacttgcatatgttatggagaagaaattgcaaaagat

SEQ ID NO: 129339 - DNA, 842 bp, Arabidopsis thaliana
  unsure (1)..(842): unsure at all n locations
gcccacgcgtccggcgtgccagtctctaacaaaaatctcaatctttccatacttatcgatcacgtcacctcctttgtctctattacctaactccatccttaaaaatccaatctttcacctttcttctccgagatttcactacactgcgcaataaaaaaatggcgaatacccaactcaaatccgatgcaatcatggacatgatgaaggaacatctttccaccgacgccgggaaagaggtcacagagaagatcggtcttgtttatcagatcaacattgctccaaagaaattagggtttgaagaggttacttacatcgttgatctgaagaaaggcgaagtcaccaaagggaaatatgaaggagggaaagtggatgctacgttctccttcaaggatgatgattttgtcaaagttgccactggaaagatgaatcctcagatggctttcattaggggtgcgatgaagatcaagggtagtctcagtgctgcgcagaaattcacccctgacatcttccctaaaccttcaaagttgtgaacaccaaaaagagtggtatgcagcaaaccctaaactcaagctcaatttatgtcttcaaaggggttggctttttagtacaactagtcagaaataaagttctcttcaaagtatctttgtattctcttttatctttggaacaaaaatattggtattgggttttaataatatgaatcttctctttgacccnnnnnnnnnnnnnnnnnnnnnnnnnnnnnnnnnnnnnnnnnnnnnnnnnnnnnnnnnnnnnnnnnnnnnnnnnnnnnnnnnnnnnnnnnnnnnnnnnnnnnnnnnnnnnnnnnnnnnnnnnnnnnn

SEQ ID NO: 129340 - DNA, 578 bp, Arabidopsis thaliana
  unsure (1)..(578): unsure at all n locations
atgatactccnnnnnnnnnnnnnnnnnnnnnnnnnnnnnnnnnnnnnnnnnnnnnnnnnnnnnnnnnnnnnnnnnnnnnnnnnccacgggtccggggaagccaagatgtgcatgtccataatgccttgggtaaaattatcatagacagtaacaacaaccccgagcatttcctgaccaccaatccttactacgactctaaggttgtgggtaagtactgcgagaaacgtgatcccactctggctgttgtggcatacagaagaggacaatgtgacgaggaactcatcaatgtcaccaacaagaactctttgttcaagttacaagccaggtacgtagtggagaggatggatggtgacctctgggagaaggttcttacggaagaaaatgaatataggaggcaacttatagaccaagttgtgtctactgctttaccagaaagcaagagcccagagcaagtttctgcagctgttaaagcattcatgactgctgatttgccgcacgagcttattgagcttcttgaaaagattgttctacaaaattctgccttcagtggaaacttcaatctgcaaaatctgcttata

SEQ ID NO: 129341 - DNA, 1010 bp, Arabidopsis thaliana
taataccctggcccaaggaagaatatattggttggttaaaaagaaaaaaaagccaaagagggggttgcccccccaaaattaatgattaaagtttttgggacaaaagagccctccaaagggttttctttcaaacaaattagagattttcaaaggcaaaggacaatatttttgtattcgccccaactaatattgaatataatatattagggggataaacaatataataaagtcgggcggaccataggggatatatgattacacccatatgcgagaggggttgaacccatcatacccatagaagagtgaagggtatccgctagggaaaaaacccaaaagaggggtttcacgaagaagggggttggatatccctaagaagggtgtagtaagggaccacatattgcccactatattgttagaaagctttatgctgaatcccctgagaacagttcctccgggggaacaagataatatagaacccccattggcccttaaatctttatcacccggagtgctttggggaaaaatcaaaaggccaccagtgaggacacatgattatttctaccagtggtgcgccatgccagggttatgattaagctgaagcatccagaaggagagaaaaaggggcaagagctctagaggagaagactaggaacggaaagattggttcctgcaaggaacaaagatgaattgcagagtgatggtttagataacgtataagtggagattgcaataagcattttgaagaagctgttgttggttattacttgtgttcatgtgggcagttttttttagttatttatttttggaaatgaaattggcgtttatacagaatcagattagtaaattcctttgacagctcagaaaggtagtacatttccttggacaaaccaccaattagaaacaattttcttggacgagggggtataaaaaaagtaaaacaaagataatagaagaagggcggccgctctagaggatccaagcttacgtaagcgtgacatctaagtcgatat

SEQ ID NO: 129342 - DNA, 1398 bp, Arabidopsis thaliana
  unsure (1)..(1398): unsure at all n locations
tcccgctctatactactcactatagggannnnagtacgcctgcaggtaccggtccggaattcccgggtcgacccacgcgtccgaaaataatctccggtttgagctgcgtcgacgagatctatcgtcaggatctcagatttgttgttacactcttgctcaagtctggagacatgagttctccgggaacgagtatgttcaccaatttcactaagctctgcaaaggacttgccctggtacttgtggtgggacacctcgtggttcagttcattcccgctaccgtcccataccttgctctgattccggcgaggactattccttttgcctggaatctgataacaagcggctattttgaactctcagtatatggggttgtcttcagcaccgtttctctcctttttatgggaaagttcctggaacctgtctggggttccacggagttccttaagttcatctttgtggtgaacttccttacgtatctctgtgttttcgttacagccattgccttatactacataacgaggctggaagtttacctatatatgccctttgctggttttcatggtgtcttggcaggccttcttgtagggataaagcagataatacctgaccaggagatattgctgttaaagataaaagcaaagtggttgccctcaattatgctaattttgtcaatagcctcaagcttcttcaacactagatttcagcagcatatcttcccactttgatatttggtacatatatgggctggttatacctcaggtacctacagaggagaccagaaacaaagctcagaggtgatccaagggaggactttgccttctctactttctttcctgaacttctcaggccagtaattgaccccattgccttaatctttcaccgggatgctttgtggaagatcaaatgccaccagtgaagaccatgattattctaccagtggtgcaccattgccaggttctgattctgctgaagcatccaggaggagagaaagaggggcaagagctctagaggagagactaggaacggaaagattggttcctgcaaggaacaaagatgaattgcagagtgatggtttagataacgtataagtggagattgcaataagcattttgaagaagctgttgttggttcttacttgtgttcatgtggacagtttttttttggtttttttattttgttaatgaaattggcgtttatacagaatcagcttcgtaaattcctttgacagctcagaaaggtagtacatttctttggacaaaccaccaattagaaacaattttcttggacgagaggatataaaagtagttatacaaaaaaaaaaaaaaaaggggcggccgctctagaggatccaagcttacgtacgcgtgcatgcgacgtcaaagcttctatatagtgtaa

SEQ ID NO: 129343 - DNA, 498 bp, Arabidopsis thaliana
taatttttcccggatctttgtgtaggttcgaatccacctgtgaaggcccttgttatttttccaggggtgggcccattccaggttttgattttgctgcagcctccaggaggaaaaaaaagggggcaagagctcttagaggagggcctaggtacggaaagcttggttcctgcaaggacctacagatgaattgcagagtcatggtgtagataacgtataagtggagattgcaaataagcattttgaagaaggctggtgttggtttctcgcctgtgttcttggggccagttttctcctgtatgggggatatgttaatgggtttggcgttgatccagaatcagcttcgtaagattcctttggcagctcagagaggtagtacatttccttggactaactcgccatttagaaacaattctcttgggcgagaggatataaaagtagttatacaggaaaaaaaaaaaaaggggagaccgctctagaggatccaagcttacgtacgcg

SEQ ID NO: 129344 - DNA, 628 bp, Arabidopsis thaliana
cccgcgggccccggtccgggattcgcacccacgcgtccggcgatatgtgtcttatccgcaagtggtgctgtctctactgcaactcttcttcagccagcaccttctcatggaactattatatacggtgtgaagctcatcccagtttgaggaggaggacgatttcatcatttcaccaattccatctctccttttgggtcaaacccaaacccaaatccaaaccctggaggtgtctctactggattcgtgtctcctcctttacccgttgactcttctccggctgattcgtcagcggcggcggcgggagctttggttgctcctccttcaggtgacacgtctgtgaagcggaagagaggacggcctagaaaatatggacaagatggtggttctgtttcgttggcattgtctccttctatctccaacgtttccccgaactctaacaaacgtggccgtggaagacctcctggctccggcaagaagcaacggctatcttccattggtgaaatgatgccttcatcaactgggatgagcttcacaccgcatgtaatcgtagtttccattggtgaagacattgcttcaaaggttaatatcgttctcgcatcaaggtcccacgagcggataatgtgtttta

SEQ ID NO: 129345 - DNA, 834 bp, Arabidopsis thaliana
  unsure (1)..(834): unsure at all n locations
cagctannnnnnnnnnnnnnnnnnnnnnnnnnnnnnnnnnnnnnnnnnnnnnnnnnnnnnnnnnnnnnnnnnnccacgcgtccgctttcaaacaaataaactcagaaaaaatggccgaaaccgaaacggagtcgatcaccacctcttctccaccgccgatctcagaaaccgaaaactccaccacattaccaacaacggagacggagaagaatcccaatccggtaaccatttccctcagaatctggccaccgactcaaaaaactcgcgacgccgtgattaaccgtctgatcgaaacactgtcaaccgaatcaatcctctccaagagattcggatctcttgaatccgaagaagcttcctccgtcgcgaaatcaatcgaagacgaagcttacgccatcgcttctgccaccgtattcggtgatgacgacgggatcgagattcttaaagcttattctaaagagattagtaaacgtatgcttgaatctgttaaggctaagagtaatgtggcttctcctccaccgaaggatggtgatggaattgaatcagctgttgattcgaagattgattcaagtgaagcttgacgagggcttgaaattatggtgttgttctcttatctctaactatctttttatttgttttagattggtatgcgattatctatctcagagttttgtttgttgtataacttgtggatttgggacctgttactaatatgattttgtggttgatttggttttgacgttttaaaaaaaaaaaaaaaaaagnnnnnnnnnnnnnnnnnnnnnnnnnnnnnnnnnnnnnnnnnnnnnnnnnnnnnnnnnnnnnnnnnnnnnnnnn

SEQ ID NO: 129346 - DNA, 526 bp, Arabidopsis thaliana
atgatctccaagctacaatacgactcacttagggaaagctgcgtacgcctgcaggtaccggtccggaattcccgggtcgacccacgcgtccgacgaaactaacgatgtacgaagcaatcaaagacaatgatgataatgatcatcaatggcgagagaagaaagacattgagtctgctcttcagatttctcgttcttcctctcttcctcccgacaaggaacgattagtttcccttgatgtctttcgcggtcttaccgtcgcatttatgatacttgtggatgatgttggagggattttaccatctattaatcattcaccttgggatggtgtcacactagcggattttgtcatgcctttttttcttatgtattgttggtgtctctcttgcctttgcttacaagaacttgtcatgtaggtttgtcgcaacaagaaaagctttgattcgatctttgaaacttctattacttggtctttttctccaaggaggatttattcatggtcttaataacttaacttatggaatagatg

SEQ ID NO: 129347 - DNA, 547 bp, Arabidopsis thaliana
aggtctctacgactcactatttggaaagctggtccgcctgcaggtaccggtccggaattcccgggtcgacccacgcgtggtcggacgcgtgggcggacgcgtggggttacaccgtcgtccagatttttcaaacgccgacgaagctgatttagtgaatatggaatctaatggatcagtttcatcgatggttaacttggagaagtttctctgtgagcgattggtggaccagtcacaaccaatctcggagcgatttagagctctcttctctcttcgcaacttgaaaggcccaggacctcgcaacgctctaatccttgcatccagagactcatctaatttgttagcacatgaagctgcatttgcattgggtcagatgcaagatgctgaagccattcctgctcttgagtacggatcttaatgatatgtctttgcatccaatagtacgacatgaggcagcagaagcccttggagctattggtttggcgggtatgttaacattttaaagaaaagcttgagctcggatccagctcaggaggttcgggaaacatgt

SEQ ID NO: 129348 - DNA, 415 bp, Arabidopsis thaliana
  unsure (1)..(415): unsure at all n locations
aagagagggggnttcatgcttgcagcgcagaactcatagttctgaccatcaaagactgcaaccagttgtgatgttcttcttcttctttgcaggatcaatcggagagttcaatctcaacagacgaccataccctcgatacagtagctgctccgctcatcaacgtccatttcgccgcctttagccgtcaacgttctctggttctgttgccgtacaaaattcttaaaggttaattagataagacctaaaacgggggcggtgtaaagcttgtcggtcttcttgacctttttggtgaactcctccttcctctctatcggctatcgctcgctgcggctctgtgtcttgttgcttggagcaagctctccagcgctcaagaatagggaaaataaaattatggattcagatgcatgggaaatta

SEQ ID NO: 129349 - DNA, 537 bp, Arabidopsis thaliana
ctcactatttggaaagctggactgcctgcaggtaccggtccggaattcccgggtcgttccacgcgtccgctaattccctggatacaaagaagaggaagatgagctcatggaactacgttgttacggctcacaaaccgaccagtgtcactcactcgtgcgttggcaacttcacaagtcctcaagagctcaatctcattggcgcgaattgtactcgaatcgagatccttttgcttaccccacaaggacttcagcctatggtggacgttcctatatattggaagaatcgctactctggagttgttccgaccccatggcgaagcgcaagactttttgttcattgcaactgagagatacaatttctgtgttcttcactgggatcctgagccctctgagcttattacacgagcaacgggggaatgtttctggtcgtataaggccgccaacatacaattggcagattggcctcattgatcccgattggtggaccattggacttcatctagatgacggcttggtcagggtattccttttgaaatg

SEQ ID NO: 129350 - DNA, 524 bp, Arabidopsis thaliana
  unsure (1)..(524): unsure at all n locations
atgannnnnnnnnnnnnnnnnnnnnnnnnnnnnnnnnnnnnnnnnnnnnnnnnnnnnnnnnnnnnnnnnnnnnnnnnnnnnnccacgcgtccgcggacgcgtgggtttctgatgcccgcccacctgggatttataaaccagattatattgatgctttatacactttttatcacgaaataaagcctgaaagtgttacttgcccaccaactcctgaatggaagaggtctgccgagcttgatcttaatggtgaagctgttcaagatgatgatgatgatgattctccgcctgaccctgttcaagaaatcaatcaggagaatgtgaagatgtcaaatgatgacactttgggtgatgaaataccccattatcaggaggaagcttaccggcaattctgttataaaatgcttatgatgaatgttgggggaagaggatttatgcaattcccaggttcgcaccctgtatcattagacagggagagtttgcaacttttgaggcagcgatactattatgcgacatggaaggcagat

SEQ ID NO: 129351 - DNA, 511 bp, Arabidopsis thaliana
  unsure (1)..(511): unsure at all n locations
atgatactgccagctannnnnnnnnnnnnnnnnnnnnnnnnnnnnnnnnnnnnnnnnnnnnnnnnnnnnnnnnnnnnnnnnnnccacgcgtccgtcagcaaaagataaaagaactgaaacagtctctaaacagcgagtttcaactcattcacgagttatgcctatatgtcctctcagcttcccaaagacaagagcttatacgtgctacactctctgcattgcatgcctatctttcttggattccgttgggatacatatttgagtcccctttgctggagatcctacttaaattcttccctgttccagcatataggaatctcacacttcaatgtttgtcagaggttgcatctcttaattttggggacttctacgatatgcaatatgtcaagatgtacagcattttcatgaatcagttgcaggcaattctccctttaaatttaaatatccctgaggcatattcaactggaagtagtgaagaacaggcttttatccagaacttggcactgttttt

SEQ ID NO: 129352 - DNA, 690 bp, Arabidopsis thaliana
  unsure (1)..(690): unsure at all n locations
acgcttcgatcgaaagaatatatatttggaagtttcctctgcttttttgttttcgtttgatagaatgggaacagttctcgattcgcattttctggctctcactgctattgtcactgtgatttaccagttcatattcttcgtaatcacggctcttttcaaatttgatcaagtcactgactttgctggtagcacaaacttcgttatacttgctgtgttaacacttgttctcaaagcctcttggcattttcgacagatagtattgactttgctagttgtggtatggggtcttcgcttggggattttccttctaatgaggatcttgcaatggggggaagatcgtcgctttgatgaacagcgtggaaatatagtgagactaatcattttctggactcttcaagctgtgtgggtttggacggttagcttacctttaacacttgttaatgcaagtagatggtggtggatctcttaaacccgcagatgttatcggttggactatgtggggtttcggcttcttgattgaaggctgcaagctgatccaacagaaggtatcattcaaaaacttttcctgaaaccagngggaaatggtgtnatgttggggctggaagtttcaaggcatccaaccacttcggnggggttttnctttggtggggatnttttttggtnaancccttnctttaaggtcanngantt

SEQ ID NO: 129353 - DNA, 911 bp, Arabidopsis thaliana
  unsure (1)..(911): unsure at all n locations
tgcaaagagtaaaatggcgaatcctaaagtcttcttcgacatcttgattggtaagatgaaggcagggcgtgttgtaatggagttatttgcagatgtgactccgagaacagctaataatttccgtgctttgtgcactggggagaatggtattgggaaagcagggaaggctttacactacaaaggctcagcctttcaccgtataatcccagggttcatgtgtcaaggtggagatttcactcgtgggaatggaactggaggagaatctatttacggctctaaatttgaagatgagaacttcaagttgaagcacactggtccagggattttgtctatggctaactctggtcccaacactaatggttctcagttcttcatctgcacagagaagacttcgtggcttgatgggaaacatgttgttttcgggaaagttgttgatggatacaatgtggtcaaggcaatggaggatgttggctctgacatgggaaatccttctgaacgagttgtgattgaagattgtggtgagctcaagaacccaagttcataagttcttaaaacattgggtgggttgatcttgacaggttattctatcatatgctgtgaagcagagacagcatcttagcgttaaggtcaatctagtctgtgatgcccccctttggttttggctatatcatatgacccttaggaaggggcccccccctgtaagttgtttttttaaaactcttgtgtgaaaataggatggatgataaaaatggttagtttctttnnnnnnnnnnnnnnnnnnnnnnnnnnnnnnnnnnnnnnnnnnnnnnnnnnnnnnnnnnnnnnnnnnnnnnnnnnnnnnnnnnnnnnnnnnnnnnnnnnnnnnnnnnnnnnnnnnnnnnnnnnnnnnnnnnnnnnnnnnnnnnnnnnnn

SEQ ID NO: 129354 - DNA, 931 bp, Arabidopsis thaliana
  unsure (1)..(931): unsure at all n locations
nnnnnnnnnnnnnnnnnnnnnnnnnnnnnnnnnnnnnnnnnnnnnnnnnnnnnnnnnnnnnnnnnnnnnnnnnnnnnnnnnnnccacgcgtccgcggacgcgtgggcagaagttcaccgttacaaccgatggtccaattaatactgctgctggcttgcagtcacgcgttgaatcactcctgcgcaaatctaacagtgaattcaccgtggttatatcacagatgaatggacaagaccatgcatcacgatcccatgtatttactgttggaaaggcgaggataaagctgtcccgaggatggatcacaaaggctagagaaatatattcaacctccatgcagctctgtggagtgagaggcaatgctaacgttcctgcaaaggcattgctctggcaacttagaaagggtctaactttcttactaactttcgagtcagagcaagaacgtaatgcagccatagtactcgcacgaacatatgcatatgattgtaatgtcactctagttggtccagatgattgaggtagtgaaaggagtagttttgtgatatcgactgttatgtatttcagtgtttgtgtgtggttgaaagaagaagaagaagaagaaccccaagtgttgctgcatagttttagacagaaaacacattttgtgtttttttttggcatgatcactggtttgaggtggttggcattttttctgatttgattttatttgtttgtttgtttgatttgtttggaccattattggctaattaggattattttttggattgtgaaaaattgtaatcaagatttgttggtatctaataacagaacagtgtttcnnnnnnnnnnnnnnnnnnnnnnnnnnnnnnnnnnnnnnnnnnnnnnnnnnnnnnnnnnnnnnnnnnnnnnnnnnnnnnnnnnnnnnnnnnnnnnnnnnnnnnnnnnnnnnnnnnnn

SEQ ID NO: 129355 - DNA, 625 bp, Arabidopsis thaliana
  unsure (1)..(625): unsure at all n locations
cnccnttttaccccgtnggccntccccccccggaccggnttgccccattggnttgggggggtnccaacccccnttaaggcccatccggggncctccaaggtttccaangtccttgttgcccccctttttaatccccncccncggaggcaaccccaagttggcnncattttgaattgccggaaacctgccnggatggcntnctaatggtacccaattntgggngccaaggacccagtgaaantgtgccngtttggtanctttggtccaccatctggttgggggttccaacggagccacgactggattcgaagtttaaccatttaaaacctgggatctatctaccctatcaatacatattgagttatgagcaatatagaggaagcatcaaatctttttcactctctcttcgatcaagaatccggcagtgatgagtttgaaaccattttcggaagtaaatgaaatatgtaattcgtcgaaatttctgactttggtctctttgtccgtttgtatagagctatctctcttctttggtttttgttttgttctcttaagaaaaatttgattcaccagtttgtaagagtgattcagaaatcaaagctagactttttatgcatgaaaaaaaaaa

SEQ ID NO: 129356 - DNA, 563 bp, Arabidopsis thaliana
  unsure (1)..(563): unsure at all n locations
accagccccnngatcgggccncngcccccnagnccnatgggnccagccgggaaanccccgttgaaccttgccccacngggggggtagtcccttccttncccnaaaannccggttnaacccngccncaacttaccaaaattnctcccttttttttaaccaccngaccggtcccttanataangtttaattttnggtggctattgtttggataattgcttgtactgttgggggtccaaccgagcacgactgattccgaagtttaacaattaaaacttgggatctatctcccctatccatacatagtgagttatgagccatatagaggaagcctcaaatctttttccctctctcttcgatcaagaatccggcagtgatgagtttgaaacccttttcggaagtaaatgaaatatgtaattcgtcgaaatttctgactttggtctctttgtccgtttgtatagagccatctctcttccttgggttttggtttggtctcttaagaaaaatttgattccccagtttgtaagagtgattcagaaatccaagctagactttttatgcatccc

SEQ ID NO: 129357 - DNA, 693 bp, Arabidopsis thaliana
  unsure (1)..(693): unsure at all n locations
atgannnnnnnnnnnnnnnnnnnnnggtatgtggaggatgtcatcccctcttaatgtacattcgtggagctacaagtgttcaccgcgcgtccggtcacactgttaatctcgccctcgaagcaaaccaagtagcgcatgtgaattgcggaaactgcatgatgctactaatgtatcaatatggagcaagatcagtgaaatgtgccgtttgtaactttgtcacatctgttgggggttcaacgagcacgactgattcgaagtttaacaattaaaacttggatctatctacctatcaatacatagtgagttatgagcaatatagaggaagcatcaaatctttttcactctctcttcgatcaagaatccggcagtgatgagtttgaaaccattttcggaagtaaatgaaatatgtaattcgtcgaaatttctgactttggtctctttgtccgtttgtatagagctatctctcttctttggtttttggtttgttctcttaagaaaaatttgattcaccagtttgtaagagtgattcagaaatcaaagctagactttttttgcctggnnnnnnnnnnnnnnnnnnnnnnnnnnnnnnnnnnnnnnnnnnnnnnnnnnnnnnnnnnnnnnnnnnnnnnnnnnnnnnnnnnnnnnnnnnnnnnnnnnnnnnnnnnnnnnnnnnnnnnnnnnnnnnnnnnnnnn

SEQ ID NO: 129358 - DNA, 435 bp, Arabidopsis thaliana
  unsure (1)..(435): unsure at all n locations
tcccccctcaggncccgtccggatccccggtcggcccacgcgtccgagaaggccatggtgaacgaaatggtgtcgaagatgacaagtgtgtgctgggacaaatgcatcacaagcgcaccgggaagtaagttcagctcaagcgagagttcttgcctcactcattgcgctcaacgctacatggatatgagtatgatcatcatgaaacgctttaattcgcagtaagattgattggagatatcatacttgttgggattttaatttatcctttttttgtttctcttggcaagtgttgaaatcccttttattactctagtgatcttgcaagagtattctcggataagtgttttaggtgtttctttatggttatgtgattgagattgttattgatggctagtaatatattaagagacaagtgttgaataatgtggttttaat

SEQ ID NO: 129359 - DNA, 429 bp, Arabidopsis thaliana
acgcccacgcgtccggctgagaacaattttcttctccttcttcttcttcaagcagagacgctctcagctcaccagacatggatcctagcatggcaaacaacccggaattgcttcaattcctcgcccaagagaaagaaagagcaatggtgaacgaaatggtgtcgaagatgacaagtgtgtgctgggacaaatgcatcacaagcgcaccgggaagtaagttcagctcaagcgagagttcttgcctcactcattgtgctcaacgctacatggatatgagtatgatcatcatgaaacgctttaattcgcagtaaaattgattggaggatatcatacttgttggaattttaatttatcctttttttgtttctcttggcaagtgttgaaatcccttttattactctagtgatcttgcaagagtattctcggata

SEQ ID NO: 129360 - DNA, 428 bp, Arabidopsis thaliana
attttcacaaacaacctctcgtcttctaggttaatccaatttcgtcgattcatgaagttcacaattctcccatcggaaaattcttcgtaatcgacgacgaagagatcatgagtaccgtcggaggtatagagcagttgatacctgattccgtttcaacgtcgttcatcgaaacggtgaacggttcgcaccagttcacgattcaaggttactctctagccaaaggcatgagccctgggaagtttatacagagcgatatcttctccgttggtggatacgattgggcgatttacttctatcctgatgggaagaacccggaggaccagtcctcgtatatctctttgttcatcgctttagcgagtgattctaatgatattagggctctgtttgagcttacgcttatggatcagagtgggaaagggaaacataag

SEQ ID NO: 129361 - DNA, 523 bp, Arabidopsis thaliana
  unsure (1)..(523): unsure at all n locations
nnnnnnnnnnnnnnnnnnnnnnnnnnnnnnnnnnnnnnnnnnnnnnnnnnnnnnnnnnnnnnnnnnnnnnnnnnnnnnnnnnnccacgcgtccgcccacgcgtccgaagctgatgatgttattggaacactggctatgcgaagcattagtgccggtttcaaagtccgagttgtctctccagacaaagacttctttcagattctttctccctcgttgcgtcttcttcgactaacaccacgcggatcagagatggcttcctttggaatggtagattttgctaaaaagtttggaaatttgggaccagcacaatttgttgatatcatcgcccttgctggagacaagtctgataatattccaggagttgatggtattgggaatgtgcacgcagtggaactgatatctagatttggcacgttggagaatctgttgcagtctgtggatgagatcaaagaaggaaaaataaaggagtctctaatagctagtgcggatcaagccattcttagcaagaaattggcactgttac

SEQ ID NO: 129362 - DNA, 799 bp, Arabidopsis thaliana
atacgactcattatagggaagctgtacgctgcagtaccggtccgaattcctgtcgaccacgcgtccgtcacagaagataacacaagagcccacacatcgtacgccacgtggcagattcacctctttataatcctctctccctcacggtttctacgacattttcacaaagccacaccaactcactcacaaaatctgtagaatcatctttcaacaatggcttccactgctctctccagcgcaatcgtaagcacctctttcctccgccgtcaacagacaccaatcagcctcagatccctcccgtttgccaacacacaatctctcttcggcctcaaatcttccaccgctcgcggcggccgcgtcacggccatggctacctacaaggtcaagttcatcacacctgagggagaacaagaggtcgaatgcgaagaagatgtctacgtcctcgacgctgctgaggaagccggactcgacttgccctactcatgccgtgccggttcttgctcaagttgcgccgggaaagtcgtctctggttctattgaccagtcggaccagagcttcttagacgatgaacagatgagtgagggctatgtcttgacctgtgtggcttatccgacttctgatgtcgtcatcgaaacccacaaagaagaagccattatggaaaattgtaaagctttttgatgaatttcatcaaaagagaaattacctgatggttaagtcatctctcttgttacttccctaatgttgccctaatttggctcatcctttttataagatcaatcaataataacacatttcaatg

SEQ ID NO: 129363 - DNA, 485 bp, Arabidopsis thaliana
ctgatctggatccaactagcgggtcgggtcatgtcgagaaactcggtaaccttgacacctacgtctgtggttccactcattcaaagcttgctgttcttcttgtccctcatgttttcggatatgaaactccaaacctgaggaaacttgctgacaaggttgcagaagctggattctacgcggtggttcctgatttcttccatggagatccttataatcccgagaaccaggatcgtccgtttcctatttggatgaaagatcatgaactagagaaagggtttgaggagtcaaagccaatagtggaggccttgaagaacaaaggcataactagtataggagcagcagggttctgttggggtgcaaaagttgcggtggaactagctaaggaaaagcttgttgacgctactgttttgttacatcctgctcgcgttacggtggatgatatcaaggaggtcaacattccaattgctgtattaggagctgaaatc

SEQ ID NO: 129364 - DNA, 798 bp, Arabidopsis thaliana
tggatctcctttctcgtcggcggctaatcaaattcttccagagggttttgacagaaatttctcgagatgggtcaagctcaaagtgacgagaactcaattccgacgacgacgacaacgaacactcctcctccttctgcgaattcacctcgggattctgaagatacttcgtcgccatcgatggattctcttcttgcagaagctgcagcatatggtgaagatgataatgagaatgagtctcttgaagccaaagcacagagagctctcgattgtccttgtatagcagatttgcgtaatggctcttgcgggtctcagttctccgaggcattcctttgctttctcaaaagcactgctgaagaaaagggatcagactgcgtgaatccatttgtagcattgcaaagctgtatcaatgccaatccggatgcattctctaaatcagttacaggggacgaaaaagaaaccgagaaaaaggaagagcagcctcctgtgcaagaccatagaatcatccctcctctctgggccaaagacccgcctcgcagtggcaattccaagctttagaatatcaacaacaatggagtcagcatcagaagctagtctctcctcttttgattcttttctctagacagcacttttaagaatgtaaaagaagagtagaagaccatgatcagtggtcgtgtagatcaacattgttctttcttttttaatactaaaaagctgagatttttggttaaaaaaacaaaaaaagggcggccgctctagaggatccaagcttacgtacgcgtgcatgcgacgtcaaagtct

SEQ ID NO: 129365 - DNA, 471 bp, Arabidopsis thaliana
acgcaacaatcaaatctcgaaacacctctcaaaacccaacacgaccaccgaagaatcaccacttcaaaccctgaatcatctccgcctcgacctttcccggaatccagccggaaacatgattctcctcctccccgagcctccaccaacgagccaatgaagaaaatcggaactccggagcgtttaagagtcccaatagctttcaagtacccagagaggtacaggagcccaactgatgcaatgatgtctccagttactaaaggtcttctcgcaaggaccagaaagtcttccggttctcttattccacccagctttaaccataccaagattcaagaactactcaaaccggaatcgggttattctactgtccagtgttgaaaagggtagacattatttaatttgatgcattgtatctaatgttatttttcggctattatttatagtatattgtttcttttttttataattttttta

SEQ ID NO: 129366 - DNA, 758 bp, Arabidopsis thaliana
  unsure (1)..(758): unsure at all n locations
nnnnnnnnnnnnnnnnnnnnnnnnnnnnnnnnnnnnnnnnnnnnnnnnnnnnnnnnnnnnnnnnnnnnnnnnnnnnnnnnnnccacgcgtccgctctctctatcgtcttttgttttgatttaaatgcctcaagtcgttgcttcagcatgtaccggtgggtctgaccggaaaatctcatgtgaaactctggccgacgataacgaagactcacctcataactcgaagatccgacccgtatccatctccgccgtcgattttccaccggaatcttactctttatcaaaagaagctcagctcgaatggctaaacgacaacgccttcttcgaacgcaaagaatcacaaaaaggaaactcttctgctccaatttcgaatcccaatacaaaccctaattcgagctctcatcgaatctcactcaaatcaaaaagcgtcgatcatcagattaccgaaaccgcagaagacgtgtttcaacgaagcgaagaaacggagaaattgcagaatcgcgaggactttgatgattccgaaacggatcgggtcgagattgaaatcggatcctacgttatcggagccatggtctcccaaggtttcttgtatcggaagggttagatctaaacgtgatcgtagccgacgaatgcagagaacaaatatccggtcgaaccaattcgttttaagataaacccggtccgggtaagaaagcctggtttttcgctagcttcagagctatttcagaaccggtggcggttgcaagacttactgcgagt

SEQ ID NO: 129367 - DNA, 564 bp, Arabidopsis thaliana
  unsure (1)..(564): unsure at all n locations
accgaccaatccgccatgaatatatctcagattattttcttcgcgtcccttcttctacggcttcacttatcaacggcggaacatcaaaattcaaacgctggtgatggagacaccatcatattcaccactctaggacgatcgcactacgaatttgacatattcgccctctccacgactcaaccgccgtcagtttccggagagctccgaatcaccgatggggaatcggtaaatttcaacggctatttcccgtctccttctccggctctattatctctccttcccgacgaaaccctaattcaaatggaagattcgtctcctctgcatctcatatacgtcaccgagagaaacggtacttctagcttgtactacgatctagtttacggccggtaatttctgtattttaaaacggaaacgnagatccggtnttagaagcancggnttcgggtncaaagttccggttgttatnccgnctttggtcaaacttagttggattnncgggnaaaatcttttaaaaggnaaggcntaggtttnagtggngggtttntttnttngggggaacccnct

SEQ ID NO: 129368 - DNA, 431 bp, Arabidopsis thaliana
  unsure (1)..(431): unsure at all n locations
gagacggcgacaatggcgaatttgatgatgagattaccaattagcttgagaagcttctctgtttcagcttcttcatccaacggttcgccgccggtgatcggaggatctagcggcggtgtaggaccgatgattgtggaattaccgttggagaagatacgaagaccgttgatgcgaaccagatccaacgatcagaacaaagtgaaagagcttatggatagtatccgtcaaatcggtcttcaagttccgattgatgtgattgaagttgatggaacttactatggtacttttcttgttctttgtgatatctgttctttgaaagcttataaatgataaattcttccattggtttagggttctcgggatgtcacagatacgaggcgcatcagaagctagggcttccaactatacgtngcaaaatccgtaaaggaaca

SEQ ID NO: 129369 - DNA, 753 bp, Arabidopsis thaliana
cttcttcttccttctctctttcccagaaagtatcatcgaaagataacccttttttcacttttcttctcctctgacttttttcttctcgaatctttagttttcgtttatagattctgttttcttcgtatatataataaaggtttgattttttcgatctgagagcaagagaaaaccctttccatggcctcagcggcgatattctcatcgttacgacggaggagatcgccgtctttggaagcattcttagcccccgttgacctttccggcgtcgcacttgttcaaaccctagcttcaatctcttcggaggttgtttcttgtttcacctctgttcgattctcgtttcaacgcaagaacgctcgttctttgattcgtaagatcgagatctttgtcgtattattcgaatttctcgtagattcaaattggggctcaacaacaacaagaacaagagcaagaagaagaagcaaaagctctgtttctgaatcaacagctttgctttgtctcaaagagctttatcttcttctctatcgttccaagatccttgttgattactgcgctcaatctagtaagttatggctcttgttacaaaacccttcgatttctgggtatttccatgatttgaatcaagaaatttcgactcttttggatgttttacctgtcaatgatcttggtctaagcgatgacattagagagcaaatcgagttgttgcagagacagtcaaggaaagcgagattgtatatcgataagaacgatgag

SEQ ID NO: 129370 - DNA, 867 bp, Arabidopsis thaliana
  unsure (1)..(867): unsure at all n locations
nnnnnnnnnnnnnnnnnnnnnnnnnnnnnnnnnnnnnnnnnnnnnnnnnnnnnnnnnnnnnnnnnnnnnnnnnnncacacacgccacgcgtccgtttggagctaatcggaaaacaaaaaagcaacggccaaagcaatgaggaaagatgatctctgcatcactgttcctaccttcttccgatgtcctatatctctcgacgttatgaaatctccggtgagtctttgcaccggcgttacctacgatcgagctagtatccaacggtggcttgacggcgggaataacacttgtccggcgacgatgcagattcttcagaataaagatttcataccgaatcggactcttcaacgtcttatcgagatttggtctgattctgttcgtcgtcgaacttgtgttgaatcggcggaattagctgctccgacgagagacgagatcgccgatgcgatcgatagagtgaagatcgagatagaagaaagagatgatcgcgaggttttgtcgaagattgttcgattcgggagagaatctgatgataacagaggatttctcgccggaaaagatgatttcgtgaaacttctcgtggatctgattaatcaggtggatttcgaaaccacctccgncgcgatatctctggttgttcaagatgcggtgaagattctgagtacgattcgaagcanagtctcagatcggagacggttttcgaatctgattttaacccacggtcgagatcgggtatcggtgatcgtctacttgtttaaaccgggaatgtcgaattgaaattgattgcgccggttacttgagttatcgccgtcacgctgaatcaagctgttaatcccgagagagaggattatcacggagctatgaatcgattag

SEQ ID NO: 129371 - DNA, 392 bp, Arabidopsis thaliana
gaaaaaacccgatccttcgatatatattacagctgccgagaagctaggtgtttcagtgaaagactgtttggtcgtagaggacagtgtgattggcctgcaggctgctacaaaagcagggatgtcatgtgtgatcacgtacacttcttcaacctctgatcacaatttcaatgatgcgattgccgtataccctgatctcagcaatgtgaaattgaaggacttggaaactctgcttcaaacaatagtcactccagcttaagacatttgtctcctattcatttctgactgttcttctgcaactgtacatctgctgtttatgtttgataaaatctcttcattaataagaaaagaagattcaaatgtataaaaaaacaaaaaaaaagggcggccgctct

SEQ ID NO: 129372 - DNA, 436 bp, Arabidopsis thaliana
catttccgagtccttcttcttcttcttcttctcgatctctgtatctctcgatcatttccttctaaaggaagcgtctttgatcttaatcgtcgtgtcgttcgtttctaactttattttgaaagatggaaacagaaacggaacatgatagaactgtctctgtcgatgacaacgacagccttgtacctgagccaagctcaacgaaagaaagcttttttgaagatctctcgcttactgggcaagttatgaatcctcaactttcaagtgcaggcgaagttttgacaaaagttgaattggattttgcttttgtctctgagaaattggtcaatcttagtcttcttactatgcaactcggcacgagggaaaatgattttgagtcttttgtttctaagaaagaagaagatgaagaagagccttcgagtaatgttgatgatgatga

SEQ ID NO: 129373 - DNA, 633 bp, Arabidopsis thaliana
tgatcttcagctctctacgactcactatatggaagctggtccgcctgcaggtaccggtccggaattcccgggtcgccccacgcctggcggaatcaagaattgctggacatcaagaggctttgaaaagggaagggagaacctgctaatggaaacagaggattcaagtagcagcattgcaattgggaagaacattacaaatctccagagtttcagcccatcaacacctccacttactacatctagtaactgcagaatcgtcaagcgaagaaagggaattcctcaccgatctccaatgggataagaaccgagattacacacaggttttagctaatacagaggcttcttctgtctcttatctttcctcgtataccaaaagaaatggtcttttgcttgtgttagcaaaaaaagaaaggccttaagttaggttttgttgtcctactacttgggcaaatatgtgaatatgtaatgtgctttgtatatgatgcaaaaagggtagaaatggaaatataggggttttagtgggctaaaagtaagaataaaaacaaaattagttttttggttttcaaaaaaaaaacaaaaaaggaaggccgctctagaggatccaagcttacgtacgcgtgcatgcgacgtcaa

SEQ ID NO: 129374 - DNA, 767 bp, Arabidopsis thaliana
  unsure (1)..(767): unsure at all n locations
atgannnnnnnnnnnnnnnnnnnnnnnnnnnnnnnnnnnnnnnnnnnnnnnnnnnnnnnnnnnnnnnnnnnnnnnnnnnnnnccacgcgtccgcccacgcgtccgcaatcatctctttacttctctcttcacatcatctttcttgaattctttatatacacagtttaaagatgcaaatgctaagaagcttgagcacgaggacaagaagccgtcgtggaggatacgagagagtgagtgatgattcaactttcagtttactcggagcaaagctaaggagatcgacgagtgttccttactacgcaccatctataaagcttggagctggtggtgttccgaccattcttgaggagcttcctcgtcagaaatcaaagaaagtcaaaccaacaggcaaatttagtcacccaatctttagtcttttctacggaaagaaagaagaagtcgacgacgacgaagcctgagttttctaggtatcttgagtatttaaaggaaggtggtatgtgggatgccagagctaatgcgcctgttatctattacaagtagatcgatatatgaatttgttaaaaacaaataatcaagaaagagagagggtgatgaaagttttcttttatttgtttagttcaaatcttcttcaatttgtgatgatattatttgtatatatatttcaacgatccaatattggtttggtttataagcatattacaagattgggaaccaaannaaaaaaaaaaaaaaaagggcgggcgtctagaagatccagctacgtacgc

SEQ ID NO: 129375 - DNA, 606 bp, Arabidopsis thaliana
  unsure (1)..(606): unsure at all n locations
cctccacctacacagaaactagagggacaaggtggtgatggaggagattcttgggacgatggtgctttcctaaatgtaaagaaagtatatattggacaaggctcgaacggtattgtcgccgttaagtttgagtacgagaacgacgctagtgaggttgttgttggagatgaacatggaaagactacattgcttggatacgaagtgttcgagctggattatccgaatgaatacatcacatcattggagggttgccacgacaaggtcatgggagctgaaactggagttataacaatgcttaggttcaagacaaacaaacgtacctctccaccttttggacttgaagctggtgtcaacttcgtcctccagaaggaaagtcacaagatcactggggtccatggaaagtccagtactatgcttcatcagattgggggtcatgtcgttcccatcactgagtgaccatccatagccacctttaaaaatgggtgaataaccggtaatanaacccctggcaaagtaggtttgtaccttcncatgggttccctaggtgnattgggccctannaccgaacgnattcncttccggannaaaaaaaagggggcgcctntc

SEQ ID NO: 129376 - DNA, 721 bp, Arabidopsis thaliana
caggtaccggtttcgggattcccggagtcgacccacgcgtccggctaagaagcttgagcacgaggacaagaacccgtcgtggaggatccgagagagggagtgatgattcacctttcagtttactcggaccaaagctaaggagatccccgagtgttccttactacgccccatctataaagctttggagctggtggtgttccgaccattcttgaggagcttcctcgtcagaaatcaaagaaagtcaaaccaacaggcaaatttagtcacccaatctttagtcttttctacggaaagaaagaagaagtcgacgccgacgaagcctgagttttctaggtatcttgagtatttaaaggaaggtggtatgtgggatgcccgagctaatgcgcctgttatctattccaagtagatcgatatatgtatttggttaaaccaaatcatcaagaaagagagagggtgaggaaagttgtcttttatttgtccagctcacatcttcttcaatccgtcctgggaattttggaatcaatcttgctcgatcccaaaaatgacgtgtccgaaacgcttataacaagttttgtcctctcgtgtgtatgcctctgagcacattttgattgaaaatttttttggggtttccccccaaaaaaaaaaaaaaaaaaaaagggcggccgctctagaggatccaagctgacgcaagcgtgcatgcgacgtcatagctcgtctatag

SEQ ID NO: 129377 - DNA, 295 bp, Arabidopsis thaliana
gtatttaaaggaaggtggtatgtgggatgccagagctaatgcgcctgttatctattacaagtagatcgatatatgaatttgttaaaccaaataatcaagaaagagaggaagggtgatgaaagttttcttttatttgtttagttcaaatcttcttcaatttgtgatgatattatttgtatatatatttcaacgatccaatattgttatgttttataagcatattacaagtattggaaacaaaattgtatgcttttgagcacattttgagattggaaatgattttgagtttgaaagc

SEQ ID NO: 129378 - DNA, 827 bp, Arabidopsis thaliana
  unsure (1)..(827): unsure at all n locations
ctccggaaaggatgtggatatttctcacttccggaggtttttgttcctcgaagggcgcaagcgttcaagggggggcaattccgtaagatgtttcaggcagcctaattttgtttaagaaaaaaatttttcgggtttccccgaaagagttaactaggaattttggcatagaactgtttgagggttccgcaccattaagatatggggctccctgtggttataacagggttccgtaggggtttacccctcgcaggttttatgcccgtgtctcaagggctaagccgcccggtttagcctttgggtccaacccagaacttatgttttatacttgggcattctttttttgttgaaaaaagagtgcaacatacgaacattaggtggagatgcccggatgttaggcccggaggcaaggtttcaaaagggatccctgtctttgatggaccaatttcagcaagtggctaaagccatcggttggactgctggtgttcatgataccggggaaggaccccacgcaagcgttaggattctcatctgcgattactggatatgaggaaaagaaaaataaaagatccgcaatcgaatgtgatgatcagtctgctcaaagagacagttcttcttagtgataaattgataattgtattattgtttatttgtttgttgatttgattgttgaagaatgaagagtgttaatacacttgagctactttaacacatgagtaacaaaaagattcattttctcagaaaaaaaaaaaaaaaagnnnnnnnnnnnnnnnnnnnnnnnnnnnnnnnnnnnnnnnnnnnnnnnnnnnnnnnnnnnnnnnnnnntccta

SEQ ID NO: 129379 - DNA, 704 bp, Arabidopsis thaliana
atgatactccagctctactacgactcactatagggaaagctcggtacgcctgcaggtaccggtccggaattccgggtcgcccacgcgtccggataatggctatggggctaatgtctccacatggcctgcacgtcttcatgatccgccagagaggctacaaagcattcaaatggatgcgtacatatcccgaaaggaaattatgaaggcagagtctagattttggttagaagtagtagagagttatgtgcgggttttccgctggaaggagttcaaactgaggaatgttctggacatgagagctggttttggagggtttgcagcagcattaaacgatctggggcttgactgttgggttatgaacattgttcccgttagcggattcaacaccttgccagttatttatgaccgtggactacaaggggctatgcacgactggtgtgagccatttgacacctacccaagaacctatgatctgatacatgctgcatttctcttctctgttgagaaaaagaagtgcaacataacacacattatgctgtagatggaccggatgttgagaccaggaggacatgtctacataagggattcactgtctttgatggaccaactcagcaagtggctaaagccatcggttggactgctggtgttcatgataccggggaaggaccccacgcacgcgttaggattctcatctgcgataaacg

SEQ ID NO: 129380 - DNA, 614 bp, Arabidopsis thaliana
  unsure (1)..(614): unsure at all n locations
gagcggagttggagactnanctagatccgccggcgaaaaagcagagccgtcacattcatcgtcggaaatcaagaaagggtaattntctgtaggatagagagacatggaagccaagtttttccggttcttgaagattnttggagttggatacaaagctagagctgaggaagcagggcgtttntnatacctcaaattgggttacagtcacgaatcgaacttgcggttcctccagcggttcgagtcttttgtttcaagaacaatgtggtttgctgcactggaatcgacaagcaaagagtgcatcagtttgctgcaacggtaaggagttgcaaaccccctgaaccttataagggcaaaggcataatgtacactgatgaagtcgtcaagaagaaacaaggaaagaagtccaaatgatctctctttgtatgcttcttcttccttcttactctgcagagacaactttcatctatctgtggtagattatggttggatttttatcaataagttttatttggttgtatgagacatcattttgttgttaagtctctttcaatgaaacaaaatgaggagagttcgtcttgggaaaaaaaaaaaattttttaaaaaaaaaataaaaa

SEQ ID NO: 129381 - DNA, 511 bp, Arabidopsis thaliana
cggaaacccgggcgacgacgcgtccgacaacgtcactttcttcccggataattgaaatcggtgatcggaatccctagaaatgtcggataatcgtgcactccgacgagctcatgttctcgccaatcacatactccaatcaaatcctccatcttcgaacccgtccctgtcgcgcgagttatgtttgcagtactctccaccggagctcaacgagagctatggattcgatgtcaaggagatgagaaaattacttgacggacacaacgtggtggatcgggactggatttatggactcatgatgcagagcaatctgtttaatcggaaggagagaggcggtaagattttcgtgtcgccggattacaatcagacgattgagcagcaccgtgagatcacaatgaaacggatctggtacttgcttgagaatggggttttcaaaggatggttgacggagacaggtcctgaggccgagctcaggaaattagctctgcttgaggtttgcgggatttatgatcac

SEQ ID NO: 129382 - DNA, 747 bp, Arabidopsis thaliana
  unsure (1)..(747): unsure at all n locations
ttttccttgaaacggttccctttttggggccattggttccaaagggtttgcctcattcgtggctaccataaagaagttcttttcaaacaaagcaaaccactacattggtgggtcccgttactcattgaaatcgcaaagaacatggggatccatcctttgctcttgatggttccaggagccattggggctcagttcgctttcttgcttcccacgggaacaccctctaacgtcgttgggttcacgacagggcatatagagatcaaagacatgatcaagacaggcttgcctctcaagatcgctggaaccatctttctctccatcttgatgcccactcttggggcttacgtttttgcatcaatgggaggagtttagttctacaagccaagcacaagaccatgtacacaattgatttattgtactatattgtttactaccgtaatacatatgtagatatatagtcaatggaatgggaaatttagatgaggtcaaaattcacaaaatcggcccatttttgtaacccgcccgattatagtttccggtaccattgctttcttttgtgcttccaaacgtaccggtaactttggtccctttttttttttgtttggtgtgtatatgaaaaagggttaatacagatttgtgtgttcttctttnnnnnnnnnnnnnnnnnnnnnnnnnnnnnnnnnnnnnnnnnnnnnnnnnnnnnnnnnnnnnnnnnnnnnnnnnnnnnnnnnnnnnnnnnnnnnnnnn

SEQ ID NO: 129383 - DNA, 413 bp, Arabidopsis thaliana
gttgaattgagcggcggaggaaacaacgtcgtgaacaaagtgttctacgcgacgtcgtatcatccgattcaagccggaagtatcgacggaactgatgttgctccacatgataacggcgtccgtcgagctcttctctgttataacgctggcttatatgatccttctggtgattcgaaggctgttggagatccttactgtactctcttcgtgggtcgtctctctcatcacactacggaggatacacttcgagaggtgatgagtaagtatggcaggattaagaacttgcgcttggtaagacacattgtgacgggagcttcacgaggatatggttttgtggagtatgagactgaaaaggagatgcttcgtgcttatgaggatgctcatcattcactaatagatgggcgagagattat

SEQ ID NO: 129384 - DNA, 817 bp, Arabidopsis thaliana
cccggccccccgtttggacggccatggagagcccctggcaggaattcccggccgcccacccgtccgcatatcttatatataggtgaacaatgtgggaacgttaatgctttaagccgaccacagagtatacagcagaagaattctcgtttcttatggctacaaatctcgactcagctttccatatttcacagcttgcgcaccctttgttgaaagcctctggctcagggagcattgtgctcatgtcctctattgccggagtcgtgcatgtcggtgtggatccatctatggagcaacaaaaggagccatgaatcagttggctagaaacttaccttgcgaatgggcaagcgacaacataaggactaacgctatttgtccatggctaatcacaactcctttgattagtgatcttctcagtgttgaggagatgaaaaaagaagcagaggaaaggacacccatggggcgtgtgggagaggcaaatgaagtctcaccgcttgtggcatttctttgtcttcctgcagcttcttatattactggtcaagtcatttgtgtggatggaggtctcactgttaatggcttctcctatcagccacatgcttgagctacgtctgtgttgtgtgtattggccaatgaaaacagtcaaccaaacaataacatcggaaaatgaatgatgtgaatatgtaggttaagccttaaaactaaattcattttggtatgttgacatattggtaaacgtcctgaacaagaaacctttaccaaaaaaaaaaaaaggggcggccgctctagaggatccaagcttacgtacgcgtgcatgcgaccg

SEQ ID NO: 129385 - DNA, 916 bp, Arabidopsis thaliana
  unsure (1)..(916): unsure at all n locations
ccnnnnnnnnnnnnnnnnnnnnnnnnnnnnnnnnnnnnnnnnnnnnnnnnnnnnnnnnnnnnnnggtcgtaggccacgcgtcagcaaggaatggcaaaggaagggggcttgggagagaactcaagatggagtcttggaggcatgaccgctcttgtcactggtggctctaaaggcatcggggaagctgtggtggaggaactagccatgttgggagcaaaagtccacacgtgtgccagagacgaaactcagcttcaagaacgcttacgtgaatggcaagcaaaagggtttcaggtcaccacttctgtctgcgacgtctcttctcgtgaccaacgagtgaaactcatggaaactgtttcctctctctaccaaggaaaactcaacatcctcgtcaacaatgtgggaacgtcaatattcaagccgaccacagagtatacagcagaagatttctcttttgtaatggctacaaatctcgagtcagctttccatctctcacagcttgcccaccctttgttgaaagcctctggctcagggagcattgtgctcatgtcctctattgccggagtcgtgcatgtcggtgtggatccatctatggagcaacaaaaggagccatgaatcagttggctagaaacttagcttgcgaatgggcaagcgacaacataaggactaacgctatttgtccatggttaaatcacaactccttttgattagtgatcttctcaagtgttgagggnggtgaaaaaaggagcagggggaagggcanccattggggccgttttggggagaggcaaaattgaaggcttcaccccttctgggatttcctttgnctttcctgaaggttcttatattccctgggcaaggcatttttttttttgggggcgccctccattaaggggtctcccttttaaccacatncttt

SEQ ID NO: 129386 - DNA, 537 bp, Arabidopsis thaliana
  unsure (1)..(537): unsure at all n locations
ttggtgtcgcctgcagagagatatgcagttgttcctgaagaaacgggcctaacggatggttcaagcaaaggtaatggaggtgatatcagtgttcccccaactgatgtcaagcgtgtacgaatttgagcctgagtcaattccgttttttttttacttccggttcttccgttggattcgaaggtttttcagtgatctcttttgggttgaggtttgtactaagagtacgtctgtctagtttgggattgtactttttgttgttgttgttagtttgtaacttgtgatgcttccctccccctagctctcttattacatgggcgttgtaaactgtgtgtactactactactagtctctagggtatgtactttttttttcctcaccataataataccttctggttctatatctttcatttcttaaaaagttttctgttttttccttcaaaaaaaaaaaaaaaaagnnnnnnnnnnnnnnnnnnnnnnnnnnnnnnnnnnnnnnnnnnnnnnnnnnnnnnnnnnnnnnnnnnnnnnnnntagaatc

SEQ ID NO: 129387 - DNA, 1025 bp, Arabidopsis thaliana
  unsure (1)..(1025): unsure at all n locations
nnnnnnnnnnnnnnnnnnnnnnnnnnnnnnnnnnnnnnnnnnnnnnnnnnnnnnnnnnnnnnnnnnnnnnnnnnnnccacgcgtccggatcaaattctctctccaatggacgaaatggagagatgaacatagggaaagatgaaaggtttcttgtgaaaaggtgcttatcagatggagattttctccatgaaagttgcactccgctgtcagccatgagtagcaatcatgaaagcatgccacaaaaaggtttctccgcaccattacagcatgtgagccatattctttcagagtcatcgtctgatataccagtatctaatgatgtagcattatcaaggtgtactccttcaatgcccaggaaacagctcttcggagatgtgcaaaaggttcatcgttttggtagcgaccaagtttactttggcggggaggaagacatgtctagtgtctccaattttgttgatattgagtggctttcatcagaaaacccatgcgagaatgctttatttgacaggtcgtcggagcttacaagaaatttgacagcggagacgtcttcaacagagaatagcgtcaacggagtaggacaatcggcaccaactataagtgaaagtgggtcaagcagcagtaagggaaaggaaccgatgggaacaaagattcgggaggactgtccagatagcttcaaagaatggggagcataccgtgaagctctctgccactgagtcccaaaatcttaggaacacgggatggtacaaaagagtagtactttattgctgaatagctgaaaccttttgtgtgcataaaattcatcattcggttgaaaccttattttccccctatttgttttggaataagtgtaatgtttatataaagcttgtaagaatcatgttaaaattattcgtaggtttctttgtctctctgccctcgtttgaatcacaaacacctgcggttataaaaaaaaaaaaaaaagggcggccgctctagaggatccaagcttacgtacgcgtgcgtgcgacgtcataacttttgtatag

SEQ ID NO: 129388 - DNA, 795 bp, Arabidopsis thaliana
  unsure (1)..(795): unsure at all n locations
nnnnnnnnnnnnnnnnnnnnnncgactcactttatggaagctggcacgcctgcaggtccccggtccggatttcccgggtcgacccacgcgtccgcaaatctccagctttctgcatagatccatgaccatgagagtctgtttcttagaacgaaaatgaaaaaaatatcttcacattattcggtagtcatagcgatactcgttgtggtgacgatgacctcgatgtgtcaagctgtgggtagcaacgtgtaccctttgattctggttccaggaaacggaggtaaccagctagaggtacggctggacagagaatacaagccaagtagtgtctggtgtagcagctggttatatccgattcataagaagagtggtggatggtttaggctatggttcgatgcagcagtgttattgtctcccttcaccaggtgcttcagcgatcgaatgatgttgtactatgaccctgatttggatgattaccaaaatgctcctggtgtccaaacccgggttcctcatttcggttcgaccaaatcacttctatacctcgaccctcgtctccgagatgccacatcttacatggaacatttggtgaaagctctagagnaaaaatgcggttatgttaacgaccaaaccatcctaggagctccatatgatntcaggtacgggctggctgcttcgggccacccgtcccgtgtagcctcacagttcctacaagacctcaaacaattggtgggaaaaactagcagcgagaacgaaggatagccagtgatactcctctcccatagcctaggaggacttttc

SEQ ID NO: 129389 - DNA, 1120 bp, Arabidopsis thaliana
  unsure (1)..(1120): unsure at all n locations
nnnnnnnnnnnnnnnnnnnnnnnnnnnnnnnnnnnnnnnnnnnnnnnnnnnnnnnnnnnnnnnnnnnnnnnnnnccacgcgtccggtttcaataaaacaaagttttgttcttgtcttcttcacaagagaagagatatgtctctcttactctgtttttcttctctctctcaataatccaacatggtatcagagccgatggttgtccttggttgtctctacaaaaataagatgtcttctgctgcgaaaagaaaaagagagatggagacaacaaatctatggtgagatgaagaggaagaagaagagggaagaagaagaaataagaggtggtaacaagagaaagtaccatcagttttcacaaacacattcacatgaagtaccttcaagaggaaggctccaaaagcgatgaagaagataggaaatcttctctagaggcaatggagaaaacgaatgtggatttggagttgtggaaggagagttctgaaaatttgttcaacaacgtcttggtgaagcgcaagacgggaaagccgctgttgtaacaaactgagcaaggcttattatcaaaacgttgtgttgagttgtgaagatgactacaacacgaaaacgtggagaaaagtttgcttcaaaaggaagaaacaaacggggcgacaaaagtcaaaagaaggccaagaaatagtgtgacttttgtacgtgtgacgatcacattgaggtgattgttggagatagcaacacagagatgttagcttgcctacgagtgtgaagctgcttacctaagagagaaggagcagagttcattcggttgcaaagataccgacgagacgtgaagagatttcacgcacagacgcaaaagacgtggagtgatcaaagagggacaccataagaggatgcttacctcggagaaaaatggagcacaagatgatgcttacctcggagaaaaatggagcataagtcggttgaagagtaaaccgaagacgacgtgaagaagattcacgcacaagacgtcatggaaacgttatggtgataaaaaaaaaaacaaaaaaaagnnnnnnnnnnnnnnnnnnnnnnnnnnnnnnnnnnnnnnnnnnnnnnnnnnnnnnnnnnnnnnnnnnnnnnnnntgaatcg

SEQ ID NO: 129390 - DNA, 569 bp, Arabidopsis thaliana
  unsure (1)..(569): unsure at all n locations
nnnnnnnnnnnnnnnnnnnnnnnnnnnnnnnnnnnnnnnnnnnnnnnnnnnnnnnnnnnnnnnnnnnnnnnnnnnccacgcgtccgcccacgcgtccgggtttagggtgacaaacgcgggatgttgtggagttgggaggaacaatggacagataacttgtcttccgggtcaagctccatgtcttaacagggacgagtatgtgttctgggacgcgtttcatccaggagaagctgcgaatgttgtcatcggtagtcgatcttttcagagagaatctgcttctgatgctcatccttatgatatccagcagcttgctcggctctagttcatgaaatttcctccaagcaaacacagagtgaaaaagagagggagacagatttaatctttttcttatttaagtgtttgatgattgtttcttcttgctgcagaagaattgtttgttttgttgagtttatgtatcatggttctatataatgacatgaaatttctgcttaaaaaaaaaaaaataaaaaaaaaaaaaaaaaanannnnnnanaaaaaggggcggccgctctaaaggatccaagctggcg

SEQ ID NO: 129391 - DNA, 537 bp, Arabidopsis thaliana
ggggtgacttgtgacgaaaggatcaattccgctaacagaatcttcaacagtaagcttgtgtctctggttgatcacttcaaccaaaacacaccaggggccaaagtcctacttacattaaatgcttagggtaccttccaagaacaatgggtagcctaatccttcccgctatgggtttagggtgacaaaccgcgggatgttgtggagttgggaggaacaatggacagataacttgtcttccgggtcaagctccatgtcttaacagggacgagtatgtgttctgggacgcgtttcatccaggagaagctgcgaatgttgtcatcggtagtcgatcttttcagagagaatctgcttctgatgctcatccttatgatatccagcagcttgctcggctctagttcatgaaatttcctccaagcaaacacagagtgaaaaagagagggagacagatttaatctttttcttatttaagtgtttgatgattgtttctttttgctgcagaagaattgtttgttttgttgagtttatgtatcatggttc

SEQ ID NO: 129392 - DNA, 441 bp, Arabidopsis thaliana
gtttagaagagaaacatcaaacatctttggtttgcttccctcgtacccgttcttcatacaagcacgcctttaattatggattgtcatagaaagacgttcttgttgaagtttttgtgcgtggcatttctgttaaactacagcaatgttggctttgtagacgcagcaacaaacattggcttgaactacggcctccttggagacaacctcccgcctccatctgaagttatcaacctctacaagtccttaagtgttaccaatattcggatcttcgacacaactacggatgtccttaacgcctttcgagggaatcgcaatatcggagttatggtagacgtgaagaaccaagacttagaggctctttcggtcagcgaagaagctgttaacacctggttcgtgaccaacattgagccttacttagctgatgtcaacatcacgttcatt

SEQ ID NO: 129393 - DNA, 557 bp, Arabidopsis thaliana
agggaaagctcgtacgcctgcaggtaccggtccggaattcccgggtcggccggtggttgactcgaaagctatgtctcagaccgttgttctcagagtggccatgacatgtgagggatgtgttggagctgtgaaaagagttcttgggaaaatggaaggcgtggagtcatttgacgttgatataaaggagcagaaagtgacggtgaaaggcaacgtgcagccagacgcagttttacagaccgtgacgaaaaccggaaagaaaacggctttttgggaagctgaaggtgaaactgctaaggcttaaggagaagcagatcattttatgtgattctctgttttaataaaatctatgtgaaatcttttagttttctccttctgtgcttgtgacttgtggctgagtgtattggaactatagatgatacaacacacttttgagtgaataaatatgcactggggcattatctggtctgaaaaaaaaataaaaaaaaaaaaaagggcggccgctctagaggatccaagcttacgtacgcgtgcgttcgacgtcatagctcttctatagt

SEQ ID NO: 129394 - DNA, 431 bp, Arabidopsis thaliana
aaacactgcaagtctctctctctttcaagccttgtcggtggttgaatcgaaagcgatgtctcagaccgttgttgggcagagtggccatgtcatgtgagggatgtgttggagctgtgaaaagagttcttgggaaaatggaaggttagattatttttcttattttggctattgatgttatgatctgtatcaaaatgctttgaacccacttgtcttacggtaaacatatagattcatcggaaaagattgtcgatatcgcggaatctgcaatgttttctatcttttctaaagcatggaacatcactctcttcactcggttattttggtttcaggcgtggagtcatttgacgttgatataaaggagcagaaagtgacggtgaaaggcaacgtgcagccagacgcagttttacagaccgtgacgaaaactggaaaga

SEQ ID NO: 129395 - DNA, 434 bp, Arabidopsis thaliana
ctttcttctaaaattcgttttccatttttcttcactctctttccggtgacgccatgaacgccgccgtgtttagtccttctgctttatctctccctatctccttctctaaaacccgatcctctttttctctccagaaagaagggcgtgaaaggagcatttagggtatttgctgtgtttggtgatgagagtggattagttgagaagaagagtcaatggagacctttgtttgatgtggaggatcctagatcaaaagctcctccttataaaggaaagtttttagatgttaatcaagctattgaagttgctaggtttgatattcaatacttggattggcgtgctcgtcaagatcttcttaccattatgattcttcatgacaaggttgttgatgtacttaatcctctagctcgtgagtacaagtccatcggtacagggaa

SEQ ID NO: 129396 - DNA, 548 bp, Arabidopsis thaliana
  unsure (1)..(548): unsure at all n locations
ctagacaaagccatccagttgcgcccacttgagcccgctcctattcagcatctagctcgggaattcatggtcaagacccgccgtagaaagggaatgagcgaagacgtcagcggaaataaattctttgatgaagcgatgatggtagagcttgcccagcaaacaggcgatctccatctgcagatgatttgatgatctctgcacttttttcatataaatcgtgattcaggactagtagtagtatcttctcttctctatatatgtgaaaggagaacaagaaaatgtggatcagttttgtaattgatgcctccaaatttacgttgtaagttgagagattttaatgaactcaacagtccacatggtcacactcacacatgactcgcaaatagttgacaggaaatgttcacaaatttttgtaaaattgtaaactactattggattatgggaaactgaactaggttatgacaaaaaacaaaaaaagnnnnnnnnnnnnnnnnnnnnnnnnnnnnnnnnnnnnnnnnnnnnnnnnnnnnnnnnnnnnnnnnnnnnnn

SEQ ID NO: 129397 - DNA, 772 bp, Arabidopsis thaliana
  unsure (1)..(772): unsure at all n locations
aatgannnnnnnnnnnnnnnnnnnnnnnnnnnnnnnnnnnnnnnnnnnnnnnnnnnnnnnnnnnnnnnnnnnnnnnnnnnnnnccacgcgtccgcttacagacccaattcttgttttctgttttgctataacaaaccagggtcagggttttatcttccatattcttttcccactgattcttacaatcgatctaagggaatctacgaactgtttggtaatttctggtgggaaaagtcttgatcttgctgtttggtttggagtaatggtgagtgcttggtttgttgttggctcaccggtgatggactcttcgagcagtccatgtttatgtctggatgctcacacgacgggtaccatcaggaggaagaagatccttggcaaagcaagaaatctggaattaggaagctctttcactggctcacattgtttttaggctttctccgaagcgtgtatcgagaattgcgaatcgaaagagcaaaaagctcttgattgtgaatgaggatgttgctggtaattacgacgataccttcggggaggtacaaaagcaaattgttaattattttacatacaaagctgggaggacggttcttcatcagctgtacgaaatgaatcctcctcaatacacttggttctataatcatatcataacaaacagaccgacggatggcaaacgtttcctccgtgccctcggcagggagagtcaggagcttgcagaaagagtgatgatcacgcgtcttcacttgatggcaaatggatcaagaatgcgaccatggga

SEQ ID NO: 129398 - DNA, 658 bp, Arabidopsis thaliana
tggtacgcctgcaggtaccggtccggttacccgggtcgacccacaccgtccgcttgaacctaccgaatcatctttgatttttttttccccaagcttttggccactctaatggcttcgccggccaatcatttgatctgacgaaagagagagaaagaagcagaaaagctttgagatggcgatgccgctgggcatggcgatgtatctgatgagaatggtttggttttctctgagtggttgggttttcacttgcgtggctatcgctgatgagatcgctggttctctgagaaacggagatattggtcctttccacgtcggatgattgaattcgagatccttagctctccttctgtgcgtatatgttcttctcttccccaaattttacgtttttttttgttttgctctgctgttttagattagagtcgcttcaaatttccctacaaactctgaaattgataatagttcgagtttatagaggataaagatagatcattttggtccgaaaaagaacaatcttttggagcaagtgattgatatatggcctcagtcactcagagtgtgcatggtgaactaaaaggtcgggttcgtatatggaactttacattatctatggaaaacaggagaggccaaccgcaccttgggcggacccctctaaaggatc

SEQ ID NO: 129399 - DNA, 538 bp, Arabidopsis thaliana
  unsure (1)..(538): unsure at all n locations
acgactcactatgnggaagctggtccgcctgcagggtccgggtccggatttcccggggcgacccccgcgtccgaaaagcttcccctaccaatttgacgacaagaagctgtgaatcttctcaattgtgtttcggaatcgaaattcgatcaagagaaatgtctaattctactgcaatctctctgagaatgtgttctatctaagaaagtaaaaaagttttcagtaccaagtgaagaagaccataaacaagttggagcagcttgattgagcaagaaaccttgataacgttattacgctgattcagtcctaagctatgtacaatgataaagcatttcaaagattacttttgtgaacattcaacaaaaaacgatgcatttaaagtttttaaaaagaaaaacgaagattttttttttaaaaaaaaaaaaaaaaaaaaaaaggaaaaaaaaaaaaaaaaaaaaaaaaggaaaacccccannaaggaaggccgctctagaggatccaagcttacgtacgcgtgcatgcgacgtcaaagctctnctat

SEQ ID NO: 129400 - DNA, 799 bp, Arabidopsis thaliana
  unsure (1)..(799): unsure at all n locations
atgcttnnnnnncagcactatcgactcacttagggaaagctcgtacgcctgcaggtaccggtccggaattcccgggtcgacccacgcgtccgcttcgtcttcacttccgccatgagaaaaacctgcacacacgcctgaaaaaccaaatcatcctcatcatcttctgatctaatgtctaccgacactatcccttccctctcatctccaccggcgccggagtttccttccaccacaccagacacggcgacgtcaccagctccgtctcagccatccatcatcggaccttcttcgttggctccgtttccggagacaacaacaaacattgatggaggctcgagaaatgtagcattaactggacttattactggagtagttctcggagctacgtttgtcctactcggagtttgtatctttgtctgtttctataaaagaaagaagaggaagtgttaagaagaagaagatggaagatttcgaagcttctacttacagagactcactagatcccaaagatgactagcaataatcttcagcaatggagttcatcagagattggacaaaacttgttacatatgaagatttggctaaagccactagtaacctctccaacactaaccttcttggacaggtgggtttggttatgttcatagaggagttctggtgatggctctggggtgctataagcagttaatctggaagggcaagtgaaccanagttaagctgaatcagactttagtgagttatctaagctctgttctctttggtattgatactgggccaaaatngttgtatgagttggcca

SEQ ID NO: 129401 - DNA, 796 bp, Arabidopsis thaliana
  unsure (1)..(796): unsure at all n locations
atgattctccnnnnnnnnnnnnnnnnnnnnnnnnnnnnnnnnnnnnnnnnnnnnnnnnnnnnnnnnnnnnnnnnnnnnnccacgcgtccgcccacgcgtccgctttttttctctcttgtgaattcgtttattgttgtatcgtcggcccgagtttatcggaactccgggtctgacgtgagttttccaaatggcggcgtcagagagatcgattgacaaagaagtcgacatgggttcttcctttcttcaaaaattcaggctttacgagacccgctcgagcttctatatgattggaagagataaaaatcgaacgtcttggagggtcctgaagttagataggacagagccagcagaggtcaatatctacgaagattcaacggcttacacagaagctgaatgctttgaaactttgagaaggatacacgagggaaacagatcatctggtggtttgaaatttgtcaccacctgctacgggatcatcggattcataaggttcttgggaccttattacatgctgataatcactaaaagaaagaagcttggtgaaatntgtggcacactgtttatggtgttgcgaagagcaagatcatcacgattccacatgcctctgtgctatccaatgtggcttattctaaggacgagaataggtacaagaggctgctctgcactgttgatctcacaaaggacttcttcttcagctattcctatcacatcatgcatacactncagaggaatctgtctaacaatgtggaaggacacacttactacgaaatcgatgttgtctggacnaatacttaac

SEQ ID NO: 129402 - DNA, 877 bp, Arabidopsis thaliana
  unsure (1)..(877): unsure at all n locations
cnnnnnnnnnnnnnnnnnnnnnnnnnnnnnnnnnnnnnnnnnnnnnnnnnnnnnnnnnnnnnnnnnnnnnnnccacgcgtgcgggagacggtgaagatggcagtgagacaaaaggcaatggcgacgttgccgaaactgattcaaagcatgagaaacgaagttacgaagcagcccagtcttgtcttaccatctctcagaagagctttctctctctacgatcagatcaatctcatcgataacgttcctgaggatcagctccgatttcaggagtttgatgagacgagtttcactgtgaatggggttaaatacgaaggaagcttgctctgtgttgggaatttgctaatgtcatggagccctcgttacttctccgacatcacaacggatagcttgtcaatcttccagacggttcgaccaattccagagctcttgattgtcgggtgtggaagatacacccacccactgaatccccaagtccgtcagttcgtaaagtcaatcggcatgaagctagaaactgttgattctagaaatgctgcatcaacttacaacatactcaatgaggaaggcaggatcgtggctgctgcattgcttccttatggagttacatcgtaagaaactcaacacctctggaatactgtagaacaaacttcgaacagcttgactcgatctttatagttgaaacaccaacatggtcttcttgtctactgtaaatgatatatttcactctnatttgtaaaacttttgcaaaaaaatcgaaatttccaggttttaaaaaaaaaaaaaaaaacacaaaaaaagnnnnnnnnnnnnnnnnnnnnnnnnnnnnnnnnnnnnnnnnnnnnnnnnnnnnnnnnnnnnnnnnnnnnnnnnnnnnnnnncg

SEQ ID NO: 129403 - DNA, 402 bp, Arabidopsis thaliana
ggaagatggcagtgagacaaaaagcaatggcgacgttgccgaaactgattcaaagcatgagaaacgaagttacgaagcagcccagtcgtgtcgtaccatctctcagaagagctttctctctctacgatcagatcaatctcatcgataacgttcctgaggatcagctccgatttcaggagtattcatctctctcagtcatgttcctaatttgactatgtagcaagggaatttggattttcgggtatgaaatgaatcaattaatggtgctttttgcaggtttgatgagacgagtttcacggtgaatggggttaaattcgatcgaagcttgctctgtgttgggaatttgctaatgtcatggacgcctcgttacgtctccgacatcacaacggataggttccagta

SEQ ID NO: 129404 - DNA, 449 bp, Arabidopsis thaliana
aatgtcttcattggtgttacccttgctgggactttgttcaacacagtgaaggatatcgcgaaaaatcccaaactcgacatgattattaaccttttggctactagcctccctaagagcgcaactttcttcctgacctacgttgctctcaagttctttatcggttatggccttgagctgtctcggatcatacctttgataatcttccacctgaaaaagaagtatctctgcaaaaccgaagcggaggtcaaagaagcttggtacccgggagacttaagctatgcgactagggttcccggagacatgctcatcctcacagtcacgttctgcgagtcagtcattgctcctcttatcctcatattcggcatcacctactttggtttaggctggctagtcctcaggaatcaggcgttgaaagtgtacgttccatcatacgagagctatggaagaat

SEQ ID NO: 129405 - DNA, 796 bp, Arabidopsis thaliana
  unsure (1)..(796): unsure at all n locations
acgactcactatttggaaagctggcacgcctgcaggtaccggtccggaattcccgggtcgacccacgcgtgcgctttggagaaactgcatcaatggcgttgagattgacatcgctaaaacgcgccgcggttgagtcctgtcgcattttggaaacccgaagcttaagtcatgtcgctgcgatgccttcccccttgaacggagcttttgatcgcccgatttctatgccgccgctggttttacctgagttcgatcagaatcaaccgggtttgatcgaagaaaagagcttcgggttcgggcttcctagttttgcttttaatggatccatggagctaatggctgtgcctaagaagaagatttctaaacacaagagagggataagaaatggtccaaaggctcttaagcctgttcctgtgatcatccgttgcaggagttgcgggcgagtcaagctgccacatttcttctgttgcagcggtgagcggctaaaccctactgagtaaggcaattcgaacaactggtcatggtttccaatatgattactccttgttggatatcaagaggataaaatcttggctttcttagtagtaccctagaatgataaaagacttagttgatgctgttttggcaaattattgtatgctgcaagatcaatattctcatgcttctcttgacaaattatgttattgtcattgcttgttgcaaagtgtaggataatctcattcacttttnnnnnnnnnnnnnnnnnnnnnnnnnnnnnnnnnnnnnnnnnnnnnnnnnnnnnnnnnnnnnnnnnnnnnnn

SEQ ID NO: 129406 - DNA, 566 bp, Arabidopsis thaliana
  unsure (1)..(566): unsure at all n locations
acgcgcacnnnnnnnnnnnnnnnnnnnnnnnnnnnnnnnnnnnnnnnnnnnnnnnnnnnnnnnnnnnnnnnnnnnnnccacgcgtccgcttcttctctcatctccgtctctcagagagtgtacacttctccttctgcttccgtcatgctcgagtaccgttgcagctccgttgactggaaaccatcaccggtggtagccctagctaacagctccgacgactctcaagtcgccgccgctcgcgaggacggttctcttgaaatctggctcgtctcccccggcgccgtcggatggcactgtcaactcactatccatggcgatccaaattcgagaatctcgtctcttgcgtggtgctgttctccttctatagggcttccttctggtcggttattctcctctagcatcgatggctctatttctgaatgggatcttttcgatttgaagcagaagattgtgcttgagtctattggaatctcgatatggcaaatggcattggctccgattagcggattctcgagtgatgtagaagtaatgtctagaaagagatgaaagtcattaagaagtgctgg

SEQ ID NO: 129407 - DNA, 977 bp, Arabidopsis thaliana
  unsure (1)..(977): unsure at all n locations
cnnnnnnnnnnnnnnnnnnnnnnnnnnnnnnnnnnnnnnnnnnnnnnnnnnnnnnnnnnnnnnnnnnnnnnnnnnnnnccacgcgtccgcccacgcgtccgcggacgcgtgggaatctccacattctgaggcatcaatcgtgaatggtagtatccatttgaatggcagtggtgaaaccaaaacaaagaatatagtcatgtcgtctgattcagacagtttcatcggtgtgcttgaggtttttgttcaccaagctagggacatccacaacatctgtatctatcataagcaagatgtgtatgctaagctttgtctcacaaatgatcccgaaaacctccttgtccacaaagatcatcaatggtggagggcaaaaccctgtcttcgacgatacccttcagttcgacgttaagaacctggattgttcgcttaagtgtgagatatttatgatgagccgcgtgaagaattatcttgaggatcagttacttggattctctcttgtacctttgtctgaagtgattgtaaggaatgggaaattggagaaagagttctccctttcttcaaccgatttgtatcactctcctgcaggttttgtcgagttgtctctctcgtacgcaggagattcgcctgacgtgatgcatattcctgcggttccaactgcggatgagaccgagttggctcctatcgagtttgatgagagtgagtttttggatccaaagattgtctgtgaaaacaatcaaatggtgtctaagtacttctccactacgtgttctgattctgatgattttgcaagctctgaaactggctttgtggaagtaaacagcatcctgtttccggttgttgaaactgctgttgacgaagcagcaccggccaattctgtctcaacaaatggaatctcatctccatcaactgcagttagctctggctcctcgggaactcatgatgtttcaaagcaatctagtgaaggaaacaactcagattca

SEQ ID NO: 129408 - DNA, 544 bp, Arabidopsis thaliana
  unsure (1)..(544): unsure at all n locations
cgggnncgccggacgcgtcaanccttctccttcctatttttttccttctccgttgcaaagctcaagaaaaactaaaggaatccaagtggtaaacctcagcgcaaatttcaagaagaagaaaagcagagaaaagttttcttctttttgacctttcttcccctaaattaaagatcctgttatggaatctccacattctgaggcatcaatcgtgaatggtagtatccatttgaatggcagtggtgaaaccaaaacaaagaatatagtcatgtcgtctgattcagacagtttcatcggtgtgcttgaggtttttgttcaccaagctagggacatccacaacatctgtatctatcataagcaagatgtgtatgctaagctttgtctcacaaatgatcccgaaaactccttgtccacaaagatcatcaatggtggagggcaaaaccctgtcttcgacgatacccttcagttcgacgttaagaaccttgggtttttcccgctttaaggtnttgggtttttttttgatgcggcccgggtaagganttttntt

SEQ ID NO: 129409 - DNA, 946 bp, Arabidopsis thaliana
aaaagagggaagcgactagcaccttttgtagttttccgtttattttctgtataaggcgggtgatttcggctccttcatcggaaattatgagcaacgttatcggcgatcgcactgaagacggcctttccaccgccgctgcggcctctggctctacggctgtccagagttctcctcccactgatcgtcctgtccgcgtctacgccgatgggatctacgatcttttccactttggtcatgctcgatctctcgaacaagccaaattagcgtttccaaacaacacttaccttcttgttggatgttgcaatgatgagactacccataagtacaagggaaggactgtaatgactgcagaagagcgatatgaatcacttcgacattgcaagtgggtggatgaagtcatccctgatgcaccatgggtggtcaaccaggagtttcttgacaagcaccagattgactatgttgcccacgattctcttccctatgctgattcaagcggagcgggaaaggatgtctattgaatttgttaagaaagttgggaggtttaaggaaacacagcgaactgaaggaatatcgacctcggatataataatgagaatagtgaaagattacaatcagtatgtcatgcgtaacttggatagaggatactcaggggaagatcttggagttagctttgtcaaggaaaagagacttagagttaatatgaggctaaagaaactccaggagagggtcaaagaacaccaagaaagagtgggagaaaagatccaaactgtaaaaatgctgcccaacgagtgggtagagaatgcagatcggatgggtcgctggatttcttgaaattatttgaatgaaggttgccataaggtggggactgcaatccgtagacagtttccaaggaaaggtttaattgagacaaaagtcggcagagaggctggaaaacggtcaggatgat

SEQ ID NO: 129410 - DNA, 548 bp, Arabidopsis thaliana
  unsure (1)..(548): unsure at all n locations
cagctctctacactcacttatggaagctggcacgcctgcaggtaccggtccggaattcccgggtcgaccacgcgggcgaagttatctcaggcggtcaatgctgcttcccaacagcttcaatgtgctgctcctactaaaaaagagcggcctgacatggaagctgttgggaagcagctttgggctataagatcaagttatctcaggcggtcaatggaataagacaagtgttcacacgttacaaccaccaaaatgctatagtctctctggtgttagataatatcacctcttttacattttgctatccaaccacttcttcttcagatttgaaatgagatgtcttattcatgacttcagattctcgaatgacgcatgtaactatgtgcattcattannaaaaaaannaaaaaaaaaaaaanaaaaaaaaaaaaaaanaaaaaaaaaaaaaaaaaaaanaaaaaaaaaaaaaaaaagggggggggccgttctagaggacccaagtttacgtccccgggcttgcaaggtaatagcttttctatagggcaccctaa

SEQ ID NO: 129411 - DNA, 855 bp, Arabidopsis thaliana
  unsure (1)..(855): unsure at all n locations
acgcgcnnnnnnnnnnnnnnnnnnnnnnnnnnnnnnnnnnnnnnnnnnnnnnnnnnnnnnnnnnnnnnnnnnnnnnnccacgcgtccgggaattggaaaaggcggatgtgattgaaccgagttggaccgatccacaaaagatatgtagtcagggagatttatcggttatgtcgggtttaggaccatttggtttgatggttttggcatccaatgacatggaagagtacacgtccgtttacttcagaattttcaagtcaaatgacgatactaacaagaagactaaatacgtggtgttgatgtgcagtgaccaaagcagatcatcgttaaatgatgaaaatgataaatcaacctttggtgcttttgttgcgatagacccttctcaccaaacaatttctcttaggactttgattgatcactcgatagtggagagttatggtggaggaggcagaacatgtataacctcaagagtgtatccaaaattggcaatcggagaaaatgcaaatctgtttgtcttcaacaaaggcactcaaagtgttgatatcttgaccctaagtgcttggagtttaaagtttgctcaaatcaatggcgacttaatgtcaccatttattgagcgtgaagagtcacgctcacctaatcatcagttttgaatgaaaaatattttacattgtacgggtaaaacgaaatatataagagattattacatattaagagatattaacattcttattttaccattcacttccaaatttgaaaaaaaaaaagaaagtgtccnnnnnnnnnnnnnnnnnnnnnnnnnnnnnnnnnnnnnnnnnnnnnnnnnnnnnnnnnnnnnnnnnnnnnnnnnagaccgnnnnn

SEQ ID NO: 129412 - DNA, 405 bp, Arabidopsis thaliana
aacaaattcacactctctccgccgcgcacagactcaccgacaccaccaataatgtcttcttctccggcgattcttcccgtcaccaaccagcaagcagccactcaatctcaacctccaatcaattctcacgccttccgtactttcctctcacgcctctcgtcctctctccgcgaaagcctctctcaacgccgtccatggctagaactcgtagatcggagctccttcgctagacctgactctctcaccgattccttctcccggatccgtaagaatctcgcttacttcaaagtcaattactccgcaattgtctcgttagtccttgctttctccctcctctcgcatccattctcgcttctcgtcctcctctctctcttaggctcctggatgtttctctacctcttccga

SEQ ID NO: 129413 - DNA, 796 bp, Arabidopsis thaliana
acgactcactatagggtaagctggtacgcctgcaggtaccggtccggagagtatcgttgtgaggtttggggatcgcgaaaatggaggttccaggttcatcgaagaagatgatcgcaacgcaagaagagatgtctgcagctaaaatagcacttggatctagagatatgtgcgctcatctcttgattccgctcaacaaatgtcgtcaggctgagttttaccttccatggaaatgtgaagacgagcgtcacgtttatgagaagtgtgaatacgagcttgttatggagagaatgcttgcgatgaagaagatccgtgaagaagaagctttggctaaacagaataaactacaaggaaacgctgctgttcctcttatccctaaaactgctaatgcttaggattcgattccttctccaatttgccgattccagattccgggattctctggaactgtgaagatggtggggactctgcttttcaatctttttcttcttgctagtgatgaaaaattgttgctacattttcagatgtgaatgttcaagattctctatctttttttttttttgaactctttttaacttggagtggtttcccaaaaaataagatgcaaaactcatctttttgttgggtttctattcccacaaaatttcttaccccccaattctaaaagggcggccgctcctagaaggatccaagctttacgttacgccgtggccttggcaacggtcaattaacttcttttcttataaggtggccaccccaaaaaatttcaaatttcacacttgggcccggtcggtttttt

SEQ ID NO: 129414 - DNA, 431 bp, Arabidopsis thaliana
ggtgacctctacaagagtatgacgtcgcacgcacgcgtacgtaagctcggaattcggctcgagggggactctgcgtgtttcacagttccagagaatcccggaatctggaatcggcaaattggagaaggaatcgaatcctaagcattagcagttttagggataagaggaactgtgaagatggtggggactctgcttttcaatctttttcttcttgctagtgatgaaaaattgttgctacattttcagatgtgaatgttcaagattctctatcttttttttttttttgaactctttttaacttggagtggtttcccaaaaaataagatgcaaaactcatctttttgttggttttctatctttaatctgtgagaaataaaaaatatatatgagatcaaaaaaaaaaaaaaaaaaaaaaaaagggcggccgccga

SEQ ID NO: 129415 - DNA, 767 bp, Arabidopsis thaliana
  unsure (1)..(767): unsure at all n locations
cagcatctatcngactcactatagggaaagctggtacgcctgcaggtaccggtccggaattccgggtcgacccacgcgtccgggaggaggctgatgatgaagctgtggaaacgggcttccggtgctctcaaagaccggaaaaccttgtttaccatcggcttctcccggaaaacctccttccgcaaccctgaccttgattctgccatcatccacgcaacctctcacgatgactcatctgtcgattaccacaatgctcaccgtgtctacaaatggatccggtcctctcccgccaatctcaagccgcttgttcatgctctttcatctagggttaaccgcacaagaagctggattgtagccttgaaagccttaatgcttgtccacggtgtgctttgctgcaaagtcacgtcccttcaagaaattcgtcgcctccctttcgatctctcggatttctcggatggtcattcccgtcccagcaaaacttggggtttcaacgcttttatccgcgcctatntctcgtttcttgaccagtactctttctttntatccgatcaaatccgtcgtcgccacaaaaaacctcagctagattcgggtaaccaagagctcganagaatcgagaaacttcagtctcttctccatatgcttctccagatccgtccaatggctgacaacatgaagaagacgctttatccttgagccatggactgcgtggtgatcgagatcttcgacatttatggaagaatatgtagcgctatcgccaagcttctcat

SEQ ID NO: 129416 - DNA, 537 bp, Arabidopsis thaliana
ctagctggtaccaatcttaaacccctctccgattttgatttctgcttgaaattgttttccccgagatctcaatttcgataatcggaaaacgaaaaagatggtttggtttcaatgcgaagactgtggagagtgtctgttgatgccaaaggtcccgtctcactgcaaggggtgcagagccaacaagttatcgtccatcgattgtggagaaatgtttgggagagatactgtgcaaggacataaccaatgcattactgaagctgagaagtatggtccaaaagggcagtcaaagtcagctaatggaacacctgcaaagccaaaggacatctctaagcaagagcctgactttgatattaatgtcggcttatcaaaccgatatccatggttttgcagtttatgtaacacataggctactagccagcagactttgcttgcccatgctgttgggaagaagcaccgaggaaaagctatagccttccatgctaggcaacaacaagaacaatccacgacttttgataacaaggatggaagtgaaaatgc

SEQ ID NO: 129417 - DNA, 830 bp, Arabidopsis thaliana
tttggccccccctcgatttcgacggtatcgataagcttgatatcgaattcgcggccgcgatttcagatcctgtaaagaaattttattagctcataagaatcatttttgggtttctgaaccataaaagcttctctcgactttcaaaaactctctcctttttccttttagccatttcaagcagagagattgatcgaagaagataaaaacctcgtctttcttcaatctcagtgattctcaaattacccatcgcttccttcttttgatctctttgatttcacttcaaaaagcaaagaaatctcgattaggttattccttgtttcaccccataaatttgcctccttttttttggtctcgggaactactctgatttgtttcaatcgattctggatttcgggatttggatatagagctctctgtttttgacattgcctttggaactaaaattctcagtctttgcatttttttgattcaaaagctcactaagtttgggtttcagaagctattacatttggtcttcgtaagcgtcctttgaatgccctgtagctgaagatgcaccctgatcaccgcaaaaagtcatcagttgaggtagatttcttcacggaatatggtgaacgaagcacatacagaatagaagaagtgattggtaaaggaagttatggaagtgtctggtctgcttaccatacacctacccgagcagaaaagttgccatttaagaaaaatcacaggaattttcttttgaacccttgtttcttgggattgccaacctccgccattttctttcgggggagaaaacaaaaccctttgtttagaaaccttttttaaacggccca

SEQ ID NO: 129418 - DNA, 834 bp, Arabidopsis thaliana
  unsure (1)..(834): unsure at all n locations
nnnnnnnnnnnnnnnnnnnnnnnnnnnnnnnnnnnnnnnnnnnnnnnnnnnnnnnnnnnnnnnnnnnnnnnnnnnnnnnnnnnccacgcgtccggaaacgaataataataatatttgaataatgtgttctgttctgttcttcatctcatagatctctcctctctacactttcttctacaaaagtgagcaaataaacttgcctcttcgtctgcttcgtgagatttcagatcctgtaaagaaattttattagctcaaaagaatcatttttgggtttctgaaccataaaagcttctctcgactttcaaaaactctctactttttccttttagccatttcaagcagagagattgatcgaagaagataaaaacctcgtctttcttcaatctcagtgattctcaaattacccatcgcttccttcttttgatctctttgatttcacttcaaaaagcaaagaaatcccgattaggttattccttgtttcaccccataaatttgcctcctttttttttggtctcgggaactactctgatttgattcaatcgattctggatttcgggatttggatatagagctctctgtctttgacattgccctttggaacaaaattctcagtctgtgcattgttttgattcataagctcactaagtnttgggtttcagaagctattacattgaggtcttcgtaagcgtcctttgaatgcactgtaactgaagtgcagcctgatcaccgcaaaagtcatcagttgaggtagatctctccacggaatatggggaaggaagcagattcagaatagaggaagtgantggtaaaaggagttatggagttggctggtct

SEQ ID NO: 129419 - DNA, 877 bp, Arabidopsis thaliana
  unsure (1)..(877): unsure at all n locations
nnnnnnnnnnnnnnnnnnnnnnnnnnnnnnnnnnnnnnnnnnnnnnnnnnnnnnnnnnnnnnnnnnnnnnnnnnnnccacgcgtccgtatggggaagagggtatattctctgttttgattcgcttctgtcttaacacattgaaattttccatagaagattccattgtgctcttttaatcctcttctctttctctctgttttaaatacctgtctttaatcgcttctctctatctctctctcttgttaaatctcatcggagttcaatttcaggactctcggcgctcttatgaagtgattgtgaagatttgcgtacactaagcctttgcttcagaaagttgagtgatttgtttgactcactttcaagatgaaaaatgagctctagcaaagatggatggcgtaaactccgttgagggctatagaaatccttttagttgtccgtttagtgagagttatccgagtctttttctttggagacatttggtctagacacaacatttgtggcgaacaaggttttagtgggaattcttaccgtctagaaatatggaattgtcagtctctcctcaaacccaaaagatgaacctgcaaactcctcgtaaaagctcactttcaggatctanganagatttgtggtttgctatacgggaaggttcgttggttgatgtggattcagcacttagcatactcaagaagactgggggggcatataatttaaggaatgcctatggtctcactcctctgcatattgctgtatggagaaatcacattcctnattgtaggagactgcttgctgctggcgctgatccaaatgctanggatggagaatctggntggagtagtcttcaccgagctttgcatttggccatctcgcggagctagc

SEQ ID NO: 129420 - DNA, 572 bp, Arabidopsis thaliana
agctctctacgactcactatatggaaagctggtccgcctgcaggtaccggtccggaattcccgggtcgacccacgcgtccgcccacgcgtccgtagagagatttttgctttctcaatttattattttttgtgtctctctctcgcccgatttggagtttttagggtttgatttttgtaatgtgagaaaggtttcgttatgttaaagaggcactctatcgccattctctccagaatcgcaagcttcgattcccataaaacccttatgtcttcctttaccgatcccctttttctgcgatcgctttactctcctcgatccatcgccatcagatttcatggagattttgctcatagactctacaatcccattcaaatttacaacaacaacaacaacaacagtggctcttgtaatggtttgttcaaggttaaaggtggaggaggaaagccgaaaggattcaccttgcgaagttgttttgattctcataagaaacctgatcaaaaggctcgagctttaactcaacatcgccgctttcttcatgatctgggatctgggcctagtgaagaacgcgcccctg

SEQ ID NO: 129421 - DNA, 702 bp, Arabidopsis thaliana
  unsure (1)..(702): unsure at all n locations
atgctgttgtctggatacatctccacccatatctacatgaatgcacttcacacagaatattagttagttgaanagtggaaccgttctgaagggacaccacaggttggcttacacatttgatgctggtccaaatgctgtactgattgcacgcaacagaaaggtcgcagtccaattgctccaggggcttctgtactattttccccctaagtcagacactgatatgaagagttacgtagtgggcgataattcaattctaaaagaagcaggattagatggagcaagtggtgtagagaatctgcaacctccacctgaaattaaagacaacattggatctcaggatcaaaaaggagaagtcagttattttatctgcactagacctggaaaaggtcccatcgtgcttcacgaccaaactcaagcccttctcgatcctgaaacaggccttcctaagtgagcattctctctgcttcaaactaattattatgattagcatctcctttaactgcaagtttaagatacgatatatgtggcagaataggtgcaggtacgttgtcatctaactattagctttcctatttccaaataaaagaaattcattggttttgttttaaaaaaaacaaaaagaaaaagcnnnnnnnnnnnnnnnnnnnnnnnnnnnnnnnnnnnnnnnnnnnnnnnnnnnnnnnnnnnnnnnnnnnnnnnnnn

SEQ ID NO: 129422 - DNA, 372 bp, Arabidopsis thaliana
  unsure (1)..(372): unsure at all n locations
acccacgcgtccggtcttctctgccctaaagagaaaaaccctacgtgagctgcgtcagttctgggtcctccgcaatttgagaatcggagatatctcaagtttcgcaaagtctcgtggatttgatcttcgtctccttgatcgatggattcaccttgagcaatcgttgatcgagcttcgaagatgtcgaatcactccagagatgagcctagtactgccccgaagacagatcaatggtatgatcttgtccttggttcctctgccaaagatgactcctcccataaattctgcactttgcgatatgaatttaagccggcttcaatcgataagaacaggtcaggntcaatgcacaagaagaaggntaacanagnttca

SEQ ID NO: 129423 - DNA, 880 bp, Arabidopsis thaliana
  unsure (1)..(880): unsure at all n locations
ctctaattcgattcactatagggaaagctggtacgcctgcaggtaccggtcccgaattcccggggcggcccgcgcgtccgtacggctgcnacnacagaagggggcttcttatttggtctcagctctgatcttttgattcaacggctcccggagacgacggaagcaatgcagttcttcggtggatctgagattagtccgtcgccgccagttccgacggcgagtggaaacaacgcgcacatgatgtacgttttcaatcgtaacggtgtatgtcttctctacaaagaatggaatcggcctcttcatacacttaatcctcagcaagatcacaagctcatgtttggtcttctcttctctctcaaatctctcaccgctaagatggatccagtcaatgcggataaaggaaatcttggggttccacagttgccaggacaaggttgctctttccatagtttccgtacgaatacttacaagctaagtttcatggagactccctctggtattaagattatcttagtaactcatccaaagaccggatatttacgcgaattccttgagtacatctacagtttatcccgtttttatgtcttaaaaaatcctatttacagcccatgatcttcaatcaagtgggagttgtccacacctcactgaccctgcctaggagcatttttatgggtcataacgattttcccttggacctcctccttaacaaactttcgcgtaacctctttaaagagaaaaattcctgtaaaaattttcttgatccactttttttttaaatgatggttggtcccttttattacccacggtgggcttgttcaggtggcagggccccaaaaaaaaaaaaaaaaaagggcgctaaatcacttcccccggctcattt

SEQ ID NO: 129424 - DNA, 782 bp, Arabidopsis thaliana
  unsure (1)..(782): unsure at all n locations
gcggccagttccgacggcgagtggaacaaacgcgcacatgatgtacgttttcaatcgtaacggtgtatgtcttctctacaaagaatggaatcggcctcttcatacacttaatcctcagcaagatcacaagctcatgtttggtcttctcttctctctcaaatctctcaccgctaagatggatccagtcaatgcggataaaggaaatcttggggttccacagttgccaggacaaggttgctctttccatagtttccgtacgaatacttacaagctaagtttcatggagactccctctggtattaagattatcttagtaactcatccaaagaccggagatttacgcgaatccttgaagtacatctacagtttatacgttgaatatgtcgtaaaaaatcctatatacagcccaggatctccaatcaagtcggagttgttcaacactgcacttgaccagtacgtaaggagcatctcttagtgtgtgcattacagatttgtccattggaacttctctccttcaacagaactatcgtctgaacaatctctgaaaagaagagagaattgtagtagagagatttatcttgagttcgactgttttctctgcaaatctatgtttcgtttaccctttttattaactccactgtattggcttgctatcaatgatgttcatggtttactcaaaaaaaaaaaaaaaaaagggcggccgctctagaggatccaagcttacgtacgcgtgcatgcgacgtcagnnnnnnnnnnnnnnnnnnnnnnnnnnnnnnnnnnnn

SEQ ID NO: 129425 - DNA, 539 bp, Arabidopsis thaliana
  unsure (1)..(539): unsure at all n locations
nnnnnnnnnnnnnnnnnnnnnnnnnnnnnnnnnnnnnnnnnnnnnnnnnnnnnnnnnnnnnnnnnnnnnnccacgcgtccgcggacgcgtgggcaacaactttaccaaatctgcaagtgttgaaattattttattctcttttttgtgttgatgacataattatggaggaactacagcgcttgaagcacttgaagattttaacagcaaccatagaggatgccatgattttggaaagggtacaaggagttgaccgattggcgagtagtattcgaggtttatgtctaagaaacatgtcagcacctcgtgtaatattaaactcggtagctctgggaggtcttcaacaacttggaattgggagctgcaacatatctgagatagagatagattgggtaagcaaagaaagaagggatcatcgatctacaggttctcccggcttcaagcaactcgccagtattactgtatccggttgggtagggccaagggattggtcatggcttgttattggctcaaaatctgaaggatatacaagtgcaatattc

SEQ ID NO: 129426 - DNA, 551 bp, Arabidopsis thaliana
ttcagctctctacgactcactatttggaaagctggcccgcctgcaggtaccggtccggaattcccgggtcgacccacgcgccgccccacgcgtccgaaaagacagagaactttctcgatacgaacgccaaagagaagaagacgaagacgaagatgatgggtgtgttgaagtcggcgattggggatatgttgatgaccttctcttgggttgtcctctccgctacctttggaattcagacggcggcgattatctccgccggtgattttcaggcaatcacttgggctccgttggtgattttgacgtcgttgattttcgtctacgtctcgatcttcaccgttatcttcggtagcgctagcttcaatcctaccggaagcgctgccttttatgtcgccggtgtccccggagatactcttttctccttggcgattagattacctgctcaggcaattggtgctgcaggaggtgcattggcgatcatggagttcataccagagaaatacaagcatatgattggaggtccttctcttcaggttgatgtgcacactggagct

SEQ ID NO: 129427 - DNA, 493 bp, Arabidopsis thaliana
gagtaatctttcgtttacaacaaatatctctctctctctcgctctctctcgctctctctttcttcttcttcatcttctttcatggctgttactggctgggcaatcacaatctgaattctttcttcctccttgtctctctgattttcgccgagttttgggggctcttgttgttacacgatgagtctggtggttggtcagtctctgggtttaactctagtcggtgatggtctttcgttacgcaattccaaaataaatgtcggaaaatcaaagtttttctcggtaaatcggaggagattggcgcgtgcggccctggtacaagctaggcctaaggaagacggagcggcggcaagtccttccccatcgtcgagaccggcgtcagttgtgcagtaccgacgagctgatctcgcggatgatcttcaagccgaggcacgagctttgggtcgtgctattgatgcttctatatactctccggagctcatcgccaggaaacatg

SEQ ID NO: 129428 - DNA, 864 bp, Arabidopsis thaliana
ctatgaggggacagctggtacgcctgcaggtaccggtccggaattcccgggtcgacccacgcgtccgcgagaattccgtcgaacatttgagctgcgttttaaagttctccaaatggcgccttttgcctactaaaaaacctttaccttcttcacagagatctaacctctccttttcccaatgttcggcactcctttttcatcggcggggttcggcactccgtcatccacacccgcctttggcacatcttctccggcgttcggtacaccgtcagctacgcctgcgttcggtacgccatcgaatccttgcttcacgttccggcagatttggctcttaactcttctcgtctcccttctcatctgaacagccacagcatcaacaacaacatcatcagcatcagcagccgagtccactgattcaggagcaaccatcttctatttttgttttgcaggcccattgcacaacaccgctcaccatgacagcaaacgcattttccaaatgctgaattgactacttagatgggtcccgttgctgcaattccttactctttcccctttcgtgatggccaggctatcattgaacctataaagaaaaacccacaaatcccagtttcctttcacatcttgattcagggtacttgaccacataccggtgaagcctcgggtgggtaaaactaacgggggccaagccctgagcaaccttgaggttggttaaccagaagaagcgctttggactaacttggccgaggttaaggattttttagcgcctaagctttaaagaatttcggcgagaggccgtgaataaaccactcaggcatgggaaatgtgcgaacctttgagctcaacttcctgtttgaagggggacaa

SEQ ID NO: 129429 - DNA, 538 bp, Arabidopsis thaliana
cagctctcctacgactcactatatggaaagctgagcacgcctgcaggtaccggtccggaattcccgggtcgacccacgcgtgcggcgagagaaagatcgattctgtctttatacagacattatctcccactcattctctgtgtcgcttgaagcagcaagagagagagagagactgacagagacagagttaaatgcgaatttatgggtttgatctatacagatctgtgtaccctaatttatgtctctggcgtaacggtcatatttaaccccatttcaatttgagctcttcatcgctgcgtttctgtgatctcggagctcttccaagtggttcgagtagtgtcaaaagagaaggtgagagatgctgacgtgtatagcttgcacgaagcagcttaacaccaacaatggcggatctactcgagaagaagatgaagaacacggagttattggtacccctaggactaagcaagcgattaagtcactgtcgtcacagctaaaagacatggcagtaaaggcttcaggggcatacaaaaactgcaaa

SEQ ID NO: 129430 - DNA, 561 bp, Arabidopsis thaliana
atctaggtctttctctcctgcaccaagacgaagaggaggtcctcctcgtggggaagaagatgaaaattacagtcgtaggtcctactcccctggctatgaaggtgctgctgctgctgctccagatcgggacagaaatggagacaatgagattagagaaaaaccgggctatgaagcagaggatagacgtcgtggtggaagagcagtttcaaggtcgccatcaggatccaggtccaggtctgtggaggtatctccaagatgaaacttatgtgaagaagtggccgaccaaaactttgtgcaacgctttatgggttttgcatttctctagtagtgcgtctctgtgtctttaaaaactccttactctggcttgtcaaagatattttgtcttgtgatgtgatgttacttgaaatcggtttcggtttatgggtctttttataaaaaaaaaaaaaaaaaaaaaaaaaaaaaaaaaaaaaaaaaaaaaagggcggccgctctagaggatccaagcttacgtacgcgtgcatgcgacgtcatagtaatctatagttcgcctcaattcaatcg

SEQ ID NO: 129431 - DNA, 1515 bp, Arabidopsis thaliana
cagctctctacgactcactatatggaaagctggcacgcctgcaggtaccggtccggaattcccgggtcgacccacgcgtgcggctatatctgttaattacacatcaggtaccacttcaagccccaaaggtgttgtttatagtcacagaggtgcttatttgaattctctggctgcggttttactcaacgaaatgcactcctcgcctacttatctatggactaatcccatgtttcactgcaatggctggtgcttattgtggggtgttactgctattggtgggactaatatatgtttgaggaatgttacggccaaggctatatttgataatatttcccagcataaggtgactcatatgggaggtgcgccgacgatattgaatatgatcatcaatgcgcctgaatctgagcagaaaccgcttcccgggaaggtgtcttttataaccggtgctgcaccgccaccagctcatgtgattttcaagatggaagagttggggttttctatgtttcattcctatgggttaactgaaacttatggaccaggcacaatctgtacatggaagcctgagtgggactctttgcctagagaagaacaggcgaaaatgaaagctcgacaaggcgtgaatcatttagggctcgaggaaatacaagttaaagaccctgtaaccatgagaactttgccagctgatggtgtgactatgggtgaagttgtcttcagaggaaacacggtgatgaatggttacttaaagaaccctgaagcaaccaaggaagcttttaaaggaggttggttttggagtggcgacttaggtgttaaacaccctgacggatacatagagctgaaagacagatcgaaagacattataatctctggaggagaaaacattagctcgattgaagtcgagtctactctgttcactcacccttgtgttcttgaagcagcttgtagttgcgaggcctgatgagtattggggtgagactgcttttgcatttttgaaacttaaagacgggtctaaggccagtccggaggagcttattagctattgcagggaccggctcccacattatatggctccgaggagtattgtgtttgaggatcttcctaaaacatcgactggaaaagtccagaagtttgttctgaggaccaaggctaaggctttggtaagcttatcaaagaaaggcagaagcaagttatgaattggtaagctttctttgttacttccaatctctacaagatgtcttataaattactgtctataagatcatgtttgtgtctaagctaaaccagaatgagatactaaaaccaatttgtatgtttctgaaataaataaaaccgggatgaaattgtaattccggaagattagatctatagcattctgattagagttgaatctgatggcaagtggatatattattatcttaagggaatcaatctttggattgtgtctaaaaaaaaaaaaaaaagggcggccgctctagaggatcccagcttacggacgcgtgcatgcgacgtcaagctcgt

SEQ ID NO: 129432 - DNA, 630 bp, Arabidopsis thaliana
  unsure (1)..(630): unsure at all n locations
ggnggaatggcattnnggngnaccnanggcataatttttttttctgnacacncaacanncgggaggagttattacttgttgctgtcttgcttagacattcagggacaaaagtgatttttgcagatcatcagtttctccaaatagctgaaggagcttgtgaaatcctctcaaataaaggtgacaaggtcccgattttggtcttgatcccagagcctcttactcaatctgtttcaaggaagaagagatctgaggaaatgatggaatacgaagatgttgtagcgatggggaaatcggacttcgaggttatacgaccaacagatgagtgtgatgctatatctgttaattacacatcagggtaccacttcaagccccaaaggtggtggttatagtcacagaggtgcttatttgaattctctggctgcggttttactcaacgaaatgcactcctcgcctacttatctatggactaatcccatgtttcactgcaatggctggtgcttattgtggggtgttactgctattggtgggactaatatatgtttgaggaatgttacggccaaggctatatttgataatatttcccagcataaggtgactcatatgggaaggtgcgccgacgatattgaatat

SEQ ID NO: 129433 - DNA, 826 bp, Arabidopsis thaliana
tgctacgccggctctatacgacttacttagggaaagctggtacgcctgcaggtaccggtccggaattcccgggtcgacccacgcgtccggtttccttctcttcgttactggatacttcactctaaacgagagatcgagaaggaaattcacccaaacttttttccttgccccgcaagaaaagggtttctttgttctgaatgacatcctcagatttgttaatgatgatgctaaggataatgttccagagaccatagatggggaagttgtttctgggataaactctacaacacccactattatcaatggcatgaagggttcggagcaagctgcatgtgtttcagtgaatcctgtttgtaaggaagtgtccaaaccctgggatattgagaatgctaaggataatggtcttgtacctgagatggctaatgaagttgcaaggactgagataacttgcaaagaagttgcagatgattcacagaaaaattatgaccctgatgatggacttgcagatgctcccaagaaatcctatgcctctgtgttgaaggttacgaaagataaatttggagttccagctgtctttttaccttctccaaagaagatacctaaagaccaagaacatcaagcgccttcagatccttctacaggccagatactcaaagaccaaggtcaacaagcatcttcagattcttctcaagtgatagaatctgataccagttctgagtctgttgatgcttctgaaaatgggcacaatcaggaagcggtagctgagggacatctattatgtgagacatctccttttatgccaacattgcatgcttgaggctgattt

SEQ ID NO: 129434 - DNA, 680 bp, Arabidopsis thaliana
  unsure (1)..(680): unsure at all n locations
tgtttnnnnnnnnnnnnnnnnnnnnnnnnnnnnnnnnnnnnnnnnnnnnnnnnnnnnnnnnnnnnnnnnnnnnnnnnnnnnccacgcgtccgcttgaggaaacacagtaaaaacctaaaaagagaatgaaactcgcaggtctgaaatcgatcgagaacgctcacgaagattccgtttgggcagcgacgtgggttccggcgacggaagatcgaccggcgttgcttctgactggatctcttgacgagacggtgaagttatggcgaccggacgagctggatcttgtgcggactaatactggacactctttgggagtagcagctttggctgcgcatccttctgggattattgcagcatcttcttcgattgatagctttgtccgtgtgtttgatgttgatactaatgctacgattgctgttttggaagctcctccttctgaggtttggggaatgcaatttgaacctaagggtacgatccttgctgtgtgcaggtggaggtaagtgcctcatgtcaagcttttgggacactgcaagctcgggagattcaatctcaactctattcattcccacgcccagatgccccaaaaaccttccgataaaacctagcacaagaaattcgttctctcggagggcttggctcctaatgggaaacgacttgctggtggtcaatggatgggacgatct

SEQ ID NO: 129435 - DNA, 883 bp, Arabidopsis thaliana
  unsure (1)..(883): unsure at all n locations
nnnnnnnnnnnnnnnnnnnnnnnnnnnnnnnnnnnnnnnnnnnnnnnnnnnnnnnnnnnnnnnnnnnnnnnnnnccacgcgtccgcccacgcgtccgcctccctctaatggatctactcgatattcctaaatctcgagtaatatgtgccgtgctgcagctgataaatgaaattgtaaaagataataccgacttcctggaaaatgcttgtcttgttggtcttattcctttggtaatgagttttgctggttttgagagggatcgatcacgagaaattcgtaaggaagcatgcctacttcttgcagcagctttgtcagtcaagccccttgacgttgcaaatgttcatatcttgccgtggaatacccgttttggtgggatttcttgaagcagactatgccaaacacagggagatggttcacttggctattgatgggatgtggcatgtatttaaactcaaaaaatccacctcgagaaatgatttttgccgtattgctgcaaagaatggaattcttcttaggctagtcaacactctttatagcttgagtgagggaactcgactggcttctatatcggaggatgcaattgatttggatggtcaaactccacgagcacgctctggtcaacttgaccctaacaatcctatctttagtcagcgtgagacttcacctagtgagattgatcatcctgatgggttgaaaactaggaatgggnggtggagaagagccttctcatgctttaactgcaaattctcaaagtgcagatgtccatcaacccgatgccttgcacccagatagtgataggcctagattaagcagtgttgtagcagatgccacagaggatgttatacaacaacataggatatctctttctgccatagaacataac

SEQ ID NO: 129436 - DNA, 811 bp, Arabidopsis thaliana
  unsure (1)..(811): unsure at all n locations
tgcnnnnnnnnnnnnnnnnnnnnnnnnnnnnnnnnnnnnnnnnnnnnnnnnnnnnnnnnnnnnnnnnnnnnnnnnnnnnnccacgcgtccgaaaatatcactaacctcattcaaagagagaatggcttgtaaagaaaagcctcgtgatcttcaagttcttttgatcatatctatagttttgagttgttcttttgctgtttctgcaacggtggaagaagctaatgctcttttgaaatggaagtcaactttcacaaaccagacaagttcatcaaagctatcttcttgggtcaatccaaacacaagcagcttttgtaccagttggtatggtgttgcctgctcactcgggagcattatacggttgaatcttactaataccggtatcgaaggtactttcgaagattttccattctcgtctctccccaatctcacttttgttgatctcagtatgaaccgtttctctggaaccatctctcctttatggagacagttctcgaaactcgaatacttcgatttgtcgattaaccagttagttggtgaaatcccacctgaacttggtgatttgagtaatttagatactctccatctagttgaaaacaagttaaacggatcgattccttctgagatcggtcggttaactaaggttacggagatagctatatacgacaatcttttaaccggaccaataccttcttcttttggaaacctaccaaactagttaacctctacctctttatcaattcgctttctggttcaatccttctgaataagaaacttacccaacctagagagctatgtctagatagggaacacc

SEQ ID NO: 129437 - DNA, 523 bp, Arabidopsis thaliana
cggacgcgtgggcattgacatcaacagggttgaagaagaacaacatcattcaacatcagcatcacgaatattttcgagtcatggagagaagcgccgttgcctcaggttttcatagaaattacatcctctgtgcttcacgcgccgccacttccacgacgcgcctccactctttgtcctccctcagaaactttccctcttcctctctcaggattcgtcactgtccttctcccatctcttccaatttcatcgttagtgaagtttcccgaaaccgacgatgcgacgccgtttcttccagcaccaccgatgtgactgaattagccgaaattgattgggacaagattgattttgggcttaaaccaacggattacatgtacgccatgaaatgtagccgtgatggtgaattctctcaaggtcaattgcaaccttttggtaacattgacattaacccagcagctggtgttctcaactatggacaaggtttgtttgaaggtctaaaagcttacagaaaacaagatgggaatat

SEQ ID NO: 129438 - DNA, 282 bp, Arabidopsis thaliana
gaaagagagctatggaaaacagttattgcattctgttcaggacagtcaatttgttcattcgattaaagacagtggtgcgttacctgcggttttggggagcttgttcgttgtgtctgcaactgttggtacttctctgttcttcaaaggagctaataattgaaacagaagaaacaaaattttaaaaaattgttgggatttgttgttgttcttgaaagattgaaaaagaactatgtgatactttgtactattcttttctataatttattgtgtgttttgtttttg

SEQ ID NO: 129439 - DNA, 453 bp, Arabidopsis thaliana
ggagttctcaagctttttgtttactattttactcttttcactgaatatttctcctcttgtttcagctcatggctccaaccatgaagactttcttaagtgtctttcttaccgaatgaacgacaacaccgtcgaacccaaagtcatacacacttccaaagactcttcctttttttccatattggattcttcgatacaaaatccaagattctcggtttccgaaacacctaaaccggtctcaatcatcactcccgttaaagccagtgacgttcaaactgtgatcagatgcgcacagctgcatggaattcatgtaaggactcggagcgccggtcactgctacgaaggtctctcttacattgcgtacaacaaaccattcgctgtcatcgatttaaggaatcttcggtctatatcattagacgttgataaccggacaggttgggtccaaaccggagcaac

SEQ ID NO: 129440 - DNA, 452 bp, Arabidopsis thaliana
  unsure (1)..(452): unsure at all n locations
nnnnnnnnnnnnnnnnnnnnnnnnnnnnnnnnnnnnnnnnnnnnnnnnnnnnnnnnnnnnnnnnnnnnnnnccacgcgtccgctgacgtgtgggcagacgcgtgggtgagcatggctctagtctgtgctcgctggctttaatgctatccaatatatatatatgttgcaggcaagaagtatataaggctttacgcatccttcctgcaagacgaactttacccttactctgagacaatgctctgcaactctagtcacgttgatctagacaatatcgacgaaaccgagttcccaaaggccatggagttggagtttatggatggtattctagaagaaggtgaaatgttgtacatccctcccaaatggtggcactatgtcaggtccttaacaatgagtctctcggttagcttctggtggagcaatgaagcagaatcttctagctcgtagcgaatgga

SEQ ID NO: 129441 - DNA, 425 bp, Arabidopsis thaliana
cggacgcgtgggcggacgcgtgggtttggaaattgtctttcgtcaaattctgttcttcttcttcattaaactcataactttttctgggtttttcgagaatttcttcgaaaggatcttacggtaagagaaaaggaaaattaagagggaataagaagattcatcatcattgtcatctgtggggaatctcagagcttttttttctgtagttttgttatctttctgaattctctacctgcttcaagatttcatttttattcatcgatctttggggtttagtttcaaagctgaattctttgaggtttctgaaatttgcgagctgggtttttgttgaaataggcttctgagttttggttatatttgtggataatcgattacttgatctgacctgagaaaagtagaaacctttgagtagagctggttctatt

SEQ ID NO: 129442 - DNA, 287 bp, Arabidopsis thaliana
atacgactctcttagggaaagctggtacgcctgcaggtaccggtccggaattcccgggtcgacccacgcgtccgcgaaatcgatcttccgcaattcaaacttcgtctccgttaattcgcactctcgttctcgtcttcgtcgccggaggtcgtatcaagtcagcctcaacgatccgatttgttttttcagacaaaggttgattctctgggtatgagttttcttctatgagacagacatgttgtatttggtgcttaatgactaggtaatgaaggctatatgtgatagat

SEQ ID NO: 129443 - DNA, 1098 bp, Arabidopsis thaliana
  unsure (1)..(1098): unsure at all n locations
ccagcatctatacngactcactatagggaaagctggtacgcctgcaggtaccggtccggaattcccgggtcgacccacgcgtccgggcgaaaatgttctacttcagcacgcattctctactcgataagaagatgatgtcaactacgatacaagccatcaagatatcaaagcaactaggcaatgtcattttttatgacttgaatctccctttaccactatggcactccagcgaagaaaccaagtctttcatacaggaagtgtggaatcttgcagacgtcattgaaatcacaaaacaggaacttgaattcttatgcggaatcgagcctactgaagagttcgatacagaaaacaatgacatcagtaagtttgtccattacccgccagatactgtggaacagctttggcatgaatatctcaaggtcttgtttgtgaccaatggcacttctaagatccattactataccaaagagcacaatggtgctgtttccggaatggaggatgttcccattactcctttacaagggatatgtcagcatctggagatggcatcgttgcaggtctataagaatgcttacggttcagccagatcttatgaacaaataaagggtacctggaacgcacagcgagatatgcaattgagtgtggtattattgatcaatggttgctggcaccaaaccgaggatatccctccaaaggataccatggagaagaagaagatgatgaagaagaagatgaagtgaatcagattccaaacggtataagatcgataacagagaaggaatacagaacctcaaagccttatgatgaaccagatggtccatacgttatgaaaccagtagaggaaagggagtacaagaagttagagcttgttggctcaatgtttgaagatggtagtttatgattttcataagatttgataatgtttctgttagtcagcttttttttcctgttcacatcttacaacatcttagtagtgtgaatttttgtcatatgttttgatatctcactcaccaaaaaaaaaaaaaaagnnnnnnnnnnnnnnnnnnnnnnnnnnnnnnnnnnnnnnnnnnnnnnnnnnnnnnnnnnnnnnnnnncacc

SEQ ID NO: 129444 - DNA, 974 bp, Arabidopsis thaliana
  unsure (1)..(974): unsure at all n locations
atgatcctnnnnnnnnnnnnnnnnnnnnnnnnnnnnnnnnnnnnnnnnnnnnnnnnnnnnnnnnnnnnnnnnnnnnnnnnnnnccacgcgtccgtttttttttttggtcaaagtcttttttagaccccctttatttctaattttcccttaataaaatagtagagagtaaactataaaagcaaacaattaaattcattagcattaaaaacataacaagatctttagaaccacaataatagtttgatactaaataagtaaactcttagagaggtaagtatatataaccaactactactagagaggtaaacaaaacattccttctaaaaactttggatatccaagaacctcgcgtcggaaacaagtggcatctggatgtgctgaacttggaattcgaattcccaagatcgtgatgcgtatggcttgggtttaacggaagtggggccaaattctcaacgtaggaagatataacattaatgttagaggagagacaacgaatctcatctgtacctgaatatatttgaacagcctcttgtgattatcatagaagacaagattcccttgcttagataccgataccggcgtgaaccaccttttttgccatggccaggatacaccacctctatgggctaaacttatggagtaagccttgctccatgtgtaacgcttgctccatcctttttcttctatatccatgctccagatctctagtatccattcaggcccaactttggtcgtcatggccatggctagacggtcctcaaggttcactaattgggtatcttgcgtgacccacgtagccgggaggtggtagacaccattgaacgtttcttggtgaagatccaaggccagtattatgtaactcacactaatttgtaaccagtagattgatccattcacacacaccgatttacttcccactcgcattatatgaggaggtgacatcagtttgctccattcgccagattcaatatcaa

SEQ ID NO: 129445 - DNA, 785 bp, Arabidopsis thaliana
  unsure (1)..(785): unsure at all n locations
aggtctctacgactcactatttggaaagctggcacgcctgcaggtaccggtccggaattcccgggtcgacccacgcgtggcgcccacgcgttcgccagattctctgaaatggtgttttgaggctgcatggatacttgcgctttcttatttcattgcatacttggagactattgctatcgcaaattttccttactatgagtttgtggaccgaagtgccatgtacagagttggatgtcttttctatgccatttacttcattgtgagcttcccaatgttcttcaggatggatgagaaatcaactgatgaatgggatttatctcgagtggctgttgatgctttgggtgctgctatgttggtaacaatcattcttgatctatggcgtctcttcttgggacctatagttcccttaccggagggacaaagctgccttcagtctggattaccatggttctccaattgaagattgaaagatcggttacttccacctattcagggaattgacatgggactgagagagaaacctgcaaaggaatttccattaacactttacggaattgggaagcagttaatgcagggcatgtttctaaggcttttcttctccaactgctgatttgtgtgttagttgtttttggttttcagcttctcttgatgaactttccctaatgtaaccgttcaagttatcctttatagaacagaaaaaaaacaaaaaaggggcggccgctctagaggatccaagcttacgtacgcgtgcatgcgacgtcaaagctctctataggttcacctna

SEQ ID NO: 129446 - DNA, 540 bp, Arabidopsis thaliana
  unsure (1)..(540): unsure at all n locations
cgactcactatttggaaagctgatccgcctgcaggtaccggtccggaattcccgggtcgacccacgcgtgcggacagagcttcatcatccatgtattagtagaaatgtggggatgcttcttcagcagtataagtgttttggatcatcagcagcttctttaattcagagaaaccctttgttttcgtcgttggattcgaaagatgttagctactttaaggagatattaggtgaaaaaaacgtggttgaagataaagaaaggcttgagactgctaatacagattggatgcataagtacaaaggatctagtaagctgatgctcttgcccaaaatacacaagaggtgtctcagatacttgagtactgtgattcgaggcgtttagcagttgttcctcaaggaggaaacactggtcttgttggtggaagtgtgcctgtctttgatgaggtgatcgtcaatgttggtctgatgaacanaatcttatcttttgatgaggttagtggcgtctgggtgtgtgaagcaggatgcttattagaaaatctggca

SEQ ID NO: 129447 - DNA, 799 bp, Arabidopsis thaliana
  unsure (1)..(799): unsure at all n locations
nnnnnnnnnnnnnnnnnnnnnnnnnnnnnnnnnnnnnnnnnnnnnnnnnnnnnnnnnnnnnnnnnnnnnnnnnnccacgcgtccgctcgttgttgagaagaagaacatcttccccactctctcccttcttcttcttcttcttcaactcaaaaaacttctctctctctctctctctctctctgaatcaattaaaaaacggttttgggttcttgtcctctgttctctagaggcttctattattctcattggtggctgttccagctctcttaaggtctccttagtgtgatctcagatctgattggtccgattctatgtttctttttattctggagatactttggtgttgtgcaaccccagacacgagacccagaaaatttcgagtctcaccttccgccatggttgacccacgacacagatgaagagctctctctgttccttgagatgcgtcgtcgcgagaaagaacatagagcagatcctcttttaacaggatctgtgattgttggattcaacgcaacggtgacggctggcgcggcagtgctctctttggngctccgaacggagtcgtctaacgttatcctccaggagaccagtgctgagactttttatattcgagaatgaaaagctgattcgattggctgctacacctccaggccggccgagttcgagacagagtccatagaagtgtaatgatcaggacgatgctcccaattccgacccccggatttantcccggctaggaactgtctgaagattctctcagggacattataagccccagcaagctttctctgagctgact

SEQ ID NO: 129448 - DNA, 204 bp, Arabidopsis thaliana
gcccacgcgtccgataaaatcaatacacgagagcttttctaagaaaggcacaatcgttgcctcgtttcaagagcttttctctctctcttgaagaaaattttcgagatcgagatttagttttctgggtagtgttcttcatcgcaggccaaagtctttatacgatggttcaggagtgagctcgttactcttcgccgtcaacggtgg

SEQ ID NO: 129449 - DNA, 526 bp, Arabidopsis thaliana
cggtcccgaaattccgggtcgacccacgcgtctgggaacgcgtggggtttcggggtaatactttgggaactagcaacattgagattaccatggagaggaatgaacccaatgcaagtagttggagcagttgggttccagaatcggcggcttgagatccccaaggaacttgatcctgtggtgggaaggatcatcctggaatgttggcaaacggatccgaatctgcggccgtcatttgctcagctgacggaagtgctgaagcctttgaaccggcttgtacttcctacaccacaatagatgtcatctgtgtgaatatgtgaaagaaaatttggttaatgtatactatttgacctctggtgctgcgcagagttattatacataagccagcctagaattgaggaatgtaaatgaaatcaatgtacactatactacgttttgatgtaaaaaaaaaaaaaaaaaaaaagggcgcacgctctagaggatccaagcttacgtacgcgtgcaggcgacgtcataactcttctatagt

SEQ ID NO: 129450 - DNA, 1100 bp, Arabidopsis thaliana
  unsure (1)..(1100): unsure at all n locations
nnnnnnnnnnnnnnnnnnnnnnnnnnnnnnnnnnnnnnnnnnnnnnnnnnnnnnnnnnnnnnnnnnnnnnnnnnnnnnnnnnnccacgcgtccgcctctctatctctctctaagtatcagcaaaaaaacagagatttatagagagagaaaaaaactatggctcacataaagatctaacagagacagtagtatagtcccacttccccaccaccaaagcttcgatcatcatcatcatcatcatcatggatccggatccggatcataaccatcgacccaacttccctctccagcttcttgattcttctacctcctcctcttccacttccttagccatcatctctactacttccgaacctaactccgaacctaagaagcctcctcctaaacgaacctctactaaagaccgacacaccaaagtcgaaggccgaggccgtcggatccgtatgcctgccatgtgtgctgcacgtgtctttcagctcacacgtgagcttggtcacaaatccgacggtgaaactattgagtggctactccaacaagcagaaccagcggttatagccgctacagggactggaaccattccggctaacttcacttctttaacatctcacttcgtagctcaagatcttctctctctgctgctcatcctcgtacaactcctagtagctattactttcattcaccacatcagtccatgactcatcatcttcaacatcagcatcaggttcgtcccaagaacgagtcacattcttcgtctcttcttcttacagcttttagatcacaaccaaatgggtactatctagtccattaactgctggatctttacctacagggtcaagagtcctgcaacgggaaccggttttggagtaggtggtgncaacacacaggaatcttttggggttttaaaaattaatccncaataattccgggtgtttttggccgggggatgttttaaaaccccaacaagtgggtggnaggtggcggcggangtgggggncatttnntgnattttgnaggnccattgnttttgtttttggnanctttggtntgggtntgggggggnggngtnnggggggncangccttntgggttntngggttttc

SEQ ID NO: 129451 - DNA, 914 bp, Arabidopsis thaliana
  unsure (1)..(914): unsure at all n locations
nnnnnnnnnnnnnnnnnnnnnnnnnnnnnnnnnnnnnnnnnnnnnnnnnnnnnnnnnnnnnnnnnnnnnnnnnnnnnnnnnnnccacgcgtccgggatgatatatccggccagggtttgattctccgatctgcttgttttcgtgtacccttctttaaagttttaatctttcactcgaattttgagaagctaagctcgattcaagagcaagttcctagcttctgtttagggttttaggacttttgtaggattctggtacagttttcagtatctataggctttgttgtgttctacgtggtgtagatatggagtcttatgtgttcttgttagtgattgttccgacatttgtccttgctgatttgttgataatgtctgatgttgatgagatcccgagtagacatactgtaaaccttttgagatggtgcaatgagattacgcagatccctcatctacggctcaagaacagtctttattcgtttgagttccttcttgataacaagagctggagagcttccgtgcacaggtttcagatgggtaaaacacgttatgctcattacccactatctatctgatgatatcttggctgatgcaggatggcattgcacggcgtatcaacgagtttatattcaagatgaaagcttatagtcattactcattatgataagagtgaggtttgggcatttctttgaaccaagaaacatatgtattgaatgagagcatactaacatttctcaaattattttgccacaatctgaaatgaacacagattagtattgacaattgtatattatagaaatgaaagagttattaagaacctaaannaaaaaaaaaaaaaaaaagggnnnnnnnnnnnnnnnnnnnnnnnnnnnnnnnnnnnnnnnnnnnnnnnnnnnnnnnnnnnnnnnnnnnnnnnnn

SEQ ID NO: 129452 - DNA, 797 bp, Arabidopsis thaliana
  unsure (1)..(797): unsure at all n locations
acgcgcacnnnnnnnnnnnnnnnnnnnnnnnnnnnnnnnnnnnnnnnnnnnnnnnnnnnnnnnnnnnnnnnnnnnnnccacgcgtccggcaagagttttgaagatctgatacagaaattttttctcgggaaaattcagagggaagatcgatactttccacaacggagaaggtgtttcgtttctgctgatcagcagattacttcttctttttctcggattgatccttttggattcttcgaaagatggaccctaataatcagatacaggcaccagttgaaaattatgcaaacccaaggacatgtcttttccatgttctcttcaagggtgctgcgttggcgttttacattctctctgctctcttcttcaacagctttgtcatcatctttgtagtcactgttcttcttgctgctcttgacttctgggtggttaagaatgtcagtgggcgtatactggttggtctcaggtggtggaacgagatcaatgacttgggagaaagtgtctggaaattcgagtctcttgatcaggagtctttggctcggatgaacaagaaagactcatggcttttctggtggacactttaccttgcagcagctgcatggtttatccttggggtattttctctgattagatttcaagcttgactatctgcttgttgttggcgnttgcttgtccctcaatgtggctaatatcatccggcctcacaaagtgcaagaaaggtgcaaagaaacattctcagcagtttgcttcgcagacaatcgcatcacggttcccatcaacagtacaatctggcctcaccc

SEQ ID NO: 129453 - DNA, 457 bp, Arabidopsis thaliana
cgactcactatttggaaagctggtccgcctgcaggtaccggtccggaattcccgggtcgtcccacgcgtgcgttcacgcgtccggacacgtatagatttggttgcagcttcccatctttacttgaagtatgtggtgcagagaccgttaccatagaagacattagctccatgagtcaggattctcagtttggagagattaatcgcatgatatgtgtcatcccaaatagtgcaggagacttatttggccgtttcaagcatctcagtttgttatctagagtgaacgagatggatttagtatgcgccgtcttttccggaatctaccttcgacttcactgataccacccatccgttgtaatttcattctcgtgctctacagatgagacagtggtagcggattctgaagccgaagaggaagaaacaacatcgtctgttcatatgattgatgctactgaaaggc

SEQ ID NO: 129454 - DNA, 644 bp, Arabidopsis thaliana
tctatacgacttacttagggaacagctggtacgcctgcaggtaccggtccggaattcccgggtcgacccacgcgtccggttccatttattaagctctcttcacgctttttaagataattaacagtcacgggttctaaaagctaaagggttttgcttcgaattcaagtgtctcccttcactttctctctctctattgctgctctgtttctgctgtcaattccctaagaaagtcctgatttttagggtgatcgagagaagttgaagaatcatgtttattgagtttccttttttgatccatagggtcatctaattttgctaattttattgtcatctccttcaggtaagggattgttgttgccaatggggtggctaactaaaatccttaaaggttctagccataagttttctgatggacaatgtaatgcgaagatatagagaagatagaaactcggaaggtcctcgttattctgcggaaggatctgattgtgacacagaggagattgaatgtgctattggactttctctttctgaacaagacatggcattgcacaagatgacaaaggaagaaaattatccaagtccaatctgaaaccgaagaagatgacgatgacattgacgatgaggatgagtatacatgaaaccca

SEQ ID NO: 129455 - DNA, 570 bp, Arabidopsis thaliana
  unsure (1)..(570): unsure at all n locations
nnnnnnggggacgagattacaagcaccaatncanctccatcaccattttcaaannctncnnaaaattggctgctttcccccgcgcccgctccagcaccggacctagtcaaaaagtctttcttctcaaatggatcaaaagcctcttggattgctcacgatccacgtcaagagagggattaatctcgccattcgcgaccatcgtagcagcgatccttacatcgttctcaacgtcgccgatcagacattgaagacacgtgtggtgaaaaaaaattgtaacccagtatggaatgaagaaatgactgttagcgttcaaagatcctaatggcccaatccgctcgacagggtccgatcgggacacgttcacaggagatcgacaaagcgggagatgcgaacatagacattcagccatactgagaggctctgaatatggcgatggagctttcgaggctccctactgagggtgctatgactagggttaaaccatcatggcacattcgttaatctgatgacagaagcattggtaggaacagtggtagaatcacccaagacttgagccttagacttaacatt

SEQ ID NO: 129456 - DNA, 1028 bp, Arabidopsis thaliana
  unsure (1)..(1028): unsure at all n locations
aggcnnnnnnnnnnnnnnnnnnnnnnnnnnnnnnnnnnnnnnnnnnnnnnnnnnnnnnnnnnnnnnnnnnnnnnnnnnnnnnccacgcgtccgcggacgcgtgggggacttgaggtcgctgggaggcagcttaaacttgcaccaacctgtccagagggtacaagtttctggccacagttcgcttcagatgatggtgagggggcgtctacctaaatggcttttaataacctatcatcagctcacatggggagacatttcccaggaatattagcttcaacctccattgatggtggatcttttcgaggtatgcacaattctgttgggtcacctatgaactccttcattgaacgtcatcagagtctcgatgttcctattggtttgccaccatcgcaagagtcatctcagctagcaagcctgttggtcttaaggagttgggaaacccatttgataattcgaaaacggggatccaaagtatgccaaatctccatcctcattttcctgattaccttgacaactttgcaagcggtagtccatataaatcctctacgacattctctgaaatggtaagcgatggccaaaaagcaaatgagggctttatgatgagcaatgttcgtggagtgggagtagatggattaatggaggtgcataggatctccataatcaaggatcccatcgtggtaactcaacttatggagtactctaacagccagaacataatcagtcaagtgggatgatggggcctaactaccatctcgcgtaacggggttccctctagcgcatccactgttatgcattctctaaccattgctttaatggaacatggatatcccctgtgcccaccacttgatctgccccggtattaaactcacctttttgggatagaagacaggcatatgtagctgaatctccagaatcttcaggatttcacttaggttctcccggtagcatgggatttcctggctcgtctccctcacatccactggcttttggttctcataaggttttttatcatgtcggtgggaatcgca

SEQ ID NO: 129457 - DNA, 811 bp, Arabidopsis thaliana
  unsure (1)..(811): unsure at all n locations
atgatttnnnnnnnnnnnnnnnnnnnnnnnnnnnnnnnnnnnnnnnnnnnnnnnnnnnnnnnnnnnnnnnnnnnnnnnnnnccacgcgtccgtgcggctgcgagaagacgacagaaggatacggctgcgggaagacgacagaaggatacggctgcgagaagacgacagaaggggaccgaggaagatgatgaagtggtcgatcgttaagagaatccccgtctatggaggttccttcatttctatgaaacatatgatgttagttccagctgatttgagctggagctgctcgttctctggtatgcactctttgataaacactggagaagaagacgaggaagaactcttgaagaagatcgttaaccatagtgaaagtggttcaaagatcatcagcaaaatcgattatacgaatcttgttgagaagtttacaagagatggaaatctctctggagcatatgacttgttacagtctttacaagaaaagaacatatgtttgcctatttcggttttcaagaaccttcttgcagcggcgggtgagctgaacgatatgaaagcttcttgtagaagtcttcagaagaggtctttgatctttgccggggtaaggaaccattgagttcagattgtatctcaaccttgctagagcattcattaacacggatgattgcacgtatttgacgagtctgcttaaagagatatcagagtcttcactttcgtataggttaatagtaatgaacagaatcatctttgcatttgctgaaactagacagatcgattaaggtcttatgatactaaaggagatgaaagagtgggaatg

SEQ ID NO: 129458 - DNA, 656 bp, Arabidopsis thaliana
  unsure (1)..(656): unsure at all n locations
nnnnnnnnnnnnnnnnnnnnnnnnnnnnnnnnnnnnnnnnnnnnnnnnnnnnnnnnnnnnnnnnnnnnnnnnnnnnnnnnnnnnnnnnnnnnnnnnnnnnnnccacgcgtccgtacgcatgcgagaagacgacagaaggggcccgattcgagagtagcaatggggattctatcatggttcacgggaagtcctaagccatcacagtccgagacgtctaagccggagatgattcagatgccgaaatcagaaactccagccccggggatgaatggagccatagaagttcctcggcccgatcgcgcgacggttttcgagttcggctccgttgctgctactggagacagagtcactctcgctggttactgtcccgtttccgatgatctcgaaccttgccgttgggagattcttcccgccgacggcaaagacgctccacagtttcgcgtcgtcttctgaggaatcagtcaataatctgtagaagatgtaaacttgttcaatctcgtcgttgataattgtatttggtctggtaatgtcatctctttcatttgaaatcggaaaaaaaaaaaaaaaaaaaaaaaaaaaannnnnnnnnnnnnnnnnnnnnnnnnnnnnnnnnnnnnnnnnnnnnnnnnnnnnnnnnnnnnnnnnnnngttcaatt

SEQ ID NO: 129459 - DNA, 428 bp, Arabidopsis thaliana
gcgtttcactgctgttgagctcttaaataatggtgctaaggtttaccaatgtgaaagatgcaagcagaaagttaaggctaagggacagctaactgtttctaaagcaccttacgttctaaccgtacatctgaagcggtttgaagcacacagatccgaaaaaatcgataggaaagtagattttacctctgcaattgacatgaaacctttcgtcagaggtcctcatgaaggtaatttgaagtatactctatatggcgtgttagttcattatggtcgaagcagccattctggtcactacgcctgctttgttcgcacatcaagtggcatgtggtattcccttgatgacaacagggttgtccaagttagtgagaagactgtgttcaatcaaaaggcatatatgctattctatgttcgggatagacaaaatgctg

SEQ ID NO: 129460 - DNA, 429 bp, Arabidopsis thaliana
  unsure (1)..(429): unsure at all n locations
atgatacannnnnnnnnnnnnnnnnnnnnnnnnnnnnnnnnnnnnnnnnnnnnnnnnnnnnnnnnnnnnnnnnnnnnnnnnngccacgcgtccgcccacgcgtccgcggacgcgtgggctttaactggtggaatgctggtctatgcgctggtattttaaccgcggtgactgtaattgtctatatcgaagaccggattggttggggtgtggctagcatcatactcacaatagttatggggctacttcgttttttatcttccgcatcggcaaaccgttttaccggtattagagcaccttctggtagcccattgaccccaatgttgcaagtctttgtcgccgcctttgccaaaagaaatcttccttggcccagtgatgcttctcttcttcatgagttaactaatgaagaggatactaaagggccggttcttt

SEQ ID NO: 129461 - DNA, 630 bp, Arabidopsis thaliana
  unsure (1)..(630): unsure at all n locations
taggtgcacactatagaagagtctatgacgtcgcatgcacgcgtacgtaagctcggaattcggctcgagctcgagccgttcagtgttctcttcttctccactaattcagatcacattcaagaatcttcttcactcacatctctgaaaaaatggcgagcaacatggaagttttctgcgagatcttaatcgcgatccttcttccacctcttggagtttgtctcaaacgtggctgttgcactgtagagttcttgatttgcttggtgctgacaatcttaggatacatcccagggataatttatgcactatacgtgatcgtgtttcaaaaccgtgaaggctctaccgaacttggagctccacttaactcagcttgatctgttttggtccattacacggatcaatatgttgttgaaactgttttacttatcatgtaccaaataataagttgctttgcaatttttatgtattgaagatttgagaacattgtcgcgttattgatacaaaaaaaaaaaaaaataaaggnnnnnnnnnnnnnnnnnnnnnnnnnnnnnnnnnnnnnnnnnnnnnnnnnnnnnnnnnnnnnnnnnnnnnnnnnnnnnnnnnnnnnnnnnnnnnnnnnnnnnnnnnnnnnnn

SEQ ID NO: 129462 - DNA, 833 bp, Arabidopsis thaliana
  unsure (1)..(833): unsure at all n locations
gnnnnnnnnnnnnnnnnnnnnnnnnnnnnnnnnnnnnnnnnnnnnnnnnnnnnnnnnnnnnnnnnnnnnnnnnnnnnnnggtacgcctgcaggtaccggtccggatccccagggcgacccacccgtccgcccacgcgtccggtttacagggattggtattggtaaagaagatgattggatcgttgtagtcctcactaccaacacaccagaaggaagctattctacagctactcctacaaaacaagagtctaagtggcttcacctttgggattggtctcgttagttatttagtcattttcatgtactcttcctttggtttctttctcttttgagatatcaaatgttttgatgagttatcaaacactctttcctttagactatcaagaataaattctgtttagaaaagaaaaacatggaacaagagattgtaattagttacagccgaaaggaggccaccaggaagggcggccgatctcaaggatcccagctaacgtacacgagcaggaaacgtgaaggttttctataaggaacctagatcaaatcgctgcccgtggatgtacacgtggggaccgggaaaaccttgacgggccaaataaatagacgtggaaaagaccacctttgaccgcgggggatataacaaagaaggccgcccggtccgcactccaacaaggggacaacctaaaagggaaggagccgccccgaaccggccctttaagaaaaaggagggagggggccccaaagaaaacccgaacataccggggagccagagacaggcgtaaactgaataaaatattataaaaagcaagaaaggaataaacgataacgtaaagacg

SEQ ID NO: 129463 - DNA, 810 bp, Arabidopsis thaliana
  unsure (1)..(810): unsure at all n locations
nnnnnnnnnnnnnnnnnnnnnnnnnnnnnnnnnnnnnnnnnnnnnnnnnnnnnnnnnnnnnnnnnnnnnnnnnnnccacgcgtccggttcaaagatttctttgtaaagttggaggactatatggcctgcttcaagttggtatcacccgaatcaaaattcgagatggcagtgaaatcggataagctcttcacggctatgatttcattggatggtactaaaggcggatcagtggattcgtggaggatgcttgatggtatgttgtcaatgggaaaagttttggttgatatcaagaagagcggttccaaggagataacttttgaacagagaagagatctgatcagctctatggtgaaatgggctagagctatcggcctattcgtgaaggcggcctctgagcgtaaaggaaaatctattgatctagcaccttttggaattgattatgaaaacaatgtcggaaatggaaaaggtaactttagaaccggccctgttctcatagacgacggcagcgagctctaatcttccaacgaaaaaggctcccaagtaaacaagaaatatgtaacaatatatggagacagccctgctttgttaaacagcagcgtgctgtagaacatttttggttattgtaaaaactatattaatcatattactaaaataaaattattacaaatcttaactcgttaaaaaaaaaaaaagagggcggccgctctagaggatccaagcttacgtacgcgtgcatgcgacgtcatagtaatctatagttcgtctcaatnnnnnnnnnnnnnnnnnnnnnnnnnnnnnnnnnnnnnnnnn

SEQ ID NO: 129464 - DNA, 540 bp, Arabidopsis thaliana
  unsure (1)..(540): unsure at all n locations
atgannnnnnnnnnnnnnnnnnnnnnnnnnnnnnnnnnnnnnnnnnnnnnnnnnnnnnnnnnnnnnnnnnnnnnnnnnnnccacgcgtccgagcgaatctcagatccaaaattttgcaaaatcctcagatcgtcttaccttctccgaatcgatcgatttttcatggaggacgacgacgagattcagtcaattccatctccgggagattcttccctttcaccacaagctcctccttctccgccgattttgccaacaaacgacgtgacggtggccgtcgtgaagaaaccacaaccggggctttcttctcaatctccgtccatgaacgctttagcgttagtgggtcatactccttctgtaaccggtggtggtggtagcggaaacagaaacggacgaggaggaggaggaggatccggtggtggtggagggaggaagagatgatttgttgaacnaangaagctacaataggttcttatcgaagcttgggggagatcgattcttctgaccaggctaaggaactgtgaaccaacacatatgaaagag

SEQ ID NO: 129465 - DNA, 862 bp, Arabidopsis thaliana
  unsure (1)..(862): unsure at all n locations
nnnnnnnnnnnnnnnnnnnnnnnnnnnnnnnnnnnnnnnnnnnnnnnnnnnnnnnnnnnnnnnnnnnnnnnnnnnnnccacgcgtccgcccacgcgtccgactttcttctctcttctcaaaaacccttccctcttcgtctccaaacaacaacaaacacaacaacaacaaaaatcttacaagaagatcatttttagaaaccctattaggataaaatggattacgaggcatcaagaatcgtcgaaatggtagaagatgaagaacatatagatctaccaccaggattcagatttcaccctactgatgaagaactcataactcactacctcaaaccaaaggttttcaacactttcttctctgctactgccattggtgaagttgatctcaacaagattgagccttgggacttaccatggaaggctaagatgggagaaaaagaatggtatttcttctgtgtgagagaccggaaatacccgaccggtttaaggacaaaccgggcgacagaagccggttattggaaagccacaggataagacaaagagatattcaagggaaaatcacttgtgggtatgaagaaaactttggttgtctataaaggaagagctcctaaaggagttaaaaccaattgggttatgcatgaatatcgtttagaaagcaaatattgtattgaaaatcttccccaaacagctaagaacgaatgggttatantgtcgtgtnttccaaaaacgtgccgatggtacaaaggttncaatgtcaatgcttgatccacacattaaccgaatggaaccagccggtttaccttcgttaatggattgttctcaacgagacttcttcaccggttcgtcgtctcacgtgacctgcttc

SEQ ID NO: 129466 - DNA, 591 bp, Arabidopsis thaliana
  unsure (1)..(591): unsure at all n locations
tgagatcaatgaacaaactgagaacatgaaacagatccaagaagcattgtcggctccatttggggctaatgattttgatgaggatgaattggaagcagaacttgacgaactagaaggcgctgagctagaagagcaacttcttcagcctgttccaatccatgtgcctcaaggaaacaagcctgctcgtgctccagctcagaagcaacctactgctgaggaagatgaactcgctgccttacaagctgagatggctctctaagctgaagctagccttggaagatttcgattaagtggggagatttgtgtgtgcattatctaaaaacagaaagaaaagattttatgtatataaggatccgagtctaattgatcggaagattttttttttctttttcaatataattaacttattaaactgcatttgaatgtttcttttacatttgtgtcagctctttatgacactttcttgtgggttacgacttggcactttctgttcttaaaaaaaaaaaaaaaaaaaagggcggcagctctagaggatccaagcttacgtacgcgtgcaggtgacctcatngatcttctatagnnnnnnnnnnn

SEQ ID NO: 129467 - DNA, 1047 bp, Arabidopsis thaliana
  unsure (1)..(1047): unsure at all n locations
ccgccacctctaatcgactcacttagggaaagctggtacgcctgcaggtaccggtccggaattcccgggtcgacccacgcgtccgcccacgcgtccgtagacccagagagagagagagagagagagagagagatcagtaacgagagagtcaaagagaggagatttcagtgaagatgaaggagatgcaggcaatagagacgtcgcagccgacgacggtggctccggcggtgcatagccgacaattgggagctcagttgtcgggaagtatgagtttcagcagccaaatgtcgaaggaagatgaggagatgtctagaactgcgttatctgcgtttagagcgaaagaagaagagatcgagaagaagaagatggagattagggaaagggttcaagctcagcttggtcgtgtcgaagaagagactaagcgtcttgctttgatccgtgaggaacttgaaggattagctgatcccatgaggaaagaagttgctatggttaggaagaagattgattctgtcaacaaagaattaaagccattgggccatacagttcagataaaggaacgagagtacaaagaagctcttgaagcattcaacgaaaagaacagggagaaggtgcagctaatcaccaggctaatggagttggtgggagaaagcgaaaagatgagaatgaagaagctggaagagctaagcaagaacatagattctatacactgactttgaatccaagacagtacaagaacttcttgggccagagatcattctctgagtggtttaactctacgtttagggttggtggtgggggatggaatttatattttataatcgtgcgggtgtatattactactacaattattatctcttgtaagggggttcttggggaatttataagtcgtattgtggtttttttatggaagtaacttcaaaaaatacttatcaagaacagggttgtactaaacgcttcttcttctttcctctaactatcttctctcttatggcccncnttaattggccctttcnaatgnntttttancttaacccccnttttaaacct

SEQ ID NO: 129468 - DNA, 1403 bp, Arabidopsis thaliana
  unsure (1)..(1403): unsure at all n locations
aacaaaagcggaacctccaccggggtggcggccgctttagaactagaggatcccccgggctgttttttattttgggccgcattttgatagataatgtcagaatgtgcaggacgctcatgcctggagatgaagaaactatgagtgatgaagccatatgggaaacacttcctcatttctgggtttccatatctatggttttcttcattgccgcaacaaccttcccacgcgtccgattatgtggtgacgtagctgcgttgggatggtgggacttatttataaacttcggaatagcagagtgctttgcgtttcttgtctgtacaaagtggagcaatcagtcaattcataggtattcacatataccggaacctagctcatcttcaatggtagtaagatatctggattggaacagaggtctagtagtaaccgctgacgacgagcatcagcaaagcaacagaatatgtggtctccaagatattggtggacatgttatgaaaattccatttgtgacctttcaaatcatccttttcatgcgcttagagggaacgccagcttctgccaaaaacattccgattttagttctgtttgtacctctttttctgttacaaggagctggggtactttttgctatgtatagattggttgagaaatcagtcttattaataaatagtggtagtggttcttatggaagatattttaccgcaacatcatcagctcgtgaattcctgggattctttcaacatggtgcaagattacttggctggtggtctatcgatgaaggaagtcgggaagaaccaagcaggctctactctggagaagctactggatacaacaccttctcaccagaggttgtgaagaaaatgccaaagtctgatcttgttgaaggatatggagacttcaagctgcattgagtgagcaaacagatatcaccagttatagccagcaagagtacgaaaggcttcaaaacgagaagattctttgtagagtttgctttgaagatccgatcaacgtggttctactcccatgtagacatcacgtcctctgcagtacatgctgcgagaaatgcaagaaatgtccgatttgtcgtgtcctgatcgaggagcgtatgcctgtattcgatgtgtagatttcagagctccaatccagaaatgaagaacccatttcttgcttgtttggttttgttttagtaatgaagcaagccctatatatatatatgttacaccttgcataggaaaaattctgattcgttttcgagtggatgtaaataattctgtaaaccatcgcatatgtcatgaatcttctttctctcaaaaaaaaaaaaaaagnnnnnnnnnnnnnnnnnnnnnnnnnnnnnnnnnnnnnnnnnnnnnnnnnnnnnnnnnnnnnnnnnnnnnnnnnnnnnnncg

SEQ ID NO: 129469 - DNA, 550 bp, Arabidopsis thaliana
aggtctctacgactcactatatggaaagctggtccgcctgcaggtaccggtccggaattcccgggtcgacccacgcgtggggctcctctcaccatttcttcttcttcttctctctaaaagaaaagagacttcaccgattcttttttattattccttcccagattttctcgggaaattaattcttttcctcctctttcttctcacttgttgttgttccttaacactctcttcctagatctactattaactgatttcatttcacgactaaaccatcgaagtcttcggcaagatatggatttgtttctgttctattaaacttgtttcaatcgagaagtaaaaaagaatccgattccacagatggaactatgtgctgtggatcagaccgattaaaccagatcgtgtcatcaagatcttcgttgccaatttctttcgaggaagataacaatcttgttaccaacacagacatgaatcacttaacagtcgaaacagaggatacgtttgcgagcttgcttgagcttgcagctaacaacgatgttgaaggtgtaaggct

SEQ ID NO: 129470 - DNA, 544 bp, Arabidopsis thaliana
agctctctacgacttcacttattgggaaggctggcccgcctgcaggtaccggtccggaattcccgggtcgacccacgcgtgcggcaggagccgccagtttctcggagatcctcgagattgaagaacgctacaccagtttcctacgcagaggaacctgaactgaagaagggtaaagtgtctaaagaagagattgttttgtgggtaggagaaggcgtaaggccagagatttacactgaggagcatgagaaactgttaggtaacacagaacgaacttgggagctttttgttgatggttgtgacaaaaatgggaaacggatttatgaccctgttagaggaaagtgttgccaccagtgcaggcagaagacgctaggttatcatacccaatgcagccagtgtaaccattctgttcgaggtcaattctgtggagattgtttatacatgagatatggagaaacatgttcttgaagctctggacaatcccgactggatttgtccagtctgtcgcgatatctgcaactggcagtttctgtcgtacaaaaaaagg

SEQ ID NO: 129471 - DNA, 431 bp, Arabidopsis thaliana
acgcacacgcgtccgccagagatctttctctctctctcatccaaagacttcacgagtccccaaagaaaaaaaagaacctattcccaaagatgaagaacaataacaacaaatcttcttcttcttctagctatgattcttctttgtctccttcttcttcatcctcctcccaccagaactggctctctttctctctctccaacaacaacaacaacttcaattcttcctcaaaccctaatctcacttcctccacatcagatcatcatcatcctcacccttctcacctctctctctttcaagctttctccacttctccagtcgaacggcaagatgggtcaccgggagtttcacccagcgatgccacggcggttctttccgtttaccccggcggtcctaaacttgagaacttcctcggcggaggagcctcaacgacg

SEQ ID NO: 129472 - DNA, 767 bp, Arabidopsis thaliana
  unsure (1)..(767): unsure at all n locations
atgatctnnnnnnnnnnnnnnnnnnnnnnnnnnnnnnnnnnnnnnnnnnnnnnnnnnnnnnnnnnnnnnnnnnnnnnnnnnnccacgcgtccgcggacgcgtgggtgaagaggcagagaacaagagacgtgttgatgatagatgatactatgaaagatgttccagaaccagaagatggcattgatgagaaagtctctcaggaatcttcaaagcctggagatgcgagtgaagaaactaatgaattggatgcagagcagaaaacacccacgttagagaccgccattgaagaaagatgtaaagatgaggctgacgaatacattgctctgaaagctctcactgaagcttttgaggatgtcggacatttctccgcacctgaagcctctttttcctttgctgatttaggaaaccctgtcatgggactggcagactttctagtgagattgagcagatctgatgttgctactgcgtcagctcgggcttacattatatctcttcacagcagttctgggatgctgctggccacacgacattgttgtattctggatgatccacncgacgagcagagggatccaacctaactacagagttcgcaggctgatgcagaggggaatgatgataattcccatagagatgatcaggcagaccaataaggcagcattgcagaagaggtctccttacattcagagataggggaatgccagatactgattcaggcaaagaatctcaggattcaagtctctgaagaagagacactccggtctcgaact

SEQ ID NO: 129473 - DNA, 840 bp, Arabidopsis thaliana
  unsure (1)..(840): unsure at all n locations
nnnnnnnnnnnnnnnnnnnnnnnnnnnnnnnnnnnnnnnnnnnnnnnnnnnnnnnnnnnnnnnnnnnnnnnnnnnnnnnnnnnccacgcgtccgcagatcttccttcttcttcctcttcctcttcttcttccttaaaccctacaagcttctactctattgacaatttgattccgagtttacatcgataatggcggaccaaacctccgattcaacatctcccgtggctcctctctccgtatcttctcctactgctactaagaaagataataccaatcctgttgattcgaagctcacggaattgaatgaatcaagggctgagttactaaacaggatccagaatctgaaacaggacttgcaaagttggagaggtaaattggacactcaagttaaagtctaccgtgaggagctctctgggctaaagaagactctgaatcttgaagttgagcagcttcgtgaggtatgaattcaaagatctgaaaactaccttgaatcaacagcaagatgatgtttccgctagcctgaaaagcttaggcctacaagattcaaaagagcaaattgataagagaagtgaggtgacagaagagaaagtggaagctctatcgactgatgataatgccaaagaagcagaacattagataatatgaaattgtttgttcttatgatattctcgccactactgttaccactaccttgagattgtactagtatgcttaatatgtagttccgcggtttagttgaaaaaaaaaaaaaaaaaagnnnnnnnnnnnnnnnnnnnnnnnnnnnnnnnnnnnnnnnnnnnnnnnnnnnnnnnnnnnnnnnnnnnnnnnnnnnagaaaacg

SEQ ID NO: 129474 - DNA, 688 bp, Arabidopsis thaliana
ccctaatacgactctcttagggaaacctggtacgcctgcaggtaccggtccggaattctccgggtcgacccacgcgtccgaagaaacagagagagactaatggcgcaaaaaccacgaacggtgatctgcgtcggagacatccatggatacatatcaaagctcaataacctctggcttaatctccaatctgccatcgacccatcagatttcagctcagctctcgtcatattccttggcgattactgcgatcgtggaccggagactcgaaaagtcatcgatttcttaatctctctgccggagaaacatcccgatcaaactcatgtctttctcgccgggaaccatgactttgccttctctgggttcttaggtttgttgcctcgtccttcagatggatctgatttgaaggatacgtggaaggagtactcaaaaagtgaggagacagaaggatggtatacaggtgaagggttcgaagatatgcatcttcaaggtagaagatggcctggtaaaattaaggcttacgttcatttctgtgaaagggatggcttataaaggatcgatttacaatggctgaatcgacttttgaatcttatggcgttccacatggtcttctgatttgatgaaggcagtacctgagagtcacaggaagtccttgaccaatatggtatgggttcatgaagaggacgatgtt

SEQ ID NO: 129475 - DNA, 390 bp, Arabidopsis thaliana
ttttcgcgattattatcgagacaaagcatcaaagactgcattgatgcaaagaacaatataactacatttgacaacatctcttttaaaacagatagcagtaggcgaagatacatatccggggagatagcaaaactcggtaaagggaacatcagtgctcatatttttacattcagagagctttgcgtcgctaccaagaacttcaaccccgataatcagctcggtgaaggcgggtttggaagggtttacaaagggcagatagaaaccccggaacaagttgttgcggttaagcagctagacaggaatggttaccaagggaacagagagtttcttgtggaagtcatgatgttgagtctcttacatcatcagaaccttgtcaatttggtcggatat

SEQ ID NO: 129476 - DNA, 521 bp, Arabidopsis thaliana
  unsure (1)..(521): unsure at all n locations
atgcnnnnnnnnnnnnnnnnnnnnnnnnnnnnnnnnnnnnnnnnnnnnnnnnnnnnnnnnnnnnnnnnnnnnnnnnnnnnnnccacgcgtccgatccctcccatttttcaaaccactctctctttctctttctctaagtctttaacaatggcgcgccttctcttccgtcttctccaagaagccaattctacatctccggctgaagcttctccgcctttcaactccgacctcgtcctcatccttgcggttcttctttgtgcactgacatgtatcatcggcttaatagccgtctctcgatgcgcttggctccgccgtatcgcctcaagaaacagatcggatcaaactcatccaccgccggtagctgcagccaacaaaggattgaaaaagaaagtcctccggtcgttaccgaaactcacctactcgccggattctccgccggcggagaaactcgtggagtgtgctatctgtttaacggaattcgccgccggagacgagcttaaggtgttgccgcagtgtggaca

SEQ ID NO: 129477 - DNA, 741 bp, Arabidopsis thaliana
atgcttacgcggagctctatacgacttacttagggaacgctggtacgcctgcaggtaccggtccggaattcccgggtcgacccacgcgtccgcttttctttctttctttttttgctccacagctcttcccattgtaagttttgttttccaaactaatcctttcaatccaaaaaccatgggagcctgtgcgagcaaacctaaggaatctgacatcgtcgaaggctctgtctcgaccgaaaatgctgttgttgagtccaagaatgccgcgaccgagacagatgccacattaactcaggagaagaaggaagagtccattgaagagccaaagaaggaaggtgagacaaaagaggactcctctgaggcaaccaaggctgagccaactccagaagctgtgaaggcagaaaaaaaaacatcttctgagactgagccaccagcacaagagacccacacctgctgctaaaaccgatgaggcccctctcgtgatcctttgattttcatttcatcaaatctcaaaatcatgagtatgtgcaagtgcaagtgtttctcacattgttattcgtatgttcatctctgttctattgtcaatatgtacaatacccatgtacattctgttgtgcccgcctctagtaaattatgattaacgaaaaaaaaaaaaaaagggcggccgctatagaggatccaagcttacgtacgcgtgcatgggacgtcatagtaatctatagtgtcgcctaatgtaaatcg

SEQ ID NO: 129478 - DNA, 715 bp, Arabidopsis thaliana
  unsure (1)..(715): unsure at all n locations
ccncagcactaatcgactcacttagggaaagctcggtcgcctgcaggtaccggtccggaattcccgggtcgacccacgcgtccgcccacgcgtccgcccacgcgtccggatgttttgaaagagttagctgggaaagtttctgctgaatacgactttatggatgatgtctcagatatttctctggaagaagttgttgaggatgatgatgtagaaacatcagaaacacaaaagtccaagacagatgatgaaaccgacacatctgcttatggaacagcatatgttgcatttggagggggtgaaaggggaaaggaggcatgtcatgctattgcctcattatgtgaagtttgctctatagactctttgatctcaaattttattcttccgttacagggaagtaatgtatcaggcaaagatggtcgcgtccattgctcccttaatatcaatacagaaactgggcgcttatcagctagaaggccaaatttgcagaaccaacctgcattggagaaggatcggtacaagattcgataaggcctttgtagcatcgcctggaaatacacttgttgtggctgagtatcggcaggtggaacttagaattctcgcacatcttactcggtcgaataagcatgatgcaagctcttatagctggcggcgatttccactcgcggacagccatcatatctgtatccacatgttcgtgatgctgtagataatgggc

SEQ ID NO: 129479 - DNA, 866 bp, Arabidopsis thaliana
  unsure (1)..(866): unsure at all n locations
atgatactccagcactantcgactcactatagggaaagctcggtcgcctgcaggtaccggtccggaattcccgggtcgacccacgcgtccggccattttttttctaaactccgaatcccaaaattgttgccttccttcgtctccgatcattttcgtggtgtctgtaaccccaattacaattcgaatccattagcgaaagaaagagacttcctttgaaagagaagagtctcgttggctcggttttctgttcaaatcagcggatttcctcacatttaattgttcaatcatggcggctaccaatgtcatgcggcgagacgagagccttcttattgatccccaaagaggagatacaagtgtttctcgtggcctctcgcttgagaagaaaattgaggcccttgagagcctggccggacaagttagtaacaggcgatctcggagatggttaaatgatcgtattctgatggaacttgttcctcgtttggatgcccaagaaatcagagggcttgtttggctccaccaccgtggggtgatgatgtcccaccctcagcattttctttgactaatggttggagaatgggacaaatttagaaacatagacatggacaaggaggccaacatcatggattccttgataggtcatccgtaaggcagacaggtagcgtggacggtgataaatcgctgcttaaatcttggagaagatagattgaggacanagatgctttcacgtagtntnaccagactaatcagggattggagctgttaagcactcatcggganggggtgaagagatgtcttggctcaggtcagaccatncatnattgtttacacgtgttgtagatacaattggataacactgcacgacagat

SEQ ID NO: 129480 - DNA, 802 bp, Arabidopsis thaliana
  unsure (1)..(802): unsure at all n locations
gtccgatgaatccaccttccaggcattgcgccaccacgagtcgcagaggccgacataccttttttgactatgtacaaagctgacttttgaacaagacagcgaagaggagctccattggtcccctgtatgtcaccgagaggcggaggatgggtaccttgtaaatttactatagacgtgtgaagaattattagctcaagaccgtctcgccgttagtttgtcaacaataagtaggatttagccctttaatgcgtttcagagantccgctagcacttttttcaggtaaggttaatcccatcaatgaatcctttccacggggttgtgagcacccaattggtttcacacgtccacgagacagataggagatagcactccagcccagcgctcaatgcaaaacagtgcgattcacgggagaacccagcatcagccgaggagcattctttagaatgcaaaggaaggaccttggtaccaacacatacaccccattggtagctgggttctgttatcaatatcagcgccaatttaaacgcctatatatcagcaaaaagatctcaagactctctctctctctctctgccctttgaaaattacccctatgtggcctcttgtaagcttgtatttgtatcctcaatttatacggttttatattaaagaacgagatagacaatacattttattgagtgctgattgtgaattttgaatctttagagttatattttaaaaaaaaaaaaaaaaaaagnnnnnnnnnnnnnnnnnnnnnnnnnnnnnnnnnnnnnnnnnnnnnnnnnnnnnnnnnnnnnnnnn

SEQ ID NO: 129481 - DNA, 1133 bp, Arabidopsis thaliana
acggtatcgttaagctagatatcgaattcgcggccgcttgaaagagaagagtctcgttggctcggttttctgtttatatcagcggatttcctcacatttaattgttcaatcatggcggctaccaatgtcatgcggcgagacgagagccttcttattgatccccaaagaggagatacaagtgtttctcgtggcctctcgcttgagaagaaaattgaggcccttgagagcctggccggacaagttagtaacaggcgatctcggagatggttaaatgatcgtattctgatggaacttgttcctcgtttggatgcccaagaaatcagaggcttgtttgctccaccaccgtggggtgatgatgtcccaccctcagcattttctttgactaatgttggagaatgggacaaatttagaaacatagacatggacaaggaggccaacatcatggattccttgaataggtcatccgtaaggcagaaaggtagcgtggacggtgataaaatcgctgtcttaaatgcttggagaagaatagattgtaggacaagagatgctcttcgacgtagctttttaccagaactaatcgagggatatgagagctgtataagtcacttcatcgaggaaggtggtgaaggagatgttcttgagctcaaggttcaagacccattccatagattgcttttacacggtgtttgtgagtatcaccaatttggtatcaacaactgcaacagaacagataggaaggatagcaatgaagacaacgagcatcaaatggaagaagagtggcgattcaggggagaaaccaagcatcagcctagcgcatttccttaggatgtcaaaggaaggagcttggtaacaacacatacactcctttgtagctgtggttttttatgaatatcagcgccaatttaaagggctatttatgcagcaaaaagatctcaagactctctctctctctctttggcctttgctacttccccctatgtggcctcttgtaagcttgtatttgtatcctcaatttatacggttttatgattaaagaacgagagcggccgcgaattcaaacagcccgggggatccactagttctagagcggccgccaccgcggtggagctccagctaatgttacactgagtgag

SEQ ID NO: 129482 - DNA, 847 bp, Arabidopsis thaliana
  unsure (1)..(847): unsure at all n locations
nnnnnnnnnnnnnnnnnnnnnnnnnnnnnnnnnnnnnnnnnnnnnnnnnnnnnnnnnnnnnnnnnnnnnnnnnnnnccacgcgtccgcccacgcgtccggagagaagcgtaagtcttgccggagagtcgagtgagctgaatggttggtactcaccattttccttcagtaattttctcagagagagctctttaatcgggaaaaatcttcaaatgcgtctggttttgttctctttttaatttttttcttgtgatttcattcatggagattgcaatttcgtataaaccgaatccgcttatctcttcatcgactcagttgttgaaaagatcaaaaagttttggtcttgttcggtttcccgccaagtatggactgggagctacccggaaaaaacagctctttcgagtctatgcgtctgaaagtagtagtgggtcttcatctaatagcgatggaggcttttcgtgggtgagattggctcagtctattcgccttggtgccgagcggattggggagaagattggagaatctgtgaagacaganattgggtttgactcggaagaagcaagtgggagagtgaatgagtatgtggctcgagttaaggatagtgtgcacaagggccatcacgagctgactcgctntaagattgagacagtgcccttcgttattgattggaacaagggggagcattggaaggacatcaggaattgggacggttaacgagttgctcgcttgtcatatatgcttttgcgctgttactttcttgtcaagagtttatgttgccatccaagctcctcgggtagaacgagagagaagagagttaacagagtcctttatggaggctttgatccccga

SEQ ID NO: 129483 - DNA, 1318 bp, Arabidopsis thaliana
  unsure (1)..(1318): unsure at all n locations
atgannnnnnnnnnnnnnnnnnnnnnnnnnnnnnnnnnnnnnnnnnnnnnnnnnnnnnnnnnnnnnnnnnnnnnnnnnnnnnccacgcgtccgagagtcaccatttctgatttcaccgctaaaccctaattcgacagccaatggatatagatgggtcgataagtgccatggattcttacataacacggttctcgttgcggcttctctcttcttcgtcgcttacttagcttacgaagcgaagaagagtctgtctaaactctcgaatcggagatcttatatcatgattgcttattatggttgtctttggcttgttagcttgctcaatcttgcttggtgctgtctccagggttgggaatgtactcctgggaaagaagttgtttggaatctgttaactttgttcacaacatctgggaatgttgtttctggaagtaagcttggtggcttttctcttccaaggaaactatgcaaggcggtgcagaagcattaactagaacgttcctaatctcggggtttattgttgctcttgatttgcttctcaaggcaattnttctctttggatttggagtgccattgtttattgacaacaatgaaaatggaaaaacgttcaaatggggcttatggatcattcataagccttcactcacttggcgttatgggatggggttcttgatgacaactctaggtggagagaaaaattgcctgcaaggcctgcattctaccactacataatcatcatgttcgccttatacagcctttacctagttgcatctgcgtttaccgcaaacaacgcgcattttggtttctggttatatgggatcatgagtgtttgctaccacgcattataccttcctcttctttacataacgttcctcgcagactttttccaggaagaagatttgaacttggagaatgtatactactcagagatgaaggatgctggatttttcgactctgattgggaataggactagggtaacaaacatcttcctcattttctcaatctgtaaatacacgttgggtaggatctcctagaagtcatggctgctttttccggctttggcgggttacattttagggtctagtcctctcgtatgtctgtactttttcctcatgtttctttctcttttataaatccaaaatgtcttgtgaatctctttgttccttaagctgataatctaaaagaaagttttgtagtgaaaaaaaaaaaaaaaaaaaaaaagaaaaaaaaaaaaccaaggccggccgctctagaggatccaagcttacgtacgcgtgcatgcggcgtcatagctcatctatagttcgcctcaattagtcg

SEQ ID NO: 129484 - DNA, 744 bp, Arabidopsis thaliana
  unsure (1)..(744): unsure at all n locations
nnnnnnnnnnnnnnnnnnnnacgactcactattgggaaagctggcacgcctgcaggtaccggtccggaattcccgggtcgacccacgcgtgcgggtaaatgtaacggaccatactctgaagattggtttgcgatgggctggcaaagggacaacaggcattccgattagaggggtatatggtcctatgatttcagctatatctgtggaacccaatttcaaacctccggtatattatgacacaaaggatatcatactaaaagtgggggtacctgtcgctgcagcaacacttcttttgtttatcatagtgggtgtattctggaaaaaaaggcgtgacaaaaatgatattgacaaagagctaaggggtctagatcttcaaactggaacttttactctacggcagataaaagcagccactgataatttcgatgtaacaagaaagattggtgaaggtggatttggctctgtttacaagggtgaattatctgaggggaaattaattgcagttaaacaactgtctgcaaaatcgaggcagggaaatcgcgagtttgtaaatgagataggaatgatctcagctcttcaacatccgaatcttgtgaagctatatggatgttgtgttgaaggaaaccaagtgatctaggtggttgaggacgtgtagaacaactgggtatgtggagcgttatttgtaaaggatgatagtttttagacttatactagacttggtaataatggtaacatattttcatt

SEQ ID NO: 129485 - DNA, 982 bp, Arabidopsis thaliana
  unsure (1)..(982): unsure at all n locations
ctttgcagtaccggtccggaattcccgggtcgacccccccgtccgagaaactctctgaagtgaatccaatgcttggtttccgcggttgcaggctcggaatatcgtatccagagctaacggagatgcaagcgcgtgcaatttttgaagctgcagcgtcaatgcaggaccaaggtgttactgtcattcctgagattatggttccacttgtaggaactcctcaggaattgggtcaccaagttgatgtaattcgtaaagttgcaaagaaagtatttgctgagaagggtcataccgtgagctacaaggttgggacaatgattgagatccctcgagccgcgctcattgcagatgagattgcgaaagaggcggagtttttctcgttcgggacaaacgacttgacgcagatgacgtttggatacagtagagacgatgtcggcaagtttctaccgatttacctcgccaaaggaatcttacagcacgacccttttgaggttcttgatcagcaaggtgtagggcaattgatcaagatggcgacagaaaaaggacgagcagctaggcctagcctcaaggttgggatatgtggagaacatggaggagatccatcttctgtgggattctttgctgaagcaggacttgactatgtctcttgttctcctttcagggttccaattgcaaggcttgcagctgctcaagtagttgttgcatgatgaagaaaaaacttggtggtgttattctgtgaataaaaaagctttggtttctattccataaaaatgaacaaaatcaaagatattggatttaactatttttgtttccttctaaagaatgtagaatataaagccttcatgtaataattgaattgctaataaaataaaaaccattgtttttnnnnnnnnnnnnnnnnnnnnnnnnnnnnnnnnnnnnnnnnnnnnnnnnnnnnnnnnnnnnnnnnnnnnnnnnnnnnnnnnnnnnnnnnnnnnnnnnnnnn

SEQ ID NO: 129486 - DNA, 677 bp, Arabidopsis thaliana
gcgtccggatcgaaaacgttattgcgaatgcggatacacctgacgacgccattgcagctaggaataacggagcttaaggaaacaggctttgtaggacagagcatatggtaactcctcctctgtacttgatttcatgtttttgatgatttacattgtttgtatccacatgtttaatgttgtctttggttcagagcttatgttctttggagcagataggattaaagcagtgagaaagatgataatggcggtaacaacagagcaaaggaaagcttctctcgacatcttgcttccttaccaacgttcggatttcgaagggatctttccgtgctatggatggtttaccggtaacaatccgtttgttagaccctccgcttcacgagtttctcccggaaggcgacttggacaacattgtacatgagctagctgaagaaactggtgtgaaagaagatgaagtcttgtcacggatagagaaactctctgaagtgaatccaatgcttggtttccgcggttgcaggctcggaatatcgtatccagagctaacggagatgcaagcgcgtgcaatttttgaagctgcagcgtcaatgcaggaccaaggtgttactgtcattcctgagattatggttccacttgtaggaactcctcaggaattgggtcaccaagttgatgtaattcgtaaa

SEQ ID NO: 129487 - DNA, 579 bp, Arabidopsis thaliana
  unsure (1)..(579): unsure at all n locations
ccggcccccccctcgaggtcgacggtatcgataagctggatatcgaattcgcggccgcgatttccgggtcctcagtatcgggtcagatcctggatccggatccggagacgctgagaatgaaacacttcagaactgagcgagtccgtgcgactccgaagctcttcacctacgttctcgtcggtttcatcgctctactcggcttgacttgcctctactacggctcttcgttcgctcccggatccagaaagtccgatgagttcgatggatctaataaccgcgttcgcaccggaatcggatccttgaggaatcgagatattgtgcttgcagtgagccgtttcgaagttcctaaaagtgttccgatatgtgattcgagacactcggagttgataccgtgtttggatcggaaccttcattaccagttgaaattgaaactcaatttatcgttaatggagcactatgagcatcattgtcctccatcagaacggcgtttcaattgccttgttccgcctcctgttggttataagatccgtaaggtgcctttagnggncgggnttgaggngaantccnaaannacttanc

SEQ ID NO: 129488 - DNA, 471 bp, Arabidopsis thaliana
agctctcacactatccactcttcatcggcagctagatttccgggtcctcagtatcgggtcagatctagatccggatccggagacgctgagaatgaaacacttcagaactgagcgagtccgtgcgactccgaagctcttcacctacgttctcgtcggtttcagcgctctactcggcttgacttgcctctactacggctcttcgttcgctcccggatccagaaagtccgatgagttcgatggatctaataaccgcgttcgcaccggaatcggatccttgaggaatcgagatattgtgcttgcagtgagccgtttcgaagttcctaaaagtgttccgatatgtgattcgagacactcggagttgataccgtgtttggatcggaaccttcattaccagttgaaattgaaactcaatttatcgttaatggagcactatgagcatcattgtcctccatcagaacggcgtttcaattg

SEQ ID NO: 129489 - DNA, 799 bp, Arabidopsis thaliana
  unsure (1)..(799): unsure at all n locations
nnnnnnnnnnnnnnnnnnnnnnnnnnnnnnnnnnnnnnnnnnnnnnnnnnnnnnnnnnnnnnnnnnnnnnnnnnnnnnccacgcgtccgggagtcggagaaagtggtggtggacgagctgccgctagctattgtgcgccgggtggtgaagaagaagctgtcggagtgttcgccggattatgacgtcagtattcacaaggaagctttgctcgcattctcagagagtgcgaggatcttcatccactacctctccgccacggcaaatgattgttgctataactactctagtggcgaccgttcttgtgagaagcggtttttaagcttttcttaatgttattacggcattgttttgtgttttgttgaagattttccatgggcagccaatgtcacagccagctccaccaatgccgcatcaacagtctactattcggcctagagttagggctaggcgaggtcaagctaccgatccacatagcatcgctgagaggctccgaagggaaagaatagcagaacggatcaggtcgttgcaggaacttgtacctaccgttaacaagacagatagggctgctatgatcgacgagattgtcgattatgtaaagtntctcaagctccaagttaaaagtcctgagcatgagccgtcttggtggagccggtgctgtcgcaccactagtcactgaaatgccattatcttcatcagttgaggatgagacgcangccgtgtgggagaaatggtcaacgatgggacagagaagcaagtggctaagctgatggaagaaacgttggagcagcgatgcaacttt

SEQ ID NO: 129490 - DNA, 1016 bp, Arabidopsis thaliana
  unsure (1)..(1016): unsure at all n locations
nnnnnnnnnnnnnnnnnnnnnnnnnnnnnnaaataacctagacgaagaacaaacaaaactctctctttctctctctctctctaataagtaaggttttgatctttttcaagatcaaacaaaaacaatggagttagagagtacgagcaatggccgacgtccgccgccaccggcagagattggccgtggggcgtacttggcgtgggaagatttgacggtggttataccaaactttagtggtggtccgactcgaagattgctcgatggattaaacggtcatgctgaaccaggtcggattatggccattatgggtccttccggatccggcaagtccacgcttcttgattctctcgcaggtagactcgcaagaaacgtgattatgaccggtaatcttctattgaacggaaagaaggcaagactagactacggtctcgtcgcttatgtaacacaagaggacattttgatgggaacactaacggtgagggagacaataacattctcagctcaatctacggctatcaagtgatttgaccaaagaagaaggcaacgacattgttgaaggaccaatctttgaacttggtcttcaagattgggcagacagagtcataggtaattggcattctagaggagtgagtggcggcgagaggaaacgcgtcagcgttgcgttagagatcttaacgcgaccgcaaattttgtttcttgatgaacctactagtggtttggacagtgcttctgctttctttgtgattcaagcgctaaggaatatcgctcgagatggtggtagaaccgttgtttcatcgattcatcaacctagtagcgaagtttttgctctctttgatgatctttttttgctctctagtggtgagactgtttattttggtgaatccaagtttgctgttgagttctttgctgaagcggggtttccttgcccgaagaaacggaatccttctgatcatttcctaagatgtatcaactcagactttgataccgtacagctacactcaaaggatctcaaagga

SEQ ID NO: 129491 - DNA, 552 bp, Arabidopsis thaliana
  unsure (1)..(552): unsure at all n locations
acgcgtccgcgagattgttcacaacttcaaagcatcgaaaaggtttaaactttacgtttttctctggaacccgattcgaagaaatcatcaagaagtttcctttcactgatttctcaatctattcctttcgcgcttatggaagattctggagtgaatccaatggattcaccatctaaaggcagtgactttggagtctatggaatcataggaggtggaatcgtggctttacttgtgcctgtgttactctctgtggtgttgaatggaaccaaaaaggggaaaaagagaggtgttcccatcaaagtaggtggcgaggaaggttacacaatgcgtcatgctcgagctcctgaattggttgatgtacccttggggaaggagctgctanctatgcctgcttttgtttgagcaggncttgtaagaagtattcgaaagatcggntantagggacctagagagtttatnaggtaaggaatttnttncttcctaggtaatgggngnaaggtttnagagctcatttntggggggnntaaatngcaaattnttggggnggtttgc

SEQ ID NO: 129492 - DNA, 551 bp, Arabidopsis thaliana
tacgactcactattgggaaagctggcacgcctgcaggtaccggtccggaattcccgggtcgacccacgcgtgcgcgccgctttttcttcgatcacatcgctcctatgccgatcaggtaatcgacacgcagaagcaggttctctctctgatccgcgatttcactctgaaagatctcgtggaggtaagatacttcatacattttgtttgttttctagagatttcgggttttgaacgattctactattcaatccctggagacacaggtgagttgtctttgaacgattttactattcaatctctggaggttttgatttttctttgatcttacttggtttttgggatgattaacaagttttggtgcctaatgagattgaaactgtgcctctttttttttttttttctcaggcaaggattagtcttcttcaggatgaagtttctactaatggcattgaagatgatgctcttaaggtttggccacacatggtttattggagtttttagggctaatggttcgcaggtgatatctccgttggatatccgggaattttggg

SEQ ID NO: 129493 - DNA, 559 bp, Arabidopsis thaliana
  unsure (1)..(559): unsure at all n locations
acgactcactattgggaaagctggtccgcctgcaggtaccggtccggaattcccgggtcgacccacgcgtccgcccacgcgtccgcccacgcgtccgcggacgcgtgggctgtggtggacctctggtgtttagctatgaagataatgatatttctgatcaggatcttcttcttgatgtgccgtcgaacggctcattccctcaagcagagcttctaaacatgatatgaaagaagataaagtttctcaaactcattggttaaactcattgtgtttctcagaacaaagacagactttttaagattatatatatatatatatatctctgttgaagagaaaactcttttgctctttaggcttttctgagaaaatgtggccaaatgagatttttatgcattagaaattgcaatttgcagatataaaaaaaaaggaatgatttttatgtaagggctctctttggtggtcttactatataaaaaaacaaaaaagggcggccgctctagaggatccaagcttacgtacgcgtgcatgcannnnnnnnnnnnnnnnnnnnnnnnnnnnn

SEQ ID NO: 129494 - DNA, 672 bp, Arabidopsis thaliana
  unsure (1)..(672): unsure at all n locations
gatctccnnnnnnnnnnnnnnnnnnnnnnnnnnnnnnnnnnnnnnnnnnnnnnnnnnnnnnnnnnnnnnnnnnnnnnnccacgcgggcgtattagtgagagaaggacgaagaatagatagaggaggaagaagaataaagagaaaagatgaacaagaaggagatcttcaagctagcgaagggtttcagaggaagagctaagaattgtataagaattgcgagggaaagagtcgagaaagctctgcagtactcttacagagataggcgcaacaagaaacgtgagatgagaggtctctggatcgagcgcatcaacgccggttctcgtcagcacggtgaactacgggaacttcatccatggactgatgaaggagaacatccagctgaaccgcaaagtcctctctgagttatctatgcatgaaccttacagtttcaaagcacttgtggatgtctcccgcaagtcgttccctggaaacaagaacgtggtccaagcatctcggaaagtagacatttcatccatcaatgcctagttaggaccaagttagtttaacttgtccttcttatgaccacggaattatttagttatttgtcagattaacatgtcccccgggggtatttccatacttttgcaatttaaggggatggattccgtcttctttatttcgttgagcggatct

SEQ ID NO: 129495 - DNA, 864 bp, Arabidopsis thaliana
  unsure (1)..(864): unsure at all n locations
gggaaacccaaggaattttccaggcgcgaaagtttttcgggaatgttgaccccgtttgaagccgttttttaaccaaaacaccaggttccactcatagggtggaagcccttcaaaaccccccagaaggcagaggaggattcatcccgtaatatcacaatctccgacgtcgatctcacaagcgttgacacagccatagtagccaacggacacaccgggtcacacccggatgataaattcgaccgggacgcactcccagtcgtgacacacattgttatgcggaatttcaccggagttgatataggagtagccgggaatctcaccgggatcggagaatctcccttcacgtcgatatgcctcgcggatattcatttacaaacgcgatcagaagaatcttggatatgctccaacgtctctggtttctcagacgacgtatcaccggagccttgtcaagaactcatgagttctccttcgtcttgcttcgccggtggtagcatatacgagggtgatgcgacggctcagtcgtattacagttggtaattatagtaaaataaaatggtgatgaagaagaagaagaagaaaaagaagaagagagtgcatgaggttacgatacgattggattttcgaattttttttgtcaataagttcataaaatttgttgtcagagagcgagaggaagaagataaaaaaagaaaaattccgttttaaggtggtgagtttcaagaacagagcgagcttttctattgtattaatggacagcttccatttcttttatctcatgcaattcatccngggggggggnnnnnnnnnnnnnnnnnnnnnnnnnnnnnnnnnnnnnnnnnnnnnnnnnnnnnnnnnnnnnnnnnn

SEQ ID NO: 129496 - DNA, 743 bp, Arabidopsis thaliana
  unsure (1)..(743): unsure at all n locations
cacgcgtccggattgcatatttctaatgttttgatcgaaccatccgttgattctccccacgttcttgggggtgccctagattcttcggacaatgtttgtatcgaggactcaacaatcaacgttggccacgacgcggtttctctcaagagtggttgggaccaatacggtatacactacggccgtccaaccaccgctgttcatattcggaatctcagattaaagtctcccaccggtgctggaatctccttcgggagcgagatgtcaggcggagtctcggatgtgaccgttgagcgtcttaacatacacagctcactcataggtgtagccttcagaaccaccagaggcagaggaggatacatccgtaatatcacaatctccgacgtcgatctcacaagcgttgacacagccatagtagccaacggacacaccgggtcacccccggatgataaattcgaccgggacgcactcccagtcgtgacacacattgttatgcggaatttcaccggagttgatataggagtagccgggaatctcaccgggatcgggagaatctcccttccacgttcgatattgcctccgccggaatatttcnttttncnaaacgcnantcagaaaaaatctttgggattnttgctnccaaccntcttcntggnttttccttcnaaacgaaantttttnctcccgggaancctttgttcccaaaaaaatnccntgantttccnccnntcccttncttttgtntc

SEQ ID NO: 129497 - DNA, 523 bp, Arabidopsis thaliana
  unsure (1)..(523): unsure at all n locations
tgctccaacgtctctggtttctcagacgacgtatcaccggagccttgtcaagaactcatgagttctccttcgtcttgcttcgccggtggtagcatatacgagggtgatgcgacggctcagtcgtattacagttggtaattatagtaaaataaaatggtgatgaagaagaagaagaagaaaaagaagaagagagtgcatgaggttacgatacgattggattttcgaattttttttgtcaataagttcataaaatttgttgtcagagagcgagaggaagaagataaaaaaagaaaaattacgttttaaggtggtgagtttcaagaacagagcgagcttttctattgtattaatgtacagcttccatttctttcattcatggtgtaacaaaattcatctttttttctttctgtgaagaagaaaataaaaaattatatgtgaaaaaaaaaaaaaaagnnnnnnnnnnnnnnnnnnnnnnnnnnnnnnnnnnnnnnnnnnnnnnnnnnnnnnnnnnnnnnnnnncacc

SEQ ID NO: 129498 - DNA, 523 bp, Arabidopsis thaliana
acgactcacatttttggaagctaacacgcctgcaggtaccggtccggattcccgggtttcccacgcggcggagtagaggtaagattgttcttgaagaatcgattctatagagcgtgttagcttcaatgctaacttgggagaccccagttatgcttgcaagcaacaccgcctcaaccaaaaagctacccttcattaccacctttctcatcattgcccgttgtccggtcacaagggtcatgtctcagccgcaggcggatgttttgccactgccagcctcagacgcagattgcctcttgagatttaaagatactttggttaatgcatcgttcattagcagttgggatccttccatctccccgtgtaagcgaaactcacagaattgggtcgggggtctctgtgttacccgtaatgttgggggcctacaactcgaaaggaagggcttaacccggaaagcttgaccttcaacccttaagtgcaatcaaagactgtacgaacccttgggttgcatgaccaccaatttaac

SEQ ID NO: 129499 - DNA, 1066 bp, Arabidopsis thaliana
  unsure (1)..(1066): unsure at all n locations
ggacgggattnatnaaataaaggaagaaaaggaagaagaagaagaagaaaggattcgtcttccttcttccacaccctttctgacacctcatctcccctcccaccttctccgtcccgttccgtttctccatcagatcctcgattccgatccaacagttcgaattcagtttccgattctgatctgatcgaaccaatactcactgagatttgatcggcgattatggagtctatatctccggtatcgaatcagcttcttcagccgacgacgacgagctctaattccgatcgctctcgtcgtaagcgtaagaagaaatcatcgccatcatcggttgagaaatctccatctccgtcaatatcgttggagaaatggagatcggagaagcagcaacagatctactcaacgaagctagttcatgctttaagagagctacgaatcagccaacaaccatcttcatcatcatcttcttcgattccacgtggaggtagagccgtacgtgaagtcgccgatagagctttagcagttgcggcgagaggtaaaacgttatggagtcgagcgatactttcaaaagctgtaaaactcaaattcaggaaacacaaacgccagagaatctctaatccgacgacgacgacgttaaccaccgggagtatcaggtcaaagaaacagagagcgacggttttgaggcttaaggctaaaggtttgccagctgtacagaggaaagtgaaagtactgagccggttagttcccggttgccgtaaacaatcattaccggtggttttagaagaaaccactgattatatagctgcgatggagatgcagattcgtactatgactgcgattctctccgccgttagttcttctcctccgccgccaacgccaggtcacgaagggggacaaacacacatgcttggttagttggccaaactgtccttttatttttttccaattttaaaaaccaaaaaaaaaactgtttttttttatcatattattattcttctcactgtattgtttgttgtttgaatattttactattcaacttaatataccatttcgtcatgtatatcctttt

SEQ ID NO: 129500 - DNA, 545 bp, Arabidopsis thaliana
  unsure (1)..(545): unsure at all n locations
gacttacttagggaaagctggtacgcctgcaggtaccggtccggaattcccgggtcgacccacgcgtccgaacctgttgaaaaaaaattcagggaaaattggaaaaagtgatgatgatgacgagagatcaattcaaatcttaagtcctccaaattttaaaaatttcgatctccactaccttcgtcatcttcctctacttctgattctcttttctgggtttgtcgtttaatgggttgattttgtatcgtcaaaacggagaaaacaagaagacttcttttggttttcttattgcgaagaagatatttctagggtttcgagattttctgggttttctgggtttttgtgtgttctttgattggatttgattattgggcaatttccttggaattcaagaaacttctaaggttcttaaagtgtaaagctttgtgattttttcttattcataccttctaagaccttgggtttggaagtggattgggctnttgggtctgaaaatgagaagcgaaacgaaaatggaaggtgtggttgaatataaacagactaat

SEQ ID NO: 129501 - DNA, 531 bp, Arabidopsis thaliana
acgactcactatttggaaagctggaccgcctgcaggtaccggtccggaattcccgggtcgtacccacgcgtgggcgggcgcgtccgcccacgcgtccgtaaagaagaaaaaactgcaacgccgtttgttgccgatctgcagcagcgcgatctctctgattattagagagctatcatcctagcagaatagaatctctcagtttaaaggctccaaagatggcggcgtctgaagagaatagcgcattgtttcccatttttatcgtgacgattatggcaattcctttggggccttacaccatggtcaagttaagcggtgctctctccaagaaacaaaggaccattcattgtcagtgtctcgagtgtgaccgttctgggaaatataagagatccttgtttaaaaagatctctaacttctctacggggagcaacttgacacttgggctactctggggtcgtgatagatttcttgatttatacactaagaccatggagccgtgaggctcaggtttttgacccattcagatactgggac

SEQ ID NO: 129502 - DNA, 639 bp, Arabidopsis thaliana
  unsure (1)..(639): unsure at all n locations
tttttgttctcctnancaatccaggatcggtcccatngngaccctntccctggctcanatncccggggactggncccncagngncagggcaataccntggnggcnncgtaagtttaggagatttccccagtctttggaatggggcaacattggaaatcnccatctgctcttcttcagccaatagtgtggactgttatccaaaccagtgtttgtgccatatgcaaatggcccacctagaaaagggattcccgttgcccataatgcacggattcacacttcagaatgcggaaatcatctgctcagaatctgaaatcccagtttgcagcgatgtcgcctacttggattcgtcccaacagcctcaatggctttgaagctaccacgatctacgacttggaaacctaactcgttgtagtttacaattggtggttgtaagtgtcgctactggtttggcatttggaccagactcagcgaccaaaacgaacaaagctttgtataatacttttgtacttaatgttgactaatctgtgaatgatatttctgtctgaaataaaatagtctttgtaattaaaaaaaaaacaaaccccaaagggcggccgctctagaggatccaagcttacgtacgcgtgcatgcgacgtcat

SEQ ID NO: 129503 - DNA, 493 bp, Arabidopsis thaliana
atacgactcactatatggaaagctggtacgcctgcaggtaccggtcccgaattcccgggtcgacccacgcgtccgcttatgttaatgcctacctagtaatcaatgttctagatgcaaaccaagtaatacctgtagcttgcatctccttgatgatcccgggatctggtgctctcagagtcatgggcaataaccttggaggcagcgtaagtttagaagatttctccatgtctttgaaatgcgaccagcattggaaatctccatctgcatcttcttcagcccatagtgtggactggtatacctacagtggttgcgccatatgccaatgaccacctagaaaagggattcccggtgcccattatgcaccgattcacacttcagaatgccgaaatcatctgcttcaaatctgaaattacaggttgcaacgaatgtgcctactgggaatccgtccaacagccttaatggctttgaaacttccacaatctacgacttggaa

SEQ ID NO: 129504 - DNA, 386 bp, Arabidopsis thaliana
agatctcgttaatatccatcctactgagcttaaattcccctttgagttgaagaaacaaagttcgtgttcgatgcaattgaccaacaagacaactactcaatgtgtcgcttttaaggttaaaacaaccaatcctcgcaaatactgtgttcgtcctaacactggtgttgtcttgcccggtgattcctgcaatgttacagtgacgatgcaagcccagaaagaggcaccacttgatatgcaatgcaaagccaagttccttgttcagactgttgttgtctctgatggtactacttccaaagaagtcctcgctgaaattgttcaacaaggagggcttgtagagtgattgaggatttcaaactgcgagttgtttacattcctgctaatcctcc

SEQ ID NO: 129505 - DNA, 615 bp, Arabidopsis thaliana
cgtttccaactctctctaatgtttcactaaagcgcatacataaccctaaccctaactctctcgtactgcacaaaaaaaaaaaaaaaattgaagaagagcgatacgatcgtaaccagggagcttgatttctcccctgatttttctaatggattctcaacagagcgatctctttgacaccgcatcgcagccggacacggtggccgacgagtatacctttttggaattcaatactcaaggcgattcagagttcgattaccaggattttggatcgccgacggcatggccgacaccgtctgattctatttccatcgctgacgttgccgatcgtggtgaaggaggagctgccgcggatcatcattctgaggcttcgtcaccttcgtccctctctgccggtgccgggaatggtgcgaaagtgggacgcggtggagttggtggaagtggtggtgttagtagtagtagtcaggttgatgcattggccgctggtgtgggaaatttgaactttgaagagactggtgatgatgatggttttgattatggtaaaaatgatttcacggagcacgcttgtaagtattgtggtatctcgaacccagcttgcgtcgttaggtgtaatgtggc

SEQ ID NO: 129506 - DNA, 503 bp, Arabidopsis thaliana
  unsure (1)..(503): unsure at all n locations
caggnaccggncccggattcccgggttgancacgcgtgcgttagcaaagagagagagagacaaagagagatctgatcctttgaagaaacaccaccaaaaaaaaaaaaaaaagacatggcatcagcggatgaaaaggtggtggaagagaaggcttcggtgatttcaagcttgttggacaaagccaaaggtttcttttgcggagaagctggcgaatattccgacgccggaagcaaccgtggacgacgttgatttcaaaggcgtgacacgtgatggagtagattatcaccccaaggtctccgtcaagaatccttactctcaatccatccctatctgccagatctcttacatcctcaagagtgccacaaggaccatcgcgtaaggcacgataccggacccggtttctttggttgggagcggcacaacggttctggacgtaccggttaaggtggcttataacataccggttagtctgatgaaagatatgtgtacggactgggacattg

SEQ ID NO: 129507 - DNA, 856 bp, Arabidopsis thaliana
  unsure (1)..(856): unsure at all n locations
cgcgcnnnnnnnnnnnnnnnnnnnnnnnnnnnnnnnnnnnnnnnnnnnnnnnnnnnnnnnnnnnnnnnnnnnnnnnccacgcgtccgcccacgcgtccggcgagaggggagacatgtaatctcaatctcaccccctttataatttctctatatctctctcttctctcacacaattcttcgtttcccagaatcttacgaaccctaaaacttctcattcttcgtcacacattgagatcatattccaattcaaaaaaatatggtgtccgatgaggttcttattggtgttcttctcagctgtactcgccggatatttcgcatggaagacggtgagttcttcgccggaattcgattcaccggacgaattgaatgagaaacaagaactcaatctcaaaaagaagatggagaatgggtttttgggtgttccgtcgatatggctagcggaagatacctttggaggaatctcaaggaaatgagaggagaatctcattgaagatggtgaggaacgaatacgaaaagattccatctttttttttttgggttcttctttgggcagagaggggaggaaccaataataagtgtccccttacgaggtcaaggatcctttggctctaaaactttcctcgggatttgggaaccttttgactcattggatttggacaccggggaaaagaaaaacaaagaggtgggaaccctcaaaaaaaacaaaaaaggggcggccggctttaaggatccaggttacggaccgcgggcgtgggacggctaactcctgcattggggcgcctaattgctgcgccggggggggttctaaggggcgcgcggcaaagcccagcgaggccgcctaacggccgcggggcca

SEQ ID NO: 129508 - DNA, 659 bp, Arabidopsis thaliana
  unsure (1)..(659): unsure at all n locations
tattccaatccccccccctaaaaattttcctaatctctctcttctctcacccattttttcgtttccagaatcttacgaaccctaaaacttctcatttttcgtcacacattgagatcatattccaatcaaaaaaatatgtgtcccatgaggttctaattggtgtttttttcagctgtactcgccggatatttcgcatggaagacggtgagttcttccccggaattcgattcaccggacgaattgaatgagaaacaagaactcaatctcaaaaagaagatggagaatgggttttgggtgttcgtcgatatggctagcggaagatacctttggaggaatctcaaggaaatgagagagaaatctcaatgaagatgatgatgaacgaatacgaaaagatttcatctttttttttttggtttcttctttgtgcagaaagtgtaagaaacaataataatgatactttacgagtttagtattcatttgttctaatctttctcctgaattttgtaacttttgattcattgatttgtaatcctggaaaaagaataacaaagagtttgtaaccttcaaaaaaaaaaaaaaaagnnnnnnnnnnnnnnnnnnnnnnnnnnnnnnnnnnnnnnnnnnnnnnnnnnnnnnnnnnnnnnnnnnnnnnnnnnnnc

SEQ ID NO: 129509 - DNA, 705 bp, Arabidopsis thaliana
gattgggcatgggtctttcgggaatgatgggaagggtcaagctaatgtaaatagttctggtgttttactgatgaatggccaagtgaacaacaacaacaacacaaatattggaggtgctggtgggtttggtggtgggattggtcaatccatggcagcaaacggaatcaataatataaacggtaacaatagtctcatgaacggaagagttgggatgatggtgcgggatccaaacggtcaacaggatttaggaaaccaacttttaggagcagtgaatggtttcaacaattttgattggaacgcgtgaaatgaagaagaggaagaagagacactgaaagggtaatgttctgcttgcgcagcatcacacatcttcaaactcaggataaggataggccaataagccgtgatattgtgcttaagaaaggaagagtcaaatctttgtatcaataactggtttttaggtcacctccacaatcaccaataccatctcttgagttactgtttctttttttactttggggagtttttcttatgctttatagtttataatgtacatctttctatcggtgtgtgttccttagggcacatcatcagggaggcaatgaatcaagctctatccttcaaaaaaaaaaaaaaaaaaaaagggcggccgctctagaggatccaagcttacgtacgcgtgcatgcgacgtcataatcttctatagt

SEQ ID NO: 129510 - DNA, 500 bp, Arabidopsis thaliana
gggggggggaggggggtccgtgtggcgcgcccgggggcgcccaggggcgcttgcgggcggtttgtcttggtggcgagtggggggcgggggcgattttgccgccgggggacaggttttgggccgggtttcgccccagcctctgttccgcccccctatagggaaaagtggtgcgcctgcagggaacggtccggaattttggggggggaaccacgcgcccccggacccgtgggtgtttgcctggggtgggtgggtactggtttagccctctccacttcaggacaagagttcgactcgtatttggtaccaagtcgggccatctcttcctctctctctctttcgccttcacaatccaatatccatgtcgatgttgttgtattgaacttaaagagaggtaataaaaattccctctaaaaaaaaaaaaaacaagggcgcgccgctctagaggatccaagcttacgtacgcgtgcatggcgacgtcatagatcttgtatagtggacct

SEQ ID NO: 129511 - DNA, 905 bp, Arabidopsis thaliana
  unsure (1)..(905): unsure at all n locations
gctggggggacctatacgactttcttagggaaagctggtacgcctgcaggtaccggtccggaattcccgggtcgacccacgcgtccgtcgaagacacgaggcggagctatgacgccgctttctatatcggcatcgccttcgccgccgtggccacttctctctccgccactatcttcatcgtcgttaaacagagctgctccggctattttttcccctttctctcgaaagaaccatggcttctcgtgctctttcattcgccgttcaacgcttcgctctaagcccgcagacaaggaagcagttccaggtggtggctatggctcctgaggaagaaagctaacttcgcgaatcctctcgatttcctatcaatgggagagacaaagcccgggaggagaccagatttattcccaaagtgtagtcctaggaagcccccgtgcctcctcctatgcctaagaccctcaaaagagagggagaagagggagagaagaaggagaagacctggagatgcccctgaaaaggagacaaggccaccccataccgggcgaaagaggtcctttttctaccgtatgggggggtttttgcctaaaaacaggtaaaacctcttcattccaaaaaaaaaaagattggcaccccccaaagcttaagggagcttgaccttttatacttggttaaaccncgataaaataaaaaaaagggggcgcctcaaagagacagtacgtcggggcgcgaatttaatttttttgggccccaaataatcccggccgggttaaacgggggaggggaacccggggtccaactaaggctggaaaaaccctttcccgggggaaaaaaaagcccccatgccttcaaattggccctaagggaaggacccccggcggcataccggggggtggcccccggccccccgc

SEQ ID NO: 129512 - DNA, 477 bp, Arabidopsis thaliana
  unsure (1)..(477): unsure at all n locations
catcgaagaacacgaggcggantaatgacgccgctttctatatcggcatcgccttcgccgccgtggccacttctctctccgccactatcttcatcgtcgttaaacagagctgctccgtctattttttcccctttctctcgaatcaaccatggcttctcgtgctctttcatcgccgttcaacgcttcgctctaagccgcaagacaaggaagcagttacaggtggtggctatggctcctgaggaagagaagctcactcgtcgcaatcctctcgattttccctatcgaatgggagagaccaaagccagggaggagaccaggtattatttcccaaagtttaggcctttggaaagtcaccgttgccttcctcccaatggccttattgntcctcccagaagaaagggggaagaatggggaagggaacgaaaagacgggggaatttgaggttgcccnttaaaaggangcgggggncncaccccg

SEQ ID NO: 129513 - DNA, 423 bp, Arabidopsis thaliana
caaaaaaaaatctctgaaacaatggcgtgttgcttagcttcgtgctgtgcgtcggcgacttgtggattatgctcgtcggtagcatcggggatatcgaggaaatcagcgaggatcgcttattgtggtcgcttcggtgcctctcttgtcgtctcctggattcttcgtgagactggtgctccgctcctcgagaaactcccttggatcaatacttctgattcagataccagagaatggtatcagcaacaagctgttcttcgtgtgagctttgggaatttcctcttctttgcagtatatgctttgatcatgattggtgtcaacgaccagaatgacaggcgtgactcctggcatcatggtgggtggggtttgaagatgattgtctggtttttgcttgatgtcctcatgttttttgttccaaatgttatc

SEQ ID NO: 129514 - DNA, 458 bp, Arabidopsis thaliana
tccgacttatatggggaacgctggtacgcctgcaggtaccggtccggaattcccgggtcgacccacgcgtccggccacgcgtacgagaaaaagttcttctttttcttccgcacatgtctgactctctcataagcgtaaatcgctctgtcaaatatctctgaccagagagacagagttgcctccacggttctccagactagtctcacgctctgccctttcaccacattcccttctccatttctcaatctcactttaccttctcggttcttgcccccatttccgaatcttcccgagtgaaaaaaagctctcaaggtgtggaaccttctaagtgtttattaaatccggggctgcccctgagtttcgtcgggaggctcgcatatgatctctaacgctcaggttttctccctccggggcttgggattttcacggctaagggataggggatctcggggaattta

SEQ ID NO: 129515 - DNA, 530 bp, Arabidopsis thaliana
  unsure (1)..(530): unsure at all n locations
tgttttggacatgtgttacactacttcaaatggcttacgctgttgcaattctagttggagccacatctccattcatatggagcaaagtcatctcggttgtgggtcatgttatactcgcaacaactttgtgggctcgagctaagtccgttgatctgagtagcaaaaccgaaataacttcatgttatatgttcatatggaagctcttttatgcagagtacttgctgttaccttttttgaagtgactgacattagaagagaagaagatggagataaaagaataagtcatcactatgcttctgtttttattacaagttcatgaaattaggtagtgaactagtgaattagagttttattctgaaacatggcacactgcaaaaatatgtcaaagatatgaatttctgttgggtaaagaagtctctgcttgggcaaaaaaaaaaaaaaaaaaaaaagnnnnnnnnnnnnnnnnnnnnnnnnnnnnnnnnnnnnnnnnnnnnnnnnnnnnnnnnnnnnnnnnnnnnnnnnnnacaatc

SEQ ID NO: 129516 - DNA, 605 bp, Arabidopsis thaliana
ccctccgactttattagggaacgctggtacgcctgcaggtaccggtccggaattcccgggtcgacccacgcgtccgatttcttccccattctctctctaaaaccatttcttttttctcagctacaaaaatcgaaactttccgacgagtttttaacattaggacttcattcggcaagaagcattaccgtagtatgtcggatttgatttaagatgacatgagatatggctgcattgaatctatcaaagaggtcaatttgtgaaacatgcggacatcaaggatggaagaattcacttgtaacttgctctaaatgccgcatagcctgtgaacactgttattgcatgcgggagagttcatttgagacctcaatacattttgtctgtgctgattgttcgatgagacctgttcaaaacaaatttacttcagattctatcaaaggagtccctagaagtattaggaataaagtgcgggtggaatcttcaaatccagttcctaaatggaaaaaaattcctgaaccgtcaaggatgaagttaattccccagaggaagtaaaaaacttgctgtggaggcagtcccagtaaccaacttttaaagtcccaaacctgttc

SEQ ID NO: 129517 - DNA, 758 bp, Arabidopsis thaliana
  unsure (1)..(758): unsure at all n locations
caaagccaacggaagtgtttcttaattcattttttgtttgttttggtttaaataattcagtgtctcacgagctgtgtcgagattggatccatacaaaatctgcacgacgcctgcttcttcactctctcccactgttccagcttcaactctcttgatatacagagagagatagagataaagagagagagagtgagagtgatagctctcggagaaattgaagaagacacaatctgattagtattctccaatattccatcaactttttgctgagggaaatctccagatttataatcgtttgtatatatatatatacagagcagcgtagaaaaggatcttagatttatagcagcaacaaaaaaatgtcaatgccactacaacgtggcatctctggagtacgagtttctgatagcagtgatgatttgagagactctcaaatgaaagacaaaactgaaagagctcgttctactgagaacaacaacttaaccttaaggtttccttttggtttcctctttagtaatccaatcttccttccaaacacgggtgggtggtggcgaaaacgggttttctgctggtcccatatagtgcaagaagnagggcatagattgatggtggtggttcctcaagatcagtttnggtcccaattgngggnattgnccctgctggtccttcctggggggncatttccatttcggnttcttcccgggggcangnnaaccccattttggggggnccggggcagntggttccaccttngggnc

SEQ ID NO: 129518 - DNA, 495 bp, Arabidopsis thaliana
  unsure (1)..(495): unsure at all n locations
gaaggcgggaccccctgcaggtcccggcccggaattcccgggttgacccacgcgtccgcccacgcgtccgcccacgcgtccgcccacgcgtccgcggacgcgtgggttcatgatctaaggtcaagattcggtatcattcctcaagaacctgttctcttcgaaggaaccgtaaggagtaacattgatccaacacagaaatactctgatgaagaaatctgggagagtctcgagcgatgtcaacttaaggatgttgttgcttccaagcccgagaagctcgactctctcgtggcggataatggcgagaactggagtgttggtcacagacaattactgtgtttaggaagggttatgctgaaacgaagcaggattctgtttctagacgaagcaactgcgtcggttgattcgcagactgatgctatgatccanaagatcatcagggaggatttttcggactgtaccattatcagcattgctcataggattccaacagttatg

SEQ ID NO: 129519 - DNA, 857 bp, Arabidopsis thaliana
  unsure (1)..(857): unsure at all n locations
aagtcagaagcccgtaacttgaagatccgcgtagacaaggttttgagtgaaaatccaagtatattccctctggctaacacagtgaatccacttggagctgctgatgtatacaccagctcagaacaacaaaagcccctgctggctatcaaaaacgaagatgagaaatcgatcatctctgaagaaaaaccggtgaaatctgcttcagtttcatctcatcacgtctcacctgaagacgacgagacaacagatattttactgtctgagattctagcatcaaagcgaagggaagggaaatctattattcccgataagaatctagtgaagacagaacaagcttcaattgaggaaggtccatcaagacctgtaaggaaaagaacaccgcgcaatcgtgaaatcattacgaaggaagagagtaacccaaagaggcgtcgggtttcaagagagaagccaaagtctaatgctgtgatggcttctaggttttccaacaggaagagaaagcgaggaaaacgaaggtcaggctctgccgggttacgaagaagatcctgaagaaggtttggaaactttcaagtaactaatcggatcttgtgttaaaaagtaaaaattgttcattctaagatattcttaactcttaagcctttaaagtacaaagaaatatttatagtggctgtgttttgattcttcatgtcaacaatatattcaaactacatcaacttttgaactttacttctataatttagaggtgtatatatttttctctattttgtattatcaaaaagaataaaaaaaggcgngcagctctagaggatccaagcttacgtacgcgtgcagtagacgctcataaagcttctatagtcccc

SEQ ID NO: 129520 - DNA, 967 bp, Arabidopsis thaliana
  unsure (1)..(967): unsure at all n locations
tatacgacttacttagggaacgctggtacgcctgcaggtaccggtccggaattcccgggtcgacccacgcgtccgaaaatcttccggagcttctaactttttttctgcatggcgtttcctcttcgtgtctaagagcgcttcatttctagttccttttctgcttgcctgggtagatattttatatccttaaaaggagaaaatggatgaaaacaacgcggcatagttaaaccgggatcaagcagattgtgagactaaaggagattcttcaaaaatggcacactgtcacaataggttcaaagtcagatgatggagaggtgggagctagaaacacacagctatcatttcacccgttttaaacaagaggctattggatttgaagactggtgacctcgacgaggaaactacttgccaaagccctgaaccaccggctgatgtccctaaaaggatatttggcggtttatggtgggacccgaccttccggaatttattaatacccacaaactttcttaaccttcttttgttaaaggtcttgcttgagaaagctgaagaagaatttggattttaatcaccagggtgcgttaacccttccttgggaaagttgaaactttcaagggcttacttaggcgcttgagaaacctccttaaaaagacccctgggctggagatcccggaaaaccgaagaataattataccccctcccatattaacctttctttccctttttataccaccccctttaacctcgttaggggggaaccctcccaagggattgaaaacaattctctttgttttttaacattttctccctccccccccggggtttttttaaaagaagaaagggattcctttaaatgggggattaagttaaaacccctggggccttggtttttgcccctttcggcccctttggaaaaaaaaaaaanaaaacctcaatatttattgggcgccccttaatccccctccccccc

SEQ ID NO: 129521 - DNA, 395 bp, Arabidopsis thaliana
tcgctggctccaaacgtatgaaccagaacaaagccttttagatagttccgtctgcgaaccctaaaatcattcaataaacttcgaacaaaaacgaatgcttttgttcaatcatcttctcagtttctgattccgaagaaaccctaatcaaataaatcatggactgctcatgcagtactcgtccttcgtctctgcttatctcttccgaaccatcttttcgctttcctcactctaatttctcctcgaatctcagctttcagataccgaaagatacgaagttggtgaagcagcgtttggtagtgagaagttcctctggttctgattatcaaaacggcgacgttaatgggtttcctctcaaaccaaacaaactctttatgcaagaggcgattggagctgag

SEQ ID NO: 129522 - DNA, 523 bp, Arabidopsis thaliana
tcacgcgtccgcacacgcgtccgcaaatatgttcctcttgatctccttcagggtgcatcagtggtggtgctggctaatctgaagccgaggaatatgagaggggttaagtcatgtggtatgcttttagctgcatctgacgcagctcatgaaaatgttgagcttcttgttccaccagaaggctctgttcctggagatagagtttggtttggcaacgaagaagatctcgagcagcttcctgaacctgcacctcctaataaggttcaaaagaagaagatgtgggaattggtgcaaccacttttgaagacagatgcgtctggtgtttcaatgcttaaggagcatttgatgcggacatcttctggtcttgttacttccaagtctttaagaaatgccaacatttcttgatttctgttaaaagctattttgtgatgttgttttgacacaagagagaaagaccaaaccgctaaggagattttttccattgcaatcaaactgatgtttttgttgattcaaaaaaaaaaaaata

SEQ ID NO: 129523 - DNA, 577 bp, Arabidopsis thaliana
  unsure (1)..(577): unsure at all n locations
cnnnnnnnnnnnnnnnnnnnnnnnnnnnnnnnnnnnnnnnnnnnnnnnnnnnnnnnnnnnnnnnnnnnnnnccacgcgtccggagaatttacataaaatagagggttttattgtaagtaactcgctatctttcggttatcttcggtttgtaatttttcatgatcttcttcgacttgtagatttaagttttgaattcgttcaccagaattcagaacttgatactgatcaattgaattttcactcatcaatttgcaacgatttgatctacggaggcttgacgaggtggattggagccagaggaagggcggatcatctcgaagtagaagatctcgattttggatcgctcggaaaactgatcaaatggaggagaaaaacggatcatcagaggtagagatcggagagaaagacgaaacgaagaagcaatcaaaggatcttgagttcttaagctgtatgatgcagccaaaaacagctgattcagatccacactacatcggaatccgccggatttcttcttcatcggaaagctgattctggcgttatctctcgccgttatgattggagatgccatggaaaaggt

SEQ ID NO: 129524 - DNA, 530 bp, Arabidopsis thaliana
  unsure (1)..(530): unsure at all n locations
gactttcttagggaaacctggtacgcctgcaggtaccggtccggaatttccgggtcgacccacgcgtccgcaccatttgaagaaggagaagaagaagaagacgattcggtgaaagcgaagatgggtggaggaatggaaacgaacaagaacaagttcatcgaggactggggatctgctagagagaatctcgagcacaatttccgctggactcgtcgtaacttcgctctcatcggaatcttcggcatcgctctcccgatcattgtctacaagggaatcgtcaaagatttccatatgcaagatgaagatgcaggcagaccacacagaaagttcctctgaggttgtttgcaagaacactctctgcaataaagtctcagcaatgtgaaatttcaagacgaggatgttaaaacccgcttttggttttttcatttcaatcaacatctggaacccaaggatataattttttttttgggaaaagtttgttgtaatgactacactttgttatgcaaataaacaaaactcagttttcccnt

SEQ ID NO: 129525 - DNA, 495 bp, Arabidopsis thaliana
  unsure (1)..(495): unsure at all n locations
gaatgtgaggggatgcaatttttccccgggagcacctattcccacgattcgcccagctctaattgtgccccctataaagaaaaatggtgcgccctcaagggcccgtccggaatttccggggtgggcccccgcggccgggcatttacatgatgatgaacttagttccagaagtggcaccatcagtgttgtaagcagtgtaagcacagaagcaaatggagctacgctgagtagagagataagaaacaatgatccaatgttgtctcattgtagaaactcttatgctccaagccaaggtagtcgggacgagtacgacacagggacccatagtatgagcagtctcagcagtccaagtcatgttcatgagaccgtcacacttagtcctctccctcagcatcatacagctggccaccgcttcactgcannnnnnnnnnnnnnnnnnnnnnnnnnnnnnnnnnnnnnnnnnnnnnnnnnnnnnnnnnnnnnnnnnnnnnnnnn

SEQ ID NO: 129526 - DNA, 566 bp, Arabidopsis thaliana
ccgggaatttccccggggttctgaccccacgcccgtgcgctttcgaacaaaattcgaaaacagcacacggcgatggcgtcgcttatactcggagctcctccgcgagtcaccgtcgcattaccttcctcacggttatcatcttctcactctgaaactgccggtgtctctctctcttgcttcactcatcaattctctctctccacttcctcatccagctcaattccactcgtgtactgtggcagaggtgaccggaaaacagctaaaggaaagcgtttcaatcactcttttgggaatgcgaggccaagaaacaagagcaaaggaagaggaccggagagagtaccggttcctccagcaccaccgaggaaagataagtttgagaacgacgagaagatcaaaatcgatatcgacgagtctctcttctctaattagaaatatgagattcttcacttgttgtctctcactgtaattttaatttgttttttgaaaagctttgatgctacgactcttttgttgttaaaaacatctccaaagttctcatctttttatgaaaagtttgcttctttatg

SEQ ID NO: 129527 - DNA, 916 bp, Arabidopsis thaliana
  unsure (1)..(916): unsure at all n locations
cttacttagggaaacctggtacgcctgcaggtaccggtccggaattcccgggtcgacccacgcctccgcgttaaaacagctcgagttgttatggcggaaaggaaagaatcangacctatcanaccttgtcatatcagggagtcttatcggagactaaagctcgaaagaaaagtgccctaaaaatcagttcccctccttttccgctaagcagcaagacccaaaaaagaacttatattcaacactaagacctgggaaatttaccaatcctgctccaggaataaggtctacggcagtgtttaacctggcaaaattttcctatcaatctcatcataaagaaaacttctttggctcccctgggggaacaatatggtcttttaaggtcctaactttgtggaaccacttttgaaaaaactaatctttgaatccaacccttaaaggcctttcattctaacggttttttttaaaaaaaaaaaaaaaaaaataanatantnatggggggccccccttttaaagaaccatttttcctcccgttcatgaaattattttctttttataagccccctaattcaatcccccccccgttttatcaacggcggaatagaaaaccttggttccccatttttccccttaaaacacccctttttccagtggtaaaaaaaaaaacccccccatccccttccaaatnccccccttaaggaaaagaccccccttaccccattaaccccggggttggttttccccaaaaaccctactctcccccccttccccctttttttttttcctttttttcccctnccgctttcccaaaaattaaaagggctctttttggtcccttttccttcccccccacccaaataatgggtggtgtcctggcccccccttaaacttccctctaatggcaacttatatcccccca

SEQ ID NO: 129528 - DNA, 765 bp, Arabidopsis thaliana
agctaagatcaaagataaagatgaagttcattaataaagggaagagaatatggatgttagccttactaaaaatccaactagttctgatcgtgctaaaatggccaaaatgcaacccatattatcgcaattccctgaggatcagatgagtagatatgaatcttttaggagatctgcccttcaaagaccacagatgaagaagttattgataggtgtcactggtagtcagaagattggtatgccaatgattattgttgcgtgtggtattgcaaagatgttcgttggtgaactcgttgaaacagctcgagttgttatggcggaaaggaaagaatcaggacctatcagaccttgtcatagtcagggagtcttagcggagactaaagctcgaaggacaagtgcctaagagatcagttccacgccttttccgccactcaacaggagccaaaagagtacttagatcagcctaagactggggaatttaccaatgctgctcaaggataagggtctacggcaggtttaagctggcgagatttgcctatcaatctcatcataaaggagaacttctttggcttccctggtggatcatactgtgctttgatgttcttaccgttgtgtgacaacttttgtagtaaatcaatctttggatacagaccctgaaatggctatcagtcttacggtttggtttttaaaaaaaaaaaaaaagggcggccgctctagaggatccaagcttacgtacgcgtgcatgcgacgtcaagctggtctatagtg

SEQ ID NO: 129529 - DNA, 899 bp, Arabidopsis thaliana
  unsure (1)..(899): unsure at all n locations
cgacttatatagggaacgctggtacgcctgcaggtaccggtccggaattcccgggtcgacccacgcgttcgcccacgcgttcgcggacgcgtgggggggacagtgctaataaacctgatgcttgggcgtttgaggaaggtcctcattctgattttgctggacctaattctgggagcacggcatgcgtagctgttgtttgagacaagcgggtatttgttgcaaatgcaggtgactcacgttgtgtgatatccagaaagaatcaggcttataatctttctagagatcacacaccagatcttgaagctgaaaagaaaggatattgaaagctgggggctttatacatgcagggcgagtcaatggaagcttaatctatcccgagctttcggtgacttggaatcaagcagaatatgtttttgccctctgaaaagcgaatagttcccggttgcccagatggtaacactggtgaaactctgggaaaaggatgattcccttgttctggcctgcgatggaattnggggatggcatgacaagccaacaactcgtgttttcatacctaaacattgaattcagagaccaactttggggggttggagaaaagttctcgatgaaggttggctccaacccttaggggggaggggtgggaaacatgaccttattttgggttcattaaaacccctcctcttagagaacggatataaccaagcccgccggcagaagaaccccattagccgtctcttaaattagcccatctcaagggagggaaaccccttaatcaaatttggggtaaatggaatctttggagaaatatttttccacccgcgtggtttgaattaaccttccgcggggcgactttttctagcgcccatttgaagggtaattgggaaaaaaaaaaaaaaaaa

SEQ ID NO: 129530 - DNA, 639 bp, Arabidopsis thaliana
tctacgactttcttagggaaacctggtacgcctgcaggtaccggtccggaattcccgggtcgacccacgcgtccgcatactctctttttttctcggacaagaaggctacagaaagatatgtcgctgtcgtcttacctcagcccgacgcgccttctagaaggctacctccgccgttgtctcagggcggcaggactgacgtcgcagacgctttccatagactctgaaacaaccatccacttctggggcccaccacctctagaccaccggagcgacgatgacagaccggttatgcttctcctccacggcttcggtccgtcgtccatgtggcagtggcggcgacagatgcaagccttctctccctccgctttcagggtttattctcccgatcttgtcttcttcggcgactctacctcttcctccaccaatcgcaccgaagtcttccaggttttataaaccctatggctctatctctctattaattataaggaatggttggatcccacaatttcccattagatttaccgatgatattattgttttttttaaacgaaccagatttgggatggtttccgaacgctagcctcatgacttggggaaaaacaaatcagataaagaacccaagaagcaaattttttcaaa

SEQ ID NO: 129531 - DNA, 429 bp, Arabidopsis thaliana
aattgttatccccttctctctctgaaactagggtttctatttctctgagtgatgtgaaatgctcgtgtaaacggaaacgatgcagaagattctgtgcaaaagtaccacttcttcaacccctgttctctctacgccggtgaactctctcgccgccggttttatctctctagggtttaagacccccgttaaaaatctccctccttgttctactactaaacctctctccacttgtttcttctctacttccgctatgccgaccacaacggcttctgtttcttcaggcggtgttggtttctctgcttatctacagaggactgttcataaaccggcaccggcgtctgttcggttctcaacagctggttaccggacttgccggtgttcaattgacggtacgaaccgggcttgggttggtcgaaccgggtcttggcg

SEQ ID NO: 129532 - DNA, 579 bp, Arabidopsis thaliana
  unsure (1)..(579): unsure at all n locations
tatacgactttcttagggaaagctggtacgcctgcaggtaccggtccggaattcccgggtcgacccacgcgtccggaaaaatcttttttcttcctctccttgatcggagggtcgccgtgttgaaaaggatggatggtggtggagagacgacggcgacggctacgatggaggggagagggttgaagaaagggccgtggacaacgacggaggatgcgatcttgacggagtacgtgagaaaacacggtgaaggtaattggaacgccgtgcaaaagaactcaggtttgctccggtgtggcaaaagttgccgtctacggtgggcgaatcatctccggccaaatctaaagaaaggatcttttactcctgatgaagaaaagatcatcatcgaccttcacgctaagcttggaaacaaatgggctcggatggcttctcagttccctgggtgaaccgaccgtgagatcaagaactattgggacaccaggatgaagagaagacaaagagctgttccaaaccaagatcttgatcatacccaccaaatatgattcagnccacatattctttaatacttcataatcctgggct

SEQ ID NO: 129533 - DNA, 533 bp, Arabidopsis thaliana
  unsure (1)..(533): unsure at all n locations
nnnnnnnnnnnnnnnnnnnnnnnnnnnnnnnnnnnnnnnnnnnnnnnnnnnnnnnnnnnnnnnnnnnnnnnnngtgggtcgacccacgcgtccgtacggcggcgtgatgacgacagaagggggaaggtcgtgagaaaagaaaaacacttctcaatctttctacagtcttcttcttccaaaagaacaccatcttccttcgtaatgtcagagaaccagtccgaagaagtccagcaaatcgagaagctctatgagttcagtgagcgtctcaatgcctccaaggacaagtctcagaatgttgaggattatgaggggatcattaagatgtccaagactagtatgaaggcaaagcagcttgcgtcgcagctaattcctcgctacttcaagttcttccctagtctctctactgaggctttcgatgcgcatatggactgtatcgatgatggagatcttggggtacgtgttcaagccatccgtgggctcccgctgttttgtaaggatacgccagatattttatctaagattgttgatgttct

SEQ ID NO: 129534 - DNA, 899 bp, Arabidopsis thaliana
ccgagcttgacgttaatgctgatttcttatacttgatagcagatgcagaagttatggcgatccaatacggaaacccagataaactatgtgtaccactccgtggaagctcaaaagaatccgtgatgatttttttggaaaccatagggctaaatatgttaaaaaagtttttgtgtagagagagtttccgggcctaacctctaaaacatttaagcccgaaacatctgctatacccttggggccacccaaaaaagtccatatagggctttggtgggttccaatttcgcactgaagtgggcatatttccaaaggggcacctgcaaacaattacctccgggtttattaaaataaaacaaaatgtcttttggatcctttccaaaaatttttttgagaaaaggtggttaccccttaaagccaatccaaacaaccccttttttttggaaagggaacataatttccctcccacccaaattttctttcccaaatggggtaccaaggtcccttggggttttgcctccaaaaaaaacccatttttctgaaaggcctttttacatgggaacttcccacccttgggcctgaaaagaaatccccggaatccccctcacccccccggggctttggggggattccaaaaatgccccctccctctcccgaaaacaaggagggcacctttggaaaattatggcctggggctcttgaagggcggagagtttagcttctcttaaaagtccccaacccaactccggtttcgaaaaaaaaaaaaaaattttttaaacctgtcttggaacgccccccttgtttgcacacctgcttaaaaaaaaaaaaaaaaaaaaaagaaagggggccctctaaaacacttcccaccccccccccctttttttttttggccaataaagctcggg

SEQ ID NO: 129535 - DNA, 585 bp, Arabidopsis thaliana
  unsure (1)..(585): unsure at all n locations
anncgggttcnttgncttccaggncttttgggaagggttnccccggagcgggnccacaaccnnttttggggagtccaaattgcccccccccagattttcttcccaaatgggtcacaggatccatggcgtcatgcatccaaacagacctcatctcctgaactgccttcttacattgtgacttgccacaactgtggccatggaagtgatctccgtggatgccctcaatctcccatggtcattggaggtgattccaagaattgcagttcacctgatgcagtgaacaaagtgaggcaacatatagtagatcatatggacttgtggctctctgagtgtcgtggagggattaggagttccatgtaaagagtcacacgaagtcagaaactgcggttatgcaaataaataaaacatcagatgtatgtttcaaacctgtatctgtgtaactgtaacctctgatgtatgtttcgaacttgtctctacggacctaatacagtagtttacacgaaaaaaaaaaaaaaaagggcggccgctnnnnnnnnnnnnnnnnnnnnnnnnnnnnnnnnnnnnnnnnnnnnnnnnnnnnnnnnn

SEQ ID NO: 129536 - DNA, 470 bp, Arabidopsis thaliana
aacaataacaactctcatgaacttgcagattgatatggcagtatctggtcatacaccacttgtgaatgctgcagtgatagttgatccttcagttaggcgaataatagctagtgaaactgatcaagtatatgcatcatctgctcctcatgacatgactagcgcagagaccaggcccttccaagaaacacgggaaatatgtttaaatgacacacgtgaaaaacataatggttcattgtctgctctttcttgtctgaatccctggcaatggagtttgcagccgcatgacactgaagattgtacccagtggcatcctcttaggcatgcttccatggttgccattgaatcctcttctgccagagatagaaatttgtttcccaatccatccaagatttttgatcaggatcatgttttggcctcaaatacagattctccggctaaaaaacagaaaacaagcagtcaaagtccagacg

SEQ ID NO: 129537 - DNA, 658 bp, Arabidopsis thaliana
  unsure (1)..(658): unsure at all n locations
nnnnntaatacgactcactatagggaaagttggttcgcctgcaggtaccggtccgaaattcccgggtcgacccacgcgtccgcacatttattggaaagttgcacaagcatcacaacgaggatgccgtatttggtgctttctctttgattttctggaccctcacgctcattccccttctcaaataccttcttgtattactgagtgccgatgacaatggagaaggcggaacatttgctctctattccctgctttgtaggcatgctaagcttagcttacttcctaaccagcaagctgctgatgaggagctctcagcttacaagtttggtccttccacggatactgtaacttcatcccccttcagaacatttcttgaaaagcacaaaaggctgaggaccgctttgctgcttgttgtactttttggagctgctatggtcattggagacggggttctgaccccagctttatcagttctgtcgtccttgtcaggcttgcaagctacagagaagaatgtgactgatggcgaactactggtgcttgcctgtgtcatattggtcggactgtttgctttgcaacattgtggtactcacagggcggccgctctagaggatccaagcttacgtacgcgtgcatgcgccgtcaagnnnnnnnnnnnnnnaac

SEQ ID NO: 129538 - DNA, 539 bp, Arabidopsis thaliana
  unsure (1)..(539): unsure at all n locations
ctcnnnnnnnnnnnnnnnnnnnnnnnnnnnnnnnnnnnnnnnnnnnnnnnnnnnnnnnnnnnnnnnnnnnnnnnnnnnnncggccgctaattaattaaggtggatatttgatgctaggagaggagagtgagagataagatgggtttcgtctgaagagctccaacttgattcgctcaattgatctcttttgtatcgacaacctgcgatggcgccggcggaatctggagtctctccccgtcggaatccttctcaactctcgtggatgaatctctctagtaacttgattttggcctaccagagctttggtgtagtctacggtgatctcagtacttctcctctttatgtcttccctagcacatttattggaaagttgcacaagcatcacaacgaggatgccgtatttggtgctttctctttgattttctggaccctcacgctcattccccttctcaaataccttcttgtattactgagtgccgatgacaatggagaaggcggaacatttgctctctattccctgctttgtaggcatgctaagc

SEQ ID NO: 129539 - DNA, 825 bp, Arabidopsis thaliana
acgacttcctatagggaaagctggtacgcctgcaggtaccggtccggaattcccgggtcgagccaggcgttcgcccacgcgtccgcccacgcgtgcgcggtatattccccccaagagatatgtgtttgtaacttcttcgttttgcacagtaacggagggaacttgtttatatatatatatatataaatgtacaggtcgaatttctgaagcgggggggggctggtgatcacaatggagccctaaaggacgcatgctttcacttaggtcccttacccgcaatgaccagtctttactggaaaacttgaaggagacttttgttagtttactccaacccgacggacccgcacctgggaaagatttggcctttgaatgatctggcaaatacgctacaggtttctgccggtaataggcttgggaatcggaagaccgaagttaatgaaaataatcaaggcgacgctttacacccataccgagggtttaagcttaaatgagtaaagacgggttaataatctcctgaagaaaattctttgaggaagggacccccgtttgattggggttattaaatcaaatcaaaaaaagatgcaccccaacttggttcttagtcacacaacgttttagcgccctgaatacaaaaaggggggacaccacttgttgagatgactaaacttgcccaaaaacttttggaagaaagcgcttttaaagatggaattctgcgatgccgaggttgtgcaattacctgtttacaataatggagacctgaggtgggttcacactttttggtacccaaccaactaaccggtaaattgctgggccgttttttatttg

SEQ ID NO: 129540 - DNA, 749 bp, Arabidopsis thaliana
  unsure (1)..(749): unsure at all n locations
cnnnnnnnnnnnnnnnnnnnnnnnnnnnnnnnnnnnnnnnnnnnnnnnnnnnnnnnnnnnnnnnnnnnnnnnnnnnnnnnccacgcgtccgcggacgcgtggggcgagtgcaattcagaaatcactctggctgataaaaaacggtgtcgtatggttctttagtctcatcactttcctaaagagcagtgaagcaaaatggcgaattggatctcgtcgaagctcaaagccgccgaaacaattcttcaacagcttgatcagcaggcagcagattctcttcggaaagatgagaagtcagagacccatgacgaggtgtttgagacctctccaaaatctggaagtagtcctgtttctttgaaagatcagttgaggaagaagacatatgaaggtagtgactctggtagtggatctcagagaaactcaacagagcaaaagcctagctacttaagtagcagcaaaaaagtacgcataccagatcaatcacacgaaaggacaagtgcaccgtcacaaagtttgacacaagataatactaaactcactgacaatgattggacagaacttctgagtactccaaatcagaggaccagcacttctacgtctcgtagtcctggtgaacatctgcgattcggggattgaagaagggatggaaaagacatgggaatttggggaaaatcctttggatctgatggaaagagaagagagtagaatgggggtaatccagagggggccccaaaacagacaattaggaccca

SEQ ID NO: 129541 - DNA, 434 bp, Arabidopsis thaliana
ggcccgaatttccgggttcaaccaagccttccaaattcagccaggggtctggtagtcgacagttagattccatagaagagtcaaaaggttcaacatcaccagaaactgctgatctggtagtccagtatcaaatgtttcttaatagacaggaagaagttcttgctgctactcgcattcagaccgcctttcggggtcatcttgcaaggaaagctctacgtgccttgaagggaatagtgaagctccaagcatatatcagaggtcgtgctgtgagacgccaagcaatgactacactaaaatgcctgcaatctgttgtgaacattcagtcacaagtctgtggtaagagaacacagattcccggaggtgttcacagagattatgaagagagcattatattcaatgataacattttcaaggtggacacaaacggccaaaag

SEQ ID NO: 129542 - DNA, 520 bp, Arabidopsis thaliana
  unsure (1)..(520): unsure at all n locations
gcacgcctgcaggnaccggnccggaattcccgggtcgacccacgcgtgcggttcagggtgaagcttatgtcggatctgaagacggagacagataagatcacacacatcgatgtttaacaaaggcgtaaccgaagaggaagaggaacaaatcgacggttctggttctgggtctggttccggtcaagagaaggagatgattcctctcggtgaagccgtggaatctaaggaaaaagaagagcagcaagcgtgtaaagaaccgtgaatcccaacagttttgatcaaataaaggaatttgtgatttgacggaagaaaggtagtgaagaaatcccatctcccggttgagaaggcggccggcgggagtgggttcgaagccggagaaagaatgcgttccctatgtttctctattgaagcttatcgaagaagggagatgggaaggacgatttcatttgggatgggtaggtcacccgaccaccgggttcggcccaggaaacgggtccaaacctgtcataaaaaaactcga

SEQ ID NO: 129543 - DNA, 397 bp, Arabidopsis thaliana
attgtttctagggtttacgaaatttgggtctctctccctctctctacttaacgctctctgtatcttcttctccgtcaacgatacgaacccagagacgtcggcggttaaaacaatcgtcggatctctctggattcgttagacgagaagtttccggtatctaatttctgtgcgttagagagaaattagggttgttgctacgatggatgagactttacttgacgatataatacgacggcttttggcgacgaataatggaaggacggtgaagcaagcacagattactgagacggagatacgtcagctatgtttagcttcaaaagaggtttttctcagtcagcctaatctcctcgagctcgaggctcctatcaagatttgcggagatgttcatggtcagttt

SEQ ID NO: 129544 - DNA, 691 bp, Arabidopsis thaliana
  unsure (1)..(691): unsure at all n locations
atgattctccagctctctacgactcactatatggaaagctggcacgcctgcaggtaccggtccggaattcccgggtcgacccacgcgtgcgcttttagatagccatcatgtaaagaaaaaaccctagccgcctaaagaggcaacgacttctctgatccattgttgaagatcgatgaagcagaatccaaagacgaaaatggaggaaatgaagatctcattgtactcgcacatggacgagacgatcgaatccgattcagttgttagatctagaccaaaggcgaggagataaagcgaaggttagatctgcttttgtaccagcacatatacggggaagaaaggaatctatttcaggctagacaatatcaaatttccgatcaaatgtcagatatacgtgtctcaaactaatttacttttattgatttagttgttagaccaagcaagcaaacaaaaacttgaaagaactctgcaatggattacactgtcgatcgatatggttagatctgtgatgaaagtggacagataatacgagctttgtcgggaaaaggtgccagcngtgctacaatgtgtcaacggttgatggggtcatcaagtccagcatnaaccaaggttcatggnggggggcncccctaagttggccnagttccccgggggnnccnncnttngggtttcccaatncaaatttttgnccttt

SEQ ID NO: 129545 - DNA, 500 bp, Arabidopsis thaliana
  unsure (1)..(500): unsure at all n locations
ccctcgcgtccggaaaaaccctaatcagcttctcgtctccataaattcagaaccaagaaacatctctgagagactaaacgaagatgtatcttcagtgctatatcaacgagaagggtgagaaggtttacacaactaagaaggaatcaccgctagggctagccactgaatctgcccatccagcccggttctcccctgacgataaatactcaaagcagagagtattgttgaagaagcgatttggtctcttaccgacccaaaacgcacctctccagtactgatgaagaagcaaaccacttgcctgtgttggtttttgatgttcctttttaatttgctatgttgtctcttaatgaaatgttgacttgaaccgtctttgtaatgtcttcaaatagtgtgagttaagagcaattaaaaaaaaaaaaaaaaagnnnnnnnnnnnnnnnnnnnnnnnnnnnnnnnnnnnnnnnnnnnnnnnnnnnnnnnnnnnnnnnnnnnnnnnnnnn

SEQ ID NO: 129546 - DNA, 499 bp, Arabidopsis thaliana
acgactcaccatagggaaagctggcacgcctgcaggtaccggtccggaattcccgggtcgacccacgcgtccggttaggctgagtatatggacatgaagacccttttagaccgtacaaacgacgccatcaacacaatcatacgacttgatgagaccaccgaaacaggggaatttcttcagccttgtattgaagctgcattgcatttggggtgcacactcttggagagcttcaaggagccaacggaacattaacccgagatgttatcttagccaagactcaactaacttggacaacatgttgtcccaagtattcatgaaaccaaacaactttgctccaaagaatcttgcagtagcacaagagaattgccctgtctccaagtactctgcctaccctttatgctattcattccggccaatcagtgactcgtgtaagtccaagaacagtagaccggcgagtctcattgacccaacaatggcattacctttggtgggtgtgaat

SEQ ID NO: 129547 - DNA, 509 bp, Arabidopsis thaliana
  unsure (1)..(509): unsure at all n locations
ggacacgactcancatagggaaagctggcacgcctgcaggtaccggtccggaattcccgggtcgacccacgcgtccggaacaaagaagaaattttgaaaatagtgaaaatggtaaccgtaagccaaagtcacacgacgacgtttctcttcttcaccacatttctcttgatattcggatcaatctcagccgtccgtttgcttccacgaccaaacactacaacaaccaacgatctagatttcatccgaacaagctgcaacgctactctatatccagacgtctgcttcacgtcactctccggctacgcctctgccgttcaagacagtccggcgaggctagccaagctcgcaatcggcgtttcactttcacaagccaaatccactgcggcttttctctccaaactctcacgctctgccgctaaatactccggtgatggccaccaaacagcttccgccgtaatccgagactgcgtttcgaacgtcgaagacgcggtggacgagatgagaggatc

SEQ ID NO: 129548 - DNA, 481 bp, Arabidopsis thaliana
  unsure (1)..(481): unsure at all n locations
agctggcccgcctgcaggtaccggnccggaattcccgggtcgacccacgcgtccgggagaatttagtccaaacagctgagaataacttggctacagagagaaagaaaattgaggtagtctctcaacagattaacgatctgcaatctcaggtggaacggcaagaaacagaaattcaggataagatagaagcactgagcgttgtttcggcacgcgagttagagaaagtaaaaggttatgagacgaagatatccagcttgagagaagagttggaactagcaagagagagtttgaaggaaatgaaagatgaaaaaaggaaaaccgaggaaaagttatcagagacaaaagcagagaaagagacccttaagaagcaacttgtgtctctggacttagtcgttcctccttaattgataaaagggttcgacattctaaagggtttgatagcacaaaagacgcacaaaacgaatgctaggttgaaaacctg

SEQ ID NO: 129549 - DNA, 793 bp, Arabidopsis thaliana
acccgacttttttagggaaacctggtacgcctgcaggtaccggtccggaatttccgggtcgacccacgcgtccgctctgatttagtgatttttcaaatttcaagttttcttcacctttaattttgtgtctcgttgatctctctttggacattctgctttggattctggaggcttctcattagatctctattagtgggtttaggtcaagttcttgaaatggataaggagaaatctcctgcaccaccacctagtggaggtcttcctccaccatcgggtcgttactctgcgttttcacctaatggaagtagctttgcaatgaaagctgaatcatcttttcctccttttgaactccaagtggaagcaatagctcaaatgctaaccgattcagccatgatattagccggatgccggataatccacctaagaacctaggccatcggccacgcttattcagagattctaactcttcctgatgacttaagctttcgaagggatcctgggcggggggtggggccccttaagcgcccctctttcttgagagatccgggcaaggacttaccttatttggttctgggaagggaaaaattaaattttggggtccatgaacctttaaaggggggagcccacagacccgctgggggaaatgattacccccaatttatacctcaagaaaccccgggggctttagtgaaagcccagaattaaccccccccggccaagggtggggggttcaccaccttcaccctcaaatccttttgcagggaataatattttttggaatttattaaaaaac

SEQ ID NO: 129550 - DNA, 584 bp, Arabidopsis thaliana
  unsure (1)..(584): unsure at all n locations
nnnnnnnnnnnnnnnnnnnnnnnnnnnnnnnnnnnnnnnnnnnnnnnnnnnnnnnnnnnnnnnnnnnnnnnnnngggtcgacccacgcgtccgcccacgcgtccggcggaatcgagttgtggaagttgttgcggtgatggtggtggtgaagcggtaacggcggttggtggtggttgtaaacggtgcggtgagagagaagcgagtgtgttggtgttaccatgtcgtcatttgtgtttgtgtacggtttgtggtggttcggctttgttacggacttgtccggtttgcgatatggtcatgaacgctagtgtgcatgttaacatgtcttcttgaccatcttttttttttgttcgttacaatttaatttatattttttttgtttccttaggattatattcgcaaaagaaatagcaaattgattcttttctttttgtaagtacatataaattagtttttggttaanaaaaaaaannnnnnnnnnnnnnnnnnnnnnnnnnnnnnnnnnnnnnnnnnnnnnnnnnnnnnnnnnnnnnnnnnnnnnnnnnnnnnnnnnnnnnnnnnnnnnnnnnnnnnnnnnnnnnnnnnnn

SEQ ID NO: 129551 - DNA, 351 bp, Arabidopsis thaliana
agcggacgcgtgggtttggagatgcacttttacgagtcttgcccttacctgaagttcgctcatttcacggcgaaccaagcgattctagaagctgttacgacggcgcgtagagttcacgtcattgatttagggcttaatcaagggatgcaatggcctgctttaatgcaagctttagctctccgacccggtggacctccgtcgtttcgtctcaccggaatcggaccaccgcagacggagaattcagattcgcttcaacagttaggttggaaattagctcaattcgctcagaacatgggcgttgaattcgaattcaaaggcttagccgctgagagtttatcggatcttgaaccc

SEQ ID NO: 129552 - DNA, 508 bp, Arabidopsis thaliana
  unsure (1)..(508): unsure at all n locations
nnnnnnnnnnnnnnnnnnnnnnnnnnnnnnnnnnnnnnnnnnnnnnnnnnnnnnnnnnnnnnnnnnnccacgcgtccgctaaactaagagggacaccgttggacactgcaagcaaatcagattcatgtaatgatacccgagatagcaaagcgaacacaaatcctattcgtaaaagcaaccggatttctaaacgacgtgttctggatgaagaactcggtggtcttgatgatgatgacgaagaaattcaatttctcagaaggatgaaaatggctaaagttgtggctgtagaagaagatgttgatgacgatgaagacaggaccagaaaacataaaaagctttccaaggtaatgaaacaaaatgtagaattcccacggggtgtgggaacatcaaaaaactcacccagaaggataagatgggaaaagcttttgacgatgctgattatgtcaaggatgatgatgaggaaaaagaagacgctgttcaagatgttgagctaaaaaataaagaccgc

SEQ ID NO: 129553 - DNA, 352 bp, Arabidopsis thaliana
  unsure (1)..(352): unsure at all n locations
gattctntgaagtgtatatnaagagtgtagcagaagaagcgtttttcccggcggcggagagttcgccggagtctgagccacgtntcgcgttcacggttgtnccagggtttagaattgggaagacttcaatacaatgcgaggtctatctctcgctttcatgatcgccgtttgatctaagatccgaaaacggacggtgaagattcttgggcggtttggtaatttctgaaaatggtggggtatgtttagaaaattgagaaaaattgtgggccgttggatttgaagtagccgacctagagttgtgtttatgttttctttttttccccctcttttgagttttgtcgatattagttca

SEQ ID NO: 129554 - DNA, 505 bp, Arabidopsis thaliana
  unsure (1)..(505): unsure at all n locations
actcactattgggaaagctggcacgcctgcaggtaccggtccggaattcccgggtcgacccacgcgtccgcttagcaatggcattacgtctagctttaagtctatgtgtttatctgctgtttacacaaggtgcacagggaaacactgatgattttgattgtgtggaaatatacaaacaaccagctttccaacatccattgttgaaagatcacaagatccaggaaacattcagcctagatggaaaaattgaaagaagcaacaaatataatacaaaagagcatttgtccaaaggaaccgttgccattttgagacaaagaaatgtatgccaagggcgttcatttgaataccgacgagtattctggggaacatttttgcaacaattgagaccattttagatggaagtatatatccggngagcagaaccctgatttaagtattcatgatttgaaactgcaaaataacccatgcaggaaaagtccaatatggcctaaagaatggacctaca

SEQ ID NO: 129555 - DNA, 594 bp, Arabidopsis thaliana
  unsure (1)..(594): unsure at all n locations
nnnnnnnnnnnnnnnnnnnnnnnnnnnnnnnnnnnnnnnnnnnnnnnnnnnnnnnnnnnnnnnnnnccacgcgtccgcttcgaaattggagctggggttggtgacatgataaactggggactttgtgttatcttcgttttgtttgtgtttatctttttggtcctggcaatgtgagtgttgtatagaaaggggaaggagaaggaagtagcgggcctgtaaaactatcaaaggttttgaaccgcgacaaagacgatggtgaacgtagaagtgctgtttcagggaaaaaaattctgctgaagttgacaagtccanagaggacaaagctgcagaaagcaaaagaaattgacctgctttaggtcttaaccgcaagtttccgactagtatttttcggcttttgcctcgatgacagaatcttaacaccaaaagaaaggtagaatggtatttgattaaatnctaagttcccgaattggttgggagatacaatcctggtttggttttccaaaggactaatcctgcagggattggtctacttctttttcttgttaagcctaaaaggtgggttatcgccactgtttttttggaacccaagaatgg

SEQ ID NO: 129556 - DNA, 1191 bp, Arabidopsis thaliana
  unsure (1)..(1191): unsure at all n locations
aacagtccatatgctcaaatgccccaacaaggtcaagcagttgccaacatcagtccatatcctcaaattccacaaacggcgntgtcatgccaaaccaaccaaatcaggctcttgggtcaggctatcaaccacagcaacaacagcagcagcagatgatgatggctcagtactatgcccaacagcaacagctacagcaacaacancagcaacaggcgtatggaaaccagatgggaggatacggatatggctataatcaacagcaacaaggaagcagcccatatctggaccagcaaatgtacggtttatccatgagagaccagacatcgcatcaggtagcatcatcatcatctaccacatcttatctgcctccaatgaaacctaagaataaaccagaggccaagctatttggggatcttgtggacatctccaaattcaagcctacaaaaccgacttccggaagagctggtaccatgtgaaaattcctccatccattcatcatttaccagtattcatctcctctatcctcctcagctaactctctttcttctctttgttaagcttttttcatcattgattttattaccctcttgggagataacatagatatacatatgtgttatgttcttccttataatttaccgttggttatgggtttgtatatttcttgtagagaaaagaaaactggaaaatcttttgttgagaactcagcgatttggggtttgtctcgagattctattttaggacattttaatctctcatttgtattttcagaccttttatttgttatatccattggcaataaagtttgatatcaattggatgagaaaaaaaaaaaaaaaaaaaaaaaaaaaaaaaaaggccncccaatttaaaagggcccacctttcctgcacgatccaagcgggccgaccctccttataggacccaacctctattccatttggtggccanggtatttcctcgtgatgggcgggccaaacttgggtgaccgggaaatccgtgacctccccgatcttcgcgattttgcggccgtccccttttgaaactgccggcaacagtcccctttccaaaagtgcgcaccttcaaagatgcccgcactctgcccgtataagagaataccctctctggtggtaaaggcccccccccggggcgttcccttaacccccccgttccccggccctccctatggcc

SEQ ID NO: 129557 - DNA, 787 bp, Arabidopsis thaliana
  unsure (1)..(787): unsure at all n locations
nnnnnnnnnnnnnnnnnnnnnnnnnnnnnnnnnnnnnnnnnnnnnnnnnnnnnnnnnnnnnnnnnnnnnnnccacgcgtccgcgccttctctcgcagccaacgatcccatccaaaaccaaaactcgctctccggtgatcgtctttcctttacctcgccgaccttctccgtcttctctataactcatttctcttcttttctcttttctagttatattgagattgtggctgcaagagaaacggcaaaatgctgctactgaagcaaatctcaccaccgttccatctccaccaactccgccgccgtatctccaccatcatctccgccggattcactctcaacctcccaaaactcgaaccttcctccgacgccgaactaatctcccaaatgttaataacaaatcacaacccattccacttcatggaatcatctctccaactcaacggcatctccctcactcccaacctcatccaccaaaccctcctccgtctccgtcacaattccaaaattgccctctccttcttccaatatctacgctccttaccctctccttcaacaacaccaacctctttcaatctcatcatcgatatcctcggccgtgttcgtcaattcgacgtcgttagacaacttatagtcgaaatggatcaaacttctcctgagaccttcttaatcctcgttaaacggttaatcgccgccgggcttactcgacaagcggttcgtgctttcgacgatgcagccttgtttctcgagaatcgtcggtttcgtttagtcgaattcgggttttactcgat

SEQ ID NO: 129558 - DNA, 1286 bp, Arabidopsis thaliana
  unsure (1)..(1286): unsure at all n locations
nnnnnnnnnnnnnnnnnnnnnnnnnnnnnnnnnnnnnnnnnnnnnnnnnnnnnnnnnnnnnnnnnnnnnnnnnnnnccttcaatggactttcccagttgcaggccttcatgctctctatgtccttgctttaattgcattcacaagagcagttcgacatgtagagtttcgttttgacgagcttagagatctctggaaaggaattctcgtctcagccacttcaatcgttatatgggtaacagcgtttgtgttgaatgagattcatgaagaaatctcttggcttcaggttgcttcaagatttgtgcttttagtcacgggtgggattctcgtcgttgtcttcttttccatctcgagtaaccaacctcttctttcacaaatcagcttgaagaaaagacaaaactttgagtttcaaagaatgggtcaagctctaggcattcccgatagcggattattatttcggaaggaggagtttcgacctgttgacccaaacgagccactcgataagcttcttctcaataaaagatttcgccattcgtttatggaatttgctgatagctgctacgctggagaacattgcattnttttgaagaggtgtctgaacatggtaaaatcccggaagatgattcgataagaagaatctacatggctcgacatatcatggaggagttcatcgtcgcaggagcggaaatggaattgaacttatctcataaaacccgacaagagatcttaaccactcaagatctaactcacactgatctcttcaagaacgcattaaacgaagtcatgcaattgatcaagatgaacttggtaagagattactggtcatccatctacttcatcaagttcaaagaagaagaaagctgccacgaggcaatgcataaggaaggatacagtttttcatctccaagactgagttcagttcaaggctctgatgatcctttctatcaagaacatatgtcaaagagttccagatgcagtagtcccggttaaggagtctaaaactggtactagaccagaacccaaaccaatgttcatagcaatccaatccatgtaatcttccttcacatttcttgtacatgtcattttctctcttgttatacctaactgtaagagaaaatgtccggttcggattttggtttagttttaaatgtgtataccggacaaaaactatggaaccatactaattaatatctcgaagaaaaaaaaaaaaaaaagggcggccgctctagaggatcccagcttacggacgcgtgcatgcgacgtcaaagttctttataggtcccctaaa

SEQ ID NO: 129559 - DNA, 750 bp, Arabidopsis thaliana
  unsure (1)..(750): unsure at all n locations
ctgtcgcgtgggttcgttctgttcctttcgttagactccgccgtgaatgtctccgaactaaagacaacggctctgttgctttggattgggtcgccggcgaagataggcactttcctcctgattcaccaatcctcattttgttgccaggtttaacaggaggaagtcaagattcgtatgttagacatatgttgttaagagctcaaagtaaaaaatggcgttgtgttgtgtttaatagccgtggttgtggagatagtcctgtgaccactcctcagttctactcggcttcgtttttaggagacattggtgaagtgattgatcatgttgttgataaattcccaaaagccaatttgtatgctgctggatggtctcttggaggcaacattcttgttaactatttgggtcaggaatctcataactgtcctctcactgctgctgtttctttgtgcaatccttttgatttggttatagcagatgaagatttccataaggggtttaacantgtttatgacaaggccttgtcggaatctcttcgtaggatattttagcaaaccattcctcttcttttttaaggcataggaggtgaatttaacattccttttggctgcaaatcctgnaccggttaggggattccntgntggcttaacccaggcttgnccggttcaaancagngngngnccntcccagccgggagnccaagcttaaanangccggnccctccttnttcnggnggaaaancccttnnccccgnng

SEQ ID NO: 129560 - DNA, 795 bp, Arabidopsis thaliana
  unsure (1)..(795): unsure at all n locations
gaattgagacgacactatacttgnactatgacgccgcatgcacgcgtacgtaagctcggaattcgtctcgagtgatgatcgtcatgatgatgatgctgatgggaagctcatgttatctgcttgttgtaagcatttcactgcctatgatttggaaaaatgggggaatttcactagatacgacttcaatgctgtggtcacagaacaggacatggaagacacatatcagcccccatttgagacttgtataagagatggtaaagctagctgcttgatgtgttcatataatgcagttaatggggtccctgcttgtgcgcaaggagacttattacaaaaagctcgagttgagtggggatttgaagggtacattacatcagactgtgatgctgtggcaactatttttgcgtaccaaggatataccaagtcacctgaggaagctgttgctgatgccataaaagcaggggtggatataaattgtggaacatacatgcttcggcacacacaatctgcgattgagcaggggaaggtgagcgaagaactagtagaccgagctctgctaaatctctgtgctgttcaacttcgtcttggactttttgatggtgatccaagaagaggacagtacggaaagttaggatcaaatgacatttgtagctcagaccacagaaaattggcactggaagcaacaagacagggaatcgcgctcctgaaaaatgatcacaagttgacgcctttgaacaaaaaccatgtttcttcattagcaatcgctggtccaatggctaataatataagcaatatggg

SEQ ID NO: 129561 - DNA, 519 bp, Arabidopsis thaliana
ctatacgacttacttagggaaagctggtacgcctgcaggtaccggtccggaattcccgggtcgacccacgcgtccggtcgtaatgtcatcatcgaacaaagctggggtgcaccaaaggtgacaaaggatggtgtgactgttgccaagagcattgagttcaaggatagaattaagaacgttggtgccagtcttgtgaaacaggttgctaacgccacaaatgacgtagctggtgatggaacaacgtgtgccacagtccttactagagctatcttcacggaaggttgtaaatcagttgccgctggaatgaatgcaatggacctaagacgtggtatcaaattggcagttgatactgttgtgacgaacttgcagagccgagcacgcatgattagcacctctgaagaaatcgcccaagttggaacaatatcagctattggaaatagggaaatggggaactgattgcaaaggcttgaaaacctgccgcaaagagggagtggtcacacttcaagatggcaagacctt

SEQ ID NO: 129562 - DNA, 197 bp, Arabidopsis thaliana
gaaatcatgtacaacactatacaaaccggagtttacacacttatcctttactcgatgatcggatacgactggactgtggtcaaattcttctggttctactactacatgttaacatgcttcgtctacttcaccctatacggtatgatgcttgtcgccttgacaccaaactatcaaatagctggaatcctgcttgtcct

SEQ ID NO: 129563 - DNA, 400 bp, Arabidopsis thaliana
atacgactttattagggaaagctggtacgcctgcaggtaccggtccggaattcccgggtcgacccacgcgtccgcggacgcgtgggcggacgcgtggggcctgcctttttcagattacctccggtttctaccactctcgccgtcgccgtcaccggtactccgatcacctccgcacgattcatttcctatttgcatttttcacctctctagcggaaagtgagtcttctcgagaatgggagattgaagaagtaagagattcactgattgaggaagagagaaaggtagttcaaaaaaatggctccagtgagtaaagctgataagaaggcaggcgtaaatgctgctgcgggatgtacgatgtcggcacttctgtgggatcctcattggtaataaagcgcttatg

SEQ ID NO: 129564 - DNA, 492 bp, Arabidopsis thaliana
  unsure (1)..(492): unsure at all n locations
gcgcccctcccctcgcccccatcccacccctagaagcctcatcnctttacgactcactttttgaaagccgggacgcctgcacgtaccgggcccgaattcccgggtcgacccacgcgtgcggttccacatctttgtctgatcatggtgaaggaaacagtgtactatgatggtcttggtgtcactccctctgcttctgaggaagagattcgcaaggcttattacatcaaggccagaccaggtcatcctgaccagaatcaacgggatcctctagctgctgaaaaggttcaaggtcttggtgaagcttaccaagttctaagtgatcctggtcatcgggaagcgtatgatccgactggaaaattctcagctcccaaagaaaccatgggtgatcccaccgctggtttacctcttttttttcgaagggaactattcgaggattattatccggcccttggggtggtacatcaatggccttacactcacaaggcttctgaa

SEQ ID NO: 129565 - DNA, 530 bp, Arabidopsis thaliana
  unsure (1)..(530): unsure at all n locations
nnnnnnnnnnnnnnnnnnnnnnnnnnnnnnnnnnnnnnnnnnnnnnnnnnnnnnnnnnnnnnnnnnnnnnnnnnnaaaaaaaccacgcgtccgaggagtttcatgttaaaaagaaatgaagctctcttgtttggtttttctcatagtatcgtctcttgtttcgagttctcttgccaccgctccgcccaacacatctatatatgaaagctttctccaatgtttcagcaatcaaacaggtgctcctcctgagaagttatgcgacgtcgttctgcctcaaagcagtgccagcttcactccaaccctacgtgcctacatccgtaacgctcgtttcaacacttccacgtcccccaaacctctgctcgttatcgcggcgcgttctgagtgccacgtccaggccaccgtcctctgcaccaaatctctcaacttccagctcaagactcgcagcggcggccatgactacgacggcgcttcctacatctctaaccgccctttcttcgtcctcgacatgccctatctccgtaacagtaccg

SEQ ID NO: 129566 - DNA, 812 bp, Arabidopsis thaliana
  unsure (1)..(812): unsure at all n locations
cgactcacttagggaacagctggtacgcctgcaggtaccggtccggaattcccgggtcgacccacgcgtccgctttcttctccatatacaaaaaaaacagagaactcacaatgtgcgattcagattttctctctcgttgctcttcctacgaagcagacgttgattccgacagcgagatctcgacctccagtttcagttcttgttcgtacagtgaatctgaggaagaagagatcaacaatggttttggtgttgttcagtcgaagaagcaaacgaagaaactggagaagaagaagagtaatgtgttgttagaaggttacgttgtagattcagctgtgaatgatgatttgaagagaaccaagagtttaacggacgatgatctcgaggagcttaagggatgtgtagatctagggtttgggtttaattacgaggagattcctgaactttgtaatactttaccagctcttgagctctgttactcggtgagtcagaagtttattgatcaagatcatcatcaccattcttcttcttcgccagagaagaaatcatcggttcttgattctcctgttagtcctattgctagctggaagatctctagtcctggtgataatcctgatgatgtaaagccaggtgtgaaattttgggcacaagctgtggcatgtnctgtgaggttatgtacttgaagatgagatttggatttgatcaaccaaaagctgaggaatcaatggaggnggaagaagatggtgaaaccagacaatttgcaggngtgaaatctcttatgagactgacctgcttgaaaacaaccattgttgtag

SEQ ID NO: 129567 - DNA, 608 bp, Arabidopsis thaliana
  unsure (1)..(608): unsure at all n locations
tnnnnnnnnnnnnnnnnnnnnnnnnnnnnnnnnnnnnnnnnnnnnnnnnnnnnnnnnnnnnnnnnccacgcgtccgaaccaattagcttctttctgtaaaacctcactcgttggccaattcttttggttttcatacacataaatctcagattccaaatgggttttcttagctctttctttcaaatgatgaacatttgttagcagaatcttcctctttccctaaagttttgatctttttttcccccttcaattttgtattttctcaccaaataaaaaaaggtttcttcagtgggttttaagggtttattattatcttaaaattaaacacaattctttaatcaaaaggcaaaaatcttaatttcatcactctcttctcactcacaaaagttcttacaatcttcaaagttttggtcttgtttcttttccgatttcaccggacaaaaaaaatgtcggcgtgtttaagcagcgggggaggaggagcagcagcatatagtttcgagttaaaaaaagtgaaatcaccaccaccatctttcctcacaacacaacaagagctacttcaccatcatcaaccattttcgaatcatcaaattcacacctcgcatctcaac

SEQ ID NO: 129568 - DNA, 503 bp, Arabidopsis thaliana
  unsure (1)..(503): unsure at all n locations
acgactacgtattgggaaagctggcacgcctgcaggtaccggtccggaattcccgggtcgacccacgcgtccgcgctgacagtgcttgctcacacactaatcgcaattgttgctgcattgccgactctgattcgttcgatttcagcattttgttcttccgaagcgatgcctcgtcgatccggagattgcatgagatgtctggtgattttcgcggttgtatcagctttagttgtgtgtggacctgctctttattggaaattcaacaagggtttcgttggatccacacgtgccaactctctttgtcctccttgcgtttgtgattgtcctcctcctttgtctcttctccagattgctcctgngctcgcaaatctctctattacagattgtggaagcgacgatccagagcttanacaagagatggagaagcaattggtggaccttctgactgaagagctgaagctgcaagaggcagttgcagatgagcctagcccgcatatgaatgt

SEQ ID NO: 129569 - DNA, 679 bp, Arabidopsis thaliana
  unsure (1)..(679): unsure at all n locations
gctggtacgcctgcaggtaccggtccggttttcccgggtcgacccacgcgtccgtaaagactcagcctttaagtatccccagaagtcgtatgaccttacgtagcttaatccttgagatgcgttcgagaccgcatcgtgtggtccacgaccttgccgccgccgcagctgccgattccacttctgtgtcatcgcaagattatcgctggtcagagattcctgaagagcttcttagggagattctgattcgtgttgaagcggcggacgggggcggatggccgtcacgacgcagcgtggtggcttgtgccggcgtttgtcgtggctggcggctacttatgaacgaaaccgtcggtggccctgagatctcttctaaggtgactttccccatctctctcaagcagactattgagtttgaagacgctgcgtttgcgtttgtattggtccccaacccagagggggtggctcgaaactatgatttgatcatgaaacaagagatatatgatcatttttacggttggatcagnttcaggtaaatattgggtagcctacttaaatggtgattttgggggggggatcttctgcagctggcccaaggattactgggtcaatgctttataaacgtatcgattacgcatcattcattttatttgggttacccactcttaccgatgtgggaagtttg

SEQ ID NO: 129570 - DNA, 928 bp, Arabidopsis thaliana
ctatagggaacagctggtacgcctgcaggtaccggtccggaattcccgggtcgacccacgcgtccgtgaacatcgtcaagttcatcaaagattgttagatcaacggcttttagcgatggtctcaccaagaggtacacagagaagacactcaagtgattattctgaagattttctaagatcttgctctctttgtaaacgtcttggtgggcatggccgtgacatctatatgtatagaggagatagagcgttttgtagtttagagtgcacggcccaacaaattacagtgggaggagaggaaggagaagaagaaggggtgggtgaaggtcaccatcgttgggcgccaccggaaccaccaaaggagagagagtttccgccgccgggtaggcctcttttcatatggtatatattatcgggaatggatggattatagggtccttgttttatgtataaaaggcttggagcactatggactgtgattaaccctgtgaatgcttcctttaagccttggcttgtgatcttaagaatattgggattatgcatataaagaagatttggggttctccggtttaaaaaaccaaaaaaataataaaaaaaggggggggcggtttaaggaaccaaagttacctgcgcggggatggggaagaataaattttttatagggccctaaatatattgacggggcggggtttacacgggagggagggaaaacccggggatccacattatggggttggaaaaatccccttttgccaggtgggtatagagaaaggcgcccccttcccctttccaacagtgccaccctgaggggatgggcccgcctgggtgggattatggcggggtggtggtttcccaaaatccccattttggcgccctacgccgtttttttttttttttttttgacagtggggtttcccaaaatatatggggc

SEQ ID NO: 129571 - DNA, 754 bp, Arabidopsis thaliana
  unsure (1)..(754): unsure at all n locations
nnnnnnnnnnnnnnnnnnnnnnnnnnnnnnnnnnnnnnnnnnnnnnnnnnnnnnnnnnnnnnnnnnnnccacgcgtccgcggacgcgtgggctcaattttgcttcttacttctttccccggctgattagaaacttgaccgcttgattctcttaaaggaggtcttgcgatggattccgctattgatatcagttctgatagtgatgtcgagatacaagaaactagaaccaggcctcaacatcccccacggatagctgaagagatctctctacgctgagaccgcactttcttagtgggagttcttccggtgcaaatggccacactaaaacaggacttacaaatctcgactcacgtaatggttttgaatccaagccactgcctcgggcagaacaccatacacatattccgggaaatgggagtatcgtaacttccagaattcccaatatctctgttggtgattatgagaaattttcatctcaacaagcttttaaaaggacacatccaccaacctttagtcgacctccttttcctcctagacctgatattggtacaagtaacgggaatgcgagtcactttcgtggtggagcacatgatgatctaggcatggggcgtgtgactaacggcactcggatcctacctccatctgtggcgcacggaacatctgcgtctccttcacatttaatggattaagtgatccaatgcataggaatggcataggcgaagaaaggaattcggaaaatgacgagaggctgatct

SEQ ID NO: 129572 - DNA, 909 bp, Arabidopsis thaliana
cgctggacgcctgcaggtaccggtccggaattcccgggtcgacccacgcgtccgcccacgcgtgcggatattccttatctgtgtgaatggaagaaggattcatctatctgagtcatgctaatgtgcttcctgggttacgattctttcagctgccaatcgagcgactctctcatcttcctcctatcgcgtgttccagaggggttgatcaggaagatgaagcacagagaaggagagcagaaaacttctaccacaccaacacgatgaaaattgcgaccacttcacgctcttgcttataagtaaatagtgggaggcccgaagattatcaacaagaagaacctaccgaacttccttcaaaactgttgccttgtgagggggcccctcgggcggccccttgaaactggaataccgtcgaaaggagggtgtcgccacgcctcaaatgtttccgcagctacttttggaccaaacctggcaagggacaaccggggggtttggtcctggtttaaagattcgaaaggcccctcctgcacagaaataaggcttacctaccggctgcgggggcatttgtttcccgtcaccctatttactaggaccggctcctttaaaaaatgggagcaaccaaccaccggcggcgggagaccctaaatccccatttaggggtttgcgagaaaaaaaaaaacaaccctcccgccccccttcggaacctcccaaatcttccccgccccaccgaccaaaggaagagctctccaaaattggggcgtttgaaccccccttcccctacagggagtggggcgccccgcaatctttgggcgccccaccccggtgtgggacaagggcctttttgcgcgccccaccttgcaccaacacggccctccacccctctaggaggggcgcagaacccacccaaaaggg

SEQ ID NO: 129573 - DNA, 632 bp, Arabidopsis thaliana
  unsure (1)..(632): unsure at all n locations
nnnnnnnnnnnnnnnnnnnnnnnnnnnnnnnnnnnnnnnnnnnnnnnnnnnnnnnnnnnnnnnnnnnnnnnnnnnnccacgcgtccgcggacgcgtgggctcgttttcaattttgagtcagattccccccaattgagagattctagggttttaagatgattgaacatgggaactctacctttgattaccggagtattagagaagtcgctgcatacgccggcgccggagccaccgcaggggctatcgcggcgacttttgtttgtccattagatgtgatcaaaacaaggctacaggttcttggtctccctgaagctccagcctctggtcaaagaggtggtgtaatcattacaagtctgaagaatataattaaggaagaaggttataggggaatgtttcgagggctttcaccaaccatcatagctctccttccaaattgggctgtctacttctcagtttatgggaagctaaaggatgtgctgcagtcaagtgatggcaagcctagtattgggtcaacatgatagctgcagctggtgctggagctgccacatctattggcactaatccgctttgggttggcaagacaagattaatgacgcccaggatttaggcctggggtgggaccctacaaaagt

SEQ ID NO: 129574 - DNA, 527 bp, Arabidopsis thaliana
gttgttgttaaatgtgtgacgtcatctcaaaccaactgtgcttcttcggaatctgtaagaaaaaaaatggatcctttcgactagggaccgcctaaatcatacgcaaacaaagtctcttcctttacccgtctacacgttcgaattttttctccgggtcgggtcaatgtcaagaacgacgagaattgtatataatcgtcgattcacgtggccgggtttatcatttactgctggatctcgttttcaattttgagtcagattccccccaattgagagattctagggttttaagatgattgaacatgggaactctacctttgattaccggagtattagagaagtcgctgcaaacgccggcgccggagccaccgcaggggctatcgcggcgacttttgtttgtccattagatgtgatcaaaacaaggttacaggttcttggtctccctgaagctccagcctctggtcaaagaggtggtgtgatcattacaagtctgaagaatataattaatgaagaaggttatacggtgaatg

SEQ ID NO: 129575 - DNA, 766 bp, Arabidopsis thaliana
  unsure (1)..(766): unsure at all n locations
gcgggcacgcctgcaggtaccggnccggaattcccgggtcgacccacgcgtccgcaacaatttattccgtgttccataaccccatgaacacattattcgagagaaatggaatcagccaatcactctctttcctccatatataaaatctagccaatattcacaaataataactacttccttcgttcttttccttaccaaaagatccacctcgaacctctctcctccgtcttcctccgcagccgccgtcactatcaccgcagctagaatgagagaagataatccaaattggttccttagatgggaagaagagcttccatctccagaagaactcatccctatctctcaaaccttaatcactcctcatctagctctcgctttccaaatcggaagtcctaatcatcatctcggatcaaagagaaccaccgcgatttatcaccagaagcttcaatcctccaccactccaacaactccaactccaactcctccaccgatgatgatgaattctgatttcggcggtggcgattccacggatcttggttcaggatcaataggaggagagccagcaagaacgttgaaacggccgcgtctagtgtggacgcctcagctacacaaacgtttcgtggatgcggttggacacttagggatcaaaaacgcagtcccaaagactataatgcagcttatgagcgttgaaggattgactagagagaacgttgcgagtcatcttcagaaatatcgtctttaccttaggggggaatgcaaggcgggg

SEQ ID NO: 129576 - DNA, 558 bp, Arabidopsis thaliana
tccacactcacctgagggaagagctggcacgcctgcaggcaccggtccggaattcccgggtcgacccacgcgtccgataatttctttttttccgatcaatctaatccaatccagagattctgagtctcaaagttttgcttttttgagtctgttttccaaagacatgtagggctggattctaagcttgcaacgtatccatttccctggtctttcttggtgatccggaactgaagtgaaggctctctggattgcttcatttagatcaatatagaggtttatctgacttaggttcttgatgagtttatgttctgtatcagagtagatatatgtggaggagatagttttagttttaaagattagattttgctgtccattttatacaggaattgaagtgaggcatggaagatgtgtccgagtctgataataatgttgagacctccattatccaccttccagatgattgcctttcctttatctttcaacgacttgatagtgttgctgaccatgattcaattgggtttgacttggtcatcgctggctcaacatccaaaacattag

SEQ ID NO: 129577 - DNA, 2638 bp, Arabidopsis thaliana
cttttttcgcggcgtttgatgcactgtgtgaagaagggatagcaacctcggtctgtagagctcttgatgaagtagctgatatatcagtcccagcctcaaaggaccatgttaaggtgcagggtgagatattagagggtcttgttgctcgtatcgtgagcagtcagagctcaagagatatggaaaatgtcttgagagatcatcctccaccaccctgtgatggagctaatcttgatctgggactcagtctaagagagatatgtgctgcccatagatctaacgagaaacagcaaatgagagcacttttaaggagtgttgggccaagcttttgccccagtgacgtggaatggttcggagatgaatctcatccgaaaagtgctgacaaatctgttataacaaaattcctgcaatctcagcctgcagattattcaactagtaaattacaggaaatggtacgcttgatgaaggaaaaacgtcttccagccgcattcaagtgttaccataattttcatagagctgaggacatatcacctgataaccttttttataaattggttgtccatgtgcacagcgattcaggatttaggcgttaccacaaagagatgaggcacatgcctagtttgtggcctttatatcgaggtttctttgttgatattaatttgttcaagtcaaacaaagggagggatctgatggctctgaaaagcattgataatgccagtgaaaatgatggtcgaggagaaaaggatggtttggctgatgatgatgctaacttaatgattaaaatgaagtttctcacatacaagttgagaacctttttgatccgtaatggcctatcaattctatttaaagacggggcagcagcttacaaaacttactaccttaggcaaatgaaaatctggggtacgtcagatggaaagcagaaagaactttgcaagatgcttgatgaatgggctgcttacataagaagaaagtgtgggaatgatcagctatcttcatcaacatacttaagtgaagctgagccattcctggagcagtacgcgaaacggagcccaaagaaccatattttgatagggtctgctgggaacctagttagaactgaggacttcttggccattgttgacggtgatctagatgaagaaggcgatcttgtgaagaaacaaggagtgacaccagctactcctgagccagctgtgaaggaagctgtccaaaaggatgaggggttaattgtattctttccaggaattcctggatctgctaaatctgcactttgcaaggagttattgaacgccccaggaggctttggagatgataggccagtgcatactctgatgggtgatcttgtcaaaggaaaatattggccaaaggttgctgatgaacgtcgtaaaaaaccacaatcgattatgttggctgacaaaaatgccccaaatgaagatgtctggagacagattgaagatatgtgtcggagaactagggcttctgcagttccaatcgttgctgattctgaaggaaccgatacaaatccatattcacttgatgccttggctgtattcatgttccgtgtacttcaacgagttaaccatccgggaaagctcgacaaggaatcttcaaatgcaggttatgtgctattgatgttttatcacctttatgagggaaagaaccgtaatgaatttgagagtgaattgattgagcgctttggctccctcatcaagatgccactattgaaatcagacaggactcctttacctgatcctgttaaatcagttcttgaggagggcattgatttgttcaatctccatagtagaagacatgggagactcgagtcaacaaaaggaacatatgcagcggaatggaccaaatgggagaaacaactacgagatactctagttgcaaattctgagtatctcagttctattcaggttccatttgagtctatggttcatcaagtgcgagaagagctaaaaacaatagcgaagggtgattacaagccaccttcggagaaaagaaaacacgggtctattgttttcgctgccatcaacttgcctgctactcaagttcacagtcttcttgaaaagttggctgcagcaaacccaacaatgagatcttttctagagggaaagaaaaagagcatacaggaaaaacttgaacggtctcacgtgacgctcgcccacaagagaagccatggcgtagcaactgtagccagctatagtcagcacttgaacagagaggtacccgtagagctcaccgagctcatctacaacgacaagatggctgctctaacagcccatgttggatctgtggacggagagaccgtagtctccaagaacgaatggccacatgttacattgtggacagcggaaggcgttactgcgaaagaggccaacacgttacctcagctttacttagaaggaaaggcgagccgcttggtgatagatcctccggtgtcaatctcaggtcctctggagtttttctgaatacttgattaaacatggaagtttctctcttgagggaggttgctcgtggaatgggacacatatggttgttataataaaccattccattgtcatgagattttgaggttaatatatactttacttgttcattattttatttggtgtttgaataaatgatataaatggctctt

SEQ ID NO: 129578 - DNA, 465 bp, Arabidopsis thaliana
  unsure (1)..(465): unsure at all n locations
acgcctgcaggtaccggnccggaattcccgggtcgacccacgcgtccgcggacgcgtgggagattatatagtgagcgattgttagaagccattaattacttgagtcggaaggtttatttgtttgttatttgtctctcggactggttgattgggttaaacttgtcaatgagtaaccctttgaatctgtcgttttgtttggtcgggcgaattatatagaaatgtattattggttataaaatggtattagggtttttggcgaaaaaaaacactatacactttaattaaaaacctcacagaccccaaggggcgcgccgctctagaaggatccaagcttacgtccccgttgcttgccgaatcattagtttttttatagagggccctacattaaattaacctgtccggagaatgaacaacatcgtgactggggaaaaccctgacagtacccaaattaatacaactaaaaaa

SEQ ID NO: 129579 - DNA, 463 bp, Arabidopsis thaliana
gctggaccgcctgcaggtaccggtccggaattcccgggtcgacccacgcgtccgaaccaccaccaccacttctcaatgtcgtcttccaccaccacaacaaccaccgtccacggcgagcctgaacgacgaacttactggtgtcatgaatgcgatatgagtttatccctcctctcctcctccgattccgattccgattcctctcctctgttatgtccccaatgccgtgtcgatttcctcgaacgtatggatcacgattcttcttcttctaatctctttgacgttacccatcggggattttggagaacaagacggagaaaacgatgatgaagacgaccaagaagattggtggttcgttgatccaagctgttaattccgatgataattccctcctcgataggccttaccttcaccgtctttttcgtatcttgcttccataattcaggatcggcttcttcttcctcgc

SEQ ID NO: 129580 - DNA, 354 bp, Arabidopsis thaliana
ggaaaaaccgggccgacccacgcgtacgtgggttctgggttttgattatttctacaatgtaaccacatttttcactttccggagatgggcctgcaaacgatgaaggttgcgaaagattgtgtagttgaagtcagttctgaagaggaagggttcgaaggagcttggttcagagctgttttagaggaaaacccaggtttcttatctcgcagaaagcttcgtgttcgttactcgacgttgctggacatggacggttcgtctcccttaatcgaacacatcgaacagagattcattagacctgtacctccggaggagaattaacaaaaagacgtcgttttggaggaaggttttgctggt

SEQ ID NO: 129581 - DNA, 684 bp, Arabidopsis thaliana
acgacttcctataatcccataaatatatattgattacaaattacagatacataaactagaaactacctataattcataattcttcggcaatagtaagtagtaacccatatgtttatcaaaggaaataattattcattaaaatgttcttgacctactaatcctataacatggggaccaatactttgacaatcatcgtcatcttatcatattcatcatcatcatcatcgatcaagatggatgaaccttatttccagctgcagtcttccaagctgatctcatagacgcggcggctgatcccatcgccgccgcaatatgtcgtttcgcggcaactgtcgccgctttctccattaaattccccgttctccgagcagtctccgctttctcctcaagctctttcagctccgccgcctccatcctctccatctcctccaacgtccgcctatactcctccatcccccactccatatcccgatcaagttcaagttcagcttcacggagagattcttcagcttcttcgagttcttgttgctgttcggattcgagagctgcccaagctttgtatgactcgacttcaaagagacgcatcaggtcctcgattcttgaaccgtcgaatgtttctcgagccgaattccgagcttacgtacgcgtgcatgcgacgtcataactcttctatagtgtgaccta

SEQ ID NO: 129582 - DNA, 355 bp, Arabidopsis thaliana
  unsure (1)..(355): unsure at all n locations
taaaannccccggttccccgnanaaagnccccgttttcccccaaaagcnntttaaagcccgccgncttcaancctctcaatctcctcaaacgtccgcctatactcctccatcccccactccatatcccgatcaagttcaagttcagcttcacggagagattcttcagcttcttcgagttcttgttgctgttcggattcgagagctgcccaagctttgtatgaatcgacttcaaagagacgcatgaggtcctcgattcttgaagggtcgaatgttttgtcgacaagagcttgatcggagaggagagtgaagtggtgaattagagcttccatgttttggtgaattttgatggagaag

SEQ ID NO: 129583 - DNA, 761 bp, Arabidopsis thaliana
  unsure (1)..(761): unsure at all n locations
nnntatacgacttacttagggaaagctggtacgcctgcaggtaccggtccggaattcccgggtcgacccacgcgtccgcttccttctggttaactgaaaatggagtgtagttcagtgagtgtactaggaatattactggtatttcctctccttcataaccttgtcaccatctccgggcagaatcttccggcggtgggtttgttcactttcggagattccaacttcgacgctggaaataaaaagttcctcacaagtgctccacttcctcaaaacttttggccttacggtaaatctcgagatgaccctaagggcaagttttctgatggcaaaattgtcccggactttattgcaaaattcatggggataccacacgatttaccgccggcgctaaaacccggcaccgatgtgtcacgaggagccagcttcgccgtcgggtccgcttccattcttggatctccaaaagattctttggctctgaatcaccaagtgaggaaattcaatcagatgatatcaaattgggaagtggattacattcagaaatcagggtttatgattagcattgggatggaagattactacctctttaccaaaaacattcctaatgctgaagtttcttgtcaacaagctttccgtacttctgtcactacccggtaaagagtgatatcacttgttgattcatctggagctagaaattcggcgacccttgctagcgccttaggttgttaccgacgcagaaagaattaaaaccggaacaatggttc

SEQ ID NO: 129584 - DNA, 504 bp, Arabidopsis thaliana
acgactcacacatagggaagagctggcacgcctgcaggtaccggtccggaattcccgggtcgacccacgcgtccgcggacgcgtgggttaaggttctattgaaccagaaagagataagtggagaagcaatagacttcatacttgaccattaccctcctcagactccgttaaattctctcttacaagagcaaaatccgggaagtcttccttttgtccctgaacatctccggcgtgaatccggcgactttgtccttgttaatcactctaccgacgtcaatgctcaagtatgattcccggcgtcccagagacatcaaatcactaagcttaggtttattcatttggccgtcattgtaacttcgactcaatctctgaagtttcggacagttaaatttacagaaataaagaaaaaaaccttgggtccaaaaaaaatgtacaaacccaagaccgcactatacgaccatcgagagaaagggtcgacatcattaaaagggcggccccctctaa

SEQ ID NO: 129585 - DNA, 312 bp, Arabidopsis thaliana
gacttctatagggaaagctggtacgcctgcaggtaccggtccggaattcccgggtcgacccacgcgtccggggtaaggcgcatccaaggacccttaaaggcaagaaaattgccattacagggaagaagaaagtttccaagtaatcactttcttgttctttaatactctttttagtttgtctagtctctctgtttatattgtgaatttttatcttcgtacaacatctgtattatcatcagacacattgatatgcaaactggtttgttcaattcaaaaaaaaaaaaaaagggcggcccgctctaaaggatccaa

SEQ ID NO: 129586 - DNA, 447 bp, Arabidopsis thaliana
  unsure (1)..(447): unsure at all n locations
cnnnnnnnnnnnnnnnnnnnnnnnnnnnnnnnnnnnnnnnnnnnnnnnnnnnnnnnnnnnnnnnnnnnccacgcgtccggaaatgcgcaatcgcaaagaggtactccagcttttgtaagacatccatcaccaactgtgcagccaattcctcagtttatggcagctcagccttttcccagtcatatacccttccctactgaattggcacagtcgtcgtattatccccgtatgccttacatgacacctattccgcatggtccgcagttcttctaccattatcaagatccctccgttacacatgaaactgcataagcaaatacaatattatgttagtgatgaaaatttgattacagacctatacccttcgaggggtcatgaataatgagggttttgttccgctacgtgtggtagctggtttcaaaaaggttgcagaacttacagataata

SEQ ID NO: 129587 - DNA, 604 bp, Arabidopsis thaliana
tgggaacaccctacgactcactatagggacagctggtacgcctgcaggtaccggtccggaattcccgggtcgacccacgcgtccgcgaaaccctaatccccaatttctctttcaagttttcgatcacgatctctggaaaattaagagagaaattcaaaaacttcgggagttcaaagtctcattcagacattccagaaggtattctagtcgactgagtaaacaatcatgagaatcagaaaaggaagtagagttgaggtatttagcaacaaagaggcgccttatggtgcgtggcgatgtgctgagattgtctcgggtaatggacatacctacaatgttagattttactctttccaaattgaacacgaggaggcagttatggagaaagttccaaggaagataattaggccttgtcctccacttgtggatgttgagagatgggatactggtgaattggtggaagttcttgataatttttcctggaaagctgccacagttcgagaggagttatctggactttactatgtggttcgcttacttgggactccagaagaactcacttttaacaaagttaacctcaggcccccaaagtcgtggcaagatgaaa

SEQ ID NO: 129588 - DNA, 748 bp, Arabidopsis thaliana
  unsure (1)..(748): unsure at all n locations
nnnnnnnnnnnnnnnnnnnnnnnnnnnnnntatagggaacgctggtacgcctgcaggtaccggtccggaattcccgggtcgacccacgcgtccggtggaaatggagatggttcgatgagacctgaaggcgaaacaagttcgggtggtggtggaagcaaagcaacggaacagaagaacaaacctgagccaccaaaggattatattcatgtgagagcaagaagaggacaagctactgaccggcatagtttagcagagcgagctagaagagaaaagatcagtgagaagatgacagctcttcaagatataattccaggatgtaataagataatcggaaaagcccttgtgctcgatgagattatcaattatattcagtcattgcagcggcaagttgagtttctatcaatgaacctagaagtttgttaactcgggggcaagtcctggccccacaatatggagtttttccttccggtgatctcgggacttttccgattggcgttcatcgaacattatcccgagcacaagaaagtatgtgataccccgtttttttaaccgggggggctccttatgcgggtgggtgggaaccttacccaaccaaattaaaaaaatnttttctttattgaaggaggggttttttgagggaaaaaaaaagaatgcacccctttatttttattcctaagcggggggtntattttgggggttttcataaaaaaaaaattgagggggcccagagaatataccctttttaaaa

SEQ ID NO: 129589 - DNA, 583 bp, Arabidopsis thaliana
  unsure (1)..(583): unsure at all n locations
taattccaggatgtaataagataatcggaaaagcccttgtgctcgatgagattatcaattatattcagtcattgcagcggcaagttgagtttctatcaatgaagctagaagttgttaactcgggtgcaagtactggtccgacaataggagtttttccttccggtgatctcgggactttaccgattgacgttcatcgaccaatatacgagcaacaagaagctaatgaaacccgagtatctcaaccggagtggctccatatgcaggttgatgggaactttaaccgaaccacataaaaaagagtctttctctgattgatggatgtgttttgtaggcagtaaaaatgaatgcaaccctttattttttatcctatgcgtgtgtatcattttgctgttatatcataagatagaatatgagagtgaccagagagattaacactttataaaacattgttgtattgtcctattatataacttgtaacaattgattcagtaacaaaaaaaaaaaaaaagnnnnnnnnnnnnnnnnnnnnnnnnnnnnnnnnnnnnnnnnnnnnnnnnnnnnnnnnnnnnnnnnnnnnnnnnnn

SEQ ID NO: 129590 - DNA, 1200 bp, Arabidopsis thaliana
gaaaaaaaaaatacagaggaggaaaagaagcacattgtcgccgtctctttaacttccttcatcaatctccgtctcgtgaatctctgtttctttgatctgtaattgcgaattcgtcgtttcccaattttgaaattgttgtaatgtcggcggtctcgtgctccacggcgagttctagcggaggatgtgcatttaggtttcgatcaaagacatcaatccattctcctaatttcatcagaattgggacaaattctcagagtgacagattctgtaatcatcgtttggaattggtacatggaactcgtaaagtgaaaggagcatctgtacgtatggcattagttgaggagagacaatcaacgagcaaagatgttgctgagcctcctcgggtcctggcgtatgatcttgttcaaggagcacttgtgaaatggagatggaaggatgacaaatctgttccagatacacctccacgcgtccgcctacacggaattttagggagcgggaaaaactggggcacttttgctcgtagattggctcatgaattcccaacgtggcagtttctattggtagacctgcgttgccatggggattcaacatctctcaagaagagaggtccacacttcggttgctactactgcttctgatgttctaaaacttggtgggcaggtgaggttaacaccccgggtcccttgtggtcataactttggggggaaagtgtataagcatggtagagcagcagctaatcctcttccacgacaatccgagcttgggtattggatgctactcccgggaaaatccgcgccggaggagatggaaaaaattctccccgaaagcttattttattttaacataattgccaaaaggggtcttggaaagcgcgagggttttaaacttttttaaaagaagggttccaatgttgccgacaggggtatttccaatttaaacctatgacccttgttttagttttggggactttgacctaacggaacctaatttccctcttacaaaaaaaactttgaactttgtgaaatcccaaaggaaactgtgatttttaaagcggaaaacttcccctgggcccaaaacttaggaatcccccctaaaactaccttaaaagggggagaaaaactttttgaaaaccgatttgttcaccaaccccagggttaggagtttttttttccgttcaaaccaaagggagggcctggtgtt

SEQ ID NO: 129591 - DNA, 846 bp, Arabidopsis thaliana
  unsure (1)..(846): unsure at all n locations
tnnnnnnnnnnnnnnnnnncccacgcgnnngnnaaaaaccgcaagaaagcccacaagatttttccccacgcgtccgattcaagttcttctctccctcctctttgcgagaagatctcatacaaaaactattttctaagagttgtggatctcacgattctaggctttctcttttctcttctcttgtaccgaattctacttatgaaccaaaacaactccgtttgggttgtggctttcctctgtgaatcctttttctctttcatatggcttcttattaccagcataaaatggagtcctgcttcatataaatcatatcctgaaagacttgatgaaagggttcatgaccttccatcggtagatatgtttgtgactactgcggatcctgttcgggagcccccgattcttgtagcaaacacgttgctttcgctgttagcagtgaattatccagcngataaacttgcttgttatgtatcggatgatggatgctcacctctcacttacttctntttcaaggaagcctttaagttcgccaagatttgggttcccttctgcaaaaaatataacattaaagggagagctccttctaaatatttttagaaccctcccccccaacgaaaggtctgatttcagaaagactgggaataaccaggtaattaaagggtttattgtttctccgcgcatgattaaatttgcaattggttacaaataaagattcgcttcttcaaaaagccaaatttttttcaacaactttttggaatggaaaaggaagggaaaaacgggggggccatttggtcttaaaatagacaggcggttttaaaaaataaaacaacatatttccacaatttggta

SEQ ID NO: 129592 - DNA, 527 bp, Arabidopsis thaliana
  unsure (1)..(527): unsure at all n locations
nnnnnnnnnnnnnnnnnnnnnnnnnnnnnnnnnnnnnnnnnnnnnnnnnnnnnnnnnnnnnnnnnnnccacgcgtccgtgctcctctcggtctcggtggtgaagacaatggggtcagacgaggaagatttcgtgtttcatggaacgccaatagagcgcgaagaagaaatcgcaagccggaagaagaaagcagtcgctggggcttctggcaatcttagaactctccctgcttggaagcaagaggtgactgatgaagaaggccgtagaaggttccatggagcatttactggtggatattctgctgggtattacaatacagttggatcaaaagagggctgggctccacagtcatttacatcatcaaggcagaacagagctggagcgagaaagcaaagtgtttcaaactttctagatgaagatgaaagggcggatatggagggcaaatcactgtctgcgagctcacaatttgacacatttgggtttacggcagccgaactttcccgaaagcgtgctgagaaagaacagcat

SEQ ID NO: 129593 - DNA, 824 bp, Arabidopsis thaliana
  unsure (1)..(824): unsure at all n locations
nnnnnnnnnnnnnnnnnnnnnnnnnnnnnnnnnnnnnnnnnnnnnnnnnnnnnnnnnnnnnnnnnnnnccacgcgtccggtccagtagagggacctgttctaccctcaaaagtggcttatgttgtgaaagaactctatgacatgggctgctttgagatttctctgggtgatacaattggaatcggcactcctggttctgtggttccaatgcttgaagccgtgatggcagttgtgccagcggacaagctggctgttcacttccatgatacctatgggcaagctcttgcaaacatattggtgtctctccagatgggaataagcatagtagactcatcaattgccggattaggcggctgcccatatgcaaaaggagcttcaggaaatgtagccccagaagatgtggtttacatgttgaacggtttaggcgtccacaccaatgtcgacttgggaaagcttatagctgctggagatttcatcagcaagcatctcggtcgtcccaatggttcgaaggctgccgttgccctcaaccgtcgtatcacagctgatgcctccaagatatgagttttattagaccatctccaatgtatagctctatatcttactcgaaaatagagttactctctacaatttatccctctattttctactctaaaaagaatattcttaaaaaatattctatttctattttatatactaatacattttatttatctaattgacaatttgaccccacaaaaaaaaaaaaaaagggcggccgctctagaggatccaagcttacgtacgcgtgcatgcggcgtcatagctcagctatagtgctgctcaat

SEQ ID NO: 129594 - DNA, 795 bp, Arabidopsis thaliana
  unsure (1)..(795): unsure at all n locations
aatacnacttactatagggaacgctggtacgcctgcaggtaccggtccggaattcccgggtcgacccacgcgtgcgcccacagcgttcgcccacgcgtccgatgagagccaagtggaagaagaagcgtatgaggaggcttaagaggaagagacgaaagatgagacagcgttctaagtaaatttgcctttgaagacaatgcgactctgtttcttgcttctctccctttctctcttgcaaacattgttcttactataagcttccttttatgtttcagacttgtttaagattttaatcaaaaagaaagtttcagactttaaaaaaaaaaaaaaaaaaaaaggggcggcccctctagagggcgccggtatagaggatccaatgtcaccgacgcgggcttctatgggttacctttttttaggggctcgccggtcatttacagggccgggggttggacaacccgtgggcgtggcaaaacctatggggcttcgcaactttacccctttggacacatgccttttacccaaggggccaatagaaaaaggtcccaaagttgccctttcaaaggttgaagggcccaccgtgaagggccctcctccgccgggtcattagccccccggagggggggtttcccatggggccccttaccgcccactcccaacgccccttttttttttttcctttctttttccccgggagcggtttccgggaaccttagggggggttctttgggtcggctttccccaaaactcttacgaaaaattaatgggggggccccggggccttccccctaagggtta

SEQ ID NO: 129595 - DNA, 571 bp, Arabidopsis thaliana
cctacgactcactatggggaccgctggcacgcctgcaggtaccggtccggaattcccgggtcgacccacgcgtccggaaaagaagagaagaaagatgggagcaaagggttgtgttaacgttctcctcaagcttctagtgtttcaaggtcttttcgtttcacgtcctcaagaagactttgatttcttctacttcgttcttcagtggcctggagcctattgcgatacatcgcgtgcttgttgctatccaacatccggtaaacccgctgcagattttggtatccacggactatggcctaattataacggtggttcatggccatcaaattgtgatcccgatagccaatttgatagatctcagatatcggatctcgtaagtagtttgaaaaagaattggccaacactatcatggtccagcaacgaagggcttcacctttcgggaccccaatgggagaaacacggtacatgctccgattccgtaatggaccaccatgagtccttcgaaatgcctctaactcaaacaaaagcaatctcctccaatcctaaaaactccgggtttatccggatgatggat

SEQ ID NO: 129596 - DNA, 721 bp, Arabidopsis thaliana
cacccgacttacttagggaacgctggtacgcctgcaggtaccggtccggaattcccgggtcgacccacgcgtccgcagaagctccttcattctccaccatgagctcgttttacctttcttcttctccaattttcaaacttcagtggcacgcaaaccataaacctaaacccaatcgtgcaatagtttcttttccaccttctcgtcttcatgccaactgctattcgtggagattatcttgtaaccttgctcaacatggtattgagttggaggaaactgtggaggaagatgaaatccttcaagttctcgacttaccaacagaggagacaaatctcgacaacgaaacgattgcttctccatctaaaatgttgaggaagaaaaaaggagatgaagagagcttggacgatagattcaagctcaaaaatggaaaggagattttcgaagagaaggcatatctagtgggcgtggaaagaaagggggatggagaatgcttgtttaatattgaggaatctgttgaggagctagaacaacttgcggatactgctgggcttgcagtggttggttctacttatcaaaagctagcttccccaaatcctagaacatacattggatcaggaaaggtcgcagagattaaaagtgcattaatggcttggacggtgagactgtgatatttgacgatgaactttccccgggcaattgcgtaccctggaaaagggccttgggg

SEQ ID NO: 129597 - DNA, 784 bp, Arabidopsis thaliana
agcccacgcgtccgcttgcttgtttagtctctcctctcctcctcgtcctcaatcatcatcatctgagaattcgcagcttttgcttcttcgatagaaaatctaattatcatcaatcatgtctaagttcacgggattctcatctctcgctatctcttattttctcttggtttcaacgattgttgcagccaccgatgttcactactgcgataataacgaagagtatgaagtaaaagtacaaggagttgatataactccttatcctatagctagaggcgagccagctactttcagaatttctgctaacacagacactgagatctcgagcggcaagttggtgatcgaagtttcctactttggatggcatattcattctgagacacatgatctttgtgatgagacaagttgtcctgtggccattggagatttcttggtagcgcactcgcaagttcttcccggatatacccctcctggttcatactcactaaaaatgaagatgcttgatggacgcaagaaggagttaacttgcatcaagttctcatttgatattggatttggatcctccgtggccgacatgtagagctgatttgctcgacgggatacaccatcttgttctataccatggaaccactctcatttattttgtataaaatacactctcctgctatacataattgttgatcaaaaaccctttgaaaattctcattctggaccattcatgaatccccaccatttatagaaaaaacaaagtaatgaattaaaaaaaaaaaaaaaaaaaagggcggcc

SEQ ID NO: 129598 - DNA, 417 bp, Arabidopsis thaliana
tcaaagaaaaatgggtttcaggtgttatgtccaatcctccatggttcctggtcacctttctagactttcgcgcctgtgaaattccggagccccgtttagtcgtctcctctgtatttccgccggcaatcatgccttcatgtcacttccggtaggtcttcccaatcggaaaaggaagtttattgaacctcaagagtgaaagacctcagagatttgttatctcagctgttgtggatgataaaagtgttgtagctaaagaggagaagaaagatggttctgaagaggttgttgtagataaccagagaatgatcaaagtttgtgataagcttattgaggtttttatggttgataagcctacaccatctgattggagaagattgttcagctttagcaaagaatgggatagtatacggccacatt

SEQ ID NO: 129599 - DNA, 800 bp, Arabidopsis thaliana
  unsure (1)..(800): unsure at all n locations
atacgacttacttagggaaagctggtacgcctgcaggtaccggtccggaattcccgggtcgacccacgcgtccgcttcaagaactgagactcgagagaagcctactatatcgacggttttggttccggctagactggctcaggtcctgaatctgaatttaggcgaaccggtccggtctacggctactctcaacgatgtgtcgtggagacagaggagcaacaatggtgggttctcgagccaaatggtcggtggcgtgagggcggagcagtcagtgcaagagcctcggttaccatcaggagtgggcttattgactgattntatgttcgtaacttttggggtgtgtttagggggaagatcttatgatgggtcttggtttgaagaaagattagagttgatgacaggtagtgaaataggggaaaaaaggttagggtaatgtagagataggggaaatttggaaaagattaaaaaagttcgaaggtgtgagagaccacgttttgaatcgtttaacccccttgatggttggatgatgaaaaaaggactctgagacaacagagatngggactctttttccttttttttggggtttttttttactttttaccgggaatgaaaggtcgtctgcacgggctgtcctttagggaccccttctggcttctttgtccacactttaagaaggataaggaggcttgtcaaaaaanaaaaaagagttcttcaggcaaaatttaaaaaagaggggggccctaggatcaactaccccgggctcgatttattttttttgggccctaataattcgggccggt

SEQ ID NO: 129600 - DNA, 255 bp, Arabidopsis thaliana
agggtggtgattggcctctactgagagtgatgaaaggaatatttgaaggaggacttgagagtgcaaacagaggggctgttgatgaagaagaagaagatgttgaaggcgactggggtgagggacttgacaaattcgatgttgatggaatggagaacacagacatcgaagccatattggatggtgcagaagcaggtgaagaagaagacgacgaggaaagtggatggggacttgacttggatctttcaccagagcttg

SEQ ID NO: 129601 - DNA, 887 bp, Arabidopsis thaliana
acgacttactatatggaacgctggtacgcctgcaggtaccggtccggaattcccggggcgacccacgcgtccggagagattgtcgactttaaagcttacccttcttgatctgtctaacaacacattatcaggccgtatccctctgagcttgggatcatataatgacaagcttcaatggcaatcctggcctctgtagcactacaatcaaatgagggaaccggtgcataaatccttcgagatcgcatggagacactcgcgtgccccggttgggatagtgttcgggtaacagaacttgctagcgtctcttcgttatttcttgcccctggaaaaaccaaaaaaaagggagggcgttcgtttaacaccatttttggattataaactccttccaaagaggattttaccgaaaaaggtttccttgcgtcaaacaaaaaaaaaatatttttttggcacaggaggttgtagggaattcctcccaagttcttcttggggagtggaaaaaaagcgcggtccaccccaccgggggggggaacaccaaaaaaatctttatggctgcgagccccactttcacctgaagggggggttacatcgagataattttaacaaacgggccccccgtcttttgcatcccatttctaaaggggtgtaaaccttttggaaatccaagagacatgactccgctttggtggcggacaatctcttcctatttgaaccccatgggcctctttaatttttgaggagacacaattgggggagaaacacgataaaatatctttggggagaaaagggcttaatcctccttatgcggggaaaccccgactcacgggcggtaccctcctccttccaaataatttgccccttttcaggcttttctttccaataataaggac

SEQ ID NO: 129602 - DNA, 602 bp, Arabidopsis thaliana
gtgtgtttgtcgtctttaaggcttagccttcttgatctgtctaacaacagattatcaggtcgtatccctctgagtttgtcatcatataatggtagcttcaatggcaatcctggcctctgtagcacgacgatcaaatcgtttaaccggtgcataaatccttcgagatcgcatggagacactcgcgtgttcgtgttgtgtatagttttcgggttactgatcttgctagcgtctcttgtgtttttcttgtacctgaagaaaacagagaagaaggagggacgttcgcttaaacacgaatcttggagtataaagtcattccgaaagatgagtttcactgaagatgatatcattgattcaatcaaagaagagaatttgattggtagaggaggttgtggggatgtgtacagagtagtacttggtgatggtaaagaagttgcggtcaaacacatccggtgtagtagtactcagaaaaacttcagcagtgcaatgccgattctcactgaacgggagggaagatcgaaagagtttgaaacagaggtgcaaacgcttagttcgatacgacacttaaacgtggtgaaactctattgtagcatcacgagcgatga

SEQ ID NO: 129603 - DNA, 442 bp, Arabidopsis thaliana
ctgaaactcctaagagtagccgaggcatacagttttctttctccattggagatcatattatcatagagggaaacaaaaggacgcctccaaggtttgtcggacgcatagctgttataatgacacaatgcttaaatggatggtacgttgtgaagacagtggacaattcagagtctatcaagttacaacattgctcacttgccaagatttcagacaattcatctacgaaggtaacagtagctgaaatgcccccgtcttggctctaactcgtagaaagcaaatatctgtggctgcagaaatcagcatctgtaattttttcattcagagaaagtagttactacgtttccttatgtaatataggaacgagacaaccattttctgtactaaatccagtgtttcccttcattccggggggtgttttgtgaaaaggaggaaaaaaaaataa

SEQ ID NO: 129604 - DNA, 578 bp, Arabidopsis thaliana
gttgctagttgaaatggttggttttggtacatccgctggcgttgtggttcttgctggaaccaacagaccggatattttggataaagctttgttaaggcctggacgttttgatcgccagataactattgataaacctgatatcaaagggcgtgatcagattttcaagatttacttgaagaagatcaaacttgatcatgagccatcatattactctcaaaggcttgctgctctcactcccgggtttgcaggagctgacattgcgaatgtctgtaacgaagcagctcttattgctgctagacacgaaggagcaacggttactatggcacactttgaatctgcgattgatcgtgttattggtggtcttgagaagaaaaaccgggtgataagcaagttggagcgacgtacagttgcatatcatgaatctggtcacgcagttgtagggtggttccttgaacatgcagagccgttactgaaagtgactattgtaccacgtggcacagcggctctcggatttgcacaatacgttccaaacgaaaaccttccatgaccaagagcaactctttacatgacttgatgac

SEQ ID NO: 129605 - DNA, 579 bp, Arabidopsis thaliana
  unsure (1)..(579): unsure at all n locations
ctctccgacttacttagggaacgctggtacgcctgcaggtaccggtccggaattcccgggtcgacccacgcgtccggtttggttcatatagatttggagatgataattcctaggtgaatattgagaacaacaaagaagaaattactcacaacaaggtacttgtcaccatactcacattatgattcaataaaaataaaggttgagtctaaaaaaaaaaaaaaaaaaaaaaaaaaaaaaaaaaaaaaaaaaaaaaaaaaaaaaaaaaaaaaaaaaaaaaaaaaaaaaaaaaaanaaaaanaaaaaaanaaaaaagggggggggccgggggggggggtcttaagttaccccccctttcttcccacggcaaagccatttttaaggttcccctaaaggaaaccaaattgcctcctttgaccccggtttaacgggaaaaacctgggaaaacccagtttatcccccttaaaccctccccctttccccccttttcgaaaaagggaaaagagcccaaaaggccccctcaaaaccttttccaaaatttagaggcaatgagagccccccgggcaccgcccttataccccc

SEQ ID NO: 129606 - DNA, 1010 bp, Arabidopsis thaliana
actcactatagggaaagctggtacgcctgcaggtaccggtccggaattcccgtgtcgacccacgcgtccgtacggctgcgagatgacgacagaagggggagatacggaagaatcagatcaacgcatgcgaccaagtaaatcaaaatcgggttgaagaagaaagagataagctttcacatcaatttttgaaggcgcgaaatggggaatacttcatcgatgctgactcagtacgacatcgaagaagttcagagtcattgtcatgatctatttgagcagcaggagattttatctctgtatcaacggttttgccagttagatcgaaacgcaaaaggatttatatctgctgatgagtttctctctgtgcctgagtttgcgatgaatccactctctcagaggctgcttaagatggttgatggtttgaactttaaggattttgttgctttcttgtctgcgtttagtgccaaggctagtctaagacagaaagttcaattgatctttaaagtctatgattcggactgcaacgggaaggtctcttttaaagatatcatggaagtgttgcgtgacttatcgggatcattcatgtctgatgagcaaagagagcaagtactgagccaggttttgaaggaatcgggctacacgagtgactcattcttaactctggaggatttcataaagatctttgggagtagtagaccggagatggacgttgaaattcctgtggattagactttatgatcatatatcatcaaacccaacactcaaatctcatcttgtattttgtccacactgtttctagaataatccttgttaattgatcacatcattgcaggctttttcagcacttgttaagtatttgtcaattgaaacttgttctactaaaggaaattacaattgtttcctctgcttagctttttgcaaaaaaaaaaaaaaaaaaaaaacaaaaaaagcggccgctctagaggatccaagcttacgtacgcgtgcaggcgacgtcataactcttctatagt

SEQ ID NO: 129607 - DNA, 792 bp, Arabidopsis thaliana
  unsure (1)..(792): unsure at all n locations
gagagaatgagttggtctctctgcagcacccatggggtctcctcttccatagctctcacttatggctttcgccatagaagaagatccaccttccgtattttcgccacctctgacggattagaacccaaggacgacccgccggaatctcctctcccttcctcatcctctgctctcggtaaagacttgaaaaaggttgttaacaagactgctgcaacctttgcccctagagcttccaccgccagtaaaaaccctgctctccctgggactactctttacaaagtttttgaggttcaaggctatgcatcgtctgttcctcggaggtgtcctttctttcaacctcctctttccctccaggaaacctgttttatggagggtgatgggccttgggcccatttgagtgttcacttttccttttttgggccccaaacttttccaaaaaaaaaaaaaaggctcttaactccctttttttaatcggccccttgctaaggggtgctttccccttcttttgagaaataatgtgcctcttggccgggctgccaacaccggttcccttctntttttttttttccctgaaaactttgattggctgaaaaaaacaaagtagggccccctcgcgaatcttgagggtttaagacttaaatttctttttcttcttcctctaaagggcctcattcccctattccgtaaggcccgggttaaggaaaaaatgcaccttcctctaatgtattaaccccccctaggatatttttgaaatctaaggttgaaaaattttgtgcacaaaaaaaaaaaaaa

SEQ ID NO: 129608 - DNA, 629 bp, Arabidopsis thaliana
  unsure (1)..(629): unsure at all n locations
gnnnnnnnnnnnnnnnnnnnnnnnnnnnnnnnnnnnnnnnnnnnnnnnnnnnnnnnnnnnnnnnnnnnnnnnccacgcgtccgggcctatagatggaactggcgaaaagccaaagagagattgaaagtctcaattcagagcataattatctggaaaaacaactagcttccctggaagccgcatctcaaccaaagacagatgagattgacaggcttaaagagctcaagaaaataatctctaaagaagaaaaagagattgaaaaccttgagaagggttctaaacagctgaaggataaagctttggagctgcaaaccaacttagagaacgctgggggtgaaaaattaaaaggacaaaaggcaaaggttgagaagattcagactgatatcgacaaaaacaatacagagatcaatcgggggtaatggtcaaatagaaacaaaccagaacctgataaagaagttgacaaaggggattgaagaggctactcgagaaaaagagaggctagagggggagaaggaaaatttgcatgtgactttcaaagatataacgcagaaagcattcgagatccaagagacgtataagaaaacacagcagttgattgatgagcacaaagacgtgttgactggagcaaa

SEQ ID NO: 129609 - DNA, 502 bp, Arabidopsis thaliana
  unsure (1)..(502): unsure at all n locations
aagaaactcccnnnnnnnnnnnnnnnnnnnnnnnnnnnnnnnnnnnnnnnnnnnnnnnnnnnnnnnnnnnnnnnnnnnnnnccacgcgtccgagagactctctcaacaaggtgccatcaccaagaggatgactgcaattgaagaaatggctggaatggatgttctctgcagtgataagactggaactctaacccttaacaagctctctgtcgacaagtccttaattgaagtgttcccaaagaacatggatagtgactcagttgtattgatggctgcaagagcttccaggattgaaaaccaagatgccattgatgcttccatcgtcggaatgttgggtgatcctaaagaggcaagaccaggaatcacagaggtgcatttcttgccctttaaccctgtagataaacgtacagcgatcacatacatcgatgaaagcggaaactggcatcggaccaataaaggagctcctgaccanatcattaaactctgcaactcccagggggag

SEQ ID NO: 129610 - DNA, 646 bp, Arabidopsis thaliana
  unsure (1)..(646): unsure at all n locations
gggacagctggtacgcctgcaggtaccggtccggaattcccgggtcgacccacgcgtccgctgaaatctcaaaatcgaaactaaaagcttctcagatctctaactatagctcaaggcggaggagactgagatcgatcatctgaatcgccgaaacatgtcgagcgatagcaatgatcttgacgaagatgagcttcttcaaatggcgttgaaagagcaggctaagagagatctcacctatcagaaacctccttcatcttctgctcgtaagcctgttgccaatttagtgcagcagcctcgacagcagaagcctgtggctgcggctgccgctccgccgaagaagtctgctgcggcggttaggaagccttccatggatgaggatgaggagtcggaggtggaattgcttatcatttcgagcggggatgatgatttggagagggaaagggaaataggtggttctagtgggggtgcggggagaggaagaggtanccatgtaccaaagaagggaagagcgaggaaggaagatgatggtgcttgggatggaggaaagccttattgtagaaacgggttattgaagctgaccttgctcgaggggtccggatatgagggaatcgaaacagccccgtggttaaaaagtaaaaagtaagcc

SEQ ID NO: 129611 - DNA, 618 bp, Arabidopsis thaliana
  unsure (1)..(618): unsure at all n locations
nnnnnnnnnnnnnnnnnnnnnnnnnnnnnnnnnnnnnnnnnnnnnnnnnnnnnnnnnnnnnnnnnccacgcgtccgctgaaacggtcgagtttacttgagattacagagattaaggcccgagaagaagcttcatctgagttgaatctcgatctttcgcgagatccgtacaaaatcatcgtcagagaagccgtcgatagtttcatcgagaaggcgattatgacaatcgatactgagatgggaaagcttcatactcagattgtagaagatgttgatggagaagtaaccgagaatgccccgaagacgactacgaagaagaaaaagaagaagaaggcaaagaagaaggtggaagaagaagagtcatcacctgcttaggtaaattttatcatctcagataaatttcatctttgctcaggtttttgtgtaatttcaacgatgaatgatgtctttagttgaaattagtgttttagccattgatactacacttcaagtcaaagtgtatcagactctgtaacatgctccctccaaaaaaaaaaaaaaaaaaaaaaaaaaaaaaaaaaaacaaagggcggccgctctagaggatccaagcttacgtacgcgtgcatgcgacgtcatag

SEQ ID NO: 129612 - DNA, 745 bp, Arabidopsis thaliana
cgacttactatagggaacgctggtacgcctgcaggtaccggtccggaattcccgggtcgacccacgcgtccgcggacgcgtgggcaaacaaacaatgggagacgaagcaaagatcttcactctctcagaagtttcagagcataatcaagctcatgactgttggattgtcatcaatggaaaggggtacaattgtgacctagtttcttgaagaccatcccaggtggggacgatgttctcttgtcttcaacaggtaaggatgcaacggatgattttgaggacgtgggtcacaagcgagagggcaagagaaatgatggagcagtactacgtaggagagattgatccaccacaattccaagaaagtcaaatacccccctcctaacacgctcactacatcaaaacaaaactctggattcataatcaagctcctccaggtcctctaccccttgccatttttgggtaagaatcggaaatccgtattacaccaaatcaggtaggctttttttttttctgacatactctcttaatctttatttagagagaagattcaggtcttttaaaagaacaaatcgaaggcccccctttggtttgcctctcccatatttggtggtagaaggatttgaataatcctaactttgggggggacggctataaccacatttgttggggaaaaaaaaaaaaaggggggccctcttagaaccaacttactacccgggatgcgagtttaatttttttttggcgccaattt

SEQ ID NO: 129613 - DNA, 420 bp, Arabidopsis thaliana
cgtgggtcacagcgagagtgcaagagaaatgatggagcagtactacgtgggagagattgatccaacaacaataccaaagaaagtcaaatacacacctcctaaacagcctcacttacatccaagacaagacctctgaattcataatcaagctccttccagttcctcgtaccccttgccattcttggtttagcagtcggaatccgtatctacaccaaatcagggtaggcttcttttttttctgagcattacttccttatatcttatatatagagagaaagattcaagtcttttgaaaagacaaatctgaaagtctctccctttgttattgtctcttcccatattttgctgtttgaatgtattttggataatttcttatctattgtggcgcaactgcatataaacaacagtcttgttggtgtt

SEQ ID NO: 129614 - DNA, 349 bp, Arabidopsis thaliana
  unsure (1)..(349): unsure at all n locations
ctacactgctggaaataaactcttatagctctaacaacaaggagtttccttacatcaccgcgacaagagtttctaggaatatgcacaaaggctatcctcatcatccaacgggcaagaacatttcaactaagcatgcttttggtctcactagctgcaaagaacaaaaagccaacacttggttcattgtacacaagaaccgtggacaaatttgttggaaccaacactctagtgaaaaattagagaagccattttgcttatacaacagaaaagctcttctagctttcgataagaagttaaaacacaaccagctttaccaaggtaagntttatttgcatacaaatgataaagc

SEQ ID NO: 129615 - DNA, 558 bp, Arabidopsis thaliana
  unsure (1)..(558): unsure at all n locations
cctgcggnnnnnnnnnnnnnnnnnnnnnnnnnnnnnnnnnnnnnnnnnnnnnnnnnnnnnnnnnnnnnnnnnnccacgcgtccgaggacgcgtgggcggacgcgtgggtaggcttttcatagctagtgtctgatatcagacaaacacagacatgtctgtgtctctaagctacacttgtcttcttagattacccaccttttcagttccaacgaaacccattagtttcaatggacctctccctttttatctaccaagatctcatatttcctcatcttgttttggtttcaaatcaaacccattcataagaactcagaccccaagattcttcaagtgtttgcctcagagagtgtctgatgaacgcagagaaacccaagtcacaacagaagaggaagaggaggatgaggaagaaaagattgccgtatttgagaggctcttctctaacctgaatcaatcaacattgaagcgagaatccggaagtttgtccagtgaattttcttggttgctggcactaccgtaggtgcagggatacttgcgattccagctgtgacacaagaatca

SEQ ID NO: 129616 - DNA, 759 bp, Arabidopsis thaliana
  unsure (1)..(759): unsure at all n locations
agcccnttggcttccggcccngtggttcattaccggccgtcnttctgccggaggacccagccctttnccccacaccctggggggaatccccctttccccgcaacccctttcgcccctttcctcttcanaaccctttccgggggccaagggcttaaggaagttgatttcgacacgcccgggaaaaggctacaaccaaactacagacaagccgagaatgcaaaaaagcaaaggactatacaggtgatggacattcatgacattcctaaacctaagaaaggtggatttttcccaagaaaaggcgggagttctcaaggtggtagacactggtaaattgagaaagatgagagttaagtgaggaagagaaaaaaagacagagaacaaagctctgtttctgagacacaagaagacagtgaattctaaaaatgtttcaagaatttggaattaagttggtgggtacacttgttttctattttgttgttactactacgtatatttttttctgataaagaacataatttttcttggattttattaaataatagattcgaaaaaaatcaagtttaccatatttgtatttttgttattagacaatgatgggcataaaatctatctctttaaagaaaatagattgattttctttggcaaaaaaaaaaaaaaaaaaaaaaaaaaaaaaaaaaaaccacaaagggcggccgctctagaggatccaagcttacgtacgcgtgcatgcgacgtcatagtcttctannnnnnnnnnnn

SEQ ID NO: 129617 - DNA, 377 bp, Arabidopsis thaliana
cacaaaccatggcttcttcttcttcttcttctttattatttcctttctttcttattcttttttcatgtttaatctcggtttcatcgtcaagaagatcattaatcgaccgtactcttccgaaaaaccttccgagatccggttttcgattgagtcttcgacatgtggattccggtaaaaacctcaccaagatccaaaagattcagagagggattaaccgtggattccatagattaaacagattaggagctgtagctgttttagctgtagcctctaagcctgatgatactaataacattaaagcacctactcatggaggaagcggtgagtttcttatggagttgtctattggaaacccggcggttaaatactctgctatt

SEQ ID NO: 129618 - DNA, 840 bp, Arabidopsis thaliana
ctggtacgcctgcaggtaccggtccggactacccgggtcgacccacccgtccgctctaaatgatcttgcagagatggcatgtatgaagaaggcactaccattcattttaaaggtattggtgcaaatagggtatgcaggaatggatattcttacaaaggaagtcctaaacaaaaggctttattatttaacgtgtttcgcgtctaccgtcaacggagttgccacccgtgtttatggctccgttcgccttttaacttcacaatccagtgattgctcaaaacttatttaatcccgggatgaaaaacaccacagctacctttgcaattgccttgaacaacatttacctgcaggcacgttcatcccccgcttattattaggctcaaaagccggaattttaaataacaggagcgccctaaggggggtggaacaatacccacaggtgggagaatcatgggcctgaaaccttgaaaaggcccaccttttacctctttgggaaaaaaggaccctccgacaaacacagtggggaccattttttaatcccctcaaggggcatgttataaaaatatgggtccttaacctttccctgttcttataccccaaccaaacctttgagaaccccccgcggaagtctttcctccccatggaatgccccatagggccacaaaggggagtgggtttccctctcggggggaaaagaaatcccccgcgggggccttgggggggaacccaaaattttaaaaaccaaataaggagagaggggcccccgcccgtttcccatggggggggggggaaaacacaggccggtgtagaaccctaacccctctttatgccggggattttcaa

SEQ ID NO: 129619 - DNA, 805 bp, Arabidopsis thaliana
cgaactctacttcgacttactatatggacagctggtacgcctgcaggtaccggtccggttttcccgggtcgacccacgcgtccggattgggagtctattgctgctggatactacatgacacagtcgaggatacaaattgcattacttttgaaaagatagaaaaagagtttggcgcaactgtgcgtcacatcgtttaaggggagaccatggcgtcaaaactgggaaagttaaagtgtaaaacggaaagagaaacaattcaagatgtatttgcagttgattctgcggagatgtttctggcgatgaaagacagaggccctgtcatttttgtcaaactagctgaccggttgtatattatgcaaactctctgcacatgcctcccataaagaattccaacttggaggggagactttgagggttttacctcctttaacaaaattgtgtggaatgttttcattaaacggctgaacggaaaatccttttttcatgcccgagaggctggggattttatagagcccctacgggttgctaacctttcaaagagctgaaaaaaactccttggaccccttcttgtgttttggcaaccaaattttggaaaaaaatcgagatgtccggttctggcctgcgactggaattctgtttggatccgggggaaggatttccctcttataaggggtttcaatcgagggggttttttttttccccccccttttctttccgggtgtttaaaaccaaaccctgtggggggggcgcctttggcccacacacaaatagttttgacttgggggctttaaaaaattgaaccctt

SEQ ID NO: 129620 - DNA, 919 bp, Arabidopsis thaliana
  unsure (1)..(919): unsure at all n locations
gactttctatagggaaacctggtacgcctgcaggtaccggtccggaatttccggggcgacccacgcgtccggcaaaaagaagaacaaaaaaacaaagcgtcgaagagacaaaaagatgaacactaaatttgggcgggaagaagccgacgggaacaccgtcactagcgtggtcgacagtcgtagttgtagcctctctgctctgccggagcctgcgtcgttcacaatatatacaaagccagatctaacattatcctcagatcgaaaaccattgaaggagacaaaaaaggaggggtctgcgaacaaaaggtaaattctattttgggggttgggtagaaaaaaatctggccatgggattctaaaacctatttggggttcaggtattatatacttactacttagaaccccggggtttggaaaaagcccaccaaggggcaaatctttgtggtccctcccaaaaaaattaataaatttttttaanaaaaacgggggcggccctcttaaaaaccaaattttacgacggggcgtgggattttttattcttttttgggggccctaatcaaattccgtgccgggtttaaagggggggatggaaaacccggggttcccaattaatggctggaaaaatcccctttgccgggggggataagaaaaacgcccccaatcccctcccaaaattgcgcacctaattgaaaaagggacccccctttggggaatataagggggggggtggggtatcccaattagacctccctttgaaggcctggtgcgctttttgttgtttctttttttcgccgcgggngtgttcccgaaaattaaaaggggcccctagggcgaatatatttagtacccccaaaaaataaatggggggttcgtggccacccttaaagatttccctcgagggaacatttaaaggtttttc

SEQ ID NO: 129621 - DNA, 662 bp, Arabidopsis thaliana
  unsure (1)..(662): unsure at all n locations
nnnnnnnnnnnnnnnnnnnnnnnnnnnnnnnnnnnnnnnnnnnnnnnnnnnnnnnnnnnnnnnnnnnnnnnnnnnnnnccacgcgtccgcttaagctgcaattttacttaactatttcaagttatttacttgtgaaggtgttgacattgatgctgctactaaacatgggattaaggtcgctagaattcctagtgagggtactggaaatgctgcatcttgctctgagatggctatatatctaatgctgggacttcttaagaaacagaacgaaatgcaaatatctctgagaaatagactacttggagaaccaaccggtgacacgcttcttggtaaaactgtatttatcttaggatatggaaacatcggaatagagctggctaaacggttgaagccatttgggtcgaaagtaatagccacgaaaagattctggcctgcttctatcgtcgactcagactgctagttgatgagaaaggtagccatgaagacatttacacattcgctggcaaagccgatatagtcgntgtttgtttgaggctcaacaaagaaacggctgaaatagtgaataaggagttcatatgctcaatgaaaaaggtgctcttcttgtaatattgcccgaggtgggcctattaactatgaatcagctttccagaatctggagtccg

SEQ ID NO: 129622 - DNA, 481 bp, Arabidopsis thaliana
gactttattagggaaagctggtacgcctgcaggtaccggtccggaattcccgggtcgacccacgcgtgcgctttcagaatcgtctgatattgatgcggttaggaggattgatctcacacacttgaaggtttatgcaattgatgttgatgaggctgatgagcttgatgatgccctcagtgcaacgagattgcaggatggacggataaagatctggatacatgttgctgatcctgctagatatgttacacctgggagtaaagtggacagagaggcaaggagaaggggaacttctgtctttctgccaacggctacttatccaatgtttccagagaaacttgccatggaaggaatgagcttaagacaaggagaaaactgtaatgctgtctctgtgtctgttgtcctgcgttctgatggctgtattacagaatattcaggagataattcaatcatcagaccgacctatatgttgacgtatgaaagt

SEQ ID NO: 129623 - DNA, 1451 bp, Arabidopsis thaliana
  unsure (1)..(1451): unsure at all n locations
aatacgcttcactatagggacagctggtacgcctgcaggtaccggtccggtattcccgggtcgacccacgcgtccggcccgggccatccattttggttgatcaaatggatactgaaatatccaaagaacctggtaccgagagtgctgatgtgtctttacaccaattagctgatatccagcccgggccatccattttggttgatcaaatggatactgaagaattcaaaaatcctgatgtgtctttacaccaattagctgatattgagccctcactgtctatttcagctgtgcaaaagaatattgaggataaggatcaaagtcacgttgaaactgctggatctgagttagttgatgtctctgccgaatgttcaacagaacctcaagttcaattaccgccatcttcagagccagggggagatatgcacgttcatttaggggcaagcaaatcagaaatagtggccgaaggtactgacttctcttcatctctcccgaagacggggggagaaaatgccaagagccaattagctggcaccgagcccatcatcgtctcttacagctgtgcaaaagaacattgaagatcaagttgaaactgctggatgtgaatttgttgttgtctctaccggatgttcaacagaaccacaagttcaattaccgccgtccgcagagccagtggttgctgaaggtacagaattcccttcttccctcctaatgaccggggtagataattcttcccatctaatgaccggggtagataatgccaagacccatctcgctgatgttgtgccttcatcgtcacctacaactatggaaaagaacattgaagctcaaggtcaagatcaaggtacaactggtggatgtgggctagttgatgtcttgaccgaatgttcgtcagaacctcaacttcaactgccgccatccgcagaaccagtgatttctgaaggtacagaactcgctacactcccattgacggaggaagaaaatgctgatagccaattagctaatattgagccctcatcgtctccttcagttgtggaaaagaacattgaggctcaagatcaagatcaagttaaaacngctggatgtgagttagtctcgactggatgttcgtcagaaccacaagttcatttaccgccctccgcagagccagatggagatatacacgttcacttaaaggaaacagagaaatctgaaagcatggttgtggttggcgaaggtacagcattcccttcatctctcccagtgacagaggaaggaaatgctgagagccaattagctgacactgagncctttacgtctcctacagttgtggaaagaccattaaggtcaagaccaagttgaacnactggatgtgggtagtgatgatcancgggtgtngnagaccccaagtcaatnccgcancgangccatggagtgtnaacgatttgggnaggnaatgaacggggtngttttgc

SEQ ID NO: 129624 - DNA, 556 bp, Arabidopsis thaliana
atgttttaggtgcactatagaagagctatgacgtcgcatgcacgcgtacgtaagctcggaattcggctcgagatccaaagaacctggtaccgagagtgctgatgtgtctttacaccaattagctgatatccagcccgggccatccattttggttgatcaaatggatactgaaaaatccaaagaacctggtaccgagagtgctgatgtgtctttacaccaattagctgatatccagcccgggccatccattttggttgatcaaatggatactgaagaattcaaaaatcctgatgtgtctttacaccaattagctgatattgagccctcactgtctatttcagctgtgcaaaagaatattgaggataaggatcaaagtcacgttgaaactgctggatctgagttagttgatgtctctgccgaatgttcaacagaacctcaagttcaattaccgccatcttcagagccagtgggagatatgcacgttcatttaggggcaagcaaatcagaaatagttgccgaaggtactgacttctcttcatctctcccgaagacggag

SEQ ID NO: 129625 - DNA, 348 bp, Arabidopsis thaliana
gacgatgcaatttatggacgtgatggttatgattttgatgggtgtcgacttcgggttgagattgcacatggtggtcgtagattttcaccatcagttgataggtacagcagcagctacagtgcgagccgtgcaccttcaagacgctctgactaccgcgtgcttgtgaccggattaccgccttctgcttcgtggcaggaccttaaggatcacatgcgcaaagctggagatgtctgcttctctgaagttttccctgaccgtaaaggcatgtctggggtttgtggattatagcaactatgatgatatgaagtacgcaataaggaaacttgatgccactgaatttcgaaatgc

SEQ ID NO: 129626 - DNA, 776 bp, Arabidopsis thaliana
  unsure (1)..(776): unsure at all n locations
gctggtacgcctgcaggtaccggtccggtattcccgggtcgacccacgcgtccggccactctagccgcagaagttcctctagctggtgaaaacgcattgcctaggtacgacgactatgcacacgagcagattctcaaggcctccgcgctgaaccttgatcaaaacaatgagggagaacctcgagagatgtgtgcatttacttacctaaggatgaatccggagttgtttcaggcggataactggggaaaattcgtagcgtttgtgaagaaaatgggtgaagggagagactcacatagatgtcgggaagaagttgagcgtgaggctgagcattttgtgcacgttactcagccgctggttcaagaagctgcagtggctctcactcactagagagaatagattggggcatgggtcctaatggtttatgttcggtatgcgattataatgaaatgggtatatgacaatgccaaaaaagatgtttaggcctgggggagcttggtgtatgtattggtagtaaaactgaaatgtatgccacagctctggttttttccggcaaaaaaaaaaaaaggggggccgtttaaagatccagtttacgtcgggggatgcgaggnaaagctcnctttggggcccaaaataaattacgggccgggtttaacaagggggaagggaaaaccctggcgtccacattaatggcttggaaaatcccctttcccagtggggaaaacaaaagggccccccgaccccttccaaaaatgcgcacctgaggggaaaggacgccc

SEQ ID NO: 129627 - DNA, 400 bp, Arabidopsis thaliana
  unsure (1)..(400): unsure at all n locations
ctggggaaaattcgtagcgtttgtgaagaaaatgggtgaagggagagactcacatagatgtcgggaaagaagttgacccgtgaggctgagcattttgtgcacgttactcagccgctggttcaagaagctgcagtggctctcactcactagagagatagattgtggcatggttctatggtttatgtttgtatgcgattataatgaaatggttatatgacaatgccaaaaaagatgtttaggcttgttggagcttgtgtatgtattgttagtaaaactgaaatgtatgccacagctctggtttttttccggtcaggttgtggcatgctactacttttcatatatgctaaaagatgtacatgttctttaatgaagccaaaataaatagcatttctttnataaa

SEQ ID NO: 129628 - DNA, 513 bp, Arabidopsis thaliana
  unsure (1)..(513): unsure at all n locations
ctatacgactcactatatggaaagctggtacgcctgcaggtcccggtccggaattcccggggtcgaccacgcgtccgcggacgcgtgggcggacgcgtgggcgcagattgtgctggagctttggatataactgacgatctccagaacttgctggctggggatgagcttactggtctatactgcttccgccatcttcgggatcatgttactagttccatagattccataaacagtattctcacttcagaattcatgcgtatctccatacatgatactggggagatagatgtactgattttatctgcagcaaatatacggggatccatttcatctaaacggaataccggcgaggaagtaaagtaagaagaagaggatacctctaccttatgtgatcggttctttccttaagtattggattgctaagaacggcaagntcccgtcaattttgaggatgtatcgtgatacactcacatccgaaatgaaaaatgccatcagaaagcagttgctgatctg

SEQ ID NO: 129629 - DNA, 486 bp, Arabidopsis thaliana
caatttagaagaaactcactattccatcttctgagcaacctctttgtcagccgagcacattgtttcttcttaaatccagagtcctttgggtttcatgaccacagaatcctgagtaacatacagcttttctctcatccctgtggcattggatgatcatgcgaatatggtggatctccatctgatgagttacaagcagataaatcaattatagattcaacatgaggaagaagtatgcaatcgaggttcaagaagctgggcaactattcagctgtttacgaagttacactgaagtgggcaagtgtgcgttaagaagaagacctatatttcaagctattcaactgtttacaagttacgctgaaatcacaagctgagcaagtgtgtattaactctcttattatttttcctaggattaagtttgtaattatgcttgatattatcatcataacacaaaaattcaatggtaaataatatattattctgaggttg

SEQ ID NO: 129630 - DNA, 756 bp, Arabidopsis thaliana
  unsure (1)..(756): unsure at all n locations
nnnnnnnnnnnnnnnnnnnnnnnnnnnnnnnnnnnnnnnnnnnnnnnnnnnnnnnnnnnnnnnnnnnnnnnnnnnnccacgcgtccgcgttttcaagtgggggctaaacggtgcagcggctgcatttgatgtctcggcttggggaatcgcgatcgcgcaggttgtttatgttgtagggtggtgtaaagacggttggaaagggctgtcttggttagcgtttcaagacgtttggccgtttttgaaactgtcgtttgcgtctgcggttatgctttgtctagagatttggtacttcatgacgatcattgtcttaactggacatcttgaagaccctgtcatagccgttggatctctctcaatctgtatgaacattaatggatgggaaggaatgttgttcataggaatcaatgcagctataagtgttagggtgtcgaatgagctaggatcgggacatccacgagctgcgaaatactccgtgatcgtaacggtgatagagtctctcgtcattggagtagtgtgtgcaattgtaattctgataacacgagatgactttgctgtgatttttacggagagtgaagagatgagaaaggcggtagctgatcttgcgtacctgctcggtataacgatgattctcaacagtttacaaccaggtatatcaggagttgcattaagggggaggatggcaagcacccggggctttataaacctggtttggtaccaccccttgcgattacctctaggggttttgttaaggtataa

SEQ ID NO: 129631 - DNA, 827 bp, Arabidopsis thaliana
gacaaagaaccgtgtccactttttcttctgttctcggtaaatgccagctctcaattctgtggtgtagcatatatggttggacctgttgattttgataagagcgttgattactggcaacaagatagatggagtggacagttcccagtgaagtggcacattatcaaagatgttccaaacagccagttccgccacattatattggaaaacaatgacaataagcctgtgactaatagtcgagacacccaagaagtaagtagcaatttgtgcctatcaagctttcttgtccataagatacctcttttaagccacaccataaccacaaccaaaaactacaggtaaaactggaacagggcatcgagatgctgaagatcttcaagaactacgacgctgacacgtcaatcttgggatgatttccgggttttatgaagagccgggagaaaattatacaagacccggaaggccaagaagacagccaagccttgccatctgcaggaggtagtagccggagaaaatgaacataaacctgcttctgctgcattacccacagacttcatgaagaacatggccaagagttttgcgcaagttgtccgcttggacgaaggcagcaaagaagcagtcaaggccagttcatctccagatgcaattacaacagcagcagtctcttctggtcaatccaacgggtctggtttttgtgtaaagtaagcctctttcctccgcccttttctgcttcaggggtatttagccaaaatttgattcatttccctcttttcaatgttctataataccctcactcttctgagttgatagaagaagaagatgaagaagat

SEQ ID NO: 129632 - DNA, 711 bp, Arabidopsis thaliana
  unsure (1)..(711): unsure at all n locations
aanttttggaacatgcataccttgcttttgcggcccccagagttactgnacggctcggntctgantcttcagnacttcggcctgcncgtcatctggntgattcggntttatgaagnggcggaggaaattttacaaggcccgggaaggcaggaggccacccaagcttgccatctgcaggagtagtagcaggagaaaatggaccataaccctgcttctgctgcattacccacagacttcatgaagaaccatgtccaagagttttgcgcaagttgtccgcttggacgaaggcagcaaagaagcagtcaaggccagttcatctccagatgcaattacaacagcagcagtctcttctggtcaatccaactagtaagtaaaagacatcaattagcaaagactatgttttcaaattccataatatgatcttttgtttgttctaagaaggtatttcaaatgaaattttacgtcagaccgggtctggtttttgtgtaaagtaagcctctttcctacgcccttatctgcttcaggggtatttagccagaatccgagtcatttcccctgtatacaatgttccataaaaccctcactgttttaggttaataaaagaagaagattaagaagataatgtatcaaaggcaatataatgtttttcttgtaaagtcggcagcatttatcttcgcagccagtttttcataatcaaaatgcagattacac

SEQ ID NO: 129633 - DNA, 876 bp, Arabidopsis thaliana
  unsure (1)..(876): unsure at all n locations
nnnnnnnnnnnnnnnnnnnnnnnnnnnnnnnnnnnnnnnnnnnnnnnnnnnnnnnnnnnnnnnnnnnnnnnnnnnnnccacgcgtccgcacaattcggaggacttcctcaatgggctgttgttggtgacacattccctgttggatgtgcatttgatgaatctaacgtacatcacaagtactttgtggaaaacccagattttcacaacgaaacctacaacactaaaaatgggatttactctgaagggtgtggattaaacaatgtcatgatgtcttggggccatgacgactacatgtacctggtggctaaagaaaacggaagtaccttgccgtcggctggacagtttatcataagataccattccttttaccctttgcacacggctggagaatacacccatcttatgaacgaggaagacaaggagaatctgaagtggctacacgttttcaacaagtacgacttgtacagtaagagcaaagttcacgttgatgtggagaaggtcaagccttactacatgtctcttatcaagaaatatttcccggaaaacttgaggtggtgaattcggtggagtaaaaaagtgcccatggaggattagtcgttttatttacttacaaatatttttacacattttcgagttaatgtgaatctattgtaattgtgttatatatatcttatgttaatcatattcaggctgtctctgaaatgtaatcacaatcaaccctcgtgaatgctaaagagtttgtacgtcgggtgatataagatcttaaataatgaagtttatttataataaaaaaaaaaaaaaagnnnnnnnnnnnnnnnnnnnnnnnnnnnnnnnnnnnnnnnnnnnnnnnnnnnnnnnnnnnnnnnnnnnnnnnnn

SEQ ID NO: 129634 - DNA, 645 bp, Arabidopsis thaliana
aggcaaagatcagaggtttggtctctggtttgatccaacaaaagattaccattcctacagttttctttggaaccctaatcaacttgtgttttatgttgacgatccaccgatcagggtgtacagcaagaatccagatgtttactacccatcggtgcagacaatgttcctaatgggaagtgtgcaaaacggatcgataattgacccgaagcagatgccttacattgctaagttccaggcatcaaagattgaagggtgtaagactgagttcatgggaatagataaatgcactgatcctaagttctggtggaatcgcaaacagctaagctctaaagagaagacactgtacctaaacgcaaggaagacgtacctggattatgactattgttctgacagacagcgatatccaaaggtgcctcaagaatgtggaagttacacttagagaaagatcaatacctgtcacagggttaagcctacaaaacaattatcttgaaaaaataacttatgttactgtaagatgctttatgataagccttttctatcaaataacaacattattgtcatcaaaaaaaaaaaaaaaagggcggccgctctagaggatccaagcttacgtacgcgtgcatgcggcgtcatagctcaactatagtg

SEQ ID NO: 129635 - DNA, 641 bp, Arabidopsis thaliana
  unsure (1)..(641): unsure at all n locations
acgccagccctaatacgacttatatagggaaagctggtacgcctgcaggtaccggtccggtattcccgggtcgacccacgcgtccgcctagatttgctgcttaagctggtaagaatgtatgggtcacaaatttactcgtcgctttccgctccctcatctgttggtgtagatattgaggctgagcaaaggatggagcggtacagttgttgctttgtcgagttcgagaaaatcaaggcttgccttccctctttagcaagaagaggaaatttggtggccaagactctccatgaactcaacttaacatttcaagaagtttcatcgtgatactttttggatgtggatttggttccaatgtggagtttaacagtactaaagcctaactctaccaagctaaccaatagagtctatggaagactaactaaccctccgcgtattgcgtatggcccactgctcgggtccggaacctttgcccttgcggatggatacgggactggctctcgtttcaagctaacttgggagcgtaaagagccatttccggtggctgtatggaactaggttattcatttcttcccacactggcttacactactcgggcttaagaggcaaaaaaaagaaccccatnatttaacaaaatgttttgg

SEQ ID NO: 129636 - DNA, 535 bp, Arabidopsis thaliana
  unsure (1)..(535): unsure at all n locations
nntgcttnnnnnnnnnnnnnnnnnnnnnnnnnnnnnnnnnnnnnnnnnnnnnnnnnnnnnnnnnnnnnnnnnnnnnnnnnnnnccacgcgtccggtaacgagccacggacaccgcaacaaatcttggagtcacatcagatttatctgaaacctgcattgcttccatctctagagccatggagggctacggagtctcgagaaacgccactagtttctgcggtttgggaaccaagatccttgttaagtatgactgtgacggtcgaaccactgttacacaaatgcatcagtctccgggatttggacatgtttcaagaaactgcagactcccattttcgccgggacaccaatgcagaaagtgtttgaactctggcatcacttaccttcgtaatctcataggtgcagagactaataacattactctgtgtacttgtcgtgatgcgacttatgctacattagcaagccgaatagacgatacatcagctcttgaactccttagttgtttctttcaagtgacagagcttaacattccttcaga

SEQ ID NO: 129637 - DNA, 494 bp, Arabidopsis thaliana
gcgatagatgtgggggtgtgtggcgggcgcatgttttcctcgcggagccgctttttccgctttcccgcgccctttttttggctccttataagaaaagttttgatgcctccagggccgggccggattttcgggtggaccccccggttcccccacgggtgggtgttgccaaggaagaagtcattgaaaagagctcagattcatcgtcaacctaaacatgtttgtactattttatgagcagagtgatgtaaatcataccgtgatttaattacggattacaacgaagagcttggacaaaatgtttgcacggaagcattgttaatttattgtacaaggtgtgatacttacagaaaggcaaaacagtgtaacaaatgtagtaagtgccttgcatttcacggttttgcaaattgttggagaataataaaaaaaaaaaaaaaagggcggccgctatagaggatccaagcttacgtacgcgtgcgtgcgacgtcataatcttc

SEQ ID NO: 129638 - DNA, 479 bp, Arabidopsis thaliana
ggaaggcgggcccgcctgcaggtaccggcccggaattcccgggtcgacccacgcgtccggtgctggaggactgagtttgctgcaattctgcaacctgaatagcttcaggacattattcatactgggcttctcaatcttcctaggcctatcaattccacaatatttcaacgagcacacagccatcaaaggctatggtccagttcataccggggcaagatggttcaacgacatggtcaatgtgcccttctcgtccaaggcctttgtgggaggatgtgtggcttacttgttggacacgacgcttcacaagaaagatggttcgatcaggaaagaccgaggtaaacactggtgggacagattctggactttcaagaacgacccgagaacagaagagttctatgctcttccgttaacctcaacaatatttcccttctgtctgaaaaaaatccttccaaactttatggaatgcctgtttgctagtt

SEQ ID NO: 129639 - DNA, 640 bp, Arabidopsis thaliana
tctagctttactatgacgacccatgcacgcgtacgtaagctcgggggtcgtgtacgtgaagagaatcaatctgacagcaaatagttttggcgtctttctaactcaacccatcatctctgttgcattttatcgagagaatatttgaggtggatatggcctcgacccttttctccagaactttcttggctgctagtcaccgactgattactccttctcttccgcaaaagatctttaatccagccacctttctcagtaggtcactccactctcagttaggctccgcttctacagcctataaatcaactacttgggctcgtcgagctatggcttctactggagttgagacaaaagccggttactccacatcatccgtatcaaccagtgaacctgttgtttctgttgattggcttcatgctaatcttagagagcctgatttgaagattttggatgcttcatggtatatgccggatgagcagagaaatccgatccaagaatatcaggttgctcatattccccgcgctctcttctttgatttggatggaatatcagatcgaaaaactagtttgccacatatgttgcccactgagggaagcttttgctgctggttgttctgctcttggaattgataacaaagatgaag

SEQ ID NO: 129640 - DNA, 718 bp, Arabidopsis thaliana
  unsure (1)..(718): unsure at all n locations
nnnnnnnnnnnnnnnnnnnnnnnnnnnnnnnnnnnnnnnnnnnnnnnnnnnnnnnnnnnnnnnnnnnnccacgcgtccgctcttcttgagagagctgcggaagtagtggtggttcctcgagtcatgcatgggaattctaatgatggtctctggagagcgtcatttgatgaattcttcaaccttcttaccaaatactgcagaagcaagtatgacacaatccgtggacagaaccaagggagtgcagcggatgttttggagctggcgataaagagggaaatgcccgctgagcttttacgtgcgagtctgcgtcacaccaatgacgaccagaggaactatttattaaactttggtcgtaaaccatcagcaattagtgagtcggcatctcatgcaaggggtggacagatcaactctgaatctgtgaggggttaataaaaaagaaagagaaaccatgtgcttggaagattccaattcttggttttcatggctgtggtgtggactcaggagacaaacttgtaagtaacctggtggtgtaggaatcttttcacaagggtttcaggtgaaaagtgcttttagattctgctcttcgtcttcgttttttaactttgaactcttttatatttcgtattatcttttatggtgggcaaaaaaaaaaaaaaaaaaaaaagggcggccgctctagaggatccaagcttacgtacgcgtgcatgcgtcgtcatag

SEQ ID NO: 129641 - DNA, 415 bp, Arabidopsis thaliana
gacgaccagaggaactatttattaaactttggtcgtaaaccatcagcagtgtagtgagtcggcatctcatgcaaggggtggacagatcaactctgaatctgtgaggggttaataaaaaagaaagagaaaccatgtacttggaagattccaattcttggttttcatggctgtggtgtggactcaggagacaaacttgtaagtaacctggtggtgtaggaatcttttcacaagggtttcaggtgaaaagtgcttttagattctgctcttcgtcttcgttttttaactttgaactcttttatatttccgattatcttttatggtggacaaatgcatattctgcttggtttgtgtattggatgatgggaaagaatgtgaaacatggagtagtttggttatctgaataagtaatgtcttc

SEQ ID NO: 129642 - DNA, 794 bp, Arabidopsis thaliana
  unsure (1)..(794): unsure at all n locations
ccccccgacttactatggggaacgctggtacgcctgcaggtaccggtccggatttcccgggtcgacccacgcgtccgcagatctctacttcctctttctctctcacacacatatacacattctctatatatatagaagagaaccaaaaagtaggagaagaagaagctaaaacatataagaatggtttcgagagaacacaagagaggttcctctctgcgtgagaagtttcatttgcttcgttcaatcactgattctcatgctgagagcgaaacatctatcatagtggatgcatcaaaatatatcaaaaagcttaagcagaaggtagaaaaaatcaacaatgcgaccacgtctgagcaatctttccgtgaatcttccgatccaaatcctatggttacagtggaaaccctagagaaggggttcatgataaaggtaatgtcaaggaagaatgaggcacgcttggtggtttgtgttcttgaaacctttgaagaacttggaactggtgttgttaaagcaagggtttcatgttcctgcacaattagcttggctcccttggttcataaaatatggagggggaaactgctaaaatgctaaaccaagaaaaagggcaggggcaaaaccaaagggccccggagggatagccctgcctgatctacaaagggtgaaccttattgaccaagtttcataaaattttcatataaataataacctgggttcaccaaaaaaagcctttaatgcacctggtccagggaaaaattcattggttgcctctgnnnnnnnnnnnnnnnnnnnnnnnn

SEQ ID NO: 129643 - DNA, 702 bp, Arabidopsis thaliana
  unsure (1)..(702): unsure at all n locations
cccgacttnatatggggaacgctggtacgcctgcaggtaccggtccggaattcccgggtcgacccatgcgtccgatcggtggagccgtcaactacgtagctatatcaaatgctcttggagttacaccatcggttttagctgctggactggctgctgataatgttatatgcgctgtatatttcacgacattgtttgctttgggctccaaaatacctgcagaagctgtaccgccaccgactactattgtagatgcagagacgaacgaagcttctgaaactaaaaataaaattcctgtgctactgatagctactggaattgctgtgtcattagctatctgcaaggctggggctctgctaacaaagtacttcggaattttcggggggagcttaccggctatacagcgggtgtgttattttagcactggctttcctcccagttggtcgtcttgctccatctgagaagcatggcttaattttatgcaggggttttcacagggggggtgcagcggaaacattggatgggatcacccgggccgacatatcttgtgtgcattgttaaaaggggacactttggctggaattgggctaggaaagctcttacatcgagtagggtactggtctaaatcaatcgtaatgcggggaccccaacccactggattggaaccgaaagggtggaactcgttatagtcccggatttggccga

SEQ ID NO: 129644 - DNA, 537 bp, Arabidopsis thaliana
  unsure (1)..(537): unsure at all n locations
tatagggacagctggtacgcctgcaggtaccggtccggaattcccgggtcgacccacgcgtccgggatttaccagctgcagagatcaaaaacttcgtgattcattcgaacaatctaattttaccagctgcagagatcaaaaacttcgtgattcattcgaacaatctaattcagatttattattgggtctggttatctttttcttaccatattttttgtttcctcgttaagacgattgtttggtaatgtcgtcaccagacattgtcggaattttggaaaacacgaaggaacttgatcggttaaggaaagaccaagaagaagttttggttgagatcaataagatgcataaaaagcttcaagcttctcctgagatagttgagaagcctggtgatatttcattagcaaagcttaagatattggtacattcaagcgaaagagctctcagaaaatgaagtaaccctatcgaacattttggctacctcaggggggatntgcttgcttccatttggccccacagggcaacaaaagaaaaaagtta

SEQ ID NO: 129645 - DNA, 575 bp, Arabidopsis thaliana
  unsure (1)..(575): unsure at all n locations
ccggtccggaattcccgggtcgacccacgcgtgcgcgacaactttctctcttcccttctctcttcctctggttcacatggaacttcaataacattcactactttaagggtttcctcattctccgaaaaaggcagggtgggtactactaaattgtggattttcgttcacttagaacagtggctggtttgatctttgattcctcaagttataacttttggttttcttttatatcttatgacatgataatatgaggggcttaaatcttcctcttctgttgatcctgttggaaaattctttgatttggggggttttgtggcttagataaccctaaaaggggttgaatttggacctttgggggattccttaatctctgtttttatcaatagatgtggttaatatatggcctaattgttgggggtatctgacattaaaaatgtgggtttngtatagaccaattttaacttgggggtgttggtgattctaaattacaaaaattttttgaggggatattaaagccttttctagggaggtttaaaaaaaagcctttaggcgtgaattttttttttcctgggggt

SEQ ID NO: 129646 - DNA, 548 bp, Arabidopsis thaliana
acgcgtccgctcttcctcgtcctcttccttctctctctcttcgcattctcctcatacgctataaggagaacatctcagagagagactgatggctaagcaatgagggagagatgcaatgtgggtccatgttgtttaagcaagaggagctacaagagatgagtggggtcaatgttggtggcgattacgttgaggtcatgtgtggttgtaccagtcaccgatacggcgatgctgttgctagacttagggttttccccaccggtgaccttgaaatcacctgcgaatgcacacctggttgcgatgaaggtctctctttttttgtctctactgtctctttctcgtgtctttctgatgcttttgggaaaatgggttttgatttgtgtgcatgttacatgtgaatgtgtgtgagattaaacgtttgtctctgtctagctactatcacattgggctggtaaagctagggtctttagcatgattacatatttatcaatgagtcttagtgtatgctagctagatccgttcttgtagaaaatgaaatgacttgatttgcc

SEQ ID NO: 129647 - DNA, 685 bp, Arabidopsis thaliana
actcactttagggagaagctggcccgcctgcaggtaccggtccggaattcccgggtcgacccacgcgtccgcccacgcgtacggtgctttctggatggggttggaccaaaattcaaggcgtcgaatgtcccgagagaaaatggatgtgattctaaaaatagttgtaaaacacttctttgtcgagaaggaagttacatctactttggtgatggattccttgtatagtggattgaaggctcttgaaggccaaaataagaacaaggagagtaggccgagactaatggatactgaagaatccacagctccaattgttagcgtggacaaagattcgtttgcattagttgatgatgtgttattactcttagagaaggctgctctggagccattgcctaaaaaagaggaaaagagttctcaaaaccgtacgaaggatgggaatgctggagaggaattcagtagagaagccgttgagcgtgatgataggcgtttaactgaattgggtagacggactgtggagatatttgttcttgcacatatctgcagcaacaaaattgaagttgcattccaagaagctattgcatggaaaaggcaagaagaacttattcgtgaaaaagaggaagcgtggctggcagaaagcgaacagaagggcaaaagaggagcatctgaaaaagagaagaaatctaagaag

SEQ ID NO: 129648 - DNA, 361 bp, Arabidopsis thaliana
acccacgcgtccgctttctcaatcccacatagagagaaagagagagagagagatgagtcggaggaacaagaacggccctaagctcgagctgaggctgaatctttcgccgcctccttctcaagccagccagatgagtcttgttcgatcaccaaaccgatccaacacgacttcaccaagctcatgcgtttcatctgaaactaaccaggaggagaacgagacaataacctcaatggttcttgtgggttgccctcgttgccttatgtacgttatgctttctgatgatgaccctaaatgtcctaaatgcaaaagcaccgttcttcttgatttcctccaagaaaacgcttttgccgctacaaccgct

SEQ ID NO: 129649 - DNA, 908 bp, Arabidopsis thaliana
tagggaaacctggtacgcctgcaggtaccggtccggaatttccgggtcgacccacgcctccggatgcggataacaatacaaaccagagctacaagatctttgattctcctcggggagctctaatctcgggaatggcagtttcgatgatattatgtttaagatcatcattgcttgctactgaaaacgcattttcttgtctggggagactattgaatttcccagagaagattgatgggaggaagatattagagaaagctaagcccttacaaactttgggctgtggatgatgattgacgatcctcacctctatcgataaatggtgggttttgatcagaacatcaccccagcgagtccggaaaaactaacatttttcttccggacccacactcctaatctccatgggtatcccccccacaaagttttgggagggacaatggaaggttctccccaagcccccggggaagaaaaaaaacttcttctccaaaaaaaaaaaaacccctggttcgggggaaaaaacttttcaagagaaggctggccctcttttgccccaatccccaagggggaaggggggccatatttttcgggcggcgaacttgcttaaaaatttaacgggcggtttgtttttgaccgggagaattcacccataggtggtggacaatagaaattcccttttctaaaacgggggtataaacccgcttcttaaacgggggttgaaaaaattatcaattgggggaaattcttttttttttttaaacacagggtctttaaaactaaaccatttaaaagtccgttggctccgggctttttttccggaaacaaaaaaaaaaaacgcgctattctcctttcctttttacagggggttttttccttctaaaaacaaaatggttctctttcttttttacggagag

SEQ ID NO: 129650 - DNA, 470 bp, Arabidopsis thaliana
  unsure (1)..(470): unsure at all n locations
cagtccagcagtaccggcgagaacttttagtttttcttccggatccacatctcctaaatctcgattgataattaccccacaaagttattgggaggatcaatggagagttctacacaaagccgccgaggaagagaaaaagagtccttctccaatacagaagaaaaagccttggttcagggtgaaaagacttttcagagcagagtctgagccaactcatagcgccaagtcaccaaatgggaaaagtgaagtcaagatatcatcagttgcgcgaaacttgcttgaagattttaatcggcagcttgtttctgaacctgtggaagctaatccaatagatgttgtgaacaatgaagatagctcaattcgagaaaccgaggatataaacacggattttaaaactcctgctgaagagagtatagtaatggnggagaattctcctnacctttnctnagatccaaacagtcctctcagag

SEQ ID NO: 129651 - DNA, 736 bp, Arabidopsis thaliana
  unsure (1)..(736): unsure at all n locations
cnnnnnnnnnnnnnnnnnnnnnnnnnnnnnnnnnnnnnnnnnnnnnnnnnnnnnnnnnnnnnnnnnnnnnnnnnnnnnncccacgcgtccgctctgcaattgtcttcttctcttcaactccatcatctccaccaccggcattctcgccggaatccaatggagcttaccagcttccatcgctcttctctcttattcctcatctcactaacattgatcattctcccgacgacaacaacttcaatcggagtaaactacggtcaaatcggagacaacctcccctccccaaccgacgtaatcccactaataaaatcaatcggagcaacaaaagtaaaactctacgacgcaaatccacaaatcctcaaagctttctccaacaccggaatcgaattcatcatcggactcggcaacgaatacctctccaaaatgaaagatccttcaaaagccttaacatggatcaaacaaaacgttactccatttttacctgcgactaacatcacatgcctaactatcggtaaccgaatcctcgctcttaacgactcttcactcactaccaatctcctcccaaggatgcaaggaggtcactctgttttatcaccgccggtctttccgatcaatttccggaaccacgcgcatctctttggaccctaaaaccccattcccaccttccgccgggaagttaacccggactacccgattcgctaccccgatcttaaaattccccgaaaactgattttcg

SEQ ID NO: 129652 - DNA, 945 bp, Arabidopsis thaliana
  unsure (1)..(945): unsure at all n locations
nnnnnnnnnnnnnnnnnatgatctatactcataagtgataagttccacagataaagtttatacatcataaacacaccaaaataccacgcgtccgcaaatgttgataagcaggaagaaaaccccttgaatcagaacttaaaagttccaacaaaaattcaactttatatatgtgtatatagatatggtattcaagaaatagagtgtctccgatcttttggtggtttggttctgcctctaccgttgtatggtgtgatgctaaaagggtttagcttaccgagtttcttggaaacagagtttatgaatgactttcttggcaatggaggcttacccgtggaagcagttgagattggtgaacttggattcgtgctgatggttgatgatgatgttttcttctcactctctttctcaaactcttttagcttcattttcattttgagaagttcgagcttcaagtcctgattttcgcgtttaagcttggagagttcgtcggtgtaggagctaagtttgggaggaagaacagctgctggttgtggtggtggtggggctggagaatctgaatcgttagtgacttctcctcgtagacgttgttgctcgtagtaaaggacttgaacaatggtctgaacaggaagacgatcattctgagctgcatgagcgcaggcttctcgtgatagtttttggcagtccattaagctgcacactttcttcctctctacatcactcatattgggatgcgcctgcaagaaaaaaccatagttgttcactagagctctcttaaagtttttcaaaatctctaagataatgggaacttgatcatctccttaaccacaagatgtcaaatatttaccnnnnnnnnnnnnnnnnnnnnnnnnnnnnnnnnnnnnnnnnnnnnnnnnnnnnnnnnnnnnnnnnnnnnnnnnnnnnnnnnnnnnnnnnnnnnnnnnnnnn

SEQ ID NO: 129653 - DNA, 831 bp, Arabidopsis thaliana
  unsure (1)..(831): unsure at all n locations
cccccgactcactatggggacagctggtacgcctgcaggtaccggtccggatttcccgggtcgacccacgcgtccgcataaacatagataaagggaagtgacacatccactgcagagtcaggatctgacgctgaagatatcggttctccgaaggctataaagagtttctctcatctccgcttgacacctgttcgtgaggttgcaaagataggtggtgaaacaagcttggctggtagttttccgggttatgacgagtatgtacctatgggtggacaaagcccggtgaccccccctggaaggtgaacccccgcctccagagagttgcctacagagggagcttaattgtctcccacccgctcaaaagatcatgaagggcttcaaggctcgagccctaaaaatggtcatggcattcttgaggggggttttcacattcttccgcctggaacaaaaaaacttccaggactactatttttccccacgaaaacccaaggaacccataaaacttggtttatacgggaaggggttaaagagggagggngttcttcttttcctgtaccaaccccanggaacggatttctataggggngacaanaaacagccaaagtggagggaaaatcgaaccctacaaaaacccaggagtgccctcaagaaaaaaaactgtaacccccccttgcaagtaacccccttgaagaactctatctcataaaggcctttcgaatttgagaaaagaaagttctttctctcttcccaaaaaaccccccccaaaaaaaaaaaaaaagactttttttctttggcacccaaaaccccccgccaaacccctttaaagcggtt

SEQ ID NO: 129654 - DNA, 754 bp, Arabidopsis thaliana
tgacgagtatgtacctatggtggacaaagccgttgacgccacctggaaggtgaaacccgccatccagagagttgcctcaagaggagctttaatgtctcccaccgttccaaaagatcatgaaggcatcaaggctcgagtcctagtaatgttcatggcattcttgatggcggttttcacattcttccgcactgtaacaaagaaacttccagcgactactacttcttccccagcagaaacccaaggaaacgcaatagaacttggttctaacggtgaaggagttaaagaggagtgtcgtcctccttctcctgtaccagacctcacggaaactgatctactaaactgtgtgacgaagaaactgacagagctggaaggtaaaatcggaacgctccaatcaaagccaaatgagatgccatacgagaaagaagaactgttaaacgcagccgtctgcagagtaggcggcacttgtaggcagagctcatagcttacttaaaaggccctttacgaagctttgatgagacaggaagagttacttgcttacattgatcgtcaagaagaagctcagttccagaagatgaagaagaagaagaagaaacatctcttttgcttctgaagcaaagccaagaaaaaccagcaccaggcatcaaaatctccctctttcgtaattcgctgttcttaagtataaacaacaaaacaaaacaaaaactcttatatctgatttgatgttaaagctaatacagagagctctgtttccttc

SEQ ID NO: 129655 - DNA, 545 bp, Arabidopsis thaliana
  unsure (1)..(545): unsure at all n locations
aattatcctgagactctccaccaaatgtttattatcaatgcagggcctggatttaggctactctggaacactgtcaagagctttcttgaccctaagacatctgctaaaattcatgtactcggatacaagtatctaagcaaattgcttgaagtcattgatgtcaacgagttgcctgagttcttgggaggtgcatgtacttgcgcagatcaaggcggttgcatgctttctgacaagggaccttggaaaaacccggaaattgtgaagatggtgcttcatggaggagcacatcgagcgaggcaggtggtgaaagttttgaacagcgaagggaaagtcattgcttatgcaaaaccttcatatacatgggtaaagggaagtgacacatccactgcagagtcaggatctnacgctgaagatatcggttctncgnagctataaagagtttctctcatcttccgttgacaacctgttcgttagggagggcnaaagttagcttggtggaancaaggtttggcttggtaggttttcccgggntttnccgggttttt

SEQ ID NO: 129656 - DNA, 414 bp, Arabidopsis thaliana
atggggaaaggagatgggtgtgaaatatggttgcccggtaaaggatgtaataactggtttgacgattcagtgtcgcggatggaaatcagcctacctgaacccggaaaagcaagcatttctcggggtagcgccgaccaatttgcatcaaatgctagtgcagcagaggagatggtcagagggagactttcagattatgctttcgaagtatagtccggtttggtatggaaaaggaaagatcagtttaggactgatacttggttactgttgctattgtctttgggctccatcttcactacctgtgctcatttactctgttttgacttctctctgtctcttcaaaggcattcctctgtttccaaaggtctcgagctcgtggtttattccgtttggatacgtcactgttgcagctaccgc

SEQ ID NO: 129657 - DNA, 468 bp, Arabidopsis thaliana
atcaacccacgcgtccgcggacgcgtggggtcgcgaagcagtctccgtcgccgatcgcatgacggagaagatgattcagtgggagacgatcttcgacaccggctggcggaaaccgaagcccggctgagaagagcaatggcgatagaaactgatctaaccccgggggcggggcatatgaggagattcgtttcggtgatggagatcattgagactttcgtggcaagaccattccaagagcagaaagatcgaattgctcgccttttctctcctgtatccacgaaataaaaaaggcttcttcttccttttgtttgtttcttctttttgttgtgggatctctttagttttggttgtcccttgtcgtttgtgtttgatagtagctaatttcgaagaaccatagattttgttttgttgaagcttaaggtaaaatgaaaagctatgtgctttatgtccaaaaaaaaaaaaaaaaaa

SEQ ID NO: 129658 - DNA, 595 bp, Arabidopsis thaliana
cccgactttattagggaacgctggtacgcctgcaggtaccggtccggaattcccgggtcgacccacgcgtccgcggacgcgtgggatttgcgccttgtcaggaggtgtagactctactgttgccgcaactcttgttcacaaggcaattggagataggcttcattgcatctttgttgataacgggctattaaggtataagtgagcaagaacgtgtgatggatacctttgagagagacttgcatctacctggtacttgtgttgatgcatccgagccggttttgagtgaacttaaaggcgttgtggatcccgagacaaagagaaagataatcggggagggagttcatcaacttttttgatcaatttgcccaagagttagagaaaaagcatgggaaagaaacccgcttttcttagttcaagggacttctgtcccctgatggtgattgagtcgcgcccttcccccgggtactgataggactcattctcacacctttaaaagtcaccatagtggtggagggaccccctaaagacatgaaattgaagctcatcgaacccctcaagcttctttttaaaaatgagggtccggaggcccggaaaa

SEQ ID NO: 129659 - DNA, 408 bp, Arabidopsis thaliana
aacacaattctgagaggttccttcatctgcaaatgctactactgattcggtgatggaatcgatcggcgacgacgatgagctccgaagcaaaacagtttctcttccgagaagaatctcgtttacgattcttcttcttcttctgttaatctccttgagtacaagggtctctggttcgttagacaaatctggaagaagagtgattgaagcgagaactgggcaagacttgatttgggttgttcagctatccgatctccatttcagtgtccatcatcctgaaagagccattgatttcaaaaacattgtgggtcctgctctggctcttatcaacccttctctcgtcttaatcaccggtgatctcacagatgggaaaagcaaagacatgttaacaatgaagttaaatgaagatga

SEQ ID NO: 129660 - DNA, 1064 bp, Arabidopsis thaliana
  unsure (1)..(1064): unsure at all n locations
tttattacaactcactattgggaaagctggcacgcctgcaggtaccggtccggaattcccgggtcgacccacgcgtccggctccttcaaagagaaatggtgtagttaaagtgactaaagttgatggaaagaaggaaatggtgacccctgtgattagagcaagcttaacgaagcagggctataaaattatcgggtcgcatagtggggttaagatatgtagatggacaaagtcacaacttagaggcaggggaggttgctacaagcactccttttatggcattgagagtcacaggtgcatggagacaacacctagtttggcttgtgcaaacaaatgtgtgttctgttggaggcatcacacaaatcctgtgggaaagagctggcagtggaagatggatgagccttcagtgattgtgaaaggcgctcttgatcttcataaaaatatgattaagcaaatgaaaggagttccaggtggtaactccagagaaattacaagaaggtcttaacccaagacattgtgcgttatcacttgttggtgagccgattatgtatccggagatcaatgcccttgtagatgagctacatggaaggcgtatttctacgtttttggttacaaatgcacaattccccgaaaagattttgatgatgaagcctatcacccagttgtacgtaagtntagatgctgccaccaaagagagcttgaaggccattgatagncctctctttgctgacttttggggacggttcattgactccttgaaagctctncaagnggaagcagcagcgaacccgtttaccgttttaacacttgtcaaagggattggacacagaggngcttgnttncttattttcaacccttttaagcatttggggaaaccctgnttttttcggggtccaaaggggncanatnctttggggtcctttgaacggnaaaaggtntcaattggggatttccctgggacaaaggttttaagngntnttagnaggcttttnttttagggaattggggacggggtttttggaccccnctttttngtntttgggncggaatnaagggtgaanggttta

SEQ ID NO: 129661 - DNA, 428 bp, Arabidopsis thaliana
atcaggaaccatataaatcatctcccatggcggaaatcgaagtcttttactttagatgaagaagaagacaaagctttgggatttatagaatggcgtgtgtatcgacatgcttgattctctcccctaggttaactcaagtgggtttatcatcaaagaagccttttttgattcggctcagatctcctgttgatcgctactcttttcccagaatgttaacggagaggtgtttgagcactcgtcggaaggttaatcgccatggaatcgctggggtgaaggctgccagtttagataaggttagcggcgcaatcaaaccaggtggattggtggagagtgacaagttgcccgctggatgtacggaaacgagccgatggatgcggtagatgagtgtggcccgaagagtaactgttggggatgttgctagtagaggt

SEQ ID NO: 129662 - DNA, 503 bp, Arabidopsis thaliana
ctaatacgactcactatatggaaagcgggacgcctgcaggtacccgtcccgaatttccggggtcgaccacgcgttccggtggtccttttacttacttttgggaattaggggttatgatttctgggttttagattagataaattggtttccttttttggttaatcaatttaaaaatctcttatttctgttaaagactggtaattttggagtttttaatgcatggacggaagagaagcaatggcttttccaggctcgcattctcagtactatcttcaaagaggagcctttactaatctcgcaccttcccaagtcgcgagtgggcttcacgcgccgccgcccatacgggattgaggccaatgtctaaccttaacattcatcaccctcaggctaacaatccaggacctcctttctcggattttggacacaccattcacatgggagtggtctcctctgcttctgatgctgatgtgcaaccggcacctgcaccggcaccacccagagga

SEQ ID NO: 129663 - DNA, 492 bp, Arabidopsis thaliana
gaaggcgggcccccctgcaggacccggcccggaattcccgggtcgacccacgcgtccggaagttttaaggattaggaggattataaggatgaagaagatggcgacccacatggatttaactgagataggggatttagaatacgtgcctcgggttgataggaagagggatcgtggtaagttaagccaagaaatgtatatggaagacgaggattttgaactgtatgattttgataaggaccggatgccgaggagcttcaagaaagggcagatttgggcgatatatgatggtggtgatgacaaaatgcctcggagttactgtttagttagtgaagtagtctctttgaatccttttaaggtatggatcagctggttggattttgagagcgagaaactaatctctcggatgaagattaattcttctcatatgccttggggtaggttccgggtttcagagatagctttgatagaacaagtgaaaccattctctcacct

SEQ ID NO: 129664 - DNA, 747 bp, Arabidopsis thaliana
ccccccgactcactatggggaacgctggtacgcctgcaggtaccggtccggaattcccgggtcgacccacgcgtccgagaaaaacataaggctttgttctctgcgtttctagagtactatcaggcatggcttgagatgacaatccaagtgagggaggagatggaaccatctcatgtgagagccaattgtgaagcacaacacaagtacctgacatggcgagcacaaaaggatcctggacatggtcttcttaaaagattagtaggtgaagcaaaggcaaaggagctgctaagggatttcctgttcaatggggtgggatgagttaggcacaaaaacattcattgattactttccagagtaccaaacagaagatggaactgtaagcgataaacgaagtatcattgggaagtcatatgaaactcgtccatgggatttaacaggacaatttatcggctaacaatgatatatgtgaacaagtcagatttcagagtcatcaacacaagaggacgtgaacttagggaagtaggaataagaaagagcagcatgaggagtctctcaggtctatctgcatttcaagatgattgtttgagttaccatgcattgtagttttacaagtgtagctctcagcccttcatcaaaatgagaatcctcgagtatgatatggttttatggaaaaaaaaaaaaaaaaaaaaccaagcgcggccgctatagaggatccaagcttacgtacgcgtgcatggtacgtcatag

SEQ ID NO: 129665 - DNA, 567 bp, Arabidopsis thaliana
gaagcaaaataagagggaatattaagatgacatctactatggttctattcctccttcttcttcttgtgtttccgcatatggataaagccctaggcgcacacgaggaatcccagaaacaaggtgcagaaaagacttaccatgatgcacgctttactattcctattaagccaaaatatattcctaaggttatacgccctacgccaaaagatccgcctattccggaatgtcttcgaaaaggcacatgtagtcgtcttcatttatctcctcctccgccccagaggtctttcaaaggcacaaacgaacctggtcattgacctcaatctagcttcgaatgcgtgtgtgtgtgcatgtttcttacattgtggtttggtttgtggcttctgtctttgtttacctatgcatgtgtttgtcatattttatagtttgtcgaacggccgctataataaataaaacttgtatttccttttgtgttataaaaaaaaaaaaaaaaaaaaaaaaacaaagcggccgctctagaggatccaagcttacgtacgcgtgcatgggacgtcaagtaattctatagtg

SEQ ID NO: 129666 - DNA, 960 bp, Arabidopsis thaliana
  unsure (1)..(960): unsure at all n locations
cgccnnnnnnctatacgacttctatagggaacgctggtacgcctgcaggtaccggtccggaattcccgggtcgacccacgcgtccgcggacgcgtgggcggacgcgtgggtggtggttcaagttcagacatggacattgcttctgattcagatgaagagatattcgagaggcaacactctcctcaagattatagaattcatcttggtttgcctcacgtcgcagctcaaaatggacttggacgtaatggtgctaaggtctttggtgctgctgatgatttatctgactcagctactagcactgaagtttcatatgaagcagaagcttgtggtgtgcggaacaatatatcttcacataatgaatttgaaagacgaaatgttgaggctggaacttcaggaaggactctgaacgggacaagcacttcaacaagttcattgcctcgtttccccacctttcatgcgagtgagcagggcccatggcctgcgatgattgcctatgaagcctgtgaacggttatggcttcattcatgggcaacgggataggggcagcgaggcttcttacttcctcaacaatgaatgcaccattatgcggaatggcattagcttggcagaggcttttctttcattctgaacaagagttactgggcaacggcacctcttggggtgggttctcaaaccgctcgcccacaatccgcaaaagcacatcggagaaagaaactccgcaggtcgcagacctaaaggcgatcagcgcaccccctggggttagcatgcgaccttggggcccccaaggacacctccaccgtgccgccccaactcgcggagctcantcagctgtgcgctgcgaccgaggacggggcgaggcgttgaactggcagcgggccgaaaggcgaacccgcgcgcgggcgccccgaggcgcgactcgccccacccaaccgcccgcgacgcacgaacacgccgtgcgcc

SEQ ID NO: 129667 - DNA, 399 bp, Arabidopsis thaliana
aggcctcaaccaaccaacatgatggttcctacctcagggcaacagtcttatccttggtcaagagcttcttttattgccagccctcgttggcaagatccgtctagctacgcttccttaatcatgcctcaaggagttgtcccggttcaaggatggaacccttacagtggtcagctcggctcagtttctccttcaggtaccggaaatgatcaaaactacagaaatttacagcagaacgagacaatagagtcaggctctcagtctcaaggatcattctcgggttacaatccgggatcctctgttccgctaggagggtattatgcattgccgagggaaaatgtgttcccggagagaccaggacaacccgaatgccaattctacatgaagacaggtgactgcaaa

SEQ ID NO: 129668 - DNA, 850 bp, Arabidopsis thaliana
  unsure (1)..(850): unsure at all n locations
cggtggttcaaatccgctgccagagccgtaactggagtcgtcgcaaatccggctttaagcgggcaacttccatttgctaaacccaacggcgcaaaccttcctgtaagcaacggagttccgtctaacaacaaccacaatgggattgtcaacaacaacaatgtccctttcctcgttggactcggcggaaccacagctaacattctccagaacaacaataacggaaacaacattttaaatggtttccctgttgctagtggcggtcagctcccgagcggttctgctcttcagatgctaatgttcgggacaatgacagtaatcgatgatgaactaactgaaggccatgagctcggatctggcttactcgggaaagcgcagggatattatgtggcgagtgcaattgacggaactagccagacaatggctttcaccgcgatgtttgaaagcggcggttatgaagatagtataagcttctttggggttctcagaacagcggtatcagaatcgcatataggagtaatgggaggtaccggaaagtatgtgaatgcgaggggattcgcgattctgaagacgtttacaggatctagcgggacgcagcagaatcagccgcatcagttcactgatgggcttgagactgttgttgagtgtaccgtttatctttcttactagttttatttttcttcttttgttggggtttgggaatgtttggtgtgtatgttatgtgtgtcatttgtaatctaaatatgaaatttgtgtaaaaaaaaaaaaaaagctnnnnnnnnnnnnnnnnnnnnnnnnnnnnnnnnnnnnnnnnnnnnnnnnnnnnnnnnnnnnnnnncgtctcaatcagccg

SEQ ID NO: 129669 - DNA, 1093 bp, Arabidopsis thaliana
gggaaggcgggaccccctgcaggacccggcccggatttcccgggtcgacccacccgtccgttaaccctcgtattaaaaggagaaaaacacaggcggagcattttacgccttttccttccaccatcgttttttcaggtttatcatggtttatcgcatctttctggaggatctagccgctgctatcatgaagttcttggagtacactaacctagacagatggaatgtttttctgggtcatcttaatctcggggaaaggactatcaaaggttgcttggaagcttattcttgcaaacatgcaggaagtgataaaagattgtctcttagtttggagaatgagatgcttgattatcttgggaaatcttctgacaccgactcttcttcacccgttgatctcttgttaagcagatcaagtcgaaaggctttgatctacttggttcttacgctctatcaaatgtatccggactacgatttcagcgctggcaaagcacatcagtttttctcggaggaaagctgggacacctttaagcagatttttaacaactatatgtttgaagcttctaaggaatggactgagaggaatgaggatggttcccttcttgaggtgatctacaaggctcttgatgaggtcgtaaaagtagctgaatgtgagatatatgtttacaatccaaatcctaatgctgatcctttcctcgaggaaggagcaatatggtctttctgtttcttattctacaaccgaaaactgaagcgcgttgcgggttttcgtttctcctgcacgagtaacctggcaaatgatgcatttctcactgacagtcctccatatgaagaggatgaagagatctttgccgacatggatatgtgatctctgtatcgttatgctgagtcacatattctgtagaaacctgtatctatgtgactatgtgtgatctctagtctctaggcttgtatgagtcagtcgaagtccaaggttaagctcttcgctttcctttatctgtgtagttgacgtgactactaataatactctgcactatgtcatgtgcaaatacttatcaaaaaatgtcgtgaaaaaaaaaaaaaaaaaaaaaaaagggcggcc

SEQ ID NO: 129670 - DNA, 699 bp, Arabidopsis thaliana
ggaatagtggagatttgcattcttttgggataaggatcaaaaatggaggaagcaaaggggcctgtgaagcacgtattgcttgctagtttcaaagatggggttagtcctgagaaaatcgaagagctcatcaaaggttacgccaatctcgtcaatctcatcgaacctatgaaagctttccactggggaaaagatgtgagcattgagaatctgcatcaaggttacacacacatctttgaatccacatttgagagtaaagaagctgttgcagagtacattgctcatcctgctcacgttgaattcgccaccatcttccttggcagcttggataaagttttggttattgactacaagcctacctctgtctctctctaattatcttgtagcagcattttcatcattgatctttttctcggggatgcatcttgttaatgttgaataaagtatattccttttgagttttcctgcattgttctcatgtttctctgtgaatttctctcttttttgtttgtttgtttgtttccctctgttgtattaaacttgatctgtaaaaagatcatgagtttattaagagtgtttgatttcagactcctctttgttataagtctattactagttaaaaaaaaaaaaaaagggcggccgctctagaggatcccagcttacgtacgcgtgcatgcgacgtcatagattcttctatagtgt

SEQ ID NO: 129671 - DNA, 398 bp, Arabidopsis thaliana
atcaggggagcttcctgctgtagagcttactactcttcccctaatactgaaggttttataattctacactgaccctatacttttgtgatggtttatttctttaaaacagtattctttacctatcccatgtctggggaaaagtgcaaaatatttatgaaggcatcattttattgttttcgcctctcgaatgttttgtggtgccttttttccattattattggcctttttactgtctggaggattaatattatttgacaaatctacttctatccatttgtgactcccataattagaatggtctttctcactgttatatttatcctctcagtgtgtatcagtctgtggaagtttcttgtttactaataatgtctacttatgctctgaatttgatcctggga

SEQ ID NO: 129672 - DNA, 649 bp, Arabidopsis thaliana
gaatcacgaagacgacgagtgaagaagaagaagaagcaatggggagaaagaagggattgccggagttcgaagagtcggcgccggatggctttgatccggagaatccgtacaaggatccggtggcgatggtggagatgagagagcacatcgttcgtgagaaatggatccatatcgagaaggctaagatcttgcgtgagaaggtcaaatggtgttaccgcgtcgaaggagtcaatcactatcagaaatgtcgtcatcttgttcagcagtatctcgattccactcgcggcgtcggttggggaaaggatcatcgtcctatttcgctccacggtcccaaaccggaggctgttgaagctgaataatgttgtgtgcctcattgagatgtctgaggttttgatatgggacatagaatggaatcatttcacaagctaatggctccctgatatcttccaaactctgtagatttctcttgttcttagaaacttgtcggtctttggaccaacggattcatgtaattgagctttgagtattgttacactccacagtatcagtttctgatgatcaaataagtcccattttcattaaaaaaaaaaaaaaggcgcgcccgctctagaggatccaagcttacgtacgcgtgcatgcgacgtcatag

SEQ ID NO: 129673 - DNA, 621 bp, Arabidopsis thaliana
atcaaaaatccgatggggaggaagaagggattgctcggagttcgaagagtcggcgccggatggggtcgatcctgagaatccgtacaaggatccggttgcgatggtggagatgagagaacacattgttcgtgagaaatggatccatatcgagaaggctaagatcttacgtgagaaggtcaaatggtgttaccgcgtcgaaggcgttaaccattaccagaagtgtcgtcatcttgttcagcagtatctcgatgccactcgcggcgttggttggggcaaagaccaccgtcctatctctcttcacggtcctaagccagtagctgttgaagaagctgaatgatgttgtgtgcgtgattgatctttggtgagtgagagctttgattaccatacatgaatggagtctctgttgcaagttaatgctccacatcaaggttgttacttgatttatgcttttctgtttcgtaaaacatatattactaattggacttgggagttccaattggttaagctcagcttcgtttttcaaatgatttatatatatttttggcttgttgtacattgcgtccctgtttatcgaaataatgaaattcccaagtacctttttgcaaaaaaaaaaaaaaaaga

SEQ ID NO: 129674 - DNA, 456 bp, Arabidopsis thaliana
cggacgcgtgggctcgtaagagatctgggcttgaatatgagtctccattgtcggcagagaagggtagatatgctgagactctgattcgccctggaaaaaagcaagtgcagaaaagagaggctcatgaaattatctacattgatgaagatgagccattcaactgtcctgatccagactttcacgattttaacaacacaatgagctctttcgctgtaggtcaagtatgggctctatatgatcctgtagatgatatgcctagatactatgctgagatcaggaaagtattgcaacctcagctgagtttacgggtgacatggctcgaatcattacagaccacagaggaaccaattcctgcttgtggggagattcgaacatggaaaatcagagaccagtagccctttgatgttttctcatgagatgtatcacaccatacgaggccaatatgtcactataaac

SEQ ID NO: 129675 - DNA, 896 bp, Arabidopsis thaliana
  unsure (1)..(896): unsure at all n locations
nnnnnnnnnnnnnnnnnnnnnnnnnnnnnnnnnnnnnnnnnnnnnnnnnnnnnnnnnnnnnnnnnnnnnnnnnnnnnnnnnnnccacgcgtccgcagggtttttacttttctagggtttatctatctcattccgcaatcatggagtctctggggaagctacagctacatcaccagccatttcacctttccttcactcacacctcttcttcaacattccccaaaaacctcttcaaatcctcaattcaaccaatttcatctctcaaatccgcttcaattaaagcttcgtcctccaaatttcaaaactctatcacccctctcccaaagtccacacctttccgtctcttcaaatccacatgcatcactctaacaaccgccgcggctctgcttttggcgaatctccatctcaaatcgccggcgattgcagctcccatcgcgcctccgccgtcagttgaaagcatagaaaacgttaccttggaagaagaagagagagcgcttgatgagcatttgattactcacccttctgatgtcgacgctcttcgttcattgatggaggtaaagatcaaatctcgaaagcttacagaagcagtagaagtgatcgatcgtttgataaaattggaacctgaagaaaaagaatggccagttttgaaagctaacatctttacctacagtggagatctagacttggctaaactggatttgaagagattctggctaaagatccgcttcgtgttgaagcttatcacggcttgcttatggcttattcagatgcaggtcttgatttgaaagatgtggagagtagaattgaagaagcatgttgaagtgcaaaaagagataatcaaaacgattttcggattntagctactcgtggcgcagattcggtattgaaggaaacata

SEQ ID NO: 129676 - DNA, 351 bp, Arabidopsis thaliana
gctggaagaacacgaccggcagctccaagatttcaccagacagaaagcaaaacactgcagaaactaaatcacgtatctgaatgattttgctgggagtcttttatcagaggacaaaaacagagaaccattcaagtcttgttgtatcaagaagagtcttatttggttcgtagattttgaaaaatttgtttgtaatatatagagattaaaagattgttgttggcttataaaaagctaagctctgtggttatagagtgatgtgtataacatttatacagactcatcatagagtttggttccttgtgtatattacatgtatgtacacttcttcatatattacagagatgtgtacat

SEQ ID NO: 129677 - DNA, 529 bp, Arabidopsis thaliana
  unsure (1)..(529): unsure at all n locations
nnnnnnnnnnnnnnnnnnnnnnnnnnnnnnnnnnnnnnnnnnnnnnnnnnnnnnnnnnnnnnnnnncgtccccacgcgtccgctctcacagtgactattcgtcgcttcagatctaaaagagaggaagataaaccatttggattcaatatcgattaaggaaaccttttgacttcacaagaatggcagtgacagaagcagaaaatcctcttcttggtgaaatcacttgtggcaccttactacagaagttgcaggaaatctgggatgaggttggggagagtgatgaagaacgagacaaactgcttctacagattgaggaagagtgtctgaatgtttacaaaaagaaagttgagctagccgcaaaatctcgtgcagagcttcttcagactttgtcagatgccactgttgaactttccaatctcacaactgctctcggggaaaaaagctatatcgacattcctgataagacttcaggaacgatcaaagaacaactttctgcaatagcacctgcgcttgacacctttggcaacag

SEQ ID NO: 129678 - DNA, 526 bp, Arabidopsis thaliana
  unsure (1)..(526): unsure at all n locations
annnnnnnnnnnnnnnnnnnnnnnnnnnnnnnnnnnnnnnnnnnnnnnnnnnnnnnnnnnnnnnnnnnccacgcgtccgcttaacatgacaaaatcgtttgaaagggctgccgcctgtatggcgcgcgccattatcatactaccaacgaaaggtgatcggtatgaagttgatacagacgcatttctttctgtattggcccttgaacctatacaaaagatggaatccatcccaaccattgtagaggtatcaagctctaatatgtatgatcttctcaagtccatatcggggttgaaagtggagccggttgaaaattctacatccaaattgtttgtccaatgctcacgtcaaaaggacctgataaagatctacaggcacctactaaattactcaaaaaatgtatttaacctttgcagcttccccaatctaactgggatgaagtatagacagttaagactggggttccaggaggttgtggtctgtgggattttaagagatgggaaagtanatttccatccaaatgatgat

SEQ ID NO: 129679 - DNA, 715 bp, Arabidopsis thaliana
  unsure (1)..(715): unsure at all n locations
nnnnnnnnnnnnnnnnnnnnnnnnnnnnnnnnnnnnnnnnnnnnnnnnnnnnnnnnnnnnnnnnnnnnnnnnnnnnnnnnnnnccacgcgtccgcggacgcgtgggcggacgcgtggggttcgcttgctgaatttctcgtctagtggaaatgagtatcgcctgaaatggggagtctttcccccacaatcttccgagtacatttccaacactacggcattgaacataatgttgcttctgaaagaaaaccggttacgcctacctggacaatttggaagctacaagttgctagaatggaaagctgagcaaaagaagaaacagagctggtgggagaaacacttacttggtgtggtgggaggagcgatgatatcgttgcttgttacttcggtgatgatcaaacttgcattggtgtggagacggcgaaagcaagaagaagctacttatgagcctgtaaatgctgctattaaagaacaagaacttcagcctctctcctctgaaacatctaatgcctgagcctcctcatcactcatagagtctctttacggtctctcgctctttatatatatttatatatttgatagaaagaaaatgaaaccccagaacacaggaaacaagattcctcaaattaaaaacacttttgatttcaaaaaaaaaaaaaaaaaagggcggccgctctagaggatccaagcttacgtacgcgtgcatgcgacgtcatag

SEQ ID NO: 129680 - DNA, 654 bp, Arabidopsis thaliana
  unsure (1)..(654): unsure at all n locations
cttggncaatttggaanttccaagtttnctagaatggaaanctnancaaaaggangaancncaggagctggtgggnggaaaccacttaccttggtgtggtgggaggcacgatgatatcgttgcttgttacttcggtgatgatcaaacttgcattggtgtggagacggcgaaagcaagaagaagctacttatgagcctgtaaatgctgctattaaagaacaagaacttcagcctctctcctctgaaacatctaatgcctgagcctcctcatcactcatagagtctctttacggtctctcgctctttatatatatttatatatttgatagaaagaaaatgaaaccccagaacacaggaaacaagattcctcaaattaaaaacacttttgatttcaagtaaattgatgtagttattacgctattttgatgtacaaggaaagaaagaaaatagagagaaaaatggttggaatgtatttggaaggcttattggcgtgagggtttaatttggtttgtgagagatatgtgtttaagtgatattttatgattttattgagaaattaaatttagtgaaaaaaaaaaaaaaaaaaaaaagggcgcccgctctagaggatccaagcttacgtacgcgtgcatgcgaggtcatagctctaagtata

SEQ ID NO: 129681 - DNA, 820 bp, Arabidopsis thaliana
  unsure (1)..(820): unsure at all n locations
ttagtaacaaacgggtttgtgcccgtgcaatgnagagtantgtgtctcacttgcaaaagcaaacacttataaccaatttgcaagctttagatgcgcaaaccagccttgggacaaaagttacagaaactgaacatcactaagaacatattcagtgtttgtcatataagtctcaaggacttctctcttcaagttggaaaccaagaatctggttgtctattaccgagcctaccatcggatgcgatatttgataaagacccggggataagcttcacttgtgacctcaatgacctcattcccgctccggggccctcatcttctctatcctcagcctctccctgtaaaaaccctgttagaattcctgctcttccagctgctgcctcctcgcaacctcgtctccacgatgaaggagtgacacgtttggtgatctttgtcttgtctatgcttcttgtgatgcttctgtcatagtaccagaactaagccggatccagtcttctcttataccggtttactagtcaataggtgtgtttgtgtagatcaaactggtacagtcagctacaaaagtcggatgttgacatgaccggttcaagtgtatgagttgttgaggtataagtttcggaaagtctttttatctttattgatttatgattcttgaaaacctttttaatgtaaagaaaaggtcttgtagggtttataacgtaaggttataatatatttatttatagcctgtcgatttcataaaaaaaaaaaaaaaaggccggccgctctagaggatccaagcttacgtacgcgtgcatgcggcgtcatagctcatctatagtgc

SEQ ID NO: 129682 - DNA, 358 bp, Arabidopsis thaliana
atactcacattccgtgaagcgtgttgagattggagcagtgagaggttcatattatggtggacaaacaataaagcaagaacaattcaagagaaccaagtctcaaactgaaagagtgcatgtcctggggagtcatggttcaccactatgtagcatagatttgaaggatgttttcaactttgatgagttcatagaacaattcacagaggaagaacagaagaaactgatgaacttgcttcctcagattgactctgatgaccttcctcatagcctcagaatgatgtttgaaagtgctcagttcaaggacaacttctctttgtttcagcagctcattgctgatggtgtctttgatgtgtcttct

SEQ ID NO: 129683 - DNA, 545 bp, Arabidopsis thaliana
  unsure (1)..(545): unsure at all n locations
ccnnnnnnnnnnnnnnnnnnnnnnnnnnnnnnnnnnnnnnnnnnnnnnnnnnnnnnnnnnnnnnnnnnnnnnnccacgcgtccgctaaaagcgaatttagggtttagtcatctctccgacatggttggtgccgcgattttggaatctcccggcgaaggaattggatctaacagcattctctcgcaaaagagacaactttcttctagtgatgcagctaagagagacgctaagaaacgctcgacaatgctaatggatctggagattctcgattgtcccatttgctacgaagctttcacaattcccatcttccagtgtgataatggacatttggcttgttcttcttgctgtcccaaactaaataacaaatgccctgcgtgtacttcgcctgttggccacaatcgctgcagagcaatggagagtgttcttgaatcgatcttgatcccgtgtccgaacgccaagttaggttgcaaaaagaatgtatcttatgggaaagagttaactcatgaaaaggaatgcatgttctctcattgcgcctgccctgcatt

SEQ ID NO: 129684 - DNA, 512 bp, Arabidopsis thaliana
atacgactcactttagggaaagctcgtacgcctgcaggtaccggtccggaattcccgggtcgacccacgcgtccggttttcaagggttttgcttccgaggctgacatgttactgcaagatctccaaagtagccttaacaaacaggaagagaagcttattacatttgcacagcagcaacggaaggcacactcgcgagctgtggatacagcaaggtcagtttcaaaagtaacagtagaattcttcaagactctagacacacatgctaccaaattaaccgggatagtagaagaggcacagacagttaaccacaagaaattgagcgaatttgaaaacaagtttgaggaatgtgctgcaaatgaagagagacaattgctagagaaagtagcagagcttcttgcaattctaatgctaggaagaaaaaccttgtccaaatggctgtacacgatctacgcgagagcgcatccaccagaactactaccctacagcatgagatggcaacattgcaggattca

SEQ ID NO: 129685 - DNA, 493 bp, Arabidopsis thaliana
  unsure (1)..(493): unsure at all n locations
gtaaactctctctgattctctctttctctctttctctcgctctctatctctctctcctctgtttgttatatcaattaatcaagaagatttcttgtgttttttttttttctgttaaagaagatttcttgggagaaaataaggtggattgaaggattagtctttaggaatggtggtggaggaggagaatagaagcatggaggaaggacttcttcagcatcaaaacgacagagatgatcgtcgtatcacagcttgtgtcatcctcagcacttttgtcgctgtttgtagtgccttcagctacggatgtgccgctggttatacttcaggcgctgagactgctatcatgaaggagttagacctttctatggcacaattttcagcgtttggctcctttctgaatgtgggaggtgcggtgggggccttnttcaacnggtcaattggcaagtcaacctcggcanaagacggancctttttggggnatngaatttttttctcc

SEQ ID NO: 129686 - DNA, 531 bp, Arabidopsis thaliana
  unsure (1)..(531): unsure at all n locations
nnnnnnnnnnnnnnnnnnnnnnnnnnnnnnnnnnnnnnnnnnnnnnnnnnnnnnnnnnnnnnnnccacgcgtccgcaaaacttgttgtaactcatcttcttcttcttcttctccatcacagactcataacaaatgggagaagtttcagtggtggagaacaagaaagtgatactaaagaattatgtagatggtattcctacagaaacagacatggaagtgaaactcggagaaacaattgagctaaaagcaccaaaaggatcttcttgtttcctcgtcaaaaatctatacttgtcttgtgatccttacatgagaggtcgtatgcgtgattttcacggttcctatctcccgccttttgttcctggccaacgtatcgaagggtttggtttagcaagagtgatagattctgatgatactaattataagcccggcgatatagtctctggtatcattggttgggaagaatacagtttgctacgtagttcagataacctacagttgagaaatattcagttagacgacgacattccgctt

SEQ ID NO: 129687 - DNA, 534 bp, Arabidopsis thaliana
  unsure (1)..(534): unsure at all n locations
nnnnnnnnnnnnnnnnnnnnnnnnnnnnnnnnnnnnnnnnnnnnnnnnnnnnnnnnnnnnnnnnnnnnnnnccacgcgtccgcggacgcgtccgcccacgcgtccgtggagaactcgttaactgcaaaagagaagattatttcggagcttaatatggagattcacaatgttgagacagctttagctaatgagcgagaaagtcatgttgccgagataaagaaattgaattctttgctcaataaaaaggatactatcattgaagagatgaagaaagagcttcaagaaagaccatcagcaaaattagttgatgatttgcgcaaaaaagtgaaaattctgcaggctgtaggttacaattcaattgaggctgaagactgggatgctgctaccactggtgaagagatgagcaaaatggagtcgcttcttcttgataaaaacagaaaaatggaacatgaggtcactccgttaaaggttcaactttctgagaaagcttccttgcttgagaaggctgaagccaagggagaagaactgacagct

SEQ ID NO: 129688 - DNA, 492 bp, Arabidopsis thaliana
tttagctgtttatatttagagttgagactaattcggcgttgcgcaccaacctaacttcggttctacttcacacacaaaactcgtgtcgtctcttgttataaagggtctctttgtttcagtgtctttggtctcgtgtttgtgtagagatggagaacaagaccgataatggaaacgaggatggtccaataatacatagccaagttgagaagataaagaaagagtttgagaagataagacaaccgtcgctgcagcaaccggagatgaggagggttcttagcgagatcaaaaggcgtcaacgttcacgttctcctcttggtttaggggagagatctatttccgttgggaattgatccatgtttgactttatagtcgagagagatagataaaaaaaaagaggtagaggtggttatgtggttcctaatagttaacaggttttgttgtatatattatgctatataaatactctttcgtttgaaaaaaaaaaaaaaagga

SEQ ID NO: 129689 - DNA, 330 bp, Arabidopsis thaliana
attagtccttttaagcaaattaatcccaaagattgatactttgttttcctgagattcttcttttacttcactgtttctgggttttgtaatttgatggtgatggatgataaagataaatatcgcgaagtagtagaacattggtcttgcgaaggtacttctccagctctaatggttggagattctactgagataacagaaatgctatcaccgagccaacatcaacgatggcgaggccttgtgttagatatacaatcgagagaagctcatggcgatttcttgagagcaaatggttccttaattcatagccccgtttccaaaaggttcaagttt

SEQ ID NO: 129690 - DNA, 1278 bp, Arabidopsis thaliana
  unsure (1)..(1278): unsure at all n locations
nnnnnnnnnnnnnnnnnnnnnnnnnnnnnnnnnnnnnnnnnnnnnnnnnnnnnnnnnnnnnnnnnnnnnnnnnnnnnnnnnnnccacgcgtccggagccaacatgacaatacctgcactttgctctgtaacatcgtcaaatctaactggaggttcctgtccagtaacagatgtcacaacgttcgagaaagttgttaacagtagcaaattactggatgcctgtcgcacagttgatcctctgaaggagtgttgtaggccaatttgccaacctgcaattatggaagctgcgctaattatttcgggacaccaaatgacagttggtgataagatccctttagcaggatcaaataacgtcaacgcaattaacgactgcaaaaatgtggtgttttcatatctttccaggaagcttcccgcagacaaagcaaacgctgcatttagaatcttatcgtactgcaaagttaacaaagcttgcccgttggaatttaaggagccaacggaagtgatcaagggcttgccgtaatgtggctgctccaagcccttcctgctgtaggctcgttgaatgcatacatttctgggatacagaaccaaatgctattaacatacaggcaggccatagtctgtgcaacagtcatacggttctatgttaaggataggtggtgttatgacaaatatctatgagctttgtgatgtcgatctcaaagatttcagtgtccaagcatatggaatgcaacaaggttgtcttctgagaagctatcctgcagacttgatatttgataacacatcaggctacagctttacatgtgatttgacagacaacattgctgctccatggccatcttcatcgtcaatgtcttctttgtctctatgtgctcctgagatgtcattacctgccttgccaacatcccagactattaaaaatcacgggttttgcaatggtggggttggagcgttgcgtctcattgttttggtatttcttctgtatgttgttgttgtgagacattaaaaagaggtttaggagggttttgtttttggtagtcagtgaggactttggataaaacaatggtaagctcaattttctcttgtgtagatgtatgacaatagggcaagtgttatgtagtagtaatatcttctcaatcttcatgtatagtggcatctctgcttctgtttgttaatgcgtttggttttattaaaaaaaaaaaaaaaaaagggcggccgctctagaggatccaagcttacgtacgcgtgcatgcgacgtcatagatcttctaagttcgtccta

SEQ ID NO: 129691 - DNA, 535 bp, Arabidopsis thaliana
  unsure (1)..(535): unsure at all n locations
cnnnnnnnnnnnnnnnnnnnnnnnnnnnnnnnnnnnnnnnnnnnnnnnnnnnnnnnnnnnnnnnnnnnnnnnccacgcgtccgtctttttgttaaagactcagtgacgaccctctcctaaaaaacactcataaataaactcgctggagacgccggaaccaaaaacagagttctaatggagaagaaagaaaatggtctcgatggaaagcaatcgggtcgggtcattaacggacccactaacccgatggtcacacctctgctcaacgatctttaccaattcaccatggcttatgcttattggaaagctggcaaacaatctgagcgatctgtgtttgatctgtattttcgtaagaatccttttggtggagaatacactatctttgctggtttagaagaatgcatcaaactttctcgctaatttcaatttgactgatggagagatcgatttcgttcgtgattcgttacctggatgtgaggaagctttctgtgattatcttcgagggcttgattgttctgacattgaagtgtatgccatt

SEQ ID NO: 129692 - DNA, 507 bp, Arabidopsis thaliana
  unsure (1)..(507): unsure at all n locations
ctcttcttcaatcggaaaaacttcttcgctctatagatcctcgattccttcgttttctcgcttatcagtgcgatcaatggcggattcagctttcaggaaaattcagatccaaagagatgacactacatttgatgcctatgtggtcggtaaagatgatgcgcctgggattgtggtgattcaagaatggtggggtgttgactttgagatcaagaaccatgctattaaaatctcacaacttgagcctggattcaaagcccttatacctgacttgtatcgaggaaaggttggtttggatactgcagaggcacagcatctaatggatggccttgattggccaggtgctatcaaagatatccgcgcttctgttaattggctaaaatccaatggctcaaaaagggttggtgccactggaatgtcctggggaggtgcattagctatagctagctctgtattggggccccggngggtgctgttntttggtttttggaccccttcnnanngctcgag

SEQ ID NO: 129693 - DNA, 443 bp, Arabidopsis thaliana
ggtggtattcaacaaatttgtctcgaatttatagagctcgaagcttcaaggaagttataatggctagtgaagatgaatcgattgaacaaaaagctgctgctcgtaaagaggcacttaaagctctaagggcagctcaggaactgtctgagaccaaggaagacggagaggatgaagctgtcgaagaagatggtccagccatgaagtttagaaactatgttccccaagctaaggagcttcaggatggtaaactagcgccaccagagctacccaaattcgaagatccgatcgttgcacttccacctgctgtagagaagaaagaggacccatttgttaacatcgctccaaagaagccaaactgggacctccgaagagatgtgcagaagaagcttgataagctcgaaaggcggactcaaaaggcaatgcataaactcatggtggagcaa

SEQ ID NO: 129694 - DNA, 852 bp, Arabidopsis thaliana
  unsure (1)..(852): unsure at all n locations
atgatactccnnnnnnnnnnnnnnnnnnnnnnnnnnnnnnnnnnnnnnnnnnnnnnnnnnnnnnnnnnnnnnnnnnnnnnnccacgcgtccggagaaattgaagtcacagctgaagaaattgagatgggtcttatcgagtccaacactacaaatgctcagcttcacattgcacttttgaagggggataccaccggtgaataaaacgcttgacgatgcaaatgcatggatcacggtgttgtgtaagaaactagctccatggtggccatggattgctaagggtgaaattcatattactgttaacaaaggggaggaaatatctgaataccaaggacttgactctattaaccgcctgaagattttgaaggcactttgtgagcttcgagttcaacaagatgatgcacgttcgtatattcaagataataccaaggaaggagactgggattctagtttacgcaagaggaagctaggaggagatggaaagaagacttcttattggtttgatggtaatgatatccaaggttacagattattatagggaagtcaatgggaatctcaaagaagaatgctggctcagatttatcttgtttgagctgggaaactgaagccaccaatctagatgaatttcagagtgtcgctagagagttatcatcaagcanagcttcttctttggctgcaactgggcagatgattgagaacagaagctatacccgttgntgagaaatatcataaaaagagagaaagggccatanaaaagaaatgaaggagagatggtcggtaatgtcaattctcgcgtctctccgactactcgtncttgtcgaaccacatgccggtactacacctttgcagataca

SEQ ID NO: 129695 - DNA, 708 bp, Arabidopsis thaliana
  unsure (1)..(708): unsure at all n locations
tttnnnnnnnnnnnnnnnnnnnnnnnnnnnnnnnnnnnnnnnnnnnnnnnnnnnnnnnnnncccacgcgtccgcccaaccacgaagtgacacgctctcaaacgaaatggtggttttgatttcaagtacagtgacgatttgcaatgttaaaccaaagcttgaagacggaaactttcgcgttagccggttgatacacagacccgaggttccatttttctcaggattgagtaatgagaagaagaagaaatgtgcagtttcggttatgtgtttagctgtgaagaaagaacaagttgttcaaagcgtggagagtgttaacgggacgatttttccgaagaaatcaaaaaatcttatcatgagcgaaggaagagatgaagatgaggactatgggaagattatttgtccaggttgtgggatttttatgcaggacaatgatccagatttacccggatattatcagaagagaaaggtcattgcgaataacttggaaggtgatgaacatgtggaaaatgatgagcttgctgggtttgaaatggttgatgatgatgctgatgaggaggaggaaggggaagataatgaaatggatgatgagatcaagaatgcgatacaaggtagccactcttgaagggagagtgggtttgtatgggaatcaaatgactgggaagaaaagaaaggagtgaatgatgctcnattggatgggtttgctcccgct

SEQ ID NO: 129696 - DNA, 568 bp, Arabidopsis thaliana
gctctttcgattttggagatatttacagataaaaaatgggagcttcgaaactttccgggatgcaaaagcaagtcttgagtctctacagaggatttctaagagcagctcgttcaagaccaatagaagacaggaagagaatagagatgattgtgtcaacagagttccgccacaactctaaggaggtcgaccgtaagaattttcagtacatcgagtatttgcttcggttaggtactaaacagcttgatcaactcaaaagccctgccatagttagcctctcctcgatcaaggtcgttacatctaaaacctgataccttattttatagcttgttgctctagtgaccatagataacaaagctgaggaaattgattcgttttcctctttttacatttagttatgtatgtattattatggatgttcaaggtcccttattaaataaaaaaaattgtggtccccattgaaaataaataaaccccttccccccaaaaaaaaaaaaaaaaaaaaaaaaaaaaaaaaaagggcggccggtttaaaggattccaggctaaggaaggggggcatgcaagttaa

SEQ ID NO: 129697 - DNA, 885 bp, Arabidopsis thaliana
  unsure (1)..(885): unsure at all n locations
atgatatnnnnnnnnnnnnnnnnnnnnnnnnnnnnnnnnnnnnnnnnnnnnnnnnnnnnnnnnnnnnnnnnnnnnnnnnnnnccacgcgtccgcggacgcgtccgcccacgcgtccgcccacgcgtccgcggacgcgtgggctcagagaccaattctctcaatctccgtcgtgcgcttttgcttgattttgtaataaggaatctgaggaattgatacaagtgggctctgatgggaaccatagactttagagctgctgcagatgaaaactccattgtggatctcagcagtcaagttcaccagctcccttgctgcattagatttgatggtcctgttgaagtttcccactatttcaagcctaaatctagcgatgttgaaatcgatggagtaaaaacggaagaagctcatttcagaggaaggaagttgcagggagcaactatctcactccctagaggctattctggctttgtgcttagacaagcgagtaacttgaatgctaatggaaagagaaaagcttctatgcccacagaagataaccagtgttgggaagtgaaggcgaaattcaataacctgacatactggaatcacgatagtcttccttcaaaggacgatactttctttcgctcttttcattggtttagcattgcagaagcgctgcataaaccagtgaaagttgaagacttggttgcagtttcacatggtggaaagataaaatatgaagtggcattaccgtttcgggttttgaacaaacatcttgtgaactagcagtaagtgatctatgacatggattctcaggcttgttgctcaggctgttcagcctgatatgattcctctgtagctgttttatagaatgaaatctatatcttagagagcagtcattccttata

SEQ ID NO: 129698 - DNA, 769 bp, Arabidopsis thaliana
  unsure (1)..(769): unsure at all n locations
agcagcaagttcccagccgcctgtgcatagatttatggtcctgtgaagttcccacttttcaagcctaaataacgatggttaaatcgatgagtaaaacgnaaaagctcatttcataggaaggaagttgcagggagcaactatctcactccctagtggctattctggctttgtgcttagacaagcgagtaacttgaatgctaatggaaagagaaaagctttctatgccctcaggaagataaccatgtgttgggaagtgaaggcgaaattcaataacctggcatactggaatcccgatagtcttccttcaaaggacgatactctctttcgctcttttcattggtttagcactgcaaaagcgctgcataaaccacgtgagagttgaagacttggttgcagtttcacatggtggaaagaataaaatatgaagtggcaattaccgtttcgggttttgagcaaaacctcttgtgaaactagcaagtaagtgatctatgccatgaaattctcaaggcttgttggcttcaggcttgttcgagcctggatcatgtatttcttctgtaagcggttttttataaagaaatgaaaatcatattattctttagagaaaccagttcaatttcctttaagaccggtcattacaagcattgggttttttaaaaaaaaaaaaaaaaaaaaaaaaaaaaaaaaaaaaaaaaaaaaaagggcggccgctctagaggatccaagcttacgtacgcgtgcatgcgacgtcaagactcttctatagtgcacc

SEQ ID NO: 129699 - DNA, 584 bp, Arabidopsis thaliana
atcagcaagactatatgggaacaaaagttttgtagatgaaagacaccgacacagatatgaggtgaatccagccatggttccacgttttgagagctctggactcacattcacaggaaaagacgagacagggcagcgaatggagatcattgaactgcctaaccatccgttttacgtcggagctcagttccatcccgagtacaaatcaagacccggaaaaccatctcctctgtttctaggactaattggagcagctagtggagaactagacactgttctgctacaaagctaccaagaaaccgtcgttccacgttctctacccaacggaaaactagagagagtttactggaaaggtgcagcgaagaagccagtcagtgttgggtacagtttatgtgatcgtgtctactcgtggaccaccgtatctgcatcaacaatgacttctctcgaaaaaagctatttagccggaatttttaacatggatttcttcacctgtggagggagagagaaggcaatgagtttgtacagtttgaagactggctttttatgagatgcttttcttaagattatgaagtaaaagatgaacacta

SEQ ID NO: 129700 - DNA, 793 bp, Arabidopsis thaliana
  unsure (1)..(793): unsure at all n locations
cgcgtgggcggacgcgtgggcctcacttaacacagcagaaaccctttcttcagtcttctcctgcgttctccttcttcacttcccaactaagtctcgccggacgatcgtaaccggagagcttccgtcgaccggtcaagtgtttgatatctaaagaagatgttgaagtttctatcaaaagtaagaattgagttcaacacattagatccaagacttgcgtcttgtgttgaattcttagctcaatgcaatgcaaggaaggccaaagaatcgaatcccaattgtcaggttttggtgaaacgtagaaccgatgagcagccgccgcagatcactgtcacttttgttaatggtgttgaggaagcttttgatgcagctgcaacctcggctcagtcgattagaaagatgattcttgataaaggtcagtatcttgagacagagcaaatgtttcgtgaagctggagaacaatggcctgtgattatccctgatgaagaacttctccaagaggctcctggtgttaagccgagaaaagcagaagacaagaagtgatgctgcaccaagcacgatcaatatctcttggtgtaatctcattgatttgacaaatctagcttttcggaatgtaagatcgtttgctgtgtgcaactcgatatgtgtctcaagcttagggtttcgactgatacatttgtattgttttctcgttctatgtgaaccgcaatggatgaacttttggtcaggaaccgggactatgacactgttatggaagctattgaagctctgggaatnaaaaccaatttttataggc

SEQ ID NO: 129701 - DNA, 759 bp, Arabidopsis thaliana
  unsure (1)..(759): unsure at all n locations
gtcgacacacgcgtctacattcactctcactactctcttctctttgtgtaagcaaagaaccaatctttagataatttaggaaactcttcattattcctcttgcaagctcgaatgatcgccgccttgttcccttgatacctcgaatccttttcttcttccagcctcagtatcacttcaatcttctcggcttgatagttaaatggatcctgttcctgttcgatgtcttcttctcggtatatctcggtatcttcatctggttgcgtgccagactataagatttaatcctattcaaacatgtattggaaatatggttctcttgttgaagctcttgaaaccgttgctcgatgaagttgttgattgcaagataccttctgatgactgtttatataaaggatgtgaagaccttgattctgttgttaaccaggctcgggagttcttagaggactggtcaccaaagttgagcaagttgtttggtgtgtttcaatgcgaggttttgttgggaaaggtccagacttgttccgttggagattagtcgcatacttcttcagttatcacagtcaagtccgggtacttcaagcgnacaaagtggtgancgcngcgtgcaggagnctgagaggtttaaagcaagagggggcattaatggnacncatgngaaatgnctttncggnancagaaaganggattacccccttggggaacaacannngggagganaaatcaaagggtggggtggnncaacnaggctcctaaaggaggnnc

SEQ ID NO: 129702 - DNA, 531 bp, Arabidopsis thaliana
  unsure (1)..(531): unsure at all n locations
nnnnnnnnnnnnnnnnnnnnnnnnnnnnnnnnnnnnnnnnnnnnnnnnnnnnncatattctttacccacgcgtccgtgaccatgcagcacttctacaccggtgtatcggaatacttctccagaaagttaatgatagagcatatgttcgtgacaagattgactggatgtacgaacaggctgacatttctatacctgcaaatagactgggtttggcgaaggccatggggctggtcgcggcttctcacttggacactgtactggaaaagctgaaaatcatcgtggataatgttgggcagagtattttccaaaggatcttatctctcttctctgagagctataaaacagaagacagtgatgatatacacgctgctttggctttgatgtatggatatgctgcaaaatatgcaccctcatcagttattgaagccagaatagatgcacttgtcggcacccaatatgctttcacggcttcttcatgtgcggcaacaaacagcaaaacaagctgttataactgctattgatttattaggt

SEQ ID NO: 129703 - DNA, 1183 bp, Arabidopsis thaliana
ctcttccgataatcctcgcatcctctccactgcgaaacctaaccaaaccttgttcaacttctcaaatcccaaaacccattcaaaattctacaaaacaacctccaatacatctcctaaccaaaaccaatctctctgtaaccatttcccaactaattatcacttcccctgttctcgcatctgaatcattcgactcaatttcatcagacccatcttctggaaaaatcgatttagagtcaattttggtcacaattgataatttcttcaacaagtatccatttttcgtagcgggatgtacttttacctatcttgttgtttatccagctgtgatgttttacttgaggaagtataaaccaatatccgccatgaacgcgtttcgtaagcttaagaatgaatctgattctcagcttttggatattagagatgtcaagactttggctttgttagcatcaccgaatcttaagtttttgggtaagagttctgttcaggttccgtttagtgagaatgatgaagaagggtttttgacgaaagttaaaggaagcttctctgatgctgagaatacagttgtttgtgttcttgataattttgatggtaactcgtcgaaagtagctgaattgctgatcaagaatggtttcaaagaggcttattatattagaggcggcgcgagagggaagaatggttggttggctattcaagaagagcttttgcctccaccggtgcatatgtacactgcgaaaaacgtaaaatcttcaaacaacaatgaagcgtctgttgttggaactgagaactagttcaagaacatagcgtaatgtggcaggacatggtactaccatgtcactggaacatgagaaagcttctttaggtggaagagtagctatatattgaaagacttgtttagacctcaagacaactctatgcttagcaaaaaagctaaccttgtctactacatattgatttctcagaccattccaataaaatgagacttgttattattatgaagttttttgtgcttttgtaccttttctattgcattgtgtgacagataatgattatgtgtaatgctcttcctgagattgtttgaaacaatttacctgcgaaaaaaaaaaaaaaaaagggcggccgctctagaggatccaagcttacgtacgcgtgcatgcgacgtcatagcttttgctagggtgtaagc

SEQ ID NO: 129704 - DNA, 323 bp, Arabidopsis thaliana
acgatgatgaattgtctcaatttttagggttcatcaaaatttgaacaaaagggacctgttttgctcaatttttgatagcagaagacgaatctggatctggggtcacttcaagattgaattaagaggtttttaagtaagttgagatgtcagttaaagcaaggagaatttctggtagattagagactgtagtaactaaggttaattatgcatttgatcctgttgacgatgacaaaatcataagaaaccggcttctaacccgaaccacgaccactcgaggcgagcctccattgaagaaacttcacaagaagttcacttcttttgta

SEQ ID NO: 129705 - DNA, 590 bp, Arabidopsis thaliana
cttagggttaagcaagagagaaactagagatgaggttgataacgcacaacatgctttcctgcaacatcaaaggagtcaccagtggatttcctctacggatcgaagctgggaacgtgattgagaaggaagtcgatttcaatcccgattttatcaggcacatgttcgcgaagattgagtggaaagctctggtggaaggtgcgcgttccatgggatacgctgagttaccggaggaatctccggacgccgcggtgctgaaatcagatgagcccttccttaagaaactccaccacgcgttgctcgagctccaccttgaggaaggcgcgcttgtttgccctgagactggacggaagtttccggttaataaaggaatcccaaatatgcttctccatgaagacgaggtttaattgattgtgagatttttccttgtaagtttcaatctatgatgtttctgatgatgtgaaccttttagtgagatatgcaattgaatgattccatttgaatcatccattgttgtcgttttgaatcctttaattgtgttttatcaaagaatggtgcctgattgcaaaaaagtttataccctaaaaaaaaaa

SEQ ID NO: 129706 - DNA, 406 bp, Arabidopsis thaliana
gacgcctatgcatattggaaagggaacccttttgttgcatctccttcaagagaagatctcctcacttgcaatttatcctcactacatgattggaattctagaattttcattcaggattggatatcagaaggacaaagaggatttgagaattcgaatgtagcaaatcaatgcacttacaggtacaagatctatatagaagggtatgcgtggtcagtgagtgagaaatacatattagcatgtgactcagtcacattgatggtgaaaccttattactatgatttcttctcaagaactcttcaacctctccaacactattggcccattagggataaacgataaatgtagatccatccaaatttgctgttgattggcttaataatcacactcaaaaggctcaagagatagg

SEQ ID NO: 129707 - DNA, 786 bp, Arabidopsis thaliana
ccaaggtttggttttaagaccgccttcatgcccagctaaaattccttttgaaaattggtttgccggggaaaacatatttccttgaaaaggccagagattgaaattgtcagggtaggtaaggcctggaagactgccccatgccttagaataatagtccaacaaagcgtgaaatgaagctaaggttctaaagagccctcgcgtccgaaacttttgggaagttcattgcgcagcacggttctttcgtctctgatcttgcaaagttacgggtagagctagaaggaacccgattgttggttctagaagctgctgatcatcttgataaatttggaaacaaaaaagctcgaggaattctcgcaatggccaaggttgcagctccaaacatggcattgaaggtactagacacggcaatacaagttcatggagcagccggtgtatcctcggacacagttttagcgcatttgtgggctacagctagaacactgaggattgctgatggacctgatgaggttcatcttgggaccattggcaagttagaactgcaaagagcttcaaagctttaaagcgttttgggatatgcgaattcgattctcagaataagatatcagttttttttttttacatcattaataaaggttgttcttgggtcttttagtacaaacagtaaatctgaataaatttactactagatcttaaaaaaaaaaaaaaaaaaaaaaaaaaaaaagggcggccgctatagaggatccaagcttacgtacgcgtgcatgggacgtcatagtaagtctatag

SEQ ID NO: 129708 - DNA, 518 bp, Arabidopsis thaliana
atacgactcactttagggaaagctcgtacgcctgcaggtaccggtccggaattcccgggtcgacccacgcgtccgcccacgcgtccgtacggctctctccgcgcttgaggttggcgtcggagattaccaacaagagctctctccaatcgtcgtctctttgatatatggcgtctcagcctgcaggtggcagtcctcctaaaccttgggaaaaagaaggaaatacatctggtcctaatcctttcaggcctccttctaatactagcacggctggttcagttgaggcttctggcacagctaatcctggtgaagtagttcctccgcccgtgaacaggcctaatacagctgctaatatgaattcactcagtaggcctgtaccggctagaccttgggaacagcagaattatgggagcactatggggggaggttatggttcaaatctaggtatgacctctgggtatgggtcaggtacatatggttcagcattaggtgggtatggttcatcatatggtggtgggatg

SEQ ID NO: 129709 - DNA, 323 bp, Arabidopsis thaliana
ggcggacgcgtgggttggaatctgacttcagaacgctctgagacaagaatgaataagtactcccgggcgtcgtttcatcctatcagccagaagattcacttcttctcatttctcaactcgataactggtgttgttttgttaattggacttatatcttttctcttcatgcgccatctcaagaatgaactaagaagttactctatcggagatgaagaagagagaaaggaagcaggttggaaactcgtacatagtgatgtatttcgatgtcctcggaacatcagctggctttgtgcaatcttaggaactggtactcagttgctaat

SEQ ID NO: 129710 - DNA, 537 bp, Arabidopsis thaliana
  unsure (1)..(537): unsure at all n locations
cnnnnnnnnnnnnnnnnnnnnnnnnnnnnnnnnnnnnnnnnnnnnnnnnnnnnnnnnnnnnnnnnnnnnnccacgcgtccggatttgagttagctccaatggtaattcaactcatgacagagaggaacattcacctgcggggtttggcacatcccatgctatttaagaatctccaagactcattagtcgacacgaagatgtttgacaaatataagataatgggtggagttccagtctcccatttcaatatctacaaactactgcgtgaaaaggctcatgtgcttctgtatcctggaggtgtccgtgaagctttgcatagaaaaggtgaagaatacaagctgttttggccagaacggtcccagtttgtgagagttgcatctaaatttggagccaaaattgttccttttggtgttgttggagaagacgatatctgcnaaattgccctggattctaatgatcaaaggaacatccctatcctcaaggatttaatggaaaaggaacaaagggcgctggcaacataagggaaggcgatgagag

SEQ ID NO: 129711 - DNA, 712 bp, Arabidopsis thaliana
cggacgcgtccgcccacgcgtccgctcaaaagcaccttccttttttttcctattctttctcatcatctttcttattatgaactaaaataaatgttcagacaaaggagccatttctaccatttataattttatattacacaactatatgtgtgtttgtgtgtgtgtgtagccgtggggatttatatatacatataacatatattgacaacctctactactgtcatttagcctgcaaagcccacaaacaaagggctacacaagtcttccttctctctctccctcttcctctctttagatggaataatggatcaatgcttgtaaaggtttgaaatttgatcaagttttggagaagcaaattgaaaaagaaaagaaaagagaagacatggaggtggagaagaggattgtagtgaatggaggaatgaaattgccaataggatacagatttcacccaaccgagcaagagcttatccttcattacttgctcccaaaggcctttgcttctcctttgccttcctccatcatccctgtctttgacctcttcttctctcatcctcttagtttcccaggggaccaaaaggagaagcagaggtacttcttttgcaagaagagagaagtgtcaagtaatgagcatagaatcaagatttcctctggtgatggttattggaaacctattggtaaagagagaccaatcattgcctgtggtaaaacattt

SEQ ID NO: 129712 - DNA, 544 bp, Arabidopsis thaliana
  unsure (1)..(544): unsure at all n locations
nnnnnnnnnnnnnnnnnnnnnnnnnnnnnnnnnnnnnnnnnnnnnnnnnnnnnnnnnnnnnnnnnnnnnnnnnnnnnnnnnnnccacgcgtccgcggacgcgtgggttgcttttctccgtcactgagtaccttgcctctcgagctcccaatcttaaggtacaattgatcttcactatagtcgttcagaatctgatctgcttatagaaatattcagaagtgtgagatagctgctaattggtctttactttgtttttttctcttgcttcacatcagaaaatttaggatcttagagcttttcatagtgaacttaagaacgcttttcgaattagtcagtcttagctctattttgtctgtgtgtgtattttctggacacgagacctttgtttcaatttctataagtgatttcggtttacattttaaaagcttgatttattcccattgaaataaatattcatgatgagtaaatctgtgcatttgtatcaaatttttagtgctttgcagattttattttaacgcacgctcttgtttggtggttgaccttgt

SEQ ID NO: 129713 - DNA, 784 bp, Arabidopsis thaliana
tatacgactcacttagggaaagctggtacgcctgcaggtaccggtccggaattcccgggtcgacccacgcgtccggtttctctggtggagacaaagacataaccagaacacattctttgatgttaaagatgggaatcatcatgaggaagtttcacttggaaacctgaggagatttggtttcagggagcttcagattgcgaccaataacttcagcagtaagaacttattggggaaaggtggctatggaaatgtatacaaaggaatacttggagatagtacagtggttgcagtgaaaaggcttaaagatggaggagcattgggaggagagattcagtttcagacagaagttgaaatgatcagtttagctgttcatcgaaatctcttaagactctacggtttctgcatcacacaaactgagaagcttctagtttatccttatatgtctaatggaagcgttgcatctcgaatgaaagcaaaacctgttcttgactggagcataaggaagaggatagccataggagctgcaagagggcttgtgtatctccatgagcaatgtgatccgaagattatccaccgcgatgtcaaagcagcgaatatacttcttgatgactactgtgaagctgtggttggcgattttggtttagctaaactcttggatcatcaagattctcatgtgacaaccgcggttagaggcacggtgggtcacattgctccagagtatctctcaactggtcaatcctctgaaaaaacagatgtttctggcttccggattctttctcttgag

SEQ ID NO: 129714 - DNA, 717 bp, Arabidopsis thaliana
  unsure (1)..(717): unsure at all n locations
gcctgcgggcacgggtccggaattccggggtcgcccctcgcgtccggaagaaacatgactggtgttaatgatgatgatgataagaacttcaaagaagaaccagagattcaagttttaagcgacgacgatagtgatgaagaacaagttaaagacgtaggtgaagaagttagcgacgaagacgatgatgatggaagtgaaggagatgatgatgatgatgaggaagaagaagaagatgacgatgacgatgatgatgttcaggttttgcagtctttaggtggtcctcctgtacaatcagcggaagatgaagatgaagaaggtgatgaagatgggaacggtgatgacgatgatgatgatggagatgatgatgatgacgaccatgatgatgaggatgaggatgttgaagatgagggggatcttgggacagagtacttagtgaggccagttggtagagctgaagatgaggaggatgcaagtgattttgagccggaagaaaatggtgtgggagaggatatagacnaaggagaagacgatgagaatgataactcgggtggtgctgggaagtcagaggcttcgccgaagaagaagagagctcctgaagaagatgaagaggatagtggtgatgaagatgatgacagacctccaaagaggtagtttttggatctgacacaacacaatgagaccagagagctttttatgttttttttctaaaaaaaattt

SEQ ID NO: 129715 - DNA, 478 bp, Arabidopsis thaliana
tacgactcacttagggaaagctggtacgcctgcaggtaccggtccggaattcccgggtcgacccacgcgtccggcagcttggtggatttatatgcattcgaacagtcgaggcatgggaatttcgctgatatcgataagaagatagtggaaactggtgaagatatcgttttctttggcaataagagtacttcatggtctggaaattctagtaaagggaactccgggtcgaaaataaaggaaccaaatgagattcatcggcttgttgaaaactctggaaagcatgacagctataaggggtagcattcttttaagatctgaagatgtcgtagatacctcagcgaactggagagagggttctgttaagactctttttcaatcttcgagaggggatgcgtcaaacagttacaatctgggtagcagctccgacaagagagagggaaagaagaaggcccactttagtgatgtgagggtggcaatc

SEQ ID NO: 129716 - DNA, 990 bp, Arabidopsis thaliana
  unsure (1)..(990): unsure at all n locations
ctggagtggctttgctggtgccacagagctagataaatttttgggacccaagggtccagcaaaaaggagtggactgagaggagcggagattcagagtcaaaggcctatggttggtgtgcacgtgcagacgactttgaatctcaaggtccaataggtgagtacctctccaaggagggacagctaagaacagtttcagatatttcgcaaaaaaatgtgcaggatagaaacactgttctggaagaactttcagatatgattgctatgacaaacgaagatctgaacaaggtccaatacagttacaacaggacggcaatgtcactgcaaagggtcctagatgagaaaaaaaacttgcaccaagcttttgctgacgaaacaaagaagatgcagcagatgtcacttcgccatatccagaaaatcctatatgataaagagaagctaagcaatgaactggatcgtaagatgcgggacttggagtctcgggccaaacaattggaaaaacatgaagcactaactgaactggataggcaaaagcttgatgaagacaagagaaagagtgatgctatgaacaaatccctacagttagcctcacgtgagcagaaaaaggctgacgaaagcgtcttgagacttgtagaagaacatcagaggcaaaaagaagatgctttgaacaagatccttctgcttgagaagcagctagacaccaaacagacactggaaatggagattcaagagctaaaaggcaaattacaagtgatgaagcatctgggggatgatgatgatgaggcggtccagaagaaaatgaaagagatgaatgatgagctggatgacaagaaagctgagttagaagggctagaaagtatgacctcagtcttgatgacaaaagaccgccaaagcaatgatgagatacaagcagcgcggaaaaanatgattgcgggtttgacaggattgttgggtgccgagaccgatatgggagtaaaaaggatgggagaactt

SEQ ID NO: 129717 - DNA, 832 bp, Arabidopsis thaliana
  unsure (1)..(832): unsure at all n locations
nnnnnnnnnnnnnnnnnnnnnnnnnnnnnnnnnnnnnnnnnnnnnnnnnnnnnnnnnnnnnnnnnngggccgacccacgcgtccggtcgagacagatagagagagctgaaatttctgtgagaagattttcttccgacattttctctttccaaacactgttctacacgtagtcggaaatctcggaaaaaccaatctccgagtcagagagagagagagaggcgttcactgttgtaaaggattaagctttgggtaagaagaagatgaagaacaagaccaatttaggtctctcagtcttcttcttctttatatgtctcgtttccgtgacatcagatctagaagctgatcgacgagctctaatcgcacttcgtgacggtgttcatgggcgtccattgctgtggaatctaacagcaccaccgtgtacttggggaggagtccaatgtgagtcgggtcgtgtcacagcactccgattacccggtgtgggtttatcgggtccattaccaatcgccatcggaaaccttacanagctcgaaactttatcattccgattcaatgctcttaacggtcctctcccgccggatttcgcaaacctaactcttctccgttacttgtatcttcaaggaaacgcattttccggcgagattccttcgtttctcttcactctaccaaacattattcggatcaatctcgcccagaataatttcttgggtcggatcccggataatgtcaattctgcaacccggttagctactctttacttgcaggataatcaactcaccggtccaatcccggagattaagaattaagctcaacagtttaatgtctcatccaatca

SEQ ID NO: 129718 - DNA, 377 bp, Arabidopsis thaliana
atgataaacaatacattgatgtgagattcactggtagtgaatatcagtcgtctcgttcaatgattacggtcaatgttacagaagagtttcatcaatggcggattttttgtcttgtagcgggattgattgtgattttgttagcacctgttgttagcagttggctaccgttttactatacgagttctatggcggttggtgtttttctcgttgttttgattattatcttccaggttatgaggttattacctactgggaggaagaatgttatgtatcttgcgttttatggatctgttgttggtgctggatctttcattctacatcaattctcaatgatggtgaatatgattcttgttaattttgggttgagtgaggatatg

SEQ ID NO: 129719 - DNA, 786 bp, Arabidopsis thaliana
  unsure (1)..(786): unsure at all n locations
atgtcccttaccctagactttctcttccaaaatggaacccccagtttcacatccttgattaatttttatgttgataatcctgttataatcattggaactccgggaacttatgaagccaagatcagccaaaaagactgttctttaactaccgaaagcttaaatctagaagcacaacgggtaaagactacattagcaaaatttcttacatcaacttgtttccttcatgtttccaataggtcactatgtcgtgatatgtggctatgatgctgttagggatgagttcgagatcagagatcccgccagttccaagatacatgagaggatctcgtcaaaatgcctggagaatgcccggaaatcgtttggcacagacgaagatcttctcctgataaacttggagaatatgaggaaccagaacggatattagaatagttgtcatcatcatcatcaaatcagttctggatgagaatgaaacctgagtgttttctcccagaagaacatgaggtgaaaagtatacgtctctatacatacgtctttacatatggatgctgccaaagaagaaggaaaagatatacatatgtcatgaaatatctcagtatctgtttgcgtttatgagattcttgtgttggcagttataattccttgttgtacaaattggtgaatagaaaagatttgattgattaaagtgttcgaaaaaaaaaaaaaaagccaccnnnnnnnnnnnnnnnnnnnnnnnnnnnnnnnnnnnnnnnnnnnnnnnnnnnnnnnnnnnnnnnnnnnnnnnnnnnn

SEQ ID NO: 129720 - DNA, 358 bp, Arabidopsis thaliana
gcgcgcatgttttggctggaggaagtgcttgtctctgggcttcactccagcaattcttgttacactggtcactatgtcgtgatatgtggctatgatgctgttagggatgagttcgagatcagagatcccgccagttccaagtaatgttctgttatatctcattgcttcaatacttacaaatcggtgctctacagcattttcttggaaatgttatatctggttgccatgttcatcgatcagcaatacacattgaaactgtttagtaatgagttaaaatctaaacataatgggaagagagatttaggttggtttatactaagatattccatcttttagatgcgagttctcattactattt

SEQ ID NO: 129721 - DNA, 332 bp, Arabidopsis thaliana
aatacagacggatgactaagattctgaaggaactccataagtcttgtcaaaaggaagatggaactgatgatcagaagaaaggaagtcagctgcttgaggtttatgcaattgaaattcagatttacactgaaacgaaggacaacaaaaagcttaagcaactataccataaggcacttgccatcaagtctgccatacctcatcctaggatcatgggtataatccgcgagtgtggtggaaaaatgcacatggcagaacgtcagtgggaagaagcagcgacagacttctttgaggcttttaaaaattacgatgaagctggcaaccaaagacgtata

SEQ ID NO: 129722 - DNA, 623 bp, Arabidopsis thaliana
  unsure (1)..(623): unsure at all n locations
nnnnnnnnnnnnnnnnnnnnnnnnnnnnnnnnnnnnnnnnnnnnnnnnnnnnnnnnnnnnnnnnnnnnccacgcgtccgaaaaaatatgcaatcactactcttgccgccggcgagttcctccggcgtatccgccgtcgcgctacggccaggtttccagcactcatttaaccaccaaagcctctctactcgctccctgccattgtttaatccacttctcttagctccgaagaagaaaaccaccatctcctcatatcaatcgccaccgtctctgtccgtctacggtttccaaatcggaggatctaaacctagtttcacaccatccacggtggcattttcatatccgacttctccgtcttccgttcccggtgataatgaggtcgacaaagcaaaactcgctcaggttgcaaagagattggagaagacttcaaggtactttaagagactagggagtattggtttctgggggcagcttgtgtcaactgtggttgcagctgtgattctatccttctccattggtgtaactgggaaacctacttcacctgctactttctatgctactggtagnggggattgctgctgcgtttgtctcgggtttctgggcgtttgggtatattccggctct

SEQ ID NO: 129723 - DNA, 492 bp, Arabidopsis thaliana
cttacgcgcgggctctgttcttcattctctggctccattatcttccccaacaaacccatcttcatcccccgctcttttcctcaaccactccgtcactcttctgctctctcgtactcctccttgaaaatgaccgatacccatatcccaggaaaccctaattcgtcccctatccaatctcccaccaaacccgagtcgcttcgttccctcgaatttcaattgggttcttctttcaccgccgatccaatcatcccgccgccgaatcagatcgtcatcgttattagcggtccaagcggagttggtaaagacgcagtgatcaacaagcttcgtgaggttcgtgaaggtcttcattttgttgttaccgccactagtcgtccgatgcgacctggggaagttgatggtaaagactatttctttgtctcgagagatcagttcttgtcaatggtggagaacgaagagcttcttgaatacgcacttgtttatggagaatacaaa

SEQ ID NO: 129724 - DNA, 804 bp, Arabidopsis thaliana
  unsure (1)..(804): unsure at all n locations
nnnnnnnnnnnnnnnnnnnnnnnnnnnnnnnnnnnnnnnnnnnnnnnnnnnnnnnnnnnnnnnnnnnnnnnnnnnnnnnnnnnccacgcgtccgagagaatccagattcttcagatgtcataactctgttgatcgttcatagcacttagaatctttagatggatctgctgttaaaggagaagttgtagtaccattagttgaagatctaaataaagaagcttctttggaagatgaagaaaaaacttctgttgaacctcttctgagctgccacagatcatgaagttcgatagccaaacttctgagcatagtgattcaccttgcactgaagatgttgttattgaagcttcatctgatcctcctcgaggagccattggttcgtcatccgaggatgtcacgatgggacttcagaatatgcttgttgttcgggaggggaatgacactcctgtgtgtggacgtttgatctcagatgccactgagcttgtaagatttcgatctccgaatgatcctgaggcttttagatgcttggtcgataaaatatcaagctcagaaagacggntctgtgctggtgtcaagtctacaaagcggcctgatatcaacaaagatattccagccaatggatctagtaatgaaaatcagcctttggctgtgcttcctacaaacgagtctgtctttaacttgcttcgtggtggcatgaaagacgctgccttgactttgagatgccagngaaacggaagaaggatattgttngtgatcagcantctgtgtgtgacaataatgtggctgggtgatcttcctcgagctgtg

SEQ ID NO: 129725 - DNA, 536 bp, Arabidopsis thaliana
tttaggtccactatagaagagctatgacgtcgcatgcacgcgtacgtaagctcggaattcggctcgagctccaaaactctatctctctctctcctccacacaccaatttcttcatgaccttcttcttctagcagagaagattaaagaaacccccaaatccagcttatactaaatgggtcatgataacatcacaaagctcgggagtctactcgtaaagctacacaaaggtccttcaagttggctttgtcttcatcctcgaccagaccgaaccagcaacggcggacgaatcaagctcgtcagatccgacggttctttacaagtctacgatcgtcccgtagtagtctcagagctaacaaaagacttcccaaaacacaaaatctgtagatcagacttactctacatcggacagaaaacccctgttctgtctgaaaccgaaacacttaagctaggtctcaactacttcctcctcccatcagatttcttcaagaacgatctctctttcctcaccatcgccacccttaaaaccccacaaaacg

SEQ ID NO: 129726 - DNA, 533 bp, Arabidopsis thaliana
taatacgactcactttagggaaagcacgtacgcctgcaggtaccggtccggaattcccgggtcgacccacgcgtccattctcttgtaaagttacaaaatgtccttttggctaagtttgatcttttgctttttcacatttgcttcctcatctccaccggatgatcctgtcaactgtgaattcggaaacacaatgtgcacggtgacgaactcgtacggcgcctttcctgaccgctctatatgcaaagcagcaaaggtggagtacccaaggacggaggctgagctggtctctatagtggctgcagccactagagccggccaaaaaatgcgggtcgtgactaggtactctcacagcttccccaagctggtttgtactgatggtaaagacgggactctcataagcaccaagtttctaaaccatgtggtgaccaccaacccggaggccaagactttgacggttgagagcggcgtgactctaaggcacctgatcgaagattcagctaagtttgatctggctttgcctacgcaccgtattg

SEQ ID NO: 129727 - DNA, 494 bp, Arabidopsis thaliana
acgactcaccttagggaaagctcgtacgcctgcaggtaccggtccggaattcccgggttgacccacgcgttcgcgccacgcgttcgcggacgcgtgggtttcaagcttctctgtgtgtgatctccgttggtcaacaacaactacgacagcttattgagcagagatggatcatcaatttggatatggtgttgaagttactgggttatctccatctgttactcataatgatcttatcgatttcttctctttctctggtactatccaagatattgatattgtcaggtcgggtgagcaagcttgtactgcttatgtgatgtttaaggattcttattctcaagaaactgctgttttactcactggcgcaacgatattggatcagcgtgtttgtataactcgttggggacaacatcacgaagagttcgatttctgggatgcggctttccccgaggttttgaagatgaatcggactcacaacattatgctcaacgaagcga

SEQ ID NO: 129728 - DNA, 444 bp, Arabidopsis thaliana
cgctaacattctctctctcagtgaacctttagaagttaaatctgtttcatcaccggaaagtttcactaactcttcttctctctctcggagtattgattcccggcgtttagcaatggaagaaagtagacaactcgaatcgtcgattgatcggctgctgaacgaagagaaacagatgaggctcgcagaaaatgtcgccggaactagaaaagcagctaccgagattcttaagctttgtttcgaagctaaggattggaaacttctcaacgaacagattttgaatctctcgaagaaacgtggtcagcttaagcaggctgtacaatccatggtgcaacaagcaatgcagtatattgatcagacactagacatagaaactcggattgagcctattaagactctaaacaatgtagcttgctggaaagatatatgtcgaaatcgagagagctc

SEQ ID NO: 129729 - DNA, 524 bp, Arabidopsis thaliana
  unsure (1)..(524): unsure at all n locations
nnnnnnnnnnnnnnnnnnnnnnnnnnnnnnnnnnnnnnnnnnnnnnnnnnnnnnnnnnnnnnnnnnnnnnnccacgcgtgcggggaccagtgagctgattggaggagatgttaaagccaacaatctttgtgagattcccaatctcaggaggaatttcaccagtaaaattgttgttagctagacgcagtctttccaaattcttcagctttcccaggtctgcagatatattccctgagggccagttttggtgaagctctaatgcagtaaggttctgaagattaaataattcaatgggaaggcttcctgttagctggttatcgcctagcattagctttgtcagtgacttgcaggttttcagatcacgagggatgtttcctgataacttgtttgaaccaagactcagaagtattagcgtctgaaatctgcagaagtgggcaggaattggaccagacagagaattggcagacatgtcaagaacagaaaaattgctatagaaaccgattaagggaggatctttccttcaa

SEQ ID NO: 129730 - DNA, 387 bp, Arabidopsis thaliana
aaatccccacttcacgaatcgcaaaagatcaaggtttattgatctattgcgaaattagggtttgtgaattcgaatcggagattaataatagattttgtgatggagtgttcatcacgcatagaagaatcttgatttcgatctcgatgaaattaggaatcgagggattttatttataattgagatggtgaatattaaaagccctttacggctattcatagaggagtcgattaaggaattaattaggggtttcaggagacaaaggatcaaatggagaaatgcgtttcttcttggttctataatgactaccattgttgttctgcttcaatacacaacgtttttaattcttctctgatgaagaagaaaccgagtcttcttcttcttcgccta

SEQ ID NO: 129731 - DNA, 389 bp, Arabidopsis thaliana
cccacgcgtccgcccacgcgtgcgggaaagcgccttgatgctggatttggatagccttggtttcaatgttaaggctactcttcaagggaacaccttcaaactccgagttccgtttccaagacgcgcacaagacagaaaggatgtcaagacattgattgtggaaatgcttcaagctgccaagtccaattagttgctaaaataaagatggaaaagctcttccatctgaatcctgctacaacaagaaaagcttcctccaatacacattttatcttatctatcagttgcaaaaagaacactcatttagtcctgtatatatctcaacaagactagaactagatgtatacatgaaaaaaagttatcaataaagatttctgaagttgtattggctc

SEQ ID NO: 129732 - DNA, 337 bp, Arabidopsis thaliana
acccacgcgtccgcccacgcgtccgctcctccctcctgacgctctccttgttccgttcgataaccgaaccttaaaagctaaagcttgggctaaacaaaatcacatgccagtaccaaagaaacttccttgtccagataactgcggagtcagcattaactggcacgttagcacggattacaaaaatggttggaccgcaagggtaaccgtttttaattggagagatttcgcgtttgaggattggtttgtggcgattgatatgggaaaggcaggtccaggatatgaaaacgtttactcctttaatggaacacgtgttccaccaagcaatcgaaccgttatc

SEQ ID NO: 129733 - DNA, 490 bp, Arabidopsis thaliana
  unsure (1)..(490): unsure at all n locations
nnnnnnnnnnnnnnnnnnnnnnnnnnnnnnnnnnnnnnnnnnnnnnnnnnnnnnnnnnnnnnnnnnnnnnnnnnccacgcgtccggttcttccccaacgaccaatcttatgttgcatcaatttcacaacagaagccttaccttttcattacacgcatattgcttcttcaaagtttccttttagataaattcttagtctgagtaacatctctttcttgtcttgggggtttctctgtaattgcagctgaatcggatcttgggcaatttttaaattccgagtcaacgagtttctcatctaagggtttgattccttttctttttcatctttgtttagtcaaatctgaagactttgttaggtttcaatgtgctgagaagtagaagaagcttcgttggcaagtccgaatcttttcttcttctttttctggggttatattcttgccaacatgtttagcttgcaagcattattnctttgagtagctgtttatcctaca

SEQ ID NO: 129734 - DNA, 934 bp, Arabidopsis thaliana
  unsure (1)..(934): unsure at all n locations
nnnnnnnnnnnnnnnnnnnnnnnnnnnnnnnnnnnnnnnnnnnnnnnnnnnnnnnnnnnnnnnnnnnnnnnnnnnnnnnnnnccacgcgtccggtaaccacaagtctccgtttcaaagagcagcttctcacatcgctgaagctctcctctcactcatccacaacgaatcatcaccaccgttaatcacgccggagaatctgattctccgaatcgccgcttacagatccttctccgaaacctcgccgtttctccaattcgttaacttcacagcgaatcaatcgattcttgagtcctgcaacgaatcagggtttgatcggatccacattatcgatttcgacgttggatatggaggacaatggtcgtctctaatgcaagaactcgcttccggagttggaggaagaagaagaaacagagcatcgtctctgaaattaacagtctttgctcctccaccttctacagtctccgacgagttcgagcttcgtttcacagaggaaaatctcannacattcgccggagaagtcaagattcctttcgaaatcgagttactaagcgtagagcttcttctaaacccagcttattggccactctctctacgttcatcggaaaaagaggcaatcgcagtgaatcttccagtaaactccgtcgcctccggttaccttccgttaatcctccgattccttaaacaactatcaccaaacatcgtcgtttgctcagacagaggatgtgaccgtaacgacgcgccgtttcaaacgcagtgattcattcgcttaataccacacttctctgctggagtctctggatgctaatcagaaccaggacgattcgagtatcgagagggtttgggttcaccatcatagagaagctgtgtatgaaactgacaccgttggattgaaagatctccaccgtggagaatcttgttacaaatgtggttctc

SEQ ID NO: 129735 - DNA, 921 bp, Arabidopsis thaliana
  unsure (1)..(921): unsure at all n locations
gaagagcaagtgtttagcagactgctcgagtgagagagagacaacatgtttgaatacagtttgtctcccctttcagttcgcgagtcagctcgtccagagaaatccaaacattgcgagagtcagattccttcgaatcgagtactagcgtaggcttttctaaccagcttatggccactctctnacgtcatcgaaagaagcaatgcagtaatctccagtaactccgtccctccggtaccttccgttatcctcngatccttaacactatcaccaaacatcgtcgttgctcagacagaggatgtgccngtaacgacgcgccgttccaaacgcagtgattcattcgcttcaataccacacttctctgcntgagtctcttgatgctaatcagaaccaggacgattcgagtatcgagaggttttgggttcaaccatcgatagagaagctgttgatgaaacgacaccgttggattgaaagatctccaccgtggagaatcttgtttacacaatgtgggttttctccggcgagtntgagtcagatggcggaagctcaggcggagtgtttgttgcagagaaatccggtgagagggtttcacgttgagaaaaggcagtcttcacttgtcatgtgttggcaaaggaaagaacttgttactgtctctgcttggaaatgttagacgaagaagaaaccacaaatctctctctcgcttagctaatttctctgtttttctttgtcagattttaaaatgttgttatgttgttcaatgatgttcttagtttcgagactgttgtgttttaacattttaaggaagtcagaatatataatcaaaatctccttttgtaaaaaaaaaaaaaaaaaaaaagnnnnnnnnnnnnnnnnnnnnnnnnnnnnnnnnnnnnnnnnnnnnnnnnnnnnnnnnnnnnnnnnnnn

SEQ ID NO: 129736 - DNA, 623 bp, Arabidopsis thaliana
aatacgactcactttagggaaagctcgtacgcctgcaggtaccggtccggaattcccgggtcgacccacgcgggcggggaggtacaggttttacaccggagaaaccgtatacgccttcgcagacgcgcttacctacactaaattcgaccatcagctaatcaaagcgccaagactcgtctctctcagtctcgacgagaaccacccttgccgatcatcggagtgccaatctttggacgcgatcggacctcactgcgagaacgccgttgagggaggatcggatttcgaggttcatttgaatgtaaagaacaccggagacagagcgggaagccacacggtgtttctgttcacgacgtcgccgcaagtacacggatctccgattaagcaactactaggatttgagaagattcgtctgggaaagaggaagaaacggggggttagggtttaacgtcaatgggggtaaggatctgggtgtggttgatgagaccgggaaaaggaaaatcgcgttaggtcatcatcttctccatgtaggaagcttgaaacactctttgaacattagtgtttgattcgacggctcgttttgtttttaacttaagatattaattatggtaataaaatgagacagc

SEQ ID NO: 129737 - DNA, 536 bp, Arabidopsis thaliana
  unsure (1)..(536): unsure at all n locations
nnnnnnnnnnnnnnnnnnnnnnnnnnnnnnnnnnnnnnnnnnnnnnnnnnnnnnnnnnnnnnnnnnnnnnnnnnnnnnnnnnnccacgcgtccggaagttttgctttttgctgctagagcttcaagagttgagaaccaagatgctattgatgctgctatggttggaatgctcgctgatccaaaagaggcaagagctggaatcagagagattcacttcctaccattcaatccagttgataagcgaaccgctttgacgtttatcgacagcaacggaaactggcaccgagtaagcaaaggagctcccgagcagattcttgatctctgtaacgcgagagctgatctgaggaagagagtccactctacaatcgataagtacgctgagcgtggacttaggtcattagctgtttcaagacagactgtaccagagaaaacaaaagaaagctctggtagtccatgggaatttgttggtgtgttgcctctgtttgatcctccaagacatgatagtgccgaaaccattagaagagctctagacctcg

SEQ ID NO: 129738 - DNA, 660 bp, Arabidopsis thaliana
tttaaacaaaacttaaaccggttgttaatacaaaataaagccgaggtaggcttgcaagagtaatgaacaggttttgatgcggtttatgtacatgacacatggcaaaacatgattggctacatgaacgattttatctaacaagcaagatagagatgagattaggagacaaggagcaatgtcgatttcttcgttggggtctccacgcgcccagccaacttcttcatcatcttcatatacgtacttaggaagctcttctcgcatctttgggctagttacgtcttctttgttatggacaaagagtaaatctcaccacacaaacacaaagctcaagaagcaaaagctatgtgttagaaattcagctcaagagattccaaagacacttgaggaagattccaagtttgtacctttagatcctcaagatcctcgattcggccctccagttttgctgttgcttggccttcaacttcatgaagcacaaaagatacaagaacttctcaaggaactcgatggcgaattcatggagattgtgttctgtacagacgatatgatcaagcgttcgttatgggaagcagttaccacaaaacagcctgacctgaagagagtgaaaatcgcggaatcactgcctcggatctgcttcttatctggtttgacaggagagga

SEQ ID NO: 129739 - DNA, 503 bp, Arabidopsis thaliana
  unsure (1)..(503): unsure at all n locations
antttcctgggtttttcctccaaaaaaggagggnggtnnaccncggggtttangnaaggaaaccccggncccgancccggnttnncccccccggtgaggttgcccccgccgagggggggaaaagaaaagggggctgaaagatcagagagtaatgaaaagaaaaaccagaaacgaaatcggagtcaatctcacagtgaatatgacactgacgaagaggataggagaaaagggaaaacaagaaagtccaagttggaaagtgctgatagagaaggcaaggatgatgaaaacttcgatgaatacatggaggggatgttcccgggtaatgggtgatattcgagactttcaagtttcaaaaggtgaccatctacatcgcaagaatatcttttatatcataggctagattgagtttgaaccctgaaatgtaaacacttacatagccccttattcactgaaagaaattgaattttaatatcgagaccataacatcaaatacttttattatc

SEQ ID NO: 129740 - DNA, 381 bp, Arabidopsis thaliana
gacccacgcgtctagcaaagcctctcagcacggtgagagattccggtgataacgtcctccgatggcgacaactcaaccatgtcttatcggccaaataatcgctgttcctcaatttcacatcctcttcagccccagaaattctctaaagccggagctctcgaccaacaaacgcacaaatttctccgtatctatcggtctacgacattccttcgcttcttctatatcaacctgtaaccctaaagccccatctttaagctgtctgcgaaattgcgccgctgttgatggagctgatactagttcgagtgaggataagtgggattgggattgggatcgttggaaccgtcacttctccgagattgaagaagtcgagagcgttgtttc

SEQ ID NO: 129741 - DNA, 526 bp, Arabidopsis thaliana
atacgactcactttagggaaagctcgtacgcctgcaggtaccaggtccggaattcccgggtcgacccacgcgtccgcggacgcgtggggttatattcattctctcttttctctttccattttggctcccaccgacgtcatcaatctctaccggagacttccgccgattctcacaccgttcttcttctctccttccgattccggattccaatttcgttccttttttgttttctctcaaaacccctaaattttcttcctttcttcgatctggattttttgtgttccccaaatttcaagactttgatctgattccttctaagatttctccaaagcaaagatcttttttttgttttttgggatctctgtattgggtgatgggcacaactagggtctgctcggaggtttcttctggatcttcgaaatcgcttagccaatctctcacggtatcgacctctaccacagaaacagggaatgggttccatgaattcaagaactgggggaccctctcgctaaagggggtgggggcg

SEQ ID NO: 129742 - DNA, 534 bp, Arabidopsis thaliana
  unsure (1)..(534): unsure at all n locations
tnnnnnnnnnnnnnnnnnnnnnnnnnnnnnnnnnnnnnnnnnnnnnnnnnnnnnnnnnnnnnnnnccacgcgtccgcacaagtgattaattttggagaaaaccacttctaccagaaatttttagcatggggagtgaagtcaaccgtccactagctgattttccagcaaatatctgggaagatccattaacttctttctcaaagtctgacctcggaactgagacgttcaaagagaagcatagtacgctaaaggaggcggtgaaggaagcttttatgtcttccaaagcgaatccgatagagaacatcaaattcatcgatgctctatgtcgccttggtgtctcctatcactttgagaaagatatcgtagaacaattggataagtcatttgattgtcttgattttcctcagatggtaagacaagagggatgcgatttgtacacggttggaataattttccaagttttcaggcaattcggctttaaactttctgccgatgtgtttgagaangtcaaggacgaaaatgggaagtcaaagg

SEQ ID NO: 129743 - DNA, 366 bp, Arabidopsis thaliana
ggcaagcagcaggctctggttaaaggatcaggtgcaccgatcagacatggttcagtccacgttaagttccctgagccagacaccgaaggcaacaagatcttcgagaccttagaaaatgagttccagaagcttggaaatgaccagaagatctgagtgatctacaacccttataacacgaattgcccataagaaaccggaatttgtctctggttgatgagcagtatttaagataagaatcaatcacctttacgtgtattactagtttcgcttgcatcagctcgatgcaggttttgtttaaaaagaagatggaacacaattccctcggaatggatattttgccctagtaccattatatatatagaactc

SEQ ID NO: 129744 - DNA, 793 bp, Arabidopsis thaliana
  unsure (1)..(793): unsure at all n locations
cagcatctatcgactcactatagggaaagctggtacgcctgcaggtacccggtccggaattcccgggtcgacccacgcgtccgcatcaaatcatctccgatactcacaaccgaaataactaacccctcctcaacaaaaaacaacaaaacatgtacactccatcatacttaaaatattcaataatctcaattatatccgtattattcctccaaggaactcatggagacgacggaggttggcaaggtggtcacgccacgttttacggcggcgaagatgcttccggcaccatgggcggagcttgtggctatggaaatttgtatggccaaggttacgggacgaacacggcggctttaagtacggctctattcaacaacggactcacgtgtggcgcgtgctatgagatgaagtgtaacgatgacccgaggtggtgtctcgggtcaacccatcaccgtcacagctacaaacttttgcccacctaaccctggcctctccaacggttatcggaggttggtgcaatcctcctcttcagcatttcgacctcgccgggccagcttttcttcagttcgctcagtatcgtgccggcattgttcctgtctctttccaanaagaccatgtatgaagataggaggaataaggtttacgatcaacggacactcatacttcaacctcgttctgatctccaacgtaggaggagcaggagacgtacacgccgtctcaatcatagggctaaaaacacagtcgtggcaagcgatgtctagatactggggaccaaactgcagagcaattatacatg

SEQ ID NO: 129745 - DNA, 519 bp, Arabidopsis thaliana
  unsure (1)..(519): unsure at all n locations
ctaatcttcgatcttgagctctatttccgggtttatacatttccttcaattcaaaaccttttctttcattgacaaatgatttgaaccaaaaaagttgtttcctttgccaaaatctgaagcgccatgactgaagttcttcactttccttcatctccaagcgcttctcattcatcttcttcttcttcttcttctccttcaccttcttctttatcttacgcctctcgctctaatgcgactctcttgattagctctgaccacaaccggagaaacccagttgctagattcgatcaagatgttgactttcatgcctcaatcgaagaacaagatttgagaagacggagcagtaccgatggaggagaagaagacgatggtggggaagatcagatttcgttgttggctcttcttgttgccattttnaggngatctttgatttcttgcaagagtaaccggaggaggcttttttagcatggagattgggatggccntccaattttaaganacgnggngcaggtnancntt

SEQ ID NO: 129746 - DNA, 818 bp, Arabidopsis thaliana
ccggctctatacgactcttatagggaaagctggtacgcctgcaggtaccggtccggaattcccgggtcgacccacgcgtccgtacggctgcgagaagacgacagaagggttagggcaaaaggcaaacaaagagttcaattccgtcggtgacgatttcaattcattgtctaacagtattgaaggaggtaccaagtggttagtcaacaaactcaaaggaaaaatgcagaagccattacctgaattgttgaaggaatttggtctaccagttgggatcttcccacaggatgctacaaactatgaattcaacgaagagacgggtaaattgactgtattcatccctgagacatgtgaagttgggtacagagattcatcggttctgcggttttcaactacggtaacgggttacttggagaaagggaagctagcagaagtggaaggcatgaagacaaaggttatgatatgggtgaaagtgacttgtatctcagctgattcatcaaaggtatatttcccagccgggattaagaaaagcagaagcagagatgcttatgaggtaatacgacctggtgttggtgttgataaattctaaaacttatagctcaatttttatgggccaattaaagttccaacttcctaagtaatgtttttgtgtgtatgttgtagtacttcttgtgtaaaaaaaaatctgattcatcaaacctttactttttaatgtataagaatgttggtaaaaaaaaaaaaaaaaaaaaaaaaaaaaaagcggccgctctagaggatccaagcttacgtacgcgtgcatgtgacgtcaagtaattctatag

SEQ ID NO: 129747 - DNA, 404 bp, Arabidopsis thaliana
agttttccgattgcaagggttaaacggagatgagagggctgcaccatttcaagagaatctcaatctctcgatctctcttctccttctctaatgccacttctcctggggcagtaacgactaggaggtctctttattctttgagcaggtcgttgttgtcatcaaccccgtacgccgccggtggatgctgccgagaaacgcctccgcttcattctccgtggtctgctctgcaacgccgcggtgttaaggttaacgcgattcagctaagggcaggaaatgtaattgagcgaacagggcgtacttttcgggttgtagaagcagagcataagcaacaaggtagaggaggagcttccatacaggttgagcttcgtgatgttgacactgggaataagcttaacttgcgtctt

SEQ ID NO: 129748 - DNA, 462 bp, Arabidopsis thaliana
ctctcatattctaagtttgctatatatgtaactttcttccttgtagactttcatttgcagcaaaaatagtttctcatatggagaggcaaatcataaacaggaagaaacgagtgttttctcttgaaccaaacaagaaccctagtgcagttttcacgagaaaatacacaagccacttggttcctgcactcaagaagctcaacatgaacaagaactcttcaaaacaaaccgtgaagcatgaagtagatatggctttggccttgtctgctcaagaatttgcatggagccgtttcttgctgcagaagctatcgtcctcatcgaatccaaccactaccactagttcttcttccgatggaattcggattcttgaaagacccgataaagaaggcggaaacgaagaaggagggattagaggagagactgagggaaatgaagaagcttttgccaggtggggaagagatgaat

SEQ ID NO: 129749 - DNA, 437 bp, Arabidopsis thaliana
acacctatcacttaaattttattcaccatgttctctctcaaatccttaatctcctcacctttcacacaagcgcaccactcatggattattcaccaacccgattacccgacccgttaatccattaccacgtaccgtttccttcaccgttaccgcttccatgatacccaaaagatcctcagctaacatgattcccaaaaaccctccggcgaggcaacagctctaccaaccgttccgaccaccgtcatctcccattccaacccaattccgttcactcgactccgccggtaaaatcgaaatcctcgccggtcgaatggctctctggttcgaatacgcacctcttatctcttctctttacacctatggtttcacttcttcaaccatcgaagaactcaccggaatctcaagcattgaacagaaccgtttaatcttttgtgctc

SEQ ID NO: 129750 - DNA, 422 bp, Arabidopsis thaliana
  unsure (1)..(422): unsure at all n locations
ggtgtcagtctcatagttttctggttttaaaacggaaaatatatgcgttagggtattgttggataacgaggaaggagtaaacgaaggaagaagagggagatgaaggcgttggggtattggttaatggtggttggttcactgagactagcttctgtttggtttggtttcttcaacatttgggctcttcgtctcgctgtcttctctcagaccaccatgagtgaagttcatggacgtacattcggagtatggacactcttgacctgcactctctgctttctttgtgcattcaacctcgaaaacaaaccattatacttggctacgtttctatcattnatctatgcgttaggccattttntgnctgaatacntcttttnccaaacaatgaccatcgggatctntnaantgtggggtttnttttcaag

SEQ ID NO: 129751 - DNA, 677 bp, Arabidopsis thaliana
  unsure (1)..(677): unsure at all n locations
cgcgaagaggaagcaccacagcttcaacatcagccttcgagggtacaattggatacttagctccagagtttgcttatatgaggaaagtgacaacaaaagccgatgtattcagcttcgggatcataatgatggagctgatgacgaaacagagaccaacttcgttgaatgatgaagattcacaagacatgactttgcgccaattggtggagaaatcgattggaaatggaagaaaagggatggttagggttcttgatatggaactcggggactctattgtttctctgaaacaggaagaggctattgaagactttctgaagctttgtttgttctgtacaagctctagacctgaagatcgacctgatatgaacgagattcttacacatctgatgaaacttagaggcaaagcgaattcatttcgagaagatcgtaacgaggatcgagaagtttagcagcaaagcttttttgatgacattttttcgactttgccaaactctgttacgaaggttgaatactttggacgtaaaacgttctgattttgcttttcgttatgtatttctgttttatataaggttgaaatttggttttaaaaaaaaaaaaaaagnnnnnnnnnnnnnnnnnnnnnnnnnnnnnnnnnnnnnnnnnnnnnnnnnnnnnnnnnnnnnnnnnnngtcctaaat

SEQ ID NO: 129752 - DNA, 481 bp, Arabidopsis thaliana
ggcgcaaaaaaatggggaggaagcggaagcacagtgagacggaagctccggcgccggtgaaaaagagcgatgagcctgctccggatagacccaaaaggactctattgggatggaaagataagagtgaaggtgaagctgagaaagctaaagctttgacttcatctggattcaagaacaaagagaaggttttggtgacttgttctcgtcgtatcagtttcaggtatcggagtttgatgttgaacattgtttcacttctaccacactgtaagaaagacagtaaagttgaagcaaagagtagcaaaggcgcgactttgaatgagctcattgagcttaagaattctaattcctgcttgttcttcgagtgtaggaaacataaagatctttacatgtggatggtcaaatcccctaatggaccatctgtgaaatttttggtaaagctgtgcacgcaatggaagagatgaaactcacttgaaattatttt

SEQ ID NO: 129753 - DNA, 789 bp, Arabidopsis thaliana
  unsure (1)..(789): unsure at all n locations
ctcatttggcgtcaaatgcttgcaaagagcgaaagcgaaacagaaagtatggcaaagaaattgttggagttgttagatggaaaggaaggagcaggactaacggagataatcgaaacaacaatgagtgaagaagatggagagaagaagaagatgatgagaggattattggggaagagtttgggagaaggtaacacagtgtatgagagagttacaagttgtatatacaaagcggctcgaggagctttattggctgggaatggagaaaatgggaagagaatggttgaaacagagatgaagaaagtaggaggaggtggaggattgaaagaaagggttttagagacagctcgagcccttggtgttgtagcttgtgtctcagtcagagttcatggtccatggttgactcagctcatgccacaacattgaaccaaaccaaaccactcggtaaacttgtatagcctcttgtatatattatgatatatatcaataataattacacgtgtaatgtaagatgcattttgatttgaagatgcattatgctgatttgtaaaacataaacggctttggtccctttttagtgtgtccgaatgaataaggtgttcaaaatagcgtgtgatttgtaatttgtaatttgtaattagtctgaaacgttgtatatatgaatattcttcaattatataaaagcttgctttcaaatttnnnnnnnnnnnnnnnnnnnnnnnnnnnnnnnnnnnnnnnnnnnnnnnnnnnnnnnnnnnnnnnnnnnnnnnnnnnnnnnnnnnnnnnnnnnnn

SEQ ID NO: 129754 - DNA, 519 bp, Arabidopsis thaliana
cgactcactattttggaagctggtccgcctgcaggtaccggtccggaattcccgggtcgacccacgcgtgcgagaattgagacttttgggaggaagaagaaagaaatttgttttctgaagaaggtggaggtgccaagagaattatcttaatccttgttcctcctcctcctcttcttcttcctcattggttgtttatgtttttatatataatctaggttttgttagtccaactctatctttctctctcttgatttcaacaacttggtttcaagttcataaacaagagagagaaagaattgttagtctccatgagtaggttatgttatcccataaccccaattggctatctatttatcacctccatccatttatactcctagaaacaacaaatctaaaggcaacacaacacaaatagtaccttctaaatgcttctatactggctcatcacttgcctctctttcttcttcttttccaaatccttatcctttcctaattggcatctaaaccaaaatttgctct

SEQ ID NO: 129755 - DNA, 437 bp, Arabidopsis thaliana
  unsure (1)..(437): unsure at all n locations
gactcgcgggtcgacgcacgcgtccactgtgagacgacgaaagaagggggagggtttcttactctgctgcttcttcttcttcttcagtagagcgagattctctcgcgctctctatcgctacatataaccatgggtttatcaacgaatctccatagcctcgacctccgttcaactttcttcgccggtctacgtacatctccaatcccttccaatttcatcaaaatctcttccatttccaaccctagacgcgatatctccaccatcagagcccaagtctccaccatcagcctcgagacctccgttaaacagcgtcaagacgaaatcgaatctcttttctcgaagcaaccctctcagcaggactccgatcggaaacgaaacgggaagagttccanaaacggagcttctgggatatcttcaggtgtgaagctagagaacat

SEQ ID NO: 129756 - DNA, 364 bp, Arabidopsis thaliana
acatgaatgttgttaacaatcttgagaataagaagatgaagaaaataggtcttcacgcaagagcacttggagaaaaccgtgagaaagtaagaaatgctttcaaaagtttttgcaagaagtttggtggttatctaggaggtaaaactcaccgaagagaactaactgaagctaaatacaacgcggattctcacgttggtgctgacgtaaaaggatttgaatccattatcgataagttttctgacttctttaatggttatcttggaggtcaccgaagagaactcttttaccaagtaccagcaggcgaattcgccgatgaaaaaattgctattcatgcttctttggacgccaaagctcacggaagaaa

SEQ ID NO: 129757 - DNA, 532 bp, Arabidopsis thaliana
attctcttcatgtccgaaagtttccaccctgttgggcttgagtacatgtgcccgccagcggagagattctttgctctgggtcgggttttgggaaatatggttacttcaccttgcagaaggaccgtccgctaggctactaaagcacatcatacgctgctatctttcgcttgacagatacccccagagcatgcgatgcacttggaagttgccttccagatcttctgagggatgctactttcagtggttgtctctatgatgacccacctgcaatgcaatggctgcagcaactgctccacaacgttaacgttggcgggagagcacctcaagggttggctcatatgtttgtgaattaaatcgaacccttatagtctgggcagaaactgttattcattggacaaaaaaagttagttggaaacagaattacagatgagaaacagaaacccaaccaaagattttgagtttgatggatatatgtatttggatttcttgaccgtcttatgatgttgcaatcaatataactaaaattccattg

SEQ ID NO: 129758 - DNA, 458 bp, Arabidopsis thaliana
accccaacaaccacactcattacttttctttcttcatccgccttctattcttcgaatctgatcaggagatcatacaggagcaaataactagagtgctgttggaacggctaattgtgaacaggccacatccatggggacttctaatcacattcattgagctaataaagaacccaagatatagcttctggaaacaagccttcatcagatgtgcgcctgagattgagaagctgtttgaatcggtagccagatcctgtggtggcctgaagcctgtcgacgagggaatggtttcgggaggttgggtctcagacaattctcactagctctttagctttcaacttgtatatatgtatgcgtattttgatattatgttgtaacaattatacatacagtaggagagattttaggagtcttagtttatttatttaacttcaagattcacaaacatgttttctaattac

SEQ ID NO: 129759 - DNA, 441 bp, Arabidopsis thaliana
  unsure (1)..(441): unsure at all n locations
caatcaacgccgggnttgatacaagaaagcgagcgagagaagtttcttcggtgattgatttagatatcacggcggctccgatgaaccctccgccgcaaactccaccgcaagttataggacgtcgacaaaatccgaatgttgtatcaaccggtctacgtttgtctcgtgaacagtcgcagaatcaagaacaacggtttttgtcttttccgataaccggagatgtcgccggagaaatcaaaagccaaacggacgaattaaatagatttcttcaaatccagggagagcagcttaagcgcatgttagctgaaaacagtgagaggaactatcgtgagcttcttgaggacaacgggaggatcagtaaggcggagattaaggtgggaaaagaagcggagtccgggaaagccacacgtcggcatgtcgagctagaagcacgtgcgactc

SEQ ID NO: 129760 - DNA, 647 bp, Arabidopsis thaliana
gaaagtttttaaaggaagaatttgggtttccaggtacagatttctgtcagaatgttttaccaggaagacctccggcgaagaagatacccccagaagccgtcggagacaatcatcatcgtcttcaacccaagaagcgattcgtcacacccgttgattccaacgcatcctctcgccggcggtcaatcgatagaccaccccttcacctacagccgccacggtcatcgtgttcatacccagcagctccaccgataataacggcagctgcggcggttggggaacaagagggtagccggagctaataaggtacagccaccagtgctgccacgttgcaaatcggaaccgaggaagtcagcgtcgaagctagcgccgaaagcttgtttttggaaaaataggaagcttgagccacaccctccggcaaccgtcggtgtcggcggcgccggagtagggttctagaagaagaagacgtgagtgggaataaaggaaactatttgggtgtaatagtaatttcagaatactatttgtccttgtttgtaaatttgttttgttagtcataattcattttctaaaaaaaaaaaaaaaaaaagggcggccgctctagaggatccaagcttacgtacgcgtgcatgcgacgtcatagctcgtctatg

SEQ ID NO: 129761 - DNA, 573 bp, Arabidopsis thaliana
  unsure (1)..(573): unsure at all n locations
gcccctncgcaccncccccccctggtgtctnctttctggcnacccaacccccaaagnagggggccngttttnttccggaagnacnctntgaccntncncctcggggtttcccgagccgttgttcccaatgggntggggaattncgcttcncagaggggggancaaggagtgaaggcccaagcagcattggttatgctagcggatgagtgggatgaaggaatatgaccgagggaagaaaaagaagataaggattaaagaggagagctatagagggcctaacccgttccagatgcttgcatcgaagagacaaaaagagacaaagaagaaatggacacaaagcataactgacgcaaagacagcctacaggatatgaataaggactataatcttatacatatatgtaatccacatgctgctgtatctggcgtaaagtaatgttaacaaatgaggaaaagataggctatagacagtagtagacattgttcgttatctcttttcctctcagttttgttctctttgggataaacagagaaagacccctatcccctgttttgtgngnttnttttcactttt

SEQ ID NO: 129762 - DNA, 387 bp, Arabidopsis thaliana
gattgatatcttgttgcaggggaactctggttccatgtgttaggtattttcctttcgtcgacctgattcatcttgtgcatgtcgattctgaataatgaacgaagaaggctgcgtcccgcacaactctgatgttgttaaacaaaagtctatagatcaaagagcccctctttccggggaacctaaatgtgttatctgcagtcgttatggtgagtacatatgtgacgagaccaatgatgacgtctgcagcctcgagtgtaagcaagcactcctgagaagggttgacagcgctagagtttttcctgccacagatgagtgcttctatgttagagacccaggatcttcttcccacgatgctcaactacttagaagaaagcttgatattcatgt

SEQ ID NO: 129763 - DNA, 521 bp, Arabidopsis thaliana
  unsure (1)..(521): unsure at all n locations
nnnnnnnnnnnnnnnnnnnnnnnnnnnnnnnnnnnnnnnnnnnnnnnnnnnnnnnnnnnnnnnnnnnnnnnccacgcgtccgcccacgcgtccgggagcaaacacggcaaggtacctatccacatgcgaaaactgtgtatggattgaatatccaaaggcactcgctgcaaggagatggtactcaacacaagccactcttcctgatggaactttcatcgttgttggaggccgtgacgctctcaactacgagtatatccttccggaaggacaaaacaacaagaaactctatgactcacaacttcttagacaaacagatgatccagaagaaaacaatctttacccttttgtttggcttaacactgatggtaacctcttcattttcgccaacaaccgatccattcttcttagccccgaaaacaaacaaagggctcaaagaggtccctcaacttcccggtggtgcgcgtaactaccctgggtccgctcctcgggtttttncccatcccgctctacgtgcaaaaccc

SEQ ID NO: 129764 - DNA, 548 bp, Arabidopsis thaliana
  unsure (1)..(548): unsure at all n locations
nnnnnnnnnnnnnnnnnnnnnnnnnnnnnnnnnnnnnnnnnnnnnnnnnnnnnnnnnnnnnnnnnnnnnnnnnnnnnnnnnnnccacgcgtccgctctcttccttttgctttcgcatcttcttcttcgtcaacgaatcctcggactctccggcgatgccccgtcgattaaacgacggcgagcctggccgttttaccgccaccgttcttcttttaatcggtttaatctcttgtgttatcgtctacgctgttttctcttctgtcctccgtccatcccaagatcctacactcgttgattccgcggttcgattcaaagaggagccgcgagatcacgatgcaactgaagacggtgaaggtgggtgttgccgtggaattgataatctggagctttggggcccggcggtgaagtggggcacggattctaagtttaattcgtctgatgggtggtgtaaagcttggaaaggtatgtggagggcgaacaagggaccttggcttggggaaggatgggcgcgcccgcccgatgcgcgaggggtggcggcggagtgcgggg

SEQ ID NO: 129765 - DNA, 532 bp, Arabidopsis thaliana
aatacgactcactttagggaaagctcgtacgcctgcaggtaccggtccggaattcccgggtcgacccacgcgtccgcgaattctcgacactaagaatttctctggggtttctctcctcaaactcgatctgattcttttgttctagggttttcactcaattggatctttctcaatctcctctctctcaatttgattattttgttctccgtgatggttgctggaaaggggaaatcaagtagaggccatggtgggagaaccgaaggaggtgagagaactggtgggagaaccggaggaggtgagagaaccgaatgaggatcgtcatctcatgcctccaacccttattcttcgaacgcgactaattcagtgactcaatcatctagagcaacgcttccttctcagtacccagcgaggtcacaaacaccgactcctatttctttgccatcaccgcatgtcgctcaacaacatcctcttaattatcaacagccgcctcctttatcaacatctgcatccttatcaaatttctcagcatcaa

SEQ ID NO: 129766 - DNA, 528 bp, Arabidopsis thaliana
  unsure (1)..(528): unsure at all n locations
nnnnnnnnnnnnnnnnnnnnnnnnnnnnnnnnnnnnnnnnnnnnnnnnnnnnnnnnnnnnnnnnccacgcgtccggtgaaacgcttataaaaataaaccggtttaatttcaccggtttaccttccgccgtagatatcagccgcaatgtacattctcgacaccggagctcgattctccgccgtcagattctcaccggtattcaatcctcctccaacatctctccgtagacgatacttcatcgtaagagctaatcttccattcccaaagcatcaagctaagtatcataaagagcttgaggtcgccattgatgctgttgatcgagcttgtcgtctctgtgttgatgtcaaaagatctcttttttcttctaaagagaagattgttgagaagaatgatcaaactccagttacaattgcagattttggagttcaagctttagtcagcttggagctttcgaaattgtttccttcaatacccattagtggctgaggaagactctcatttttgtgcgtgctaataaccttgtaagct

SEQ ID NO: 129767 - DNA, 530 bp, Arabidopsis thaliana
  unsure (1)..(530): unsure at all n locations
nnnnnnnnnnnnnnnnnnnnnnnnnnnnnnnnnnnnnnnnnnnnnnnnnnnnnnnnnnnnnnnnnnccacgcgtccggtggcatatgacttttatagacaccttatcaaaatatcttgatttttatttacattattaatttttttcttgttttttcactaccggccacgccatttaaaaagtttggtgactttattttactggttgttttattattgaataatatttcttagttaattttgtcactactaatccggtaatcccaaatctacttaagtatttatgtaagattcaatgttctttttcttcttataatctgaagattccaaaattaaaataatttttgaacttaattttaggatcacaaaagaaaaggagtggggagggtgtgcaaataaaaaaaagtgctagatggaatgtgacacanatctagataaggatgatgagtcattgaagtgggacctatnaaataaagtattctagcctcgaactttgtgaaattatacaaggaggccattttgggatcgaagt

SEQ ID NO: 129768 - DNA, 507 bp, Arabidopsis thaliana
atacgactcactttagggaaagctcgtacgcctgcaggtaccggtccggaattcccgggtcgacccacgcgtccgggtggtggttcgtacacaggacagatgttgaacgatcatagtggtgccacgtataatgttaatgggatccgacggcggtatttgatccagtggttatggagccacgttgttagttactgtaccggacccaatgcgcttgattagtgaatgaatggtatggtttgtgtttaaatttgggaagggtaattttgtcttttggaatttgagctcgacattgtggaattattatgatcaagaatgggtttgttgtgtcgatgcataattaaaattagttaatgatagttatgaggaaagtcacgtatgttgcttatctttcttcttcttgttaaaacaaagccaatcttaatgcataatatatctttgggtgcaaaaaaaaaaaaaaaaaagggcgggccgttctaaaagatccaagcttacgtacgcgtgcatgcg

SEQ ID NO: 129769 - DNA, 880 bp, Arabidopsis thaliana
  unsure (1)..(880): unsure at all n locations
tactaccnnnnnnnnnnnnnnnnnnnnnnnnnnnnnnnnnnnnnnnnnnnnnnnnnaaatcaatcaattgaatctatggcgatggctatgagacttccagcgatatctagagctgtgacggaagtagcttcagctccggttggtttgagacgactgttctgttcaaatgcttcaaggttctcttttttgtctccacaagctgaatcccaaacaccggctcgtcctcaggctgaacctagcaccaatctcttcgtctccgggcttagtaagcgcaccacttctgaaggactaaggactgcttttgctcagtttggagaagttgctgatgctaaggttgtcacagacagagtatcaggatattccaaagggtttggatttgttagatatgccactttagaagattctgccaaaggcatagctggaatggacgggaagtttcttgacggttgggtcatattcgcagagtatgcaagaccgagagagcaatcacagtcatatcaacctcagaacaacatgtctcgtcctccatactatggtaaccgctagagaaacagttttcttcggttcttatgaatcttttatattcatatttatgcttcattctatcctcttctatgatcgaactgtgttgtgcttcgtctcgtgttattacctttagaagattaaaaacttcaaattatattttgaaggaataatcagaaactgtcatttacaaaaccaaagtattaagtgtaatagttttttaagaggaagaggattttgcttacatggttaactcggaaatccttnnnnnnnnnnnnnnnnnnnnnnnnnnnnnnnnnnnnnnnnnnnnnnnnnnnnnnnnnnnnnnnnnnnnnnnnnnnnnnnnnnnnnnnnnnnn

SEQ ID NO: 129770 - DNA, 540 bp, Arabidopsis thaliana
  unsure (1)..(540): unsure at all n locations
agcttttcaaagttaaaaccttttttncccgaagaagaatcaatacgactcaaatcaatcaattgaatctatggcgatggctatgagacttccagcgatatctagagctgtgacggaagtagcttcagctccggttggtttgagacgactgtcctgttcaaatgcttcaaggttctcttttttgtctccacaagctgaatcccaaacaccggctcgtcctcaggctgaacctagcaccaatctcttcgtctccgggcttagtaagcgcaccacttctgaaggactaaggactgcttttttnctcagttttggagaaggttgctgatgctaagggttgtcacaggcaggggctttcagggttcattccaaaaggggtttngggtttgttaaccgatatgccacttttagaaaggattcttnnccaaaggcattaggcttggaaattngnccgggaaaggtttntttaccggtttgggggncataattngnaagnggtnttcaaagnncccccgnggggcaatncacaggtcattttaaccc

SEQ ID NO: 129771 - DNA, 825 bp, Arabidopsis thaliana
  unsure (1)..(825): unsure at all n locations
atgatactnnnnnnnnnnnnnnnnnnnnnnnnnnnnnnnnnnnnnnnnnnnnnnnnnnnnnnnnnnnnnnnnnnnnnnnnnnnnccacgcgtccggttaaataagaaaaatatcattcaaaagaaacaataatcatgaaactcttagaacaaatggtataccgtagaatgttttatgataataatggctacattgttagtgtccatgagttacggtcatcgagcgatgattaatgatgtagccgaagcacccgtgattgacaatgtaggcagcccaaccaacggactcgacagttcttggtatgatgcacgagcaacattttacggtgatatccatggtggagatactcaacagggagcctgtggatacggtgatttattcaaacaaggctatggtctagagacagcggcattgagcacagcactcttcaacgaagggtatacatgtggggcttgttaccagatcatgtgtgtgcacgacccacantggtgtttacccggaacatcangatacagcacatatttctgtcaccagatactccaaaccgaaggcgtttggtgcacccacccaaaagcctttgacctctcctaccaatgttcctcaagatcgcccatacaaagctggagttgtcccagttaaatacagacgtatttcttggcaagaactggtggtgtcaagttgaaccaaagaaacccttattcttaatgtcttgcctacaatgaggagggctggaatataagtgatcaagtaaagaacagaccggtggtacatgcaaaactgngacaactgacactgtgtattgactgcaggattattaggtacaca

SEQ ID NO: 129772 - DNA, 321 bp, Arabidopsis thaliana
cgcttttctccgtaaacaatttctcagtttccaatttcaacgtaaccggtccggttttctccgcgcaatggacggcgaatctcacaatcgagaatcaaaacacgaaattgaaaggctactttgatcgaatccaaggtttagtataccaccaaaacgcggtcggagaagacgaatttttagcgacggcgttttttcaaccggttttcgtggagaccaagaaatcggttgtgatcggagaaactttgaccgcgggagataaagaacaaccgaaagttcccagttgggttgttgatgagatgaagaaagagagagagaccggaa

SEQ ID NO: 129773 - DNA, 453 bp, Arabidopsis thaliana
  unsure (1)..(453): unsure at all n locations
gatatactgtcagccccgatgcaatgttcgacattcagatcaagcgtatacatgagtacaagcgacaactgctaaatatcttgggaattgtttaccgctacaaaaagatgaaggaaatgagtgctagtgagagagagaaagcatttgttccaagagtttgcatatttgggggaaaagcatttgccacatatgtgcaagctaagagaattgttaaatttatcacagatgttgcgtctacaattaaccatgatccagaaataggtgacctccttaaggttatctttgttcctgattacaatgtcagtgttgctgaattgctcattccagcaagtgagctttctcagcacatcagtactgctgggatggaagctagtgggacaagcaacatgaaattttcgatgaacggttgcgttttgattggaaccttggatggngcgaatgtcgagattagag

SEQ ID NO: 129774 - DNA, 510 bp, Arabidopsis thaliana
gtcacacactcttcacctaaacagcatcaatggcgacttctctctccgtttctagattcatgtcctcctccgccaccgttatctccgtcgctaagccgttactttcccccaccgtatccttcaccgcgccgctctccttcacacgctctctcgctcctaatctctctctcaaattccgcaaccgccgcaccaattccgcctccgccaccaccagatccttcgctacgacacccgtcaccgcctccatttccgtcggagacaagctcccagactccactctctcctacctcgatccatccaccggagacgtcaaaacagtaaccgtctcatccctaaccgccgggaagaaaacaatcctattcgccgttcccggcgcattcacaccaacatgctcacaaaaacacgtccctggattcgtatccaaagccggagaactcagatctaaaggcatcgatgtaatcgcatgtatctccgtcaacgacgcgttcgtgatggaagcgtggaggaaag

SEQ ID NO: 129775 - DNA, 548 bp, Arabidopsis thaliana
agcatcggcggtggtaaagagttcgcaacaaatccgtcgtcatgtagctgatgcttgtttcccgacgtttaatcgtgcgaactgttcttcaaattcccagatttctctgatctggcaaagtccttactccgcctggttcctctacatggacacggatcggaggcaaattggcgagcgagggagacgaagaagtggagccgaaagaagaggatgtatctaacatcggagaatccggtaagcagttcacatcttggcctccttgctgttgttcttgctgctgcggcggtggaggttgctgttgcttggcgcttttaacagagtatgaccgtaccatttccgcttccaattccaccaaaccttcgcgtctccggttgtttctattcacctccaagcctgaggctactcaatctatgggtcagatccttgagagctctgccaagagcgacgattggttcctcaacgcactcaatagcgccggtcttctcgagccgaattccgagcttacgtacgcgtgcatgcgacgtcaagctcttctatagtgcacctaa

SEQ ID NO: 129776 - DNA, 332 bp, Arabidopsis thaliana
cttctctcatcgctcgtctctccaacacgcttctcgacggtcgttccttcaccctcaagtaccagttacctagcgaagaccttgactctcgcatctccgtcactaccgacgaagatctcgacaacatgatcgaagagtatgaccgtaccatttccgcttccaattccaccaaaccttcgcgtctccggttgtttctatgcacctccaagcctgaggctactcaatctatgggtcagatccgtgagagctctgccaagagcgacgattggttcctcaacgcactcaatagcgccggtcttctcaatcgacgattctcagattctgataccaac

SEQ ID NO: 129777 - DNA, 913 bp, Arabidopsis thaliana
  unsure (1)..(913): unsure at all n locations
nnnnnnnnnnnnnnnnnnnnnnnnnnnnnnnnnnnnnnnnnnnnnnnnnnnnnnnnnnnnnnnnnnnnnnnnnnnnnnnnnnnccacgcgtccgtggactttcccattcggttggagaatccccatgttatatcctcaaatcagctatgggctggagttgtaagtactggtccatcagggtacgttcttaattctagctaccgcaatcgtgatgtcccagagtacaaacaagaacttgggaatgccatagttaacttttctcgagtcgtgcctgaaggactgctgatatttttcccttcctattaccttatggactcttgcattacattttggaaaaatgggtgttacagaaactcaatgacagtatgggaaagaatttgcaagctcaagatacctgtcattgaacccaaggattcctccctctttcctgcagcaatgcgggacttttcagaaaaattgcaagacagagcaacttcgggtgtggtgttttttgccgtttgtcgcggtaaggtcagcgaaggactggattttgctgacggtgctggcagagctgtcgtcattactgggttaccttatgccagggtgacagatcctagggttaaattgaaacgagagtttctggatgaacaatcacaacttgcagatgttaagcttccaagatcaaccctactatctggaagcatgtggtacagtcaagaagccggaccggctgtgaatcaagcaattggacgtgtaatcccgcatcgtcatgattatggagctatcatcttttgtgatgacagatttgaacaacatnccagaatccaagatatcactttggatacgacctaacgtcaagtgctactctagatatggagagggtatttctgaccttgctcgattttttcggactgaaagatcaattttcctgcaa

SEQ ID NO: 129778 - DNA, 1364 bp, Arabidopsis thaliana
  unsure (1)..(1364): unsure at all n locations
cagcactatacgactcacttagggaaagctggtacgcctgcaggtaccggtccggaattcccgggtcgacccacgcgtccgtttgctgaaagcatctgttggactcttttaaatcagcaagatgagacagttgtctggaaaaagactatcaacaccaaatgttatagttcccggaaacctggagtgggcccttctgtgtgtaccaaagggcacgatgttgagtctccttattacaggccgcttcagatgtgtataggtggaacacgtagccggaggtggattcccattgaaggcaggacaagatggcctagccggtctaacatgaacaagactgaactttcattatatggtcttcaccccgaggtgcttggagaggatgctgagaactggaagataacagtgagagaatactggtctctcttgtctcctctgatattctctgatcatccaaaaagacccggcgatgaagatccatcaccgccttataacatgctcagaaacgtactggatatgaatgctcaattcggtggtctcaattccgccttgttggaagcaagaaaatcagtctgggtcatgaatgtggtccctacagctggacctaaccacctccccatgatacttgaccgtggctttgtcggagttttgcacaactggtgtgaaccattcccgacttacccgagaacatatgacctgggtacatgcagacaatctcttgtcgcttcagacaagtcagccccgaaaaacatgtctacttattgatatattcacagagattgaccgattgcttcggccagagggatgggggataatccgtgacacgggacagcttggtggaaaaggcgagaaagacgataacgcagttgaagtgggaagctcgagtaatagaggttgaaagcagcagtggacaaagacttctcatctgccaaaaaccattcaccaagcgacaatccatctgaagaagaagaagaacatagncccagggttttctccacttttttaatttttttgttccaatgcctcacattttggaatcaaatcatccaacttgtgttggcgatacggggaagaaaggaggaagagatgnaatatatatcccgccggggacgtaagaccgccggtgaaatttctttatctggttccgtgagctcccntataacagaatctagattttttttttctttacaactttggttctataacaactcttattatacagcgaaaaaagaatatgattcaatatttgtgaagatgtttatgaaataagttcaaaggtttttagtaaattttcactgagttagaaaaaaaaaaacaaggaaggccgctctagaggatccaagcttacgtacgcggcgatgcgacgtcaa

SEQ ID NO: 129779 - DNA, 437 bp, Arabidopsis thaliana
  unsure (1)..(437): unsure at all n locations
ccaaaatcaaaagctgagagctctcttacattgaagctactttcgaagatagcattcagctgattggtaaagagttctagaagcgacgagcatcttctttagttcccgagttttctgcgtttgagaagtctgttctagaaagtaatgggtgacagcgaggccatggtttccgagggttatacttctgctccatatggagactataatgcttctgctgctactgtggaatcgaccgggcaagagactgcaccaattgttgatgcatcacactcggtcaacaatgattctttggtcaatggtactgcgccagttgagaacggaagtgcaacagataatgtggctgtgactgctccagcagcggagcatggagacaatactggctctacactctcaacggaagaggagcgcttgtggaatatngtaagggcaaattcttt

SEQ ID NO: 129780 - DNA, 233 bp, Arabidopsis thaliana
gtccgcccacgcgtccgcggacgcgtgggtaaattacttctgcaagctgcagatgcttcattcaaaacattatagctttaatgggaaggggtagtttcacatctgtcataacttaaaatggattcttgttaagtctctgagtcaatgcaatctttgtactgtatcattttctttatgatcaatgagagctttatttgctccaacaattttagtaaaagaggaagcggtgcccc

SEQ ID NO: 129781 - DNA, 589 bp, Arabidopsis thaliana
gtttttcagaggagtccatcacgcaatcaaactaattgattgatcttattaagaaatcgatgtcttactccatgacttttttttaggaaaaaagaggagaacaacagcctgacattaggtcctattaaagtaccccgttaggtagggaatgaatagaacccatcattgatttgagatattgatagggtgaatacccagtctactcaatgctaggtagaatgagtataaggaactcaaaaatgatcttttcgtcctatgaaccttaaggtgtatcaagtttcatgtttgattttttaatcaggatgttagagactatatttaacttaagttgatctagaccaaaagcaaacctacgtcaagagaacccttctttgaaacactttgggtagttcttctgtattgtattagaattcaaaaataatcaatcagagtacttggaaccatttcttatctttttttaagaaaaaatatggtagactaactgatctttcgatcagttaatgaaagagcccaatgcaaaaaaaaatgcatgttgggtctttgaaagagttcgaatcattttgataataataagttcgaactcttttac

SEQ ID NO: 129782 - DNA, 531 bp, Arabidopsis thaliana
atacgactcactttagggaaagcacgtacgcctgcaggtaccggtccggaattcccgggtcgacccacgcgtccgcccacgcgtccggtaacatcagaaaatttgctttgactcgcacacatcaaggttactcatagtccagggctgtgaaattgagcttgtgatgtcgcatagtatgtcccatttcagttataacaatcagtctgcatgaaaaattaagctactgttttgatacgattgccaacgtgagagtgagaaactaagatgtgtgtctacattaaaacaaaacaaaaaaaaacgggtctacgcacgtccaaagtatcattaacctatcttcatttggttccccatgatatccacatctcagattaggacattaccactttgtgttgcaactttgctttgatgcatactccatgcatgttttatttgatttttcagtcatctgctgcaaccccttgtggattgtactctgacacttggaagaatactcgagaaaaagttttgcctcgggactgggcgatacggaaa

SEQ ID NO: 129783 - DNA, 535 bp, Arabidopsis thaliana
  unsure (1)..(535): unsure at all n locations
cannnnnnnnnnnnnnnnnnnnnnnnnnnnnnnnnnnnnnnnnnnnnnnnnnnnnnnnnnnnnnnnnnnccacgcgtccgataaaacaaagttttgttcttgtcttcttcacaagagaagagatatgtctctcttactctgtttttcttctttctctcaataaaccagcagatacggcgacaagggcatctgaccagtagcgaagggttggaggaaatggctcgatatcttcttctgggtcttcaggcactccttcaagatctctcccgtcccacacatcgtttctagttgcacatttggaatggacagcataatgacattctttattacaagaatattgcccgtagttgatgtcaacggtttggcgacaaactccgcaagagaaatcaccagaaggaagggaggatgtgagagagagacgatgagagtgtcgggtgatctgaatgacacgaggtaaatagatacatgatctgtggaccatgtggctgcaagggagacaagagtaaacangatcttcagcgtcgcttaaagacag

SEQ ID NO: 129784 - DNA, 849 bp, Arabidopsis thaliana
  unsure (1)..(849): unsure at all n locations
agttcgactgaacgcagtaggcacgaatatgtagtagtcctcatagccccaggcttcccttatgctcggctgtatgtgttgaatgtagcgatacaattcaccagaacagctatgacatatacgcaagctctatcgctcnctataggaagctggtcgcctgcaggtccggtccgaattccgggtcgacccacgcgtccgcccacgcgtccgcggacgcgtgggttcgtttccgatcgcacttcttctcaagtaaatttaatagacgtttgttgggtgatttaagaagatgggtcagatccagtactccgacaaatatttcgatgatactttcgaatacaggcacgttgtacttcctccggaagttgctaagcttttacctaagaatcgtattctttcggaaagtgaatggagagccatcggagtgcagcaaagtcgtggatgggttcattacgcgattcatcgtcctgagccacatatcatgctctttaggaggcctcttaactaccagcaggagcaccaagctcagattgctaagtagaagaattatgcaaaattctccctaatctctgtttatgtctctcgtaaacgaggttttaaaatactactctgatgttttgttcctgtagttttttttattgtgttcatgaattctcttcagtggagaatcatgtgagtttggtagaacaacttttaatgttatgttaagtctggtcctttgctagactttggttggatccacgtttgaacttcttcatggttaagaatgaaaaaaaaaaacaaagnnnnnnnnnnnnnnnnnnnnnnnnnnnnnnnnnnnnnnnnnnnnnnnnnnnnnnnnnnnnnnnnnnn

SEQ ID NO: 129785 - DNA, 366 bp, Arabidopsis thaliana
agccgaagtagagacgttgggtcgggtcagacatggaaacatcgtgaaacttcttatgtgctgcaacggcgaggagtttcggttcttagtgtacgagctcatggaaaacggcagcttaggtgacgttttgcattcggagaaagaacatcgtgccgtttctccacttgattggacgacacgattttcgatcgcggttggtgctgctcaaggactttcttatctacatcatgactctgttccgcctattgttcaccgtgacgtcaaaagcaataatatattgttggaccatgagatgaagccacgtgtcgccgatttcggtttagctaaaccgttgaagagagaagacaatgatggtgtctccgatgt

SEQ ID NO: 129786 - DNA, 530 bp, Arabidopsis thaliana
aagaacaaatccattaagagaccctcccgtgcccggaaagcaacaatctgtcatctccttcaccaagaaaaacatcaaaggactgaatattcccgaaggcgacggtttcccaacaaagcttttcttcaatggagaagaatgtgcgcttccaaaacatttccctaagaagagctcagggcatagacgcggtatcagtgtctcaatgtcctttgttttcgcaacaatcgcggcttttgcactaatgatgattaattactgaggagataactatacttaccattcttgatcagtttttttgatcttcaaattcttaagattggtgttttgatgatgttgctgaacagaggaaggatccaaaggagccgattggtatatgattggtctaagttggaaaaatattggccatggtggattaaaacctttgtttggtccaataaaggaataaagggtatggtggtctctagtaaaaaaaaaaaaaaagggcggccgctttaaaggatcccagcctacggaagggggccagccacgtc

SEQ ID NO: 129787 - DNA, 524 bp, Arabidopsis thaliana
  unsure (1)..(524): unsure at all n locations
agctcagggcataaacccggtatcagtgtctcaatgtccttggttttcgcaccattcgcggctttggcactaatgatgattaattactgaggagataactatacttaccattcttgatcagtttttttgatcttcaaattcttaagattggtgttttgatgatgttgctgaccagaggaaggatcaaaaggagcagattgttatatgattgatctaagttggaaaaatattgacaatgttgtattaatacttttgtttggtctataaaagtattaaagtgtatgttgttctctagtaatcccaaaatctcagattagtgttggccttttttttggcatgaagaagatcttagtactttgatttgatgtttttgtgaaatctctcttcgttcttgaagatctttatccgaaaagtaataataaaatataccccaaaaaaaaaaaaaaaaagnnnnnnnnnnnnnnnnnnnnnnnnnnnnnnnnnnnnnnnnnnnnnnnnnnnnnnnnnnnnnnnnnnnnnnnnnn

SEQ ID NO: 129788 - DNA, 762 bp, Arabidopsis thaliana
  unsure (1)..(762): unsure at all n locations
cagcactnnnnnnnnatcgactcctataggaagctgtacgccgcaggtccggtccggaatcccgggtcgacccacgcgtccgattcagccagagaatcccacgaagatatataccgtgctattgatatgtatctcgaggctcacacaggaacaactgatggcgaaaaactcaacttgatacgaactttaagttacgagaagctttcaggagaatcaagagctcacatttcgcgtaaccaaaagtttcaggctattgagacactagatgaacaacaacaacaacaacaacaacaacaacaacagaagcagctcatactcagaatggagaaggttgagacttcaggagaaaacgagaagctgaaggaacatatcgaagggattcaatggagggtaatggaattggagagagcttgtttgaaaatgcagaatcaaatggaagttatcaagaagagatccaagagctcgagcaaaggaagtaatagatcacttcctaagctctgttcttgattagtgaagctgtaagcttacgatcatatttgtacatagagtgatagagagcataaggagtcaattattagttaccatttggttcttatgtttcagagtatttatcttttcttgggttgttttctttgccccaaagttgtgcgtaatgaaaagtaaagataaattcgttttaaaaaaaaaaaaaaaaggggcggcgtctagaggatccaagctacgtacgcgtgcatgcnnnnnnnnnnnnnnnnnnnnnnnnnn

SEQ ID NO: 129789 - DNA, 572 bp, Arabidopsis thaliana
cagagttgaatcagttctacaatgatctctgtctctcgattcttgtcgcctcatattctacgcaattccaaggagcttcgtaaaaatgtctgcttcagcgactcaaacggccggagaagtttcaatggggatcaagcctccttcacaccctacttacgatttgaaagctgttatcaaactagccctagctgaagatgctggtcatacaggagatgtaacgtgtatggctacgataccgtttgatatggaagtggaagcttatttcttggccaaggaagatggtattgttgctggagttgctcttgctgacatgatttttgaacatgttgatccctccttgaaggttgaatggatgcgaaaggatggagattatgttcataaaggattgaagtttgggaaagtatcagggaatgcacataagattgttgttgctgaaagagttttgctcaactttatgcagaggatgagtggaattgcaacccttaccaagttaatggcagatgctgcatcccctgcatgtatactggagacaaagaaaaactgctcctgcgtttgcgcgtgcgtagataaat

SEQ ID NO: 129790 - DNA, 483 bp, Arabidopsis thaliana
  unsure (1)..(483): unsure at all n locations
gtgaaccaagctcaggttttgtcttctctttgatcattcctttctcagcaatataaattagagttatatcctttataaaggattttcctttttcaccaacaaaccctaaattcggtgtctcagcaagaatcacgtgattctcgttcctcttcctcacgaaacccatcatcttctatctcatttgagaaatgggtcaaaagttttgggagaatcaagaagatcgagcgatggttgaatccaccataggctctgaagcttgcgactttttcatctcaacagcttcagcttccaacactgccttgtccaagcttgtctcaccaccaagtgattccaatctccaacaagggttacgtcacgttgttgaaggatctgattgggattatgctcttttctggctagcgtccaacgttaatagctctgatggttgtgtcttgatctggggggatggcaattccgtntaaaaaaggntttcnaggnngggtt

SEQ ID NO: 129791 - DNA, 545 bp, Arabidopsis thaliana
ctaaatcatcgtcgccgtgttcttctccgcttccaccgtcgttgtattcgtcttccgcctcctctcccatcggttttgaacagcttggcagaagaagtgaaacttgagagagtaatggagaacttggaagatctgaaaattctggctgagcagtggtcgcatcaaggaattgaatatcttcagaagataccaccgaatcagctgtatgccgccattggtgttttgttgtttacaaccatcttgctcttcctatccattcgcctggtcagacgtaccaaatccaacactgtactcctttctgggctgaccggaagtggaaagactgtgctcttttaccaactccgagatggatcgtcgcatcagggcactgtaacatcaatggaaccaaatgaaggcacttttgttcttcacagtgaaaatactaagaaaggaaaaatcaagcctgttcatcttgttgatgttcctgggcactctcggcttcgacccaagctagaagaattcttgccccaagcagctgccattgtgttcgtagtggatgccttgga

SEQ ID NO: 129792 - DNA, 607 bp, Arabidopsis thaliana
  unsure (1)..(607): unsure at all n locations
cgnnnnnnnnnnnnnnnnnnnnnnnnnnnnnnnnnnnnnnnnnnnnnnnnnnnnnncgtccgcttttgagtccacgcgtcaagaagaagaagattaaaattcactaaaaacccgagaaaagtggaagaagaaggaaggaagaagaagacaagagagcattctgattcatgtgactctggtttcgtttctttctgtgtctctgctgtgtcgttttctcggcatatttctgatctttcgttctcggttggtttttggtttctgggtattgattgattgattcaaaagtcttcaactttcctggaaactggatctgggtttatccgtttttactcgtctgagaagagaaaaaaggatgaatccttatgatgcgaaagacagaagatggattctctctatgttcttcttcgtcgttttgttctgcaacaacgtttcgacttcgtcttcttcatctgaagttatcacgattaagccaagacatttatccttgctaaagagtgctttacaacggtcaagtggagaccagtctgatcttcgtttggcggccatttaccttntccaaggatgggggcccttgaattnnttttgggaaanccccntcattncccgg

SEQ ID NO: 129793 - DNA, 594 bp, Arabidopsis thaliana
  unsure (1)..(594): unsure at all n locations
gactcattgctcatatctncttctcaattccaattttgtaatccttatctcaaattaatttctattttnataactacttaatctcaattagaagaagcctgctctctaataacaaaaaaaaaaaagccgtttgggatttcttttacacgaacacattcttccgatctttcttgtttttaacttaccggtaataacgaagatatgcagaggtttttctccgccagatcgattctcggttacgccgtcaagacgcggaggaggtctttctcttctcgttcttcgtctctcctattcgacgacactcagttacagtttaaagaaagtgtatccaagtttgcgcaagataatatcgctcctcatgcagaacgaattgatagaactaattcatttccacaggatgtaaacttatggaagctaatgggtgagtttaatctccatggaatcactgcgccagaggaatatggagggctaggtcttggttacttgtatcattgtattgcaatggaggaaatcagtcgggcctcgggttcagttgctttgtcttatggtgctcattccaacctttgcatcaatcaattggtgaggaatggaact

SEQ ID NO: 129794 - DNA, 813 bp, Arabidopsis thaliana
  unsure (1)..(813): unsure at all n locations
ctttccaactgttaccgtgagtaacagttaataggttgactgactcatgaacacctaaataggccagtccattcagaacaataagggcctgaccgtaaccaaggatggtggggccgttgcttaaaacctaaaggatncagtaggaacaccccgataattctcaggcgggccaacgaatgctagaaagacggtaaaggaccagtccccatccaaccatcacaacctcgaactcttacggaattcctcaatgaacctgctgtaataatggatctaaaaaggaaagaaccctcccagaacgccagtgcttcgaggagaccagagcctcaggaaataaaccaacgtcatcaggtgaacaaaagggagacccgggactcgagccgcgtagcctcaaagggtgcggggggccgcccatcagtcttccagaaaaaccaaagcgcagctgctgtgagtggataaagtcaaagacagcatctgcctttaaccccgaccgagtagccgcttcaagaacagcacgagacgaggctctcagaagcttcgagcttctttcgatccgccaaatgaagccttcaatcaatgggctctttgctgtaaaccgcattcttctttacatatgttgtttggtcctttgtttccacgaaactcccaatttttcatgtattatcaaattctctggattttgtatcaatttttacacactttattgtaatcatgacaatttgttgagttaaaaaaaaaaaaaaaaaaagcccggccgctctagaggatccaagcttacgtacgcgtgcatgggacgtcatagctattctatagtgt

SEQ ID NO: 129795 - DNA, 1017 bp, Arabidopsis thaliana
  unsure (1)..(1017): unsure at all n locations
cggcactatnnnnnnnnnnnnnnnnnnnnnnnnnnnnnnnnnnnnnnnnnnnnnnnnnnnnnnnnnnnnnccacgcgtccgccagactactcatatctaaagagacttttccgagacttgtttatccgtgaaggttatcagtttgattatgtattcgactggactgcattgaaacaccctcagagtagtgccaggtcccattccagtacacatgaaaggcatcgtaccggtaaaccagggatgggtgcgggaccgtctgctgaaaaacctgaaaggatttcagtagggaacatccgcgataaattctcaggtgcggtcgaagcatttgcgagaaggaacgttagaggacccagtccccatcaaaaccataccagacatcgaactcttgacgaaattccttcaatgaaacctgctgtgaatatggtatctgagaaaggaagaaacacttccagatacggcagtgcttcgaggagaggcagtagcctcaggaagtagaccaagctcatcaggtgaacaaagggagagccgggactcgacccgcgtaccttcaaccggtgccggtgtccgaccatcagtcttccaaagaacccaagcagcagctcctgtgagtggatacgagtcaaagacagcatctgcctttaaccccgaccgagtagccgcttcaagaacagcacgagacgaggctctcagaagcttcgagcttctttcgatccgcaaatgaagccttcatcaattggctctttgctgtaaattggattcttctttacatatgttgtttggtcctttgtttccccgaaactcccaatttttcatgtattatcaaattctctggattttgtatcaatttttacaccctttattgtaatcatcacaatttgttgagtttaattcaatgttccagttttaaaaaaaaaaaaaaaaaggcnnnnnnnnnnnnnnnnnnnnnnnnnnnnnnnnnnnnnnnnnnnnnnnnnnnnnnnnnnnnnnnnnnnnnnnnnnnnnnnnnnnnnnnnnnnn

SEQ ID NO: 129796 - DNA, 523 bp, Arabidopsis thaliana
taaacggaaaaaatcgctgaagctcatcggaggcgaaaatggcgaaatcaatggcgacgctagattctggcaccacatgttcctcctggaatcaatccggcgaccgtttagccgccggatctctcaacggaaaactttctatatacgaatcctctacttcgtcttcttcgactttcagttgcacttccaaagttagggttagtgaatcgagtatcgtaaagatcgtttggttgccttcagagtacggcgacgcagtagcctgcgtttgcgaagacgggagcttatcgatttgggaggagctctctgaagacgcacatggtcttgagtggaaattgtgtaagagtatgaagaataagtctagccaagtgctcgatgttcaatttggtgtctccagacagagttttttgtttgatgcagcatattctttttgttctttttggttttttatttttttattcctattagttttttttttttatcttcataattattttatttttgtataactaatttattttttttt

SEQ ID NO: 129797 - DNA, 537 bp, Arabidopsis thaliana
cggcactatacgactcacttagggaaagctggtacgcctgcaggtaccggtccggaattcccgggtcgacccacgcgtccgggcgaaatcaatggcgacgctagattctggcaccacatgttcctcctggaatcaatccggcgaccgtttagccgccggatctctcaacggaaaactttctatatacgaatcctctacttcgtcttcttcgactttcagttgcacttccaaagttagggttagtgaatcgagtatcgtaaagatcgtttggttgccttcagagtacggcgacgcagtagcctgcgtttccgaagacgggagcttatcgatttgggaggagctctctgaagacgcacatggtcttgaatggaaattgtgtaagagtatgaagaataagtctagccaagtgctcgatgttcaatttggagtttccagaaagagtctaaagatgggttgctgcatattctgatgggtaccttaggggttttgagctcttgaatccattggagctaaagatttggaacttcaggcttagtt

SEQ ID NO: 129798 - DNA, 613 bp, Arabidopsis thaliana
  unsure (1)..(613): unsure at all n locations
nnnnnnnnnnnnnnnnnnnnnnnnnnnnnnnnnnnnnnnnnnnnnnnnnnnnnnnnnnnnnnnnnnnnnnnnnnnnnnnnnnnccacgcgtccgcggacgcgtgggtccggacagtatcgccggtggttaaggagctttgtaagaagcataatctaccgtataggagtctttcgtggtgggaagctaatgtgtggacgattaggactttgaagaacgcggcgattcaagctagagatgcgactaatcctgtgttgaagaacttgctttgggaagctgtgaacacgcatggctaaatatgtagttttttatcacggtagagttacacctaaaacagttcaatctaattaaaaagtacatatttattttgattttctgctgagtttataattttctaatcgctaagcctaagaatctatttttgataaacaaatttgtcagacatgcgtgcttgttctacgtttaagacggatcgtgcgggtctaatatacatgacaaagtactccaccgaaaaacccgagcttttgaaccaaattgtttgagttcccgtcaatgtaaagttttatctggaagggttcatgctttttatccaacaaatgaaagacccttttgccc

SEQ ID NO: 129799 - DNA, 381 bp, Arabidopsis thaliana
aatgtattgggtagaggtggttttggtaaagtgtataagggacgtttagccgatggcaatctagtggctgtcaaaaggctaaaagaagaacgtaccaagggtggggaactgcagtttccaacccaagttgagatgatcagtatggccgttcataggaacttgcttccgcttcctggcttttgcatgactccaactgaaagattacctgtttatccctacatggctaatggaagtgttgcttcctgtttaagagagcgtcctgaaggcaatccagcacttgattggccaaaaagaaagcatattgctctgggatcagcaagggggcttgcgtatttacatgatcattgcgaccaaaaaatcattcaccgggatgttaaagct

SEQ ID NO: 129800 - DNA, 862 bp, Arabidopsis thaliana
  unsure (1)..(862): unsure at all n locations
nnnnnnnnnnnnnnnnnnnnnnnnnnnnnnnnnnnnnnnnnnnnnnnnnnnnnnnnnnnnnnnnnnnnnnnnnnnnnnnnnnnccacgcgtccggctatttgcaaagttgtatttggagcttaaaaccctaaacccagaaatccccaactcttaaacttgagaagatgatggctgatgacactgaactcgtcagtaacactgaccagaagatggaagacgcttcagccgaaaaccctgcccgagctgatcccccctcatcggatgattccggcgattctgattccgactcagaagatgaagccgagtcgaatcagcagattgtaaccttggagtcggagctctccgctaatccttacaactacgatgcttatgtccaatacattaagcttctcaggaaaacagccaaccttgaaaagctaagacaagcaagggaagctatgagtgccatatttccgttgagtccttccttgtggcttgaatgggcaagggatgaagcgtctttagccgctagtgagaatgtgcctgaaattgtgatgctttatgaacggggactttctgattatcagtctgtatctctntggtgggactacctgagctttatgctagaatttgatccatcagtgcgtggatacccatctgaaggtatttccaaaatgcggagtctttttgaacgtgctattccggctgcgggcttccatgttactgaagggcatagaatatgggaaggatatagagaatttgagcaaggtgtcttagccactatcgacgaaggctgcattganggagagaataagcagatccaaggatcagatgcatattcaccgtcacctgtctggtcctttagaaacttgagctccaccc

SEQ ID NO: 129801 - DNA, 351 bp, Arabidopsis thaliana
accacgcgtccggccgccactgcatccttggactccttcggaagcttgatactgttcttcagcttctctctcttgctcgccaccgacggcgactcctctagcatcctctgaagacctccgccagctcttggatccaccatctccgccacaatctccttctgaaactaataattcacgagattcttcactgacagctgaagatacagagcaagactgtccacaatccttcgtaagactatcgtccagtaagatgctatcctcatcttcatatcgaaggcttgctgcaggagatgagcatgatacttccgtaggtgagagatcttcacaattccaccaaatccagtcaacgag

SEQ ID NO: 129802 - DNA, 380 bp, Arabidopsis thaliana
attcttgctccaaccaggtaacctcaaatctctccaaacgcttctcttgtctcacattatccccaaacgagtcgggtcaaaccaatggcctgaggagaattcgggtcgggtcaaacacgtcacgttagggcatgaccaagtgctgcatttgagtaaactcaaaggaacaaatggaaagagattggtgaattccgctgtaattacccgacccgatgatttaacccgacccgacgggttgatccacggaatcgaacggcttttaatccctcgttccgttcaagaagatttcaaccgacggagaaatctccgatcaatctccgccgtattacccgaaggagctccggaaatcgacccgagaaccaaccgtctcaagaaatctg

SEQ ID NO: 129803 - DNA, 544 bp, Arabidopsis thaliana
  unsure (1)..(544): unsure at all n locations
nnnnnnnnnnnnnnnnnnnnnnnnnnnnnnnnnnnnnnnnnnnnnnnnnnnnnnnnnnnnnnnnnnnnnnnnnnnnnnnnnnnccacgcgtccggagagaatggcgagtaatcaacaaccaccgtcgaatctacagacctacggtgtaccaatttacgccgtcgactggattctagaggaagctgtcagatccaaaatcactaaggatcaggatgatgatgatgatgatggatcgtcgtcgtcgtcgtacatcgttttatccggcggaggaggagaaggacgaagtggaatacctaatgtcatcttaatctgtcgtgttgatctccacaccaattctctctctgaacaacctattggtaggcgtgtgattggcactgatctaccttatcgtatggctattcatcctcgtcaaggtggtcttatttgtgcattgcctaacagttgcagactgtttgattgggaaaacattatagaggatgataatgaggaagagtcagagaaagttgttaaagagttaaaagatgttggacaacagttgtctctc

SEQ ID NO: 129804 - DNA, 546 bp, Arabidopsis thaliana
  unsure (1)..(546): unsure at all n locations
nnnnnnnnnnnnnnnnnnnnnnnnnnnnnnnnnnnnnnnnnnnnnnnnnnnnnnnnnnnnnnnnnnnnnnnnnnnnnnnnnnnccacgcgtccgcccacgcgtccgcccacgcgtccgggtgatggtgttgaggcaatggctgatgttggtggaagcgttctcaccggaattaatgggaatccgcttggggttttggcgaggcaacttggtttgcctcttcataaggttagagatatttgtcctttgtatcttcccaatggagagcttgctgatgctagtgttgattctaagattgaggcatcgtttaataagttgttggatagagtttgtaagcttagacagtcgatgatagaggagaataaatcagttgatgtgcctttgggagaagcgcttgaaacatttcgattggtttatggggttgctgaggatcagcaagagagaatgctcttagattggcatttagcaaacttggaatatgcaaatgctacattgttggggaatctgtcaatggcgtattggatcaagatgatccgtatgagatgggt

SEQ ID NO: 129805 - DNA, 1119 bp, Arabidopsis thaliana
  unsure (1)..(1119): unsure at all n locations
tctgantgttttaggaaccgctgaactgctactctcatgtgttttccctgtcttctctcacgggttctatttcccaaatcagatataaaaatttcttcatctcatttctccgtaggtctttggagggcttgtgaatgctgggaacaaaaagctctttgaaaccgaattggctgaggatgagtatcctttttaactttctgaaaaacttttaatgcactcaacacagtcttagtacaccttctctgttcctgtgattgctagtgtggttttaattttttaattactgggggtaaaaacggtttcagtataagatccgttcctttgacgggaaaaactcagctaccttttgttcaacttcaatgactaccccaatggaatggtcacactcttcaatctgctagttatgggtaactggcaagtatggatggagagctacaaagatttgacgggcacgtggtggagcattacatatttcgtcagtttctatgtcatcacccttttactcctggtgaatttggggagttccactgacgccaactcctaggagcccgatcaaccagagcccatgattgttgtaaggaaccttaactctgcttcttagatcgacttataatgcgtgtttgtttcaggttgttgcctttgtcttggaggcgttctttactgagctggatcttgaagaagaagaaaaatgtcaaggacaggattctcaagaaaaaagaaacaggcgtcgatctgcagggtcgaagtctcggagtcagagagttgatacacttcttcatcacatgttgggtgatgaactcagcaaaccagagtgttccacttctgacacataaaacaaaacaagatcgttaagagcttatttatacgtttatactgtgaatctttgattctatatggagagatcaatagaatctagaaggtgactaaattttttcttcttttgggtgaagatttaatataagacgattgtgttataatttgtcatgaaaacatatgactatatgactatatgagcatcaatttctttaacacttttgtaatgtttacccaaagggcggccgctctagaggatccaagcttacgtacgcgtgcatgcgacgtcatagatacttctatagg

SEQ ID NO: 129806 - DNA, 526 bp, Arabidopsis thaliana
  unsure (1)..(526): unsure at all n locations
cggcannnnnnnnnnnnnnnnnnnnnnnnnnnnnnnnnnnnnnnnnnnnnnnnnnnnnnnnnnnnnnnnnnnnccacgcgtccgttttgttcaacttcaatgactaccccaatggaatggtcacactcttcaatctgctagttatgggtaactggcaagtatggatggagagctacaaagatttgacgggcacgtggtggagcattacatatttcggcagtttctatgtcatcactattttacttctgttgaatttggttgttgcctttgtcttggaggcgttctttactgagctggatcttgaagaagaagaaaaatgtcaaggacaggattctcaagaaaaaagaaacaggcgtcgatctgcacggtcgaagtctcggagtcagagagttgatacacttcttcatcacatgttgggtgatgaactcagcaaaccagagtgttccacttctgacacataaaacaaaacaagatcggtaagagcttatttatacgtttatactgggaatctttgattctatatgga

SEQ ID NO: 129807 - DNA, 499 bp, Arabidopsis thaliana
  unsure (1)..(499): unsure at all n locations
nnnnnnnnnnnnnnnnnnnnnnnnnnnnnnnnnnnnnnnnnnnnnnnnnnnnnnnnnnnnnnnnnccacgcgtccgcgagagtgagagagagagacacacacacagcgagtgaaaatgtctccggagaagaagagtcaaaacttccctccaataacggaatgcagagacggagagtacgattcgatagccgccgatcttgacgggactctgcttctctcaagaagctccttcccttacttcatgctcgtcgctgttgaagctggaagccttttacgtggactaatcctccttctctcgttaccattcgtcattatctcttacctattcgtatccgaatctcttggtatccagatcctcatcttcatctcattcgctggtctcaaaatccgcgatatcgaacttgtctctcgcgcagttcttccacggttttacgcggcggatgtgaggaaagacagttttgaggtgtttgataagtgtaagagaaaagtggtagtgacg

SEQ ID NO: 129808 - DNA, 538 bp, Arabidopsis thaliana
atcgactcatttagggaaagctcgtacgcctgcaggtaccggtccggaattcccgggtcgacccacgcgtccggattgacaagataaaatgtgagaacctagcgaaaagactactttcgttaatgctgaaactagctgcagtttttcgttatactccgcttgagcttctgagaagccagactacagtcagcccttcaagtctaacagaagatgacagtcggtgcagcctcatctcaccacctcctagagagcccacaatgaaagaccggattcttccatgtttggaacgtattcagaaactggagaaaagttatgaggatattcggaacaaacccgttgcaatacctggagagaaggagagaatgttgatggattctttagatagaatcaagtcaggtgaagtttgatctcgacaaaacaaagagggcttttacacgccacgggggatgaaacagatggagataacctgaaatgctgcaaaatatacgagaactcccaactttcacaaaagaaagaggattggttttgttaataaacc

SEQ ID NO: 129809 - DNA, 1063 bp, Arabidopsis thaliana
  unsure (1)..(1063): unsure at all n locations
nnnnnnnnnnnnnnnnnnnnnnnnnnnnnnnnnnnnnnnnnnnnnnnnnnnnnnnnnnnnnnnnnnnnnnnnnnccacgcgtccggtaaaacactattatagaagctcttacaaagaaaaaatatgaagaaagctacggcattgatgaaacatatcgttgcattgttgagttccatggcgaaggcaaaatctatagccataaagaacaaaacgagtgctttcaagacacgagtactcatgttgtctctagtgaaacacaagaaactcgggttccgttccatttccaacaagattcaccacctcttgggccatgcggatcaagacgacgataacgaccaggaccaagacaagaacaaggctatagtcctctacaacagcaaggcatccacaatggctcatcatgaggaatatgacgttcacgaggaggaaagcgacaagtatcctgatctgaggcacacgttgttcgaaggagaggaggacttcggggacttggaggaggaaggtcaaggtagttctgtgatagatatggtgaggacctcgaaggaagaagaaggagagaatttcaagctagaagatgagatcgaccatgtcgcggatctctttatttctaggtttcataagcagatgaagcttcagaaactcttgtccttcaagaggtatcaagaaatgctagcccgaggcacctaaacccatatccatatatatatataaacatgttggcaatagatatgaataatagattcatattatgatctttgctaacgtacgttcttattttgtgttgtctatgataaatccttcgagttctcttattttctaggatcgaaatattacggtctcttagatctgttttcatttaatatgttgaagttgaaggaaggatctgctttgcggaatatgttttcttcctccttgagaccgtactgtgtagatcttttaagtgttccaatatagagcattattttttggcttaaaaaaaaaaaaaaaagnnnnnnnnnnnnnnnnnnnnnnnnnnnnnnnnnnnnnnnnnnnnnnnnnnnnnnnnnnnnnnnnnnnngtccta

SEQ ID NO: 129810 - DNA, 1345 bp, Arabidopsis thaliana
  unsure (1)..(1345): unsure at all n locations
atgattctccaagctactatacngactcactatagggaaagctggtacgcctgcaggtaccggtccggaattccgggtcgacccacgcgtccgctgactcccaaaatcgatcagatttttagctacgattcaaccgctgccgttagattacaggcgaatgaatctctagagaagctatcggaatcggtgaatgcaatgatgacggagtttcaatcgtcgattacgaaggaatcgtcgaaatcggcgatttctggcggcggagttcatcagctcacgaggtatgtgatgaacttcatcgtcttcctcgcagactacagcgattctctcgccaccattctcaaggagtcatcgttacctttaccggaggattacttcagtagcagcggcgaagagaatccaggatccggtgatcgttctccgatggcggcgagactcgcgtggttgattctcgtcttgctctgtaaaatcgacgccaaatctcggctctacaacgactcggctctatcgtatctcttcctagcgaacaacctccattacgttgtgacccaaggtccgtacatcgaatctcagactcgtactcggagacgattgggtagcgaatcacgaggttaaagtgaatcaatacctcgagaaatacgaaaaaatggcctggggggatgtgatagcgtcgctccccggtgattcaacggcggggacggaggcggaggagtctctagacggttcaacgaggcgttcgaagaggcttacaagaagcacaagacatgggtcgtacccgacccgaacctgagagacgagatccaagcgtccatagcgagaaaactaatgcccgggtatacgggtttctataagaaacccccggtcgggtcatgcaatattgtcagatttacccctgaagatctaaataattacataaccgaccctatatgttggtttaggaagatccgtgccgttatccaaaactaagaagtatatggttagcccaagcccatacgacggatttgaagtaatagctccatgtaaaaagccctcatacgtgtaactctgtgaaatcaacgaatcataggccggtcttaggctaaaagcccatatatcaattttgggcttcaaattatagaccatagatataaaagtctacatttcatttgccatattcagaatcagtgtgtacttgtgcttgcttttgttctctattgatctgatcttcttgtacgtgtgttgttcacactcacgcctaaatcacattcttctttataaaaaaaaaaaaaaaaaagnnnnnnnnnnnnnnnnnnnnnnnnnnnnnnnnnnnnnnnnnnnnnnnnnnnnnnnnnnnnnnnnnnnnnnnnnn

SEQ ID NO: 129811 - DNA, 631 bp, Arabidopsis thaliana
  unsure (1)..(631): unsure at all n locations
atacgactcactttaggggaagctggtacgcctgcaggtaccggtccggaattcccgggtcgacccacgcgtccggtggagattctggctaagctatccccggagtatcctcttccgaccaagtgcaaggacgagaagaaccctagagccaagccatacaaattcactaaccagaagattaaggacttaggcttagagttcacttccaccaagcaaagcctctacgacacagtcaagagcttacaagagaaaggccatcttgctcctcctcctcctcctccttcagcatcgcaagaatccgtggaaaatggcattaagatcgggtcttgaaaagcttattaattccctcaagtatcccccttaagtatccttaaccattgaagttgcttttgtttgttgtctctggttatgtgaaacctctgtttcaatatgtctcgtctggttatgaatctgtacactcagttctttggccaaaccgtttgatggattttgtagtcaagtcttcatgtttgatctatgtaatagattacacttaagtaaacaacttcattttgttttttaggaggagattatcttgccagcacaactgagtggggcgcgtttaccaagatccatattnnnnnnnnnnnca

SEQ ID NO: 129812 - DNA, 825 bp, Arabidopsis thaliana
  unsure (1)..(825): unsure at all n locations
atgatctgccnnnnnnnnnnnnnnnnnnnnnnnnnnnnnnnnnnnnnnnnnnnnnnnnnnnnnnnnnnnnnnnnnnnnnnnccacgcgtccgcggacgcgtgggttttggtttcgccaataatggaactcttcttccaccattttcctggaaaatctcggtatcgagaagatgaatccctagacagataaatctagaatcactcaaatctctgctcttcttccgattcagatcgtatcgaattttgaattttgtatctcgctacactgttcgattgagaattctttttttccgattgattcgaatcggattttgtttttttcctcgatatagaatgacttcgaatcaacgtatgttgttctactcctgcattgcgaaaggaacagtgattctcgcagaattcgcttcaaaggaagagccaggaatcgaagatctagctttgagatgcattgagaacgtacctccacatcattcgatgatctctcacacagtccataagagaacctacgctttgatcatcgatggattgttttcgtttttcgcggatttagatgagggcgtagcgatatcggagtctgtatggctattcaatcgattgaaatcagctacagagtctctaatggaagaccgatctactgcggattcgttggtaatccgactcacactgtctccatcaaagctagatccagtttcgctgaaatgctgctattgggggatcataaaaggtttggattggagttggataccgagagttaccaggggataaagtatatcaagttggatctcaaggcgaaagcgggcgtgtgcgtttagaagcgtgagtgtg

SEQ ID NO: 129813 - DNA, 353 bp, Arabidopsis thaliana
caaaagaagagtagacttcccatcatcctccgctataatgcgccactctccgcgttatctataatacgctagtattccgtgcccgctataatgcgcaagtctccgtctcagcctctcttcgccgtctgatgtctgatcttctaggtcacctccacaaattcgaacaagaatttgtctttatgtgcaaaaccaaaatgggagtcaatgcttcagagccaaaacgaacacgatcgcgaccaagtcaatcgcaggggaggcatccgtcgacgagacgatctccgtcaacgagcaacaccggcacaacaacaaccacgacgacatcgaattctaacaaaactggtgcctcctcttcc

SEQ ID NO: 129814 - DNA, 535 bp, Arabidopsis thaliana
  unsure (1)..(535): unsure at all n locations
ccccccccgcccccggcccgcgggagggtagtttgccnnnnnnnnnnnnnnnnnnnnnnnnnnnnnnnnnnnnnnnnnnnnnnnnnnnnnnnnnnnnnnnnnnnnnnccacgcgtccgaggactatttggaattttgatattgtggatgtacgctaatttttggatcactggaacattatttatagttggaggttatttgttctctttgaatcacgcacgggtggtggttcttatggcgacaatgtatgcaatgtactgtgtcaaagtcagacttggatggcctggagttattctctcgatgaatcttgcattcttgtccaacgatatatttatttgtcttcttcaatggtgtgatactgttagtgaaaaaacacaagtggaggagccaacgaaacctgaaactgtaatagacgaagagtttccaggagagtttgagtattcttctgttcctgctgaagaagcagagaaaaaggttcatgaagataagtcgtccactaagccagcatcatcgggaattgttgcaagtaacctgaa

SEQ ID NO: 129815 - DNA, 549 bp, Arabidopsis thaliana
  unsure (1)..(549): unsure at all n locations
tattatctccttttctctcccggctctctgctcctctagtatcgccgannnnnnnnnnnnnnnnnnnnnnnnnnnnnnnnnnnnnnnnnnnnnnnnnnnnnnnnnnnnnnnnnnnccacgcgtccgcttgaactcgcaaatttcaagactgcaactgtagaagacattgcaaatgttcacgacaaggcttatgtctttggcctagaaaagtgtaggcaatggatgaggcttcagattcgggactaattttcattgaaggctctggaccaacatatgccacttcaacgacattccaagattcacttatcgcagcaggagccggaatggctttagttgattcagtgatcgcagcatccagaaacagcgtagatccacccattggttttgcattgataagacctcctgggcaccacgccgtgccaaaaggtccgatggggttctgtgtttttggtaatgtggcaatcgcagctcgtcatgcccaacgcacacatggtctgaagcccctcttcatatttggctttgatgttccccccagcgatgtttcatatg

SEQ ID NO: 129816 - DNA, 553 bp, Arabidopsis thaliana
  unsure (1)..(553): unsure at all n locations
nnnnnnnnnnnnnnnnnnnnnnnnnnnnnnnnnnnnnnnnnnnnnnnnnnnnnnnnnnnnnnnnnnnnnnnnnnnnnnnnnnnccacgcgtccgctctctgcaactcaaaaaataagattgtgaaaaaccctaatcgtaatctctcggttgagtcagtcttaaggtatcaatggggaaaaacaagagagagaggaaagatggagaagagaaatctccacacgctgccgccactgtttgcgtctctggctggccttattccatcaccaacgcacagcttgaagaagcctttagtgaagttggcccagtcaggcgttgctttctggtcacaaataaagggtctgatgaacaccgcggctttgcgtttgttaaatttgctttacaagaagatgttaatcgtgccattgagttgaagaacggttctactgttgggggccgtatgattactgttaaacaggctgcacatcgaccttctcttcaagagcgtcgaacaaaagcagctgaagggatctctgtacctgataattcccagggacagagtgacaaggacacttc

SEQ ID NO: 129817 - DNA, 876 bp, Arabidopsis thaliana
  unsure (1)..(876): unsure at all n locations
nnnnnnnnnnnnnnnnnnnnnnnnnnnnnnnnnnnnnnnnnnnnnnnnnnnnnnnnnnnnnnnnnnnnnnnnnnnccacgcgtccgggcctgcgaaaatgagtgaagagaacatttcatatacagttgtttctaataagaaaaaggagattagcgaaaactcaaaacaggaacaaagttaaaagagtgagagagaaagaaagagagaagatgaaggtacaggagggtttgttcgtggtggctgttttctaccttgcttatacgcagctagtcaaggggcaacctcgcaaggagtgccaaactagatgtggcaatgtcgcagttgagtacccttttggtacttctccaggttgttactatcccggagatgaaagtttcaatcttacttgcaacgagcaagagaagctcttctttggcaacatgccagtcatcaacatgtctctcagcggccagcttcgtgttcggctagttagatccagagtttgctacgatagtcaaggaaaacagactgactacattgcccagcggaccaccctgggtaatttcactctctctgaacttaacagatttactgtagtaggttgtaacagttacgcatttctccgcacatctggagttgaaaaatactcaactggatgcatatcaatatgtgattctgccacaacgaaaaacggatcatgttctggtgaaagttgctgccagatccctgtccctagaggatactcttttgtcagagtaaaacacatagctttcacaccattctactgtgcatctgtntaatccttgcacctacgcctntctcgttgagatgggatgtttgacttcatgcttgggagatctcacatctgcgaatgtactacgtccctgagactagatt

SEQ ID NO: 129818 - DNA, 922 bp, Arabidopsis thaliana
  unsure (1)..(922): unsure at all n locations
atacgactcacttagggaaagctgctacgcctgcaggtaccggtccggaattcccgggtcgacccacgcgtgcgctttcctctctctttcatctttcagatccagagagagagaaagagaacaaaacatgaagctttattctgtttccatcatcatcttcgtcttaattgctctctccaccatagttaatgctcaacaagctgctacagattcctgcaactcaactctacctctcaacgacctcaccttcaacaccagcctccttcaatgcaccgaagcttggactccccaaaatttcatcctccgatatgcaagaacggcagagaacacatggagctttatcttatcggcgccggattcaagcgctttcatcgggatcggattctctaccaacggtcagatgatcggaagcagcgcgatcgttggttggataccttccgacggcggttccgggactgtgaaaccgtacttgctcggtgggaaatctcccggagaggttaatcctgaccaaggagatctaacgatcgtcaacggctcgttgaagatcgaatccagtgtcgtcgcgtctttacatgagatttcaattgacggcgacgctggccgcggcagaagttctttctttcacggtgtgggacctgccggattcttcccatcttcgccggattttaaggtttagagagcaccgtttcgtgaccaccacggccatcaattataataaaaggttcgnaaagtgtggtaaagtttacccactttaaggtaaagaggcanaatggggtattaacattttcgnttggggaatttnnttntcgttggccnngtggtcgcaattaggaatgggcccctttggtttttnccaatggttcaannctggntttccnnggtaatgggaatttgggtggnttaaacggtnagccaaaattta

SEQ ID NO: 129819 - DNA, 678 bp, Arabidopsis thaliana
  unsure (1)..(678): unsure at all n locations
nnnnnnnnnnnnnnnnnnnnnnnnnnnnnnnnnnnnnnnnnnnnnnnnnnnnnnnnnnnnnnnnnnnnnnnnnnnnnnnnnnnccacgcgtgcggcctgagacatcatcatcacattaccaatcatctccaatggcaaaatacgccggaacaagaaccagaccggttgtatgtatctccgacgtcgttctcttccttggcggagctttcatgtcactaatcctcgtctggtctttcttctccttctcttcaatctccccaaatctcaccgtgaaaaacgaagaatcctccaacaaatgttcttcaggaatcgatatgagccaagatccaaccgacccggtttactacgacgacccggatctaacctacacaatcgaaaaaccggttaaaaactgggacgagaaacgaagacgttggttaaatctacacccttcgtttatccccggagctgagaattcggacggttatggtaacaggttcacaatcttgcgccgtgtaaaaacccaatcggagatcatttgttgcttccgtttttttaagacaaagttggttattgtcgggtccntgggcatgnnatttntttnggaacggttttttatcngaggtgatttttttgggggaacttcggnggtnaaggggggtgtttcancttgggggggggctgnggtgtnnngttttt

SEQ ID NO: 129820 - DNA, 1040 bp, Arabidopsis thaliana
  unsure (1)..(1040): unsure at all n locations
ccagcatctatacgactcactatagggaaagctcggacgcctgcaggtaccggtccggaattcccgggtcgacccacgcgtccgcaccattcacgtttctcttcttctcgtcacaaattccttatctctctctctctttctctcttatataaagagagaaatatacaaaacctccaagtacgtttcatcgatcctacctaattcatcaaaaaattgtgtgaggcttatttgatcaataattatgaattctggtcgtcgatcgttaatgtccgccacggcgagtctgagtttgctgttgtgtatcttcaccaccttcgtcgtggtgtcgaacggtgagcttcagagatttatagagccggctaaaagcgacggttccgttagttttatagtcatcggagattggggtcgtcgtggctccttcaatcagtctctcgttgcttatcagatgggaaaaattggagagaagattgacttagatttcgtggtgtctacgggagataacttctacgacaatggattggttagtgaacatgatccaaacttcgaacattctttctctaacatctacactgctccatgtcttcagaaacagtggtacagtggtttgggaacnatgactatagaggtgacgcaaatgctcagctgagttctgttctccgggaaatcgacagccgttggatttgtcttcgatcattttgtcgttgatgcagagttggtagagatgttctttgttgacacgactcctttcgtgaaagaatactacacagaagcagatggtcactcatatgattggcgcgcagttccatctcgcaactnttatgtcaaagctcttctccgtgatcttnaagtttccttaaagagttctaaagcaagatggaagattgtngttggtcaccatgcaatgagaagcattggacatcatggagatactaaagagctcaaccggaggagcttctttccgnttcttaaaagnggaccgggtgtttgatcctnttccanggaatgggccatnntccaatggctttnaaacaantnngggt

SEQ ID NO: 129821 - DNA, 358 bp, Arabidopsis thaliana
acggacgcgtgggtcagaagacgcattggcgcatcaaaacacatcttgccatcagtcatcttgatgtcagcaaaattaataatatcgtggctgatatgcgcaaggtgttgtctaaaaatcctcaaatcgagcagcaaaaaatacacagaagagtctttctggaggatatagatccagagaaccaagcccttaggattctaatatcctgttttgtcaagacttcacgttttgaagaatacctgtgcgttaaggaagcagtgctcttggatcttcttactgttattaggcatcacggggcacgtctagcaactcccattagaacagtacagaggatgcgtaatgaggctgaggtggacac

SEQ ID NO: 129822 - DNA, 871 bp, Arabidopsis thaliana
  unsure (1)..(871): unsure at all n locations
nnnnnnnnnnnnnnnnnnnatacgacacactatatggaaagccggcacgcctgcaggtaccggtccggaatacacgggtcgacccacgcgtccgcacagcttgtaaccaaagaacctatatcaccaaagcctctttcatccccacgtaagcaacaacaactacaaacagagaccaaggaagcaaaagcaagcgtgtcacaaaccaaactcactactctaactgcaccaggaccaccaccaccaccaccaccaccgacaacatcgcccacaaccgccgcgaaacgaaacgctgatccagcacagccatcaccaacagaggcataagaagcgtcacagactgtcgcagatttaccagaaccagcgtctgatattcagcgagcgtcatcgtcgaaagagactataatggaggaaacactaaggatcactcgtgggagtctgagaaaagctcgttctgcgggagcaccgcgctaagagaatgattaaaaaagaaaaggggaacacataattttaaatctctaacccctttagattggtttctctctaaaacagcaataatgagtcttatttgagtatttggtggtttaaggccaaggaaatctcagacttcagactaatattggatggggatctgcccttagctgagtaaaccaaataaaagttggaaaaaaattatggattacttcactacaaaggttgtttcaaggcaaaaacgtggccttcctctgtgacaaggtaaacccattgaccatcggggccctctgtaagaaaataaccttattacgggctttaaaaatagagtctaaaaaagcccccaattgaaaacgggcgtggcaacttgacggcggagaaacctgggataccgtaagggttg

SEQ ID NO: 129823 - DNA, 527 bp, Arabidopsis thaliana
  unsure (1)..(527): unsure at all n locations
nnnnnnnnnnnnnnnnnnnnnnnnnnnnnnnnnnnnnnnnnnnnnnnnnnnnnnnnnnnnnnnnnnnnnccacgcgtccgggcgcttgcgtttctcgatgtctcgagggatgctatggcattggatccacctgattttataactggttatgagtttgttgaggaagctttgaagcttttacaggaggaaggagcaagtagccttgcaccggatttacgtgcacaaattgatgagactttggaagagatcactccgcgttatgtcttggagctacttggcttaccgcttggtgatgattacgctgcgaaaagactaaatggtttaagcggtgtgcggaatattttgtggtctgttggaggaggtggagcatcagctcttgttgggggtttgacccgtgagaagtttatgaatgaggcgtttttacgaatgacagctgctgagcaggttgatctttttgtagctaccccaagcaatattccagcagagtcatttgaagtttacgaagttgcacttgctcttgtggctca

SEQ ID NO: 129824 - DNA, 527 bp, Arabidopsis thaliana
  unsure (1)..(527): unsure at all n locations
nnnnnnnnnnnnnnnnnnnnnnnnnnnnnnnnnnnnnnnnnnnnnnnnnnnnnnnnnnnnnnnnnnnnnnnccacgcgtccgcaagtaacaggccacgttttggctctttctctacaaatgtacggctgcagggttatccaaaaggcgttagaggtggttgaattggagcagcaagctcgaatggtgaaagagcttgatgggtctgtcatgaaatgcgttcatgaccagaacggtaatcatgtgatccagaagtgtatagagcgtcttcctcaggattggatacagttcatcatttcctcattctacggaaaagttttagctctttcaacacacccttatggatgccgtgtaatccagagggtactggagcatattgatgatatagaaacccaacggatcattatggaggaaatcatggattcagtctgtactctagcacaagatcaatacggaaattatgttatccagcatatcatacaacatggtaaacctcatgaacggtcagaaattatcaataagcttgctg

SEQ ID NO: 129825 - DNA, 589 bp, Arabidopsis thaliana
  unsure (1)..(589): unsure at all n locations
cctccagctagtgccggacagcctgcaaatcctccagcacagactcaacaacctgcagcagcacccgcaagtggtcctaatgcaaatccgttagatctcttcccacagggcttgccaaatgttggaggaaatcctggtgctggaacacttgacttcttgcgcaacagccaacagttccaagctctgcgagcaatggtgcaagcaaaccctcaagttctgcagcccatgcttcaggaactgggaaaacagaacccaaacttgatgcggttgattcaagaccaccaagctgacttcttacgcttaatcaatgaacccgttgaaggagggggagaaagtggcaacctccttggccaaatggcggcgggaatgccacagccacaggcgattcaagtcacacatgaggaccgtgaagccattgaacggcttgaagcgatgggttttagagggcattggtgtttgaagtttcttttnggtgaacaaggttnagggttgntnnaaatatnttttggtcnattnatgatttgggggtaaggtntttagttctttnccnactttnttttttggatggcccatnttngctttntggngg

SEQ ID NO: 129826 - DNA, 852 bp, Arabidopsis thaliana
  unsure (1)..(852): unsure at all n locations
cnnnnnnnnnnnnnnnnnnnnnnnnnnnnnnnnnnnnnnnnnnnnnnnnnnnnnnnnnnnnnnnnnnnnnnnccacgcgtccgcaaatgttggaggaaatcctggtgctggaacacttgacttcttgcgcaacagccaacagttccaagctctgcgagcaatggtgcaagcaaaccctcaagttctgcagcccatgcttcaggaactgggaaaacagaacccaaacttgatgcggttgattcaagaccaccaagctgacttcttacgcttaatcaatgaacccgttgaaggagggggagaaagtggcaacctccttggccaaatggctgcgggaatgccacagccacaggcgattcaagtcacacatgaggaacgtgaagccattgaacggcttgaagcgatgggatttgagagagcattggtgttggaagtgttctttgcgtgcaacaagaatgaagagttggctgcaaactatcttctagatcacatgcatgaattcgaggaataagcttcttcagattactttacctactctctatctttcgcattggtccatatgttttagctatatatgtgtgggatgccaaatccatgacctcgtcactttgtccatgttcatggctcagttctcagtttaaaatgaagtttgtcatgtgttctttctttggattgtcggtagtccctacaaaatatcttgttccagttatttttgttgaattggggacaggtattatttctgtatgtgcctcaatagttaaattatttaattattaataattttttttaaaaaaaaaaaaaaagggcggccgctttaaaagattccaggctacggaagggtgccatccacgttat

SEQ ID NO: 129827 - DNA, 355 bp, Arabidopsis thaliana
acgcgtccatcacattctctttcagataaacaaacagtttcttagtttcgttcgagatgagcggtgaagtttggagatggaacaagcaagcagagatgaattcgataagagattgtttgaaacattgtaattccatcgctatcgacacagagtttcccggatgcttaaaggagactcccatggacgcaagtgatgaaattcgttatagagacatgaaattcaatgtggacaacacccatctcatccagctagggttaacgctattcggcaaaggaatcactaaaacctgggagatcaacttgtcagatttcaacgaatctaagagcttgaaaaatgataaatctatagcgttttt

SEQ ID NO: 129828 - DNA, 1540 bp, Arabidopsis thaliana
  unsure (1)..(1540): unsure at all n locations
nnnnnnnnnnnnnnnnnnnnnnnnnnnnnnnnnnnnnnnnnnnnnnnnnnnnnnnnnnnnnnnnnnnnnnnnnnnnnnnnnnnccacgcgtccgtcagttgccacagcaggaaaactcatttgactgtggcctctttctgctgcactatctggagctatttcttgctgaagctccccttaattttagtcctttcaagatatataatgcttccaactttctttatctgaactggtttcctcctgccgaggcatcattgaagcgtactctgattcagaagttaatatttgaactccttgaaaaccggtcacgggaagttagtaatgaacaaaaccagtcctgtgaaagtccagttgccgtcaatgacgatatgggcattgaggttctctctgagagatgcagccccctaatagactgtaacggggatatgacacagacgcaagacgatcaaggaatcgaaatgactttgcttgaaagatcttccatgaggcacatacaagctgctaatgattcgggtatggtactaagagatttattcgattcaggatccaataacacaggatcattacttgaacaactacaacaaccattcgaggatccgtcttcgtttatcatcttagtacgactcgtcggaagagagcaagtgacatggaaactggtgccagtttatgtgtttgaacgctggagagggcaactttcaatgcatcacggaaactacctctccgagagcatctaattcattctcttcatggaaccttggtattcccctggtgcagaaggaagacgagactgatttgttatctgaaacttcgaatagttctaatgattcaaatcggtatcatagaagacacccccatagaaaatactcatgaagaagaaatcgacgagagtcctccaagagagaccgtctctttaaaatctgcaaccgtgggttctaacactgctgaccataccactgagaatgaagagcccgtttctacacacattgagcttgttgttccatcgagtcagaatgacagagatgaggagaagccattggagcatgatcttgaaattggggacaagacgagtgaagatgttggagatgattgtgatcaaaaggagccaatggaagaagaagatgagaagcgagctgcaaaacggccgaggctatcatctcccactggcgaagctgaggagatggagaaatagagattgtgtgggctatatcaacacaccacgggttttgtgttgggtcttggatggttagacgacttagagggtttatatcaaaccacctttaggaagtgtttataacgttgtaggagtattttacgaagaaaaaggaaagaataacgtctttcatcgttttttatgtaaaatttcgatacgttaacttaagagggttgatgaatatatagcccattttgtggtttttatttgaggttcttccgaggtaattttttacaaaaaaaaaaaaaaaaaagnnnnnnnnnnnnnnnnnnnnnnnnnnnnnnnnnnnnnnnnnnnnnnnnnnnnnnnnnnnnnnnnnnnngtacctaa

SEQ ID NO: 129829 - DNA, 528 bp, Arabidopsis thaliana
  unsure (1)..(528): unsure at all n locations
ccnnnnnnnnnnnnnnnnnnnnnnnnnnnnnnnnnnnnnnnnnnnnnnnnnnnnnnnnnnnnnnnnnnnnnnnccacgcgtccgcccacgcgtccggagatattgaggaatggctgcgaagaaggtttttggatcggcggaagcgagtaatttggtgacggagcttcgtcggagttttgatgatggtgtgacacgtggttatgaatggagagtgactcagcttaagaaactgatgattatttgtgataatcatgagcctgagatcgtcgcggctcttcgcgatgatcttggtaagcctgagcttgaatcttctgtttatgaggtatctctactgagaaactctatcaagttggctcttaagcagctaaagaactggatggctccggagaaggcaaagacttctctaacaacgtttcctgcatccgcggagattgtgtctgagcctcttggtgttgcgctagngatctccggcttggaactatccttttctgttgcccattgatcctgttattggggcaatttctgctg

SEQ ID NO: 129830 - DNA, 413 bp, Arabidopsis thaliana
ctcaatatttgttctcttctcttctctctctctttgcccgtgattactgattacggagttaattatttttattctgcgtacgttacgtaagagagatattgaggaatggctgcgaagaaggtttttggatcggcggaagcgagtaatttggtgacggagcttcgtcggagttttgatgatggtgtgacacgtggttatgaatggagagtgactcagcttaagaaactgatgattatttgtgataatcatgagcctgagatcgtcgcggctcttcgcgatgatcttggtaagcctgagcttgaatcttctgtttatgaggtatctctactgagaaactctatcaagttggctcttaagcagctaaaggactggatggctccggagaaggcaaagacttctctaacaacgtttcc

SEQ ID NO: 129831 - DNA, 703 bp, Arabidopsis thaliana
  unsure (1)..(703): unsure at all n locations
agcaaagttaggtgtccgtcatggcatgtggggagctgtcaagaagctaaactctggtttacgagcgtaccaatccgccagaaaatcagactcatctctatctcggatcgcccaaatggcaagaatcactacaaaactgaacatggattctgcagaatcatcttcaagagatgaagacacaagcagagcaatggaatatgcgagacaacgggaccatttgagaatggactggaaatgggttgttgtaggaggtgtcgcattggcttgtggccttcactctgggatcattggcaaggctttactggctggagctggccagagactggctcgtaggtgagaaaccttgtcgtattcttattatatcttcccttgacagaaaagagaaacatatgcatataattaagggaaatgtattatttttgcaactcctctgagaagggcatgtggttttggtggtgaaccatgtagagtagtagctttaaactatggagtcataagttatttgagttctatcttgtaccacaggatagtgagatatgtattttataaactatatgaatctacatagcttctaaaagcttaaattctttgcatgtgacaaaaaaaaaaaaaagaaaacgaagnnnnnnnnnnnnnnnnnnnnnnnnnnnnnnnnnnnnnnnnnnnnnnnnnnnnnnnnnnnnnnnnggtcctaannnnnnnn

SEQ ID NO: 129832 - DNA, 514 bp, Arabidopsis thaliana
  unsure (1)..(514): unsure at all n locations
cccanaagcttgccatatnataaacaccagagccattaacacaccgaaattaaaaaacgttaaggaaccgaaaatatgatgatgaaagtcgttgatctgtctctctctcatcctcctcccacttgtctccgtcgtggaaggtctcggtggtggtggtggtcttggtagccggaagccgatcaagaatgtatctgatccggatgttgttgcggtcgccaagtatgccatcgaggaacataacaaggagtcgaaggagaagttggttttcgtcaaggttgtggagggaacgacgcaagtggtctccggtacaaagtacgatctgaaaattgcggcgaaggatggtggtggtaagatcaagaactatgaggctgttgttgttgaaaagctttggcttcattctaagagccttgagtctttcaaggcgttatagatctttaattggatttttgtttagatccgtctcttctctcgggtatatctatctagcttttgatgatttgagactctgacgttt

SEQ ID NO: 129833 - DNA, 314 bp, Arabidopsis thaliana
aagacgcgtgggttcttctctctctctctgcaaattcaaaacactgaaaaaaacctctcttcattttttaactccctctctctctctctctctatggagagacgaacgagacgagtgaagttcacagcagaatcgtacggtcacaaacgtagcagctacaccatctaacgggtctccgacactggtccgtatcactgttactgatcctttcgctactgactcgtctagcgacgacgacgacaacaacaacgtcacggtggttccaagagtgatacgatacgtgcaggagattagattctgccaaggtgaatctt

SEQ ID NO: 129834 - DNA, 458 bp, Arabidopsis thaliana
tgaaactggaatagtcacgggtgaaagtttcccgggtaaggttaaatccccgggagtagaaagaggaggaagtgagtcatggtcgttttctggtgggttttgggacaaagttataccaaaaaaaaaaaggtttcatggaacatctcataatacattcttgttttttcttttctctcatatgttcttcaaccccttgaggagggagaggtctcaggtttttatcaagtgggggcattattagaggacaatcccttgattttttcttttgttttcttttattatttggttagttgcagtctttgcatcatcattttgtcttttgggggggtttgtatgtttgattaacagcattattcacatttttatttttataaaaaaaaaaaaaaaaaaaaaaaaaaaaacaaagggcggccgctctagaggatccaagcttacgtacgcgtgcatgcgacgtcata

SEQ ID NO: 129835 - DNA, 556 bp, Arabidopsis thaliana
  unsure (1)..(556): unsure at all n locations
nnnnnnnnnnnnnnnnnnnnnnnnnnnnnnnnnnnnnnnnnnnnnnnnnnnnnnnnnnnnnnnnnnnnnnnnnnnnnnnnnnccacgcgtccgcttctgcccaaaccaaaaaaaaaaagtttccagatccaaaattacaacaaagattctcaaactcctaaaacttcatcttaaaaacttaacaaacaaaattctaattacgaaaaatcccaatcctagtgtttctcttgttggcttttttgtttgatctgtctgtaattttttttttgtttgatctgtggtttgttttgtaaaaattccactcgtcagcactcagattaatctcttgtccattgatctatctatcgacttgcttcgacttttgatttgagatttgcgaaaattagggtttttgtttcgaaattagtgtttgtgtcacctagatgaacgatcaatctaagctgatgaatccgccacctccacagcagatgattggtcagcctccaccgcaacagaggatgaatccgccgccgccgtcacaggtaccacggattatgaaccagagtccgttattagg

SEQ ID NO: 129836 - DNA, 858 bp, Arabidopsis thaliana
  unsure (1)..(858): unsure at all n locations
ataccgnaaattnccagagganagaccccacgncntccggttgcataatggttagtttgttgatgagccaacaatgattagtttgtggttagcttaggtcgagtaaaggcgcaggcaaaagaagcagaagctagtccaagtccagtgggagtgggagacgcattcagtaatgtgaagcatcttctcctgccggtgattgatcggaatccttatctttctgaaggcaccagacaggctgctgctacaacaaccagcttggcaaagaagtatggagctgatatcacagttgtagtcattgacgaagaaaagagagaatcatcttcggagcatgagactcaagtatccaacatccggtggcatttgtctgaaggtgggttcgaggagttcaagctgttggagaggcttggggaagggaaaaaagcgacggccataataggagaggtggcagatgagctgaagatggagctggtggtgatgagcatggaagccatccactctaagtacattgacgccaatctactcgctgagttcatcccctgccccgtcctcctcttgcccttgtgatcgctcccccaaatgcttatatgatagacataccacttgttttatttttctctgtgtttggttgccgtagaagagcattactaggagaggggatggaaatgtgtcaaggtgtgagatgcatgtgtcaagcatttcctgtcttatcatggttgttgttgttgtgtcctttgttttctccgttactcacatactaacgtgttcggccccaaattaaaaaacaaaaaaaaagggcggccgctctagaggatccaagcttacgtacgcgtgcatgcgacgtcatagctggtctatagt

SEQ ID NO: 129837 - DNA, 476 bp, Arabidopsis thaliana
  unsure (1)..(476): unsure at all n locations
ttcggtgggcagaaccaaaataagttaacaaaaaataagtttgttttctgggtgtgttttctggaatcgtcgcgattgttgctgaactccgtcgcaacttcaatggcatctgctcactccatagccgccgtttctgttctcgatgcggcctccaagcaagcaacacttccttcttcttcttcttcttcctctgcgctctaccctctttcttctcttcgatctaaacctcgccagcagcttctctccctacgcagtgtcgctctcaaaggtcgagtaaaggcgcaggcaaaagaagcagaagctagtccaagtccagtgggagtgggagacgcaattcagtaatgtgaaggcatctttctccctgcccggttgattgntcggaatccttaatcttttttgaaggnnnccagncagggttgnttgtttacaacaancccagctttngaaaaannaggttttgggggcttgtntnacaa

SEQ ID NO: 129838 - DNA, 473 bp, Arabidopsis thaliana
agtgaatccataagagaagacaacaaaagatctatctctataccacatattacactttttctccaatggcttctctgaagctttcaccttcttctccaatctccatttctaaggttggtgtgattccttcctctaagaaaggactttcatttcttgtaaaagcagagcaccattcctcgtcttcttcttctcatcttcaagataaatgtcagagacgtctgattgtaacatttggtgttgttgctccttggatctcattgcttagtagagctccattatcatttgctgcagaaagcaaaaaaggattccttgctgtctctgacaataaagatgcttatgcgtttctctatccatttggttggcaggaagttgtgattgaaggtcaagataaggtatacaaagatgtgattgagcctttagaaagtgtagtgtgaaattggtcccaactagcaaacagactattaaagaatttg

SEQ ID NO: 129839 - DNA, 860 bp, Arabidopsis thaliana
  unsure (1)..(860): unsure at all n locations
annacgnnggtacgaacggtcatcgcataagtcttgcatcatcgnaattncgcgtgccgctttcttagcctctcgtttctcatctccgagaaccaccaccgatgctcctccgtcttcttcgccggtgattttgtcttccgattgtaatcaatnagtcttcgtgtagtttcctccgttttctccggaatcaatcgaatccctaacctccacgagactcatactcttcttcgctctcatgtcttctctttcttcttcaaaccggcgaatatcggtagtatacggcgactggtcttatccccatcatatggagaccggagcagagatagtgttggctccgccgccgatgtttcgtcatctattctcgacgacgagcttctgagcagcgtatccgccgttagagatgccgatgaaagcgntcgnaatgntttctgatccggttcgggtcaaatcgcggttggaatcgttgaacttgaagattgccgttcgattatctccgcttgctgtcagtcgcggcaatgtgggccttccgttgtcgatattctacaccatgcgggcgggtttcgatttaggtggaagtgacaatgatcgatggagttggtcaaggcctgatgttgaagtgtacacgatgttggttaatggtcttgctgcttccttaagggtttctgattctttaaggattatcagagatatttgccgtgttggtatctcccctgctgaggaggttccctttggtaaaattgtgagatgtccgagctgtttgattgccatagctgttgcacaaccacagcatggagttcagattgtatcttgcgctaattgccgttaccaatacgagcttttctctggtgacataactagca

SEQ ID NO: 129840 - DNA, 621 bp, Arabidopsis thaliana
  unsure (1)..(621): unsure at all n locations
gagctcatcattttccaccgataacttttctcagctccgacaaaaatggctgcaatcaccatttcttcctccttgcacgcctcagcctctccgcgtgttgttcgtccacatgtttctcgaaatacccctgtgatcaccctctattcacgcttcacaccatccttctccttcccatctctctccttcacactccgtgacacagctccgtctcgtcgtcgttccttctttatcgcctccgccgtcaaatctctaacggagacggagctgcttccaatcacagaggctgattcaatcccgtccgcttccggtgtatacgctgtatacgataagagcgacgagcttcagttcgtcggaatttctcggaacatcgctgcgagtgtctctgctcatctcaaatctgtgcccggagctttgtggctccgttaaggttggaatagtagaagaaccaggtnaagcagtttaaaacaagcatggnattatggggtngaggacntttaaaggaactggaaagtccgcgggggnanantanggggaaaaaatttgnaaaaaacccgggnanaatcggancgggnaaccaggngcatgtanncacggncttgggnatgnttgnttggaaagant

SEQ ID NO: 129841 - DNA, 678 bp, Arabidopsis thaliana
  unsure (1)..(678): unsure at all n locations
ggcacgagcaaaaaaccctaacaaaaatggaatcggaaagcaatttgcttagggtttcttcctccaagacttcgattttcatctccacgtttactctctcttcctccttctgctcctgcttcttccacatttgcgacgcgtcacaaacttgattccagacaaaccctcctttggaacaaaccgcaattgagccgagttcgtgtagcgtgttcttcttctcaatctgactcaagacctgagaagaagcaatcggataagagtaactatgctcgagctgagctgttccgtgggaaatcaggttctgtttctttcaatggtctgactcatcagctggttgaagaaagtaaactggtttcagctccgtttcaagaagagaaaggttctttcttgtgggttttggctcctgttgttttgatttcttcgttgattcttcctcagttcttttctaagtggtatcaattgaagctacccttcaaaaacggcactgttgctgaaaattgttacttctttttgctttgagacggtgttttatgctgggctttcgatattcctgtctgtganctgaccnagttcagaggccgtccttanntttcanctccaagagatggggctnaccnctgncttagggggtaccttaggntgaattccnacgntngggttaaaagtttnggncccgga

SEQ ID NO: 129842 - DNA, 509 bp, Arabidopsis thaliana
caaggttgcaacagaatctcaggaaacatcaactccgacattgttagctccttgtgctggtcattctttgatagcatgggacaacaagctgctgtctatcggtggtcacacaaaggatccctcagaatctatgcaagtgaaggtctttgatccccataccattacatggtcaatgttaaagacatatggaaaaccaccggtttcacgtggaggccagtcagttacaatggtgggtaaaaccttggtgatatttggcgggcaagatgcaaagagatcacttctgaacgatttgcatatacttgacctagacacgatgacctgggatgagatagatgccgtgggtgtatctccatctccgaggtctgatcatgctgctgcagtgcatgcagaacggttccttcttatctttggtggcggctcacatgcaacctgtttcgatgacctgcatgtccttgatttgcaaactatggagtggtcaagaccagcacagcaaggtgatgcaccaactc

SEQ ID NO: 129843 - DNA, 603 bp, Arabidopsis thaliana
  unsure (1)..(603): unsure at all n locations
cgaagctattccttgtgatcaattcgacgttgcgtttcaggcggtggagctttggatcgccgatcgtgctgttctcccagttgagaactctctcggtggttcgattcatanaaattacgatcttctcctccgtcaccgtctccacatcgtcggagaagttcagatcccggttcaccactgtctcttagctcttcccggagttcgtacggattgcatcncgcgagtgatttcgcatcctcaagctctggctcagacggaaggatccgctcaacaaactcactcccaaaagcagccgattgaaagcgtttcacgacacagccgcggcggcggaatacatcgctgctaacaacctccacgacacggcggcggtagcgagcgcaagagcagctgagctctacggacttcagattctcgccgacgggatccaagacgacgcaggaaacgtcacgcgcttccttatgttggcgcgtgatccgatcattccccgtaccgatcgtccgtttaaaacgagtatcgttttcgcagctcaagaacataaaggaactagcgttttattcaaagtgctttccgcgtttgcgtttcgaaacattagtttgacgaaaa

SEQ ID NO: 129844 - DNA, 490 bp, Arabidopsis thaliana
ttttcaattaatgacatcttcttcttctcctttcactgcaaaaccgaaagcttgagactgtgagattatgtctatggcatcggcttcttcttccatcgatcacttcatcacctttcgtcatcttgatcttattctccactgtataaaatcagcgagattttaagggattgtgaaggtaccatcttaaacacaaaatgggtacttctactacagagagtgtggtggcgtgtgaattttgcggcgagagaacggcggttctgttttgtagagccgatacggcgaagctttgtttgccttgtgaccagcacgtgcactcggcgaaccttctctcgaggaagcatgttcgttctcagatctgtgataactgtagcaaagagccggtgtccgtacgttgcttcacagataatctcgtattgtgtcaggagtgtgattgggatgttcacggaagctgttgctccttcgcgacgcatgaacgctccggcgtggaagg

SEQ ID NO: 129845 - DNA, 600 bp, Arabidopsis thaliana
accacgcgtccgggattaagacataaacaagacaaaacaagaagaagagatttatttattacataaaaatggttgtcgccaatgatctctcgtccaagattctccccagagttctcatcgtctctcgtcggactctccgcaagaacaagtacgtggacttcgtaggagaataccatctcgatctcatcgtctcctccggtgccgtccctgtcattgtcccacgtgtcaatgggatccattctatgctccagagcttcgagcctattcatggtgtcctcctctgcgaaggagaagatgtcgatccttctctctacgcggacgatgaattatcagacctctcgccagaagacatggaggagattaagaaggcgcatgcagaggacatgaccatcggaccgagagaaagacagcattgagctgactctagctagactctgtctcggaaagaaacattcctttcttaggcatttgtcgtggctctcagattctcaacgttgccgcaggtggaactctttaccaagacatcgacaaagaactcggaactacgatgacaacgacaaatcatatagattatgacaactacgatgggcacagacacga

SEQ ID NO: 129846 - DNA, 597 bp, Arabidopsis thaliana
gtcaatgagttgataaagaaacagaagttgtcagcagttagaaagatcttgcagtgacatgactatacgaaaccatggatcgcagatgttagggctaaggttggaagtcgtctaatagagttactcgtaagaacagcttatatacagtctccagctgatcagcaagataatgatctgcctgatgtccgacctgcatttgtgcataccttcaaggtagcgaaaggaagcatgaattctgggagaaaatatggtgtaatcgagtgtgaccctttggtccgcaaaggcttgggaaaaagtgggagatatgcagtgatgccatacatgccaatgctggttcctcctctcaaatggtcgggatatgacaaaggtgcttacttgttcttgacgtcttatataatgaaaactcatggagccaagcaacaaagagaggcacttaagagcgcacctaaaggacaactacaaccagtctttgaggccctggatacgcttggaagtactaaatggagagtaaataagcgagtcttaacggttgtagataggatatggagcagtggcggatgtgttgctgatatggtggatcggagtgatgttccttta

SEQ ID NO: 129847 - DNA, 598 bp, Arabidopsis thaliana
  unsure (1)..(598): unsure at all n locations
anttccattttccnagcttatcccccttgggaactgtccntagtcggcggatccgggnacccacgnccggccttaagggtcttttggacgatgaaacaactaatccgccgtttatcgcgtgtcgcggactcaacacagtatagcctcctccggtctgaatcccagcgtggccgcaccaagaaggagaaacacaaatcttgggttcccgaggggcacgtgcctgtttacgtaggccacgagatggagcggttcgtggtgaatgcggagctgctcaaccaccccgttttcgtagcgttgctgaagcagtcggctcaagagtatggatacgagcaacaaggagggcttcgcatcccttgccacgtgcttgtgttcgaacgcatcttggagtctctccgtctcggactcgccgatcgagtcacatgacctacacgatctcttttgagatttaagaagtttctagtgtcttatagtatcttgctagctataggggaaacagagttatgtaaattacatattctttatctaattggtttatcagatctatttgaagatgggattatatatataagtgaaataatcgagatttaaggcttttatt

SEQ ID NO: 129848 - DNA, 716 bp, Arabidopsis thaliana
  unsure (1)..(716): unsure at all n locations
aacccacgcgtccggccaagccagcatgaacaggcagcattttctgcaatgtgctcaagggataatgaacaaacattttgaaaagctcgttcaatgtgatcatcgtctgttccatctaagccgacagccggagatagctattgactctccctactttgatgcacggcaatctatttttgaggatccaagtgaatcaaaaggccatccttttgggaatttgaatcttagtacaggtccttcgatctctgggactcagaatttagcatctcctgttggggctcagtcatcatctgagcatatgtatctgtctcatgaagcaccatcacccagctcagtgatagatgctcgtgcaaatgaaggaattgggggttctgaagcagtcaattcaagaaacagaacagattgtggtcagatcgaagcacctggaatacaccaatctatgtcactgagtgatttccttgcggttctctgtgatacaaaaaacacaacggatttgaatctggctgacgccgtagatggactacaccaatctatgtcagttagtgatttcggttgcatattttatctgattcaaggaaccattactgattcagatcagataaaggtacctggactacaccaatctatgtcagtgagcggtttcggtggcttctctctgattcgcctgntgaagtcatccgaccntttngggaattttgggcnatgaaccagcantt

SEQ ID NO: 129849 - DNA, 457 bp, Arabidopsis thaliana
ccttttcctgctgcttctcgtgatgggttgctttctggtgatgtaattctcgctgtggacggtactgagctgtctaaaaccgggcctgacgctgtttcgaagattgttgacattgttaaaagaaacccgaagagtaatgtggtgtttagaatcgaaagagggggtgaagatttcgatattcgggttacaccggataagaactttgatgggacggggaagatcggtgttcagttgtctccaaatgttagaatcactaaggtgagaccgaggaacattccggaaacgtttagatttgtgggaagggagtttatggggctatcttctaatgttttggacggtttaaaacaaacattctttaacttctctcagacagcaagtaaagtagcaggtcctgtggcaattattgcagtgggagcagaagtggcaagatcaaatatcgacgggctttaccaattcg

SEQ ID NO: 129850 - DNA, 1059 bp, Arabidopsis thaliana
aagtctctgattttgcctttggttatgagttcagtctcttctctctgtatccacattgtcctctgttggagcttggtctttaagtttggtcttggaagcctcggtgcagctattgcgatcggtgtttcttactggctaaacgtgactgttcttggattatacatgacgttttcttctagctgtagcaagagccgtgcaactatctccatgagtttgtttgaaggaatgggagagtttttccgggtttggaatcgcatctgcatctatgatttgccttgagtggtggtcattcgaatttttagtcctgctctctggtattttaccaaatccgaagctagaagcctctgttctctcagtctgtctttcaacacaatcctccttgtaccaaatcccagagagtctcggtgcagcagcaagtacaagagttgcaaacgagttaggagctggaaacccgaaacaagctcgaatggcggtttacacagcgatggttataacaggtgtagaatcaataatggtgggtgcaatagtctttggtgcaagaaatgtatttggttacctattcagttctgaaactgaagttgtagactatgtaaaatcaatggctccactgctttctttatcggtcatattcgatgcccttcacgcagctctctcgggtgtggctagaggatcagggaggcaagatattggggcatacgtaaacctagcagcatactatctctttggaataccaactgctatactattagcttttgggtttaaaatgagaggaaaaggactctggattggaattacagttgggtcatgtgtacaagctgttttgctcggtcttatcgtaatcctccctaattggaaaaaacaggcgagaaaggctagagaaagagtgatgggtgatgagtatgaagagaaagaaagtgaagaagaacatgaatacatcagctaaatcaaacagtttccattccatccccattaatccgttaaatgttgtgtgtttttattaattcgatgtttggtattgttgttttcgagtatagtaatgaaggaattgattgttcccat

SEQ ID NO: 129851 - DNA, 372 bp, Arabidopsis thaliana
attcgaaaccctaacaaaagccctaatttacgaaatacgccgaatcgttgacgagaatggagtttgacgaatacgagtacctggagaagacggttgaggaaggagctgggtcgaataagaaaaaggaagagagtgggaacgagaggagcgagaggagttacagaaagagagaaggaggagagaggcagggggaagaaggaggtgaagaagagcgggttagcagtcggagtaagaagtctcgcggagacggcgaagagaacggtggtggtaagagggatcgggagagagagaggcataggagcagcagagacaaggatagggagagggataaggttagagaaggatcgagagataaagagagcgatcgaaaga

SEQ ID NO: 129852 - DNA, 739 bp, Arabidopsis thaliana
  unsure (1)..(739): unsure at all n locations
cntccctacccntttncaagacgggccntccnaaaaaccttgtnccttgnatttgccanccgggtttccnntganngattntgggccnccgatgatttcccgaccaagggacttgtagagattggtggatgaaagaagcattagatgttttggttgagagactttcatcaccaatgaatcaaccaaaggaagagaagactatgtcaatctctattgaaacaatgtgttgatgatgaagctgatgattgctaaattgctgattgttgatgggagtttttatgagctaatatggatctctgtaggtattaaatagatgggtctcaattagttattgagacggctaaaaaaatctatttcgaaaagccgatgcagagagcatggacaaagaaaaagatggtagagttttaagttttggatcagaaagattaacatcatgtgatttaagaagtcttgtgtttgtgtttataatgtttctgcaagaacttcttaagatatgattaagagggaagatgataaacttagagtgcaagcaaaacctgtataattgtgtttccctctgtttatttttcctctctctttgaatttgcaatggagacatttgatttcatccaaaaaaaaaaaaaaaggacggccgctctagaggatccaagcttacgtacgcgtgcatgcgacgtcaaagctcttctatnnnnnnnnnnnnnnnnnnnnnnnnnnnnnnnnnnnnnnnnnnnnnnnnnnn

SEQ ID NO: 129853 - DNA, 538 bp, Arabidopsis thaliana
gattatttcagcaccaacttggaaaatgggattttttaagcatatgcagaggaacatactatgaaggactaatgttccctatgcttgttacagaacaacttgagctttggcctgaacaacatgttaggcaaagaatctgggtcagtagctaaataaaactatgttttctttagatattttgtaacatatctagtgttttactgattgatatgaatttattggggacaacagatgaatgtaaccgaagcaagaggaagctttgtagagattggtgggatgaaagaagcattaggatgttttggttgagagaccttttcatcaccaatgaattcaacccaaaaggaaggggaaggctattgtcaattcccctattcgaaacaatgtgttgatgatgaagctgatgattgctaaattgctgattgttgatgggagtttttatgagctaatatggatctctggaggtattaaatagatgggtttcaattagttattgagacggctaaaaaaatctatttcgaaagccggtgcagagagcatg

SEQ ID NO: 129854 - DNA, 984 bp, Arabidopsis thaliana
  unsure (1)..(984): unsure at all n locations
cggaaaaaataacaatttacttccctttgttcagacgtttctttattcttcttccttccttcttctccttcttcttgatcgtgttcagaaatcatattcatcacctctctctctctatgtctctatatttggattctttataacatgtgagatcgatctatttttgatcagagacagagagaagactagaagaagcaaagaatatttcaagaatgatgaagatgaatacaggaacatcgccgtcggtcatcggcggcgggactagtggtaatgagtgggagtctcgacctggaggaatggttgttcaacgtcggacagatcagaactccgatgtgccacgtgtctttcgtgttcgggttaaatacgggtcggtttatcacgagatcaacatcaattcccaatcttccttcggagagttgaagaagatgttgtctgatcaagtgggacttcaccatgaagacatgaaggttttgtacaaagacaaagagagagattcaaagatgtttcttgatctttgtggagttaaagatcggtcaaagcttgttgttaaagaagatccaatttctcaggagaaacgtctccttgcaaaaaggaaaaacgccgccattgaaaaagcttctaaatctatctctgatattagtttcgaagtcgacagactcgccggacaggtgtcggcgtttgagacggtgattaataaaggaggtaaagttgaagagaagagtcttgtgaatctgatagagatgttgatgaatcagttattgagacttgatgctattattgctgatggtgatgtcaaattgatgaggaagatgcaggtgcaaagagttcagaagtacgttgaggcactcgacctcttgaaagtcacatacctctgccacaaaagtttgaagtcaacaaagtcccgtcccgccacaaaccggcaaaacggacacggngnttttngcaacggggtnttgttnatcngtttttnnatgaatgtgacgt

SEQ ID NO: 129855 - DNA, 457 bp, Arabidopsis thaliana
gaagaaagatgtaaggagagcaactggtggtagtagtgacaagacaatgaatagcaatagcagtaccaacgaagaaagtttagtcaacggtgaagctacaatcagctagtggaatgcaaacaagatcactgttcatatctgtgtctcgtgagactcattacgaaaggaggagagtttcttccaacggaaccacagtttcttgaagctgtgcatatatgttggcaagtctggtgtggaggaggataacatttttgaagacgtcatatgttgggagattctcagacatttcatcagttctttctgttgtcttctctcttgcaaactcattagtccgtttaggttacttgatatattaatgtttttgactaaattttatttgggatagatgatttttcttcagcttgtcaaagtttcccaatttttgttatgtttcgagttattagatggacttggcaaa

SEQ ID NO: 129856 - DNA, 463 bp, Arabidopsis thaliana
  unsure (1)..(463): unsure at all n locations
cnnnggnctcanttgctcgnnttnctgancggtggggaaggnttgtaccnacttattnccgagtgtcctgtgcgagtacctctccaatttanctgaacactttaccngntctactccaattgtcaggtcaatggttcaccnagaggagacaagccgtctcctactttgtgaagcaacggccatagtcatgcggaaatgcttccaccttcttggaatcactccggtttacaagatttgatcacatcacaagtaaacgacccaaaggaaaatgtttttaattcgttttgacaatttttctgcacaattagtgtaaaaggcgttatttggccctaaattctctctgttctcatttagcttggggcaaacttgtatacaaatgaatacaatgttaaactgaacccagaaggttgttttgtcatgtcattgaactgatttgggtgaatcatgaaatggtttaanggtt

SEQ ID NO: 129857 - DNA, 645 bp, Arabidopsis thaliana
  unsure (1)..(645): unsure at all n locations
cgttttttcccccncccnaaagggntacttctcatntccccntttcaccatggnctttccggatccctgctaaaacttnccaaatncccncngntttnanacctccgggggagcattggggncccgggcaattaaggcaggccttggaagcccttaaggcaaagacacccggcttgctctggaattgatgggtgaacgagatgaggagttggaggaacttcgagcggatatagtggacttgaaggagatgtacagggagcaagtgaacatgctggtgaacaagatccaatgaggggcaagggaagatggtgttggcaagctcaggctcacgagtaggaccacctaatccttgtttccccaatattgtatagctctataagctaccaacctaagcccactatattcatttgtcgttttgtctctcaggtgttggttgaacttgaggctttttaaaacaaacttttgctgctcgaaagaagatttttcttacagtgaattcgatcgtaaattattattttggagacgagaataaacttttgtctgtgtgacttgtctacgtatgtaacatgtattgtctgtgtagtagaaaaacggtggagagacccattaataatgggattcgttgatgtagcaatccatccatat

SEQ ID NO: 129858 - DNA, 589 bp, Arabidopsis thaliana
  unsure (1)..(589): unsure at all n locations
cccccccnnnnnnnnnnnnnnnnnnnnnnnnnnnnnnnnnnnnnnnnnnnnnnnnnnnnnnnnnnnnnnnnnnnnnnnnnnnnnnnnnnnnnnnnnnnnnnnnnnnnnnnnnnnnnnnnnnnnnnnnnnnnnnnnnnnnnnnnnnnnnnnnnnnnnnnnnnnnnnnnnnnnnnnnnnnnnnnnnnnnnnnnnnnnnnnnnnnnnnnnnnccccgcgtcgggaacgagatgaggagttggaggaacttcgagcggatatagtggacttgaaggagatgtacagggagcaagtgaacatgctggtgaacaagatccaatgaggggcaagggaagatggtgttggcaagctcaggctcacgagtgttggttgaacttgaggctttttaaaacaaacttttgctgctcgaaagaagatttttcttacagtgaattcgatcgtaaattattattttggagacgagaataaacttttgtctgtgtgacttatctacgtatgtaacatgtattgtctgtgtagtaaaaaaaaaaaaaaaacagggcgcccgctctagaggatccaagcttacgtacgcgtgcatgcgaggtcatag

SEQ ID NO: 129859 - DNA, 742 bp, Arabidopsis thaliana
  unsure (1)..(742): unsure at all n locations
ccccccctcgagtacgacggtctagcataagcttgatatcgaattcgcggccgccctgtatatagcccgagacgaaggctactggattataagcttctcagttcatgcatactcagatcggttaggctgcgttgattctctctttgattacgaaagcttaagatctcttttggtgggattttggcgctcatccatccatgggggatcgcagatcttttggctctataactcctcctctccaattagatatggaacagttgctgtcagaagcccaacacaggtggcttaggcctactgagatttgtgaaatccttcagaactatcacagcggtcatatagcatcagagtctcccacccgacccgccagcggttcactttttctttctgataggaaggtactgagatattctaggaaagacggacatatctggaggaagatgacagatggctacaccatcagacaagctcatgagaagctcaaggtaggaagcatagatgtgctacattgttactatgcacatggggaagccaacgagaatttccagagacggttgctactgggatgcttggaacaacatttgatgcatatcgtttttgtgcactacttggnaggtaaagggtaccggnccagtataggatgnaagnaacaatccaatcctgnaatgnccantccaggnaattggtccanagnagccacnagccatgcacatatgngaatccgaccggggngcnncagcaggna

SEQ ID NO: 129860 - DNA, 530 bp, Arabidopsis thaliana
  unsure (1)..(530): unsure at all n locations
cnnnnnnnnnnnnnnnnnnnnnnnnnnnnnnnnnnnnnnnnnnnnnnnnnnnnnnnnnnnnnnnnnnnnnnccacgcgtccgggttagggttcgttgattctctttttgattacgaaagcttaagatctcttttggtggatttttgggtttatccatctatggtggatcgcagatcttttggctctataactcctcctctccaattagatatggaacagttgctgtcagaagcccaacacaggtggcttaggcctactgagatttgtgaaattcttcagaactatcacaagtttcatatagcatcagagtctcccacccgacccgccagaaggtactgagatattttaggaaagacggacataactggaggaagaagaaagatggtaaaaccataagagaagctcatgagaagctcaaggtaggaagcatagatgtgctacattgttactatgcacatggggaagccaacgagaatttccagagacgttgctactggatgcttgaacaacatttgatgcatatcgtgttt

SEQ ID NO: 129861 - DNA, 1037 bp, Arabidopsis thaliana
  unsure (1)..(1037): unsure at all n locations
ccnnnnnnnnnnnnnnnnnnnnnnnnnnnnnnnnnnnnnnnnnnnnnnnnnnnnnnnnnnnnnnnnnnnnnnnccacgcgtncgcggacgcgtgggaaacgattttctgtctgttctctctttgctctctcgccctctcttgctcttctgggttcgtcttcctcggctagggtttatcagtggtttgtcaatggaggcttcatcatctcaaccatccgattcttctgatcaaactgcttccaagttcctttctgacctcccgtctcgaggtttcttgtcttctaccgtcgtctcttccaatccgggaagcttgcgggtctacatttgtgagcatgacacatctcccccagtaattgggagtctcaggattatcagtttcagaataaaaggacagcttatcaaaacaaaccagcaaaatatactaatcagatctctcttgttaaagaagcaaaaaggcgaatctagttctaaagactcaaaaggaactgctgaagatggtcctaaaaagagggctgcaaatagagctctggacgacagaagctcagctaaaagagctgctaatgcatctagacaagaaggatcaagcagtcgcacaggcgaaagagactttcagtctttgaccgttgagaagctccgcgccatgctcaaggagaagggccttccaacaaaaggaagaaaggatgagctcattgcgcgtctgaagagtgccaactgaaatgaagttgagaagggtgctctggtgaatatatgtatctttagaggtttcccaaataggagagaattgttgttgttcttgatcaaatacaaatccttttgatctcatctggagaatttgttatcaggaattaggctactttagtttatgaatccggtttggtgacatttgtaatatggatttcatcttttgataaagcaaaccaaaccaaaccaggcggtcttggttaattaaaaaaaaaaaaaaaaggcggcccgctttaagaggatccaaggcttacgaacgcgtgcatgcgacgtcatagatcttctatagnnnnnnc

SEQ ID NO: 129862 - DNA, 922 bp, Arabidopsis thaliana
  unsure (1)..(922): unsure at all n locations
nnnnnnnnnnnnnnnnnnnnnnnnnnnnnnnnnnnnnnnnnnnnnnnnnnnnnnnnnnnnnnnnnnnnnnnnnnnccacgcgtccgcccacgcgtccggagcgttcagatttctcttcaacataatcatggcattgaccttcttcttcttgttatcgaatttgttcttctccggagttatgtcaaggagcttcacattttcaaacaaatgcgattacacagtgtggccgggaattctatctaacgccggagtttctccattaccaaccaccggcttcgtcctcctgaaaggcgagacgcgtacaatcaacgcaccgtcatcatgggggggtcgtttctggggaagaacactctgctcaaccgattccgatggaaaattctcgtgtgccaccggagattgcggctccggaaaaatcgaatgctccggcgctggagctgctcctcctgcgactttagctgaattcactctcgatggctccggaggactcgatttctacgatgtcagtctcgtcgacggctacaatgtccagatgctggtggttcctcaaggcggctccggtcagaattgcagcagcaccggctgcgtcgtcgatttaaacggatcttgcccgtcggagctaagggtgaatagcgtcgaccggaggaagcggtggcgatggcgtgtaaaagtgcgtgcgatgcgtttcggcagccggagtattgctgcacnggcgcgtttggattcgctgacacgtgtaagccgtctacgtactngcggatcttcaagagcgcgtgtncacgcgcctatagctancgcgatgacgataagtctagtacatttacgtgcgcaaatctccaactacgtatcactttctgtcttctcccacaccagctaaatcagctgaggacacacacgagacatgacgacacaggtcagtccggag

SEQ ID NO: 129863 - DNA, 585 bp, Arabidopsis thaliana
ggaactacaatcataatttgtgatctctctccaattttcatcttttggtcgaaattcccaattccctgagtcaagaaccctaatttcaacatggtttgcgttatgtgtttggtgcctctgttcctcgtcccgctcatcaatttaatgcctcgaatcatcgattatttcatggctaaattgtacgcgtggctcggatgggagtacaggaagccagcgagagttcctccagcttgtcctttcaagccagttgctaaaaacgacaacgccaccaaagtgggtgcggaaactggaactgaaggtacagaaacaatagctaaacctggcgttgtagaggagacgggtggtattaagcaggattgaggccgagtcttttcttcaataaaaccttttgtatttgtggatatgttttggataagagaagaagctggaagttgaaattacctgatgtgatactgataatgaatgatgtacgttgaaaatgctacgtaaccagataattttcttatatggttaaaaaaaaaaaaaaaaaagggcggccgctttaaaggatcccagcttacggacgggggcaagggacgtcaaaga

SEQ ID NO: 129864 - DNA, 799 bp, Arabidopsis thaliana
  unsure (1)..(799): unsure at all n locations
nnnnnnnnnnnnnnnnnnnnnnnnnnnnnnnnnnnnnnnnnnnnnnnnnnnnnnnnnnnnnnnnnnnnnnnnnnnnnnnnnnnccacgcgtccgcaaacaaaaagttgaagctgaattttttttgcaggttttaagtaaagatgatgcagaagaagctacttcttatagtatcaatcatcgtgaatctcgtattcaccattcatattctttattatagttcaaccacatggaatccaacgtggaccaacagagctgcagcggaagcagaaactgtagcctctttttcatgctcaggccacggcagagcttttgtggatggtcttggtggccttgacggccagaaacctccttgtgagtgcaacaattgctacataggaaaagattgctccgttcttctcaaagattgtcctgtcgatgctaactcaggagaccctttgttcttggagcctttctggatgcgacaagcagagagaagcgcggttttggtctcgggatggcacaggatgagttatatttatgaagatgggacatatgtgtctcgagagctcgagaaggtcattagaaaacttcatagtgtagtgggaaatgcagttacagataacagattcgtaatctttggatctggtaccacacaattgcttgcagcagctgttcatgccttgtctttgacaaactcatcagtatcatcacctgcaaggcttctgacttctattccatactatgctatgtacaaggaccaagcagagttctttgattcagcacatctcaagtttgaaggagatgcgtctgcgtggaagc

SEQ ID NO: 129865 - DNA, 928 bp, Arabidopsis thaliana
gggctggagcagagcaaagccagagatggagccttaaggccaagaccgtacttgtaaccggtggaacaaaaggcatcgggcatgctatagtagaggaatttgcgggatttggagcagtaatacacacttgtgctagaaacgaatatgagcttaacgagtgtttaagcaaatggcaaaagaagggttttcaagtcactggttcggtctgtgacgcatctttgagaccagagagagaaaagctaatgcggactgtgtcttcaatgtttggtggaaagctcgatatcctcataaacaatttgggagcgattcggtcaaaaccaacgctggattacacagcagaagatttctcgtttcatatttcgacaaacttagaatctgcttatcatctgagccagcttgcgcatcctctgcttaaggcttcaggatgtgggaacataattttcatgtcctctattgctggagttgtatctgctagtgtcggctccatctactctgcaacgaaaggggcattgaatcagctagcaaggaacttggcatgtgagtgggctagtgatggcattagggctaatgctgtggctcctgcagtcatcgcaactcctttggctgaagctgtgtatgatgatgagttcaagaaagtggtgatatcaagaaagccgttggggcgtttcggggagcctgaagaagtgtcctcgcttgtggcttttctatgtatgcctgcagcttcttatataactggtcaaaccatttgtgtcgatggaggtctcactgtcaatggcttctcctatcagccacaaggttaaaatccaatatccaaaaacaaacacattttcaacttcattactttgaacattgtcatcttgggctaagcccggtttggaagtatggattctggccgtaacactttagaaaataaaaggaaacttcaacc

SEQ ID NO: 129866 - DNA, 525 bp, Arabidopsis thaliana
  unsure (1)..(525): unsure at all n locations
gctcctnnnnnnnnnnnnnnnnnnnnnnnnnnnnnnnnnnnnnnnnnnnnnnnnnnnnnnnnnnnnnnnnccacgcgtccggaaagacgcaatgatttagacagagacgatggaaacaaagagcctttggtcgtggatagtagcgatagtacagtgaacaacgaagctcctttgccgcaaacgaaactggttgccctgcagctaacaacagatcacagcacaagcatcgaggatgaggtgacaagaataaaaaacgagcaccccgatgacaaccattgcatagtgaatgacagggtgaaaggacggcttaaggtgaccagagcgtttggagcgggattcttaaagcagccaaaattgaacgatgctttgctggaaatgtttcgaaacgaatacattggtacggatccatacatatcatgcacaccttcccttcgtcactaccggctaacagagaatgatcagtttatggttctctcatcggatggattgtaccaatacttgagcaatgtggaagttgtttctctt

SEQ ID NO: 129867 - DNA, 540 bp, Arabidopsis thaliana
  unsure (1)..(540): unsure at all n locations
ccnnnnnnnnnnnnnnnnnnnnnnnnnnnnnnnnnnnnnnnnnnnnnnnnnnnnnnnnnnnnnnnnnnnnnnnccacgcgtccgtgacaatgacctctctaagaagaaaggaggtaagcctaatctgaggattgctagtcttggccacgcgttgcatgtatggctcaatggagaataccttggaaacggacatggtagccatgaagagaagagtttcgtctttcagaagccagttactctaaaagaaggagagaaccacttaaccatgctaggtgttttgacgggatttccggatagtggatcttatatggagcatagatacacaggtccacgtagtgtttccatcttaggtttgggctctggaacacttgatctcactgaagaaaacaaatggggaaacaaggtgggtatggaaggcgaaaggcttggtatccacgccgaagaaggattgaagaaggttaaatgggagaaagcttcagggaaagacccgggaatgacatggtaccagacatacttcgatgcaccagagagccaaagggc

SEQ ID NO: 129868 - DNA, 580 bp, Arabidopsis thaliana
acgactgactatgggagagctgaccgcctgcagtaccggtccggaattcccgggtcttccacgcgtccgtacagctgtgagaagacgactgaaggggaaagagaaaagctttgagtcttccattgacatgggcgcttagcttatgcttgagatattttgtttttacctccgagaaacggatttagattcgtaatcgtgagttttttggtgtaatggagatcgctactgtcgtaaaggctaatggcgttgtcgattcaagcacatccagataagaaattagcaaagaaaatgcacaaagctcatcctaatctttataaagacgacaatcacaaaccagagatggctttggcctatactcaattcgaggctctctgtggctttatacctcttcaggagcttaagagtgtcattcgagctattccggagattgaacaacttgttgggagtgaatagcaaacaaaggttcttgatcactgaacctgatgaggaaaaagtgaaatttgatgtccgaacaatcttcaccctgcttatgtctgctgaccccgatacaacaagaaaaattgcatccaaattaataacg

SEQ ID NO: 129869 - DNA, 391 bp, Arabidopsis thaliana
gctttgagtcttccattgacatgggcgcttagcttatgcttgagatattttgtttttacctccgagaaacggatttagattcgtaatcgtgagttttttggtgtaatggagatcgctactgtcgtaaaggctaatggcggttgtgaagcggatcgacgacggcttcgccgattgagatgctctgttaaggattacgattggggcaaaattggatcggattcactcgtttacagggtttatgcggcgaattcagattacgagatcgatcctacacgaccttacgccgagctatggatggggactcacgagtctggtccgagttacttggaggatgctgatggatccaatggcgtgacccttagatcctggatcaccgaaaaccctaaatctc

SEQ ID NO: 129870 - DNA, 450 bp, Arabidopsis thaliana
cctatagggaaaactggtacgcctgcagggcccggtccggaattcccgggtggagccacgcgtccggaaccctttctctcccctgtatatgtagatgcttcttgatcaaatggagacctagctagcactccttctccatctcttttcatttttattgattttgtcacagcatcatctacttttgtattattcttttagttctctgatgcttcttctctttctttctttttttgggtgggggtatttgtatttctagtcataacctttctcgcctgcagatatgtgaaagatagagagagagttgataacttttttctttgtgtcatgagagtgagtgactcggagggctcaataatatcataaacttgcagaaaaaaaaaaaaaaagggcgaccgctctagaggatccaagcttacgtacgcgtgcgtgcgacgtcataactcttcgaga

SEQ ID NO: 129871 - DNA, 468 bp, Arabidopsis thaliana
gacagtactctagcttctccggcgactccaggagcgcctctttgcacctctcttcttctctcgctctctgtttctgaggttctgcaagaagtaaaacatgtcagttcttattgtgacgagccttggtgatatagtaattgaccttcactcggataaatgccctttgacttgcaagaacttccttaagctttgcaagatcaagtactacaatgggtgtctttttcacactgtgcaaaaggatttcacagcacagactggtgatccaactggtacgggagctggtggagattcaatctacaaatttctgtacggtgagcaggctcgtttttacaaagatgagattcatcttgatttaaaacattcatagaccggcactgttgcaatggccagtggtggagagaatctcaatgcttcccagttctatttcacacttcgtgatgatttggactatcttgatgggaaacacac

SEQ ID NO: 129872 - DNA, 513 bp, Arabidopsis thaliana
  unsure (1)..(513): unsure at all n locations
nnnnnnnnnnnnnnnnnnnnnnnnnnnnnnnnnnnnnnnnnnnnnnnnnnnnnnnnnnnnnnnnnnnnccacgcgtccggtgaaaggagatttagaatagctagagatgagcttatgaatttgaaagatgcattggggattggtgatgagagagatgatgtgattgtcatcgcagctaaattctttgaaatggcagttgagcagaatttcacgaaaggcctgcagaactgaactagtacaggcttcctgcctctacttgacgtgcagggaattgaacattgcgttgcttcttattgatttctcaagctaccttcgagttagcgtttatgagttaggttctgtatacttacaactctgtgaaatgctgtaccttgtggaaaatcggaattatgaaaagcttggtgatccttcaattttcatggatcgattctcaaacagcttattgaagggaaaaaataataaagatgttgtggcaacagctagagacattatagctagtatgaagagagattg

SEQ ID NO: 129873 - DNA, 412 bp, Arabidopsis thaliana
atacgactcatatagggaaagctgctacgcctgcaggtaccggtccggaattccgggtcacccacgcgtgcgcggacgcgtaagcagacccctgggcggacgcctgggcctggctctcaaattcatactacttggccagcttgctcgatttccctcgtacagccaaattgtgctatgggaatcaaaattaacagtcgcagaacccagtaataatggagtcgttgctgcgggcggatcaaaccctaattccgggagcgatgtgtagcccgcagagttttggacacactcaggactgcctcttccctcagggagcgtaactgaattggatctggggagagggctattacaagctttgcaggggctgcctagccccttctttttttgggacccaactggacaaactttcccgccc

SEQ ID NO: 129874 - DNA, 536 bp, Arabidopsis thaliana
  unsure (1)..(536): unsure at all n locations
nnnnnnnnnnnnnnnnnnnnnnnnnnnnnnnnnnnnnnnnnnnnnnnnnnnnnnnnnnnnnnnnnnnnnccacgcgtccgcgctgctctcacacgcaaataatggctcatctcttcagggagctgtctctgggccactccaagagagagtctacgccgccgccgccgtcacattcggcgacttcacgttcttcttcaatgtcttccgatctacctccatcaccactcggacaacgcgctgtccaactttccgattccgatctccgtctcactgcttacgagatcttcgtcgccgcatgtcgtagcgccaccggtaaacctctctcatcggctgtttcagtcgctgttttgaatcaggattctcccaatggctctcctgcttcgccggcgattcagcgttctctgcacctcaaccgccgctagtaaaatgaagaaagctttggggttaaggtcgtcttcttcgctttcacctggatctaataagagttctggttctgcttcgggttctaatggtaagtcgaaacgtcctactactgt

SEQ ID NO: 129875 - DNA, 402 bp, Arabidopsis thaliana
ggaatcactcctgcacgcgtcttcgtctctggtgtctctgagacccagaatcgacggtagagattcgttcatcaacccgtcacgcgtgtgccttaatcctagtctcggccgcagaggatctaaacctcttccgttggtcgcggcggcgaagaagatgaaaagcaagaaagatgacaatcataacttttcagctagacctgacgaagccactggtccttttcctgaatccattcttctcaaagagaagaagattgatgaagaaggtgatcttcttcccgagtttgctgatgctgaagaaatggagctatatcagcttctggatcttcagcttctgagtgactcgtatgaagaaaggatgaggcactatgaggtggtttacttgattcatgaaaaacatgctga

SEQ ID NO: 129876 - DNA, 962 bp, Arabidopsis thaliana
  unsure (1)..(962): unsure at all n locations
gccnnnnnnnnnnnnnnnnnnnnnnnnnnnnnnnnnnnnnnnnnnnnnnnnnnnnnnnnnnnnnnnnnnnnnnnccacgcgtccgctagtgatgagtccaccagaaatggagattccaagaaatcaggaatcggagcgggggcaattgcgggcataatcatttcattgttagtagttacagctcttcttgttgctttcttcttgttcagaagaaaaaaatcaaagaggtcatcacccatggacattgagaaaaccgataaccagcctttcactcttgcttcaaacgactttcacgaaaacaattccattcagagttcttcatcagttgagacaaagaaactggacacttcattgtctattaatcttcgacctccaccaattgatagaaacaaatcatttgatgatgaagattcgacaagaaagcctattgctgtcaagaaatccacagtggtggttccttcaaatgtgagactctattcagttgcagatctccaaattgctactggcagtttcagcgtagataatcttcttggagaagggacttttggacgagtatacagagctgagtttgatgatggaaaggttcttgctgtgaagaaaattgattcgtctgctctcccacatggcatgaccgatgatttcattgaaatggtatcgaaaatagccaatttggatcatccaaatgtgaccaagcttgttggttactgtgctgagcacggacaacatctcgtggtctatgaattccacaaaaatggatcattacatgacttcttacacttatcagaagaggaaagtaaagcattggtgtggaattcacgagtcaagatcgctcttgggactgcacgcgcattggagtatctgcatgaagtttgctcaccgtctatagtggacaagaatatcaaatcagctaattttttactcgattcagagctgaatcctcacttatcagattctggtctcgc

SEQ ID NO: 129877 - DNA, 563 bp, Arabidopsis thaliana
actcactttagggaaagcacgtacgcctgcaggtaccggtccggaattcccgggtcgacccacgcgtccggtcgtgttcaatatctacaacaagaaggtcttgaacgcttatccttacccatggcttacctcgacgctttctcttgccgctggttcgttgatgatgcttatctcttgggctgttgggatcgttgagactcccaagacggattttgatttctggaaaactctttttccggttgctgtggcacacacaattggtcatgtggctgcaacggtgagtatgtcaaaggttgctgtttctttcactcacatcatcaagagtggtgaacctgcgtttagtgtgcttgtctcgaggtttattttgggtgaaaccttccctacttcggtttacttgtctctcattccaatcattggtggttgcgctctgtctgcccttaccgagcttaacttcaacatgattggtttcatgggagctatgatttcgaacttggctttcgtgttccgtaacatcttctcgaagaagggaatgaagggaaagtctgtgagcgggatgaactact

SEQ ID NO: 129878 - DNA, 506 bp, Arabidopsis thaliana
ctatacgactcacttagggaaagctggtacgcctgcaggtaccggtccggaattcccgggtcgacccacgcgtccggcttatacacaagagcgttcgcttgttttcaaccagcccgtatttgacacttggcagcgttgttgaagacttgcctgaagaagacggcagctacatcggagatatcctcttgttcgatccggccaaggaagagttagtcacagtccgggacaaaacaattcccgaaaagctcgttaactcgagagtggtcggagcttcacatggatggacatttttctctgaccgatgcaatcataattctgtatgtatcagcgacctttttactcccatggcttccaaatcaaacacaaagataattcctctgcctctgcttactactatgatctatggccaaacagaagctgtctggaacgtggcaatgtcgtcatcttctcctcaccaagacaatgaagaagaagactgtgtcgtggctatcaatttcttgggtagc

SEQ ID NO: 129879 - DNA, 495 bp, Arabidopsis thaliana
tacgactcatatagggaaagctggtacgcctgcaggtaccggtccggaattcccgtgtcgacccacgcgtccggttcttttgatctcgatggtggttgcggttaccgttggtgtcagcctcaataagcatgacggtgactctaaaggtaaagcagaggtaaatgcttccgtcaaggccgtcaaggatgtttgtgcaccaactgattacagaaagacttgtgaagacactctgattaagaacgggaagaacacaaccgacccgatggagttggttaagactgcgtttaatgttacgatgaagcagatcacggacgcagctaagaagtcgcagacgattatggagcttcagaaggattcaaggactaggatggcgcttgatcaatgcaaggagcttatggattacgcgttggacgaactaagtaactctctcgaggagcttggaaaatttgagttccacctgctcgacgaggctttgatcaatctgaggatttggct

SEQ ID NO: 129880 - DNA, 619 bp, Arabidopsis thaliana
  unsure (1)..(619): unsure at all n locations
taatacgactcatatagggaaagctggtacgcctgcaggtaccggtccggaattcccgtgtcgacccacgcgtncgcccacgcgtacgcccacgcggccgctctgtctacttttgaaatccttcaaaaatgtcgggactcagattggatggcaaaatcgcaataataacaggcggagctagcgggattggagccgaagcggttaggctgttcacggaccacggagctaaggtggtcatcgttgactttcaagaagaacttggtcaaaacgttgccgtttctgtcgggaaagacaaagcaagtttttaccgttgcgatgttacaaacgaaaaggaggtagaaaacgccgttaagttcaccgtcgaaaagtacgggaagcttgacgttctctttagtaacgccggcgttatggaacagccgggaagctttctcgacttgaatctggaacagtttgaccgaaccatggcggtcaacgttcgtggtgcggctgcgtttatcaaacacgctgcacgggccatggtggagaaaggcacgcgtgggtaaatcgtttttgcccacttcggtttgaancggtgncnaggcctaagggtcanggggtttanncgttttttggntgttaa

SEQ ID NO: 129881 - DNA, 443 bp, Arabidopsis thaliana
tcgtaatctgaaaccaatctgttcatatgatgaagaagtttctctcgttctcctccaacgcgtagaaaattctgacggcttaacgatgtggcgaagatctgttgtttctcgtttctcttcaagaatctctgtttcttcttcgttaccaaaccctagactgattccttggtcccgcgaattatgtgccgttaatagcttctcccagcctccggtctcgacggaatcaactgctaagttagggatcactggtgttagatctgatgccaatcgagtttttgccactgctactgccgccgctacagctacagctaccaccggtgagaattcgtctagagttgcggcttttggctggattagggcatcactacgctcgttgttattgggagctttctaaagctaaacttagtatgcttgtggttgcaacttctggaactgggtatatt

SEQ ID NO: 129882 - DNA, 448 bp, Arabidopsis thaliana
ccacgcgtcagaaaaaacttaagcctcaagaaatcaaacccacaaaaaatcaattcaacaaaacctctttctgctctctctctctttttcattcccatatgttgcttccttgagtttatctcttcccaaagaatgggaagcaacatctgaggatccatttgattaccatacatatattaaaaacaaaaacatatatctttgtgtgtgcgcgttaatgatgaaatagcagattgagagcaagaaagaggtcatagctgataaccacaatggagattcagaggatgaggcagttgatgtctctttggtctaatttgaagagtagccgcgtttccctcaccggtgggaatcatacagccgcaaggttctgcactcgctaggctcgcctcttctctcgctagctttttctttcttctttctcttcttcttacttccttttgattctctttta

SEQ ID NO: 129883 - DNA, 850 bp, Arabidopsis thaliana
  unsure (1)..(850): unsure at all n locations
aatgatttccaacaaattgaaaacaagagagagattttcagtaatatatttttgtttatttttcgtgttcattgaaatttttaacgaaatggcagtaaatatgggaaggttcacagacacacttttacgatgaaatcgaacccttttgtcgatggagaagaacggaagacatcgacattcttgagctacatcttccttcaggtttgaagaaagagcatcttaaaatacagatcaacaacagtggtgtactaacaataacaggaggctgtccagtggaccaaaccaaaacaatcaggttcatgaaagaaacaaaagttgcaaaagattgtaaaagaaatgagattcgtgcaaagttctctaagggagttttgtatgtgacgatgccaaagacaaatccctatagcagctggtctctcagtttctttgaagggagccacgccacaacatcaaacccctaaaacagatgagggtatgagaaatgttgcaaactgttcaagcgaattttatagtaagtttggctcattgaagcaaagactatggaggaagacagtagttgagggtgtggccgctgtggtggttgtggctgctgcagttttaggagttgttaaagcgtaccaatattttatggcatcacctgtgtgatcaagttttaataagaccatgtatttgcattattggtatgatgtatacatatattcattatgtttcactttacataagttactcccccattactactaaataagtataaattgtccttcttgagttaaaaaaaaaaaaaaaagnnnnnnnnnnnnnnnnnnnnnnnnnnnnnnnnnnnnnnnnnnnnnnnnnnnnnnnnnnnnnnnnn

SEQ ID NO: 129884 - DNA, 534 bp, Arabidopsis thaliana
acgactcactttagggaaagctcgtacgcctgcaggtaccggtccggaattcccgggtcgacccacgcgtgcgagcagaatttgtatatcaaaatcgagcgaacgaagatctccggattgctgcactctgctacatgcctttcgaatccgtttactgcatcgccggagaagtaggaatctgtttacttacctttggaatccatcctcatccctctccgtctagtgtgatgcagcagttaggcactagtgcagtgacatctaagtttaaacagacttttttcttcaaaatgcgacattttcttctgatgtctgcagtacggttgtatacctctttctctccccccattcaccctcttcgatcgtgttgtttcttgcatcgccttggcagtaatctcgggggtttctttcttaaagtttgtgcaaaatggtggactggctttcactattaccctggaataaaatcttcactgctgcatgtggctgctttttaagcgatagcaactacattcacttgatggagtcaaatctcgatgc

SEQ ID NO: 129885 - DNA, 556 bp, Arabidopsis thaliana
  unsure (1)..(556): unsure at all n locations
aggacagccttgcacgttccgcctcgccgcttgtatcgccnnnnnnnnnnnnnnnnnnnnnnnnnnnnnnnnnnnnnnnnnnnnnnnnnnnnnnnnnnnnnnnnnnnnnccacgcgtccgcccacgcgtccggtgtctgtgtactgcgtagggtttagtgagtccatttgcaaagatgactcgtgagttctaatctatcgacctctctcgttttctcgcagttgcagagtctcaggattatataataggacaaagagagagagacaacatgcactctcttaagactacttgcgttgggcaaatatttgctctagctaagcctcacgattctgtaggcaagaggactcgtaatcggattcctaaagaagagagaaagacactggttgaatcttttataaagaagcatcagaaactaaacaatgggagttttccttcacttagcctcacacacaaggaggttggtggatctttctacactataagggagattgttagagagattatccaagaaaatagagtccttggtcctggtgacttgctacttgagggaaatggc

SEQ ID NO: 129886 - DNA, 533 bp, Arabidopsis thaliana
cagctctctacgactcactatagggaaagctggcacgcctgcaggtaccggtccggaattcccgggtcgacccacgcgtgcgcccacgcgtccgtgggaatgttcccttaaagtggtatgaagatgagaaacatattggttatgacctcactgggaagaagattactaagaaagaaaaacaagataaactcgactcttttcttgcaactatagatgactctaagacttggcgcaaaatttatgaggaatataatgacgaggacgttgagctgactaaagaggagagcaagatcgttcagagaatactcaaaggggaagctccacatgcggactttgatccatatgcaccttatgttgagtggttcaaacatgatgatgcaatacatccactctcaagtgcaccagagcccaagcgaagattcatcccttcaaaatgggaggccaaaaaggttgttaagattgttagagcaatacgtaaggggtggatcaagtttgataagcctgaagaagagcccaatgtataccttttatgg

SEQ ID NO: 129887 - DNA, 523 bp, Arabidopsis thaliana
atcctgaatcttacttgctacctttcttcttccttcttcatcattcatcattcatcattcatcattcatcattctcatatctctcttcttttactggggatcacaatatctatctacttgtaaattgtgaatgatagatcctgagccttcttgccgccacctcttgaacttaatgtacttgaaaccagtctccacatagcgatagagagagagatctgttatgtgtgtattcatcaagttctctttttttgggctcaaagtgtaaaaggagacattttcaattctgagttcttttgttttcttataataaaatctgggttttctgagattttcgtcacatcgtccgaaacgtggacacattttgatcttttgggtgtcactgtgtcaataaaggttgaaactttgattacatttctctcaaaaggattaatttttatttctctatctgggtgagatttggattaattggtgaggaatcggaagaaactggcgagattacaagcgattgtgaaatatcagaatc

SEQ ID NO: 129888 - DNA, 562 bp, Arabidopsis thaliana
  unsure (1)..(562): unsure at all n locations
cggacgcttgggcggacgcgtgggagaaaccccaaaacattttgcctagaaagttgtttaaattacctcttaaaccttaagaaatcatatccagaaactcaatggatcaacaagggatggtcaagaaaagactagccgttctcgtcggctgcaactaccctaacacaaggaacgagcttcacggttgcatcaatgatgttctagccatgaaagaaactattttgtcacgtttcggattcaaacaagacgacattgaggtgctaacggacgagccagaatcaaaggtaaagccgacaggtgccaacatcaaggctgctctacgtaggatggtggataaagctcaagcccggatcttggagacatcttgttcttccactacagtggccatggaacttcgaattncttcgggttaaaatnttgctnaatccttttaaaacaaggcggagctatttgtnccctngtgnntttaantttcatccacaagatttttnatttccgnggatttgggcaatcaactttcctaaggnccaaggnttnccatgaccttttngttttnccanng

SEQ ID NO: 129889 - DNA, 550 bp, Arabidopsis thaliana
  unsure (1)..(550): unsure at all n locations
nnnnnnnnnnnnnnnnnnnnnnnnnnnnnnnnnnnnnnnnnnnnnnnnnnnnnnnnnnnnnnnnnnnnnnnccacgcgtccgcttcttcccgccgggaaattcttacgtttctccggcggttagaaaaatgacaccacagatcaaaactcatctcttgccgaagcaagaaccttcttcgtctgagaaccatggatcatcaacctccggcatcgttttcaacgtgtcaacgagtataagcggagccggaataatgtcgatgccggcggcgtttaaagttcttggaatagttccagcgtttttgattatcacgatcatagcttggctttccacaatttccgttggatttctgatgaaatcaactctcgccggagaatcaactacttacgccggagttatgaaagagtcgtttggtaaaacaggatccatcgctgtacagattgctacgatggttgctacttttggttgtatgattatattttcgattattataggagatgtgctttctggtaatgaaaatggtggtcctgaacatattggagttttgcaaga

SEQ ID NO: 129890 - DNA, 524 bp, Arabidopsis thaliana
aggtctctacgactcactatagggaaagctggcacgcctgcaggtaccggtccggaattcccgggtcgacccacgcgtccgttaaaggagaaacaagctgagttaactgaacagtgggagcacgagaggtctgttatgtcccgtcttcagtcgattaaagaggagattgatcgagtaaacctcgagatccagcaggcggaacgtgaatacgatctcaaccgtgcagctgagctcaaatacggaagcttaaactcattgcagcgacagcttaatgaagcagagaaagagctgaacgagtacttaagctctgggaaatctatgttcagagaagaggttttgggtagcgatatcgccgagattgtgagtaaatggactggaatcccggtatcaaaacttcaacagtctgaacgagataagcttctacatttggaagaagaattgcataaaagagtagtcggtcaaaccccagcagtgactgcggtagctgaagcattccaacgatcaagagctggtctttcggatcc

SEQ ID NO: 129891 - DNA, 582 bp, Arabidopsis thaliana
  unsure (1)..(582): unsure at all n locations
aggtcacagtgaccaaaatcacacacttcacaagaaacaacctatggatccaaatgaatctccaccaaaccaatttcgccacgtggtggccatgccttatccaggtcgaggacacatcaaccctatgatgaacctctgcaaacgccttgtccgtcgataccctaaccttcacgtcaccttcgtcgtcacagaagaatggctcgggtttattggacccgacccgaaacccgaccggatccatttctccactctccctaatctcatcccttccgagcttgtcagggccaaagacttcataggcttcattgatgccgtctacacaagattggaagaaccattcgagaagcttcttgacagcctcaattcaccacctccgagtgtaatattcgccgacacttacgtcatttgggctgtgcgagtcggcagaaaaaggaatattccggtggtttctctctggaccatgtcagccacgnttctntccttcttcctncactctgatctactcataagtnatggncatgntctgttcgaaccatcagnaagaagaggtttttgatnaggnnccccggtttatctccgacg

SEQ ID NO: 129892 - DNA, 982 bp, Arabidopsis thaliana
  unsure (1)..(982): unsure at all n locations
atacgactcactttagggaaagcagctacgcctgcaggtaccggtccggaattcccgggtcgacccacgcgtccgtttccttcttcatttatgaaacgcaaaaaacattattcccctctgtggtctctctctcacgagcatcgtttcttcatcgatctcatagttaccggcgttgttttgaggccactaccgtcgtctctctccgtaatcgtctccaacatcatcatcttctcaatttcgaagcattttattctctaataggactcaggaatgaatctttctccgttcaagagagatatcgatgagctgatagacgagtttgtggaggatgatttgacaacctttgctgatatgaagagtgtctggctatctagaaagttttctcatatatatgaagctagtcctaacagcaacctagcctttttcatgcagtcactatatgttcataccattggtcacatggttagtattgattctttttcacggagacttggaggtctttactgtctctattgccttcatgagatccaaccctttaaacccaagttcagaatctatatctcacttcaagagcttgggaaatttagggatccttgtagttgaggcaaaagataaaggtgtagagatagctgctgctgtggcaaaaaaaatgcttgatgaggacatgttaatattttggagctgtggatggggcatctgcaaccaaggcaattcatcaattaaccgggctacagcaccggacggcttcgggttttcctatgnggaggtaaacctgtgacacttggttttancccaatttattcattttgggtatggggaaaggaaggttnacctgnattcccctgggaaaaatgcctttagggttttccaggggccnagaaagggtcaagccgnagggtccaggggnantaatgggggtttgtgncanaagggttttccngggggnagggnttttnggggnanattggggatttaaggggta

SEQ ID NO: 129893 - DNA, 603 bp, Arabidopsis thaliana
  unsure (1)..(603): unsure at all n locations
ttctgcagaatatttactattttttataaagaaacaaaagagcatagaaaggtttggtttttcaaagaacgtgaaaatgagtatgcattttaggaataaagcatggattattctggcaattctgtgtttttcatctttgattcactcaacagaagcagtggtcacttatgatcacaaagctttaatcatcaatggacagagaaggatccttatctccggttctatacactatccaagaagcactcctgagatgtggcctgatcttataaagaaggccaaagaaggaggtttggatgttatacaaacatatgttttctggaatggacatgaaccttctcctggaaattactattttcaggatagatatgatctggttaaattcaccaaactggtgcaccaagctggactatatcttgatctaagaattggtccatatgttttgtgccgagtgggatttttgggggatttccggtttggctcaaatatgttccnggnatggttttcagancagataacgnacctttcaaggttgcaatgcaaaaattcncaaagaagatttntgggtatgntgnaggaggaaagntgtttaggctnaaggnggnc

SEQ ID NO: 129894 - DNA, 900 bp, Arabidopsis thaliana
  unsure (1)..(900): unsure at all n locations
cagctannnnnttaggagcaactatagaagagttatgacgtcgcctgcacgcgtacgtaagctcggaattcggctcgagtcttctccttcagctttgagtttctcgaggctcttttcttaattttactgctaaatagtagtgtttactgtcttcagccgccgtcgccggattccattatcgaaggcgacggaagcagtatcttaggttttgtccgacgaagctccgtttgattgttatcggttccgttgtattcgtcgatcttccattttcgcatttgttttctatatccgaagatgggaagcagtccagctccgtttgccgatattggcaagaaagccaaagatctcctaaacaaggattacatttttgaccacaagtttactctcacaatgctgagtgctacaggaacggaatttgtggctactggtttgaagaaggatgatttcttttttggcgatataagcacactatataaaggtcaaaacaccattgttgatctgaaaatcgacagccactctagtgtgtcgacgaaagtaactctcaaaaatctcttgccatccgctaaagctgtaattagtttcaaaatacctgatcacaagtctggcaagctggatgtgcaatatgttcatcctcatgctacgctcaattccagcattggcctcaacccaactcctctgttagatctatcagcaactatcggaagccagaatgtttgccttggtggtgaagtcagtttcgacacagcttcatcatcactaaccaaagtacaatgcagggattggtttcaccaaccaaggcggctctgctcgcactcatcactggggggtaaagggggggggtctgagagctacttacgttcacacagtgaacccaaccacattctttggtgcagaactgat

SEQ ID NO: 129895 - DNA, 525 bp, Arabidopsis thaliana
  unsure (1)..(525): unsure at all n locations
nnnnnnnnnnnnnnnnnnnnnnnnnnnnnnnnnnnnnnnnnnnnnnnnnnnnnnnnnnnnnnnnnnnnnnnnnnnnnnnnnnccacgcgtgcgagtttctctgtgttttttcgttgggtggttcctcagtggttaccaaatctctcttcttcttcttcgtcagaagctaaaacctttcaagaccctaatttcatctatctatctcaataaggctagatcaaaaattcgaatttcaaaatcccgttttgagtgttagtagattcggtttctgggttttcgtagaaacgggattaacggcggattcagatcttgaaatttttgtgtgtttctcaaactgattataaattttggtttttttttttttaaatttcgggtttgaaaaatagggaaaatttctgggtttcttctgagaaattcgaattttttggagatgggagaaggtgaagaaggagacaaattcccgccaaaaacggaggaggtacacaagaatctatgaagtcgggcgagcgaactcgattttactgg

SEQ ID NO: 129896 - DNA, 729 bp, Arabidopsis thaliana
  unsure (1)..(729): unsure at all n locations
atgatactgccnctcnnnnnnnnnnnnnnnnnnnnnnnnnnnnnnnnnnnnnnnnnnnnnnnnnnnnnnnnnnnnnnnnnnnccacgcgtccgattactttcttctcatacaggaaaaataagtcagtaatctccaagcataagaaaaatatggctaaactaatctcccatgttactgcgctattcattgttgtagttttggtgtgtgcgtttgttcctgctttttctgtagaagaagctgaagcaaaatcattatgggacacttgtctcgttaaaatcactcctaaatgtgcattgaatataatcgcggttgtttttggaaatggaaccctcattgagtcttgttgcaaggatcttgtccaagaaggaaaagtgtgtcacgataatctcattaaatatattgctgacagaccaagcttaattggccgtgaaacacaatacttgaagaagagggatgacgtgtggagtcattgtatctcaatctctaaaactgcttaaaatatgtgtgtttttaatattatttcgatcgaacacatttaaattttgttgttgtaacatttttgttacgataaattaatttctatgtgtttactttaataccaaataaattaacaagctctcgtaagatgaaaaaaaaaaaaaaagnnnnnnnnnnnnnnnnnnnnnnnnnnnnnnnnnnnnnnnnnnnnnnnnnnnnnnnnnnnnnnnnnnnnnnnnnnnnataaatcg

SEQ ID NO: 129897 - DNA, 1203 bp, Arabidopsis thaliana
agctctctacgactcactattgggaaagctggcacgcctgcaggtaccggtccggaattcccgggtcgacccacgcgtccctgtatttcaaactatgacaatggagtcatacaaaaccctagaaatcattcgcaagaacactgattcctccgtatttcatctcatcatcaacagaccatcacatctcaacgccttatctctcgatttcttcatcgaattccccaaagctctctcatctctcgaccaaaatccagatgtctccgtcatcatcctctccggcgccggaaaacacttctgctccggtatcgatctcaattccctctcttcaatctcgacacaatcctcctccggtaacgacagaggacgatctagcgagcagctacgccgtaagatcaagtcgatgcaagcggcgattacagcgattgaacaatgccggaaacctgtaatcgccgctattcacggcgcgtgtatcggtggcggtgttgatctgattaccgcttgtgatattaggtattgctctgaggatgcgtttttctcgattaaagaggttgatctagcgattgttgcggatcttggtacgctccagcgattaccgagtatcgttgggtatgctaacgccatggaattagctttaactgctcggagattctctggaggggaagccaaggatcctggttgggtttccaaagttttccggtctaaatcggggcttgccaacggcgccagtacatcccctgaaggattgggggccaagtcccctttagctgtgacagggccaaaggcagtgttattaagaacccagagaggtgagtgtagaccaaggacttgactatgtagcaacttggaactcggctatgcttatatcagatgatctcaacgaagctgtttctgctcagatgatgaaaacaaaacctcggtttgctaaactgtgatacagtctctgtgttgcttctttgtctttcaaagctcttctggtaactaaagtaataagatattacttcaaataagtttagttattgatagttccctaattacggattagggctatagataaaatggtcttctacacatgagaatatgattaatactctgcacaatgcatattggtaaatgctatacctcaatgtttattaaaaaaaaaaaaaaagggcggccgctctagaggatccaagcttacgtacgcgtgcatgcgacgtcatagct

SEQ ID NO: 129898 - DNA, 741 bp, Arabidopsis thaliana
tagaatacgccaattggatttggcagttgaagcagcaaatgcaaggtttcaagaaggggtatatacaagcccccaaacagaagaccaggagatagttttaaaaacgaaatctgatgacaaaaatgaagagcaggaattaggaaaataattgtagcgataataaagtacaatttcagggcaaaggtttaaagtctgaatctaaggaaaaaagagtaccaatatccgaattcaaagggtgaaagtgaagtagaggactcaaagtcagagtaaaagccgaaatggagagaaacagatgatatggaggatgttgtagaagaagaagaagaagagcttggtcatatggtgggtgaagccgaagaagagaaagaagaggttgttgattaagaggcaaccccccccatgtctgagattgagttagaagaagaagaagaagaagaagatgaagagaagagaaagtcatgaaggagtttcatagagttagagcattgttagctaaaaccgtttcagaaagattctttctgcttagacgctctggtttatctttcttagtaggtttgtggatattgaaccaagttttagatgaggtcacctggtttgtgtttgtgtcttgagagtttgtgacatttgtaattcgttatcgttgttacatagtataaaccatatgttatggaaaaaaaaaaaaaaagaaaaagataagggcggccgctctagaggatccaagcttacgtacgcgtgcatgca

SEQ ID NO: 129899 - DNA, 746 bp, Arabidopsis thaliana
gcgctgaaagaagcaatgaatctttcaaggcaagagataacacaattgaaatctgcagttgaagcagcagagacaaggtatcaagaagagtatatacagagcacacagcagaagagcaggaagtgagtctagaagctgaatctgatgacagaagcgaagagcaggaatacgaagatgattgtagcgataagaaagaacaatctcaggacaaaggtgtagaggctgaaactaaggaagaagagaaacaatatccaaattcagagggtgagagtgaaggagaggactcagagtcagaggaagagccgaaatggagagaaacagatgatatggaggatgatgaagaagaagaagaagaagagattgatcatatggaggatgaagcagaagaagagaaagaagaggttgatgataaagaggcaagcgcaaacatgtctgagattgagaaagaagaagaagaagaagaagaagatgaagagaagagaaagtcatgaaggagttacatagagttagagcattgtaagctaaaaccatttcagaaagattctttctgcttagacgctctggtttatctttcttagtagatttgttgatattgaaccaagttttagatgaggtcacctggtttgtgtttgtgtcttgagagtttgtgacatttgtaattcattatcgttgttacatagtataaaccatatgttatgagccacacgcgtttctctgtcggttataaaaattatttacaacgtgcg

SEQ ID NO: 129900 - DNA, 601 bp, Arabidopsis thaliana
  unsure (1)..(601): unsure at all n locations
nnnnnnnnnnnnnnnnnnnnnnnnnnnnnnnnnnnnnnnnnnnnnnnnnnnnnnnnnnnnnnnnnnnnnnnccacgcgtccgcgcacgcgtccgtggcagtgtctgtggaaccgactagttcctcaggtgtaagatcctcaagtagaacacttatgaagaaggattgtggcaaaaggttgaataaacaagttgaaaaaacaagagaaggaaagaatctaagatcgttaaaagagttgaatgctgaaactgacaggacagcagaagagcaggaagtgagtctagaagctgaatctgatgacagaagcgaagagcaggaatacgaagatgattgtagcgataagaaagaacaatctcaggacaaaggtgtagaggctgaaactaaggaagaagagaaacaatatccaaattcagagggtgagagtgaaggagaggactcagagtcagaggaagagccgaaatggagagaaacagatgatatggaggatgatgaagaagaagaagaagaagagattgatcatatggaggatgaagcagaagaagagaaagaagaggttgatgataaagaggcaagcgcaaacatgtctgagattgagaaagaag

SEQ ID NO: 129901 - DNA, 513 bp, Arabidopsis thaliana
  unsure (1)..(513): unsure at all n locations
agccggtcagtgaaaaaacaagtgtctgatggctttggcgaggatttggtcggtaagagagtcaatatgtggtggccgctcgaccagacattttatgaaggcgtcatagattcctattgtactcgtaacaagatgcatcgggtaatatattctgatggagattccgaagagcttaatctccctgaagagcgctgggagttactccaggatgacacttcggcccattaggataaggagattgatctgccagagtccagtcctttatctgacataatgcagaggcagaaagtttagaaaagcaacaacgtggcagtgtctgtggaaccggctagttcctcaggtgtcagatcctcaagtagaacccttatgaagaaggattgtggccaaaggttgaataacctagttgtgcagagactcagtttcatacgaccgaacgcatagnnnnnnnnnnnnnnnnnnnnnnnnnnnnnnnnnnnnnnnnnnnnnnnnnnnnnnnnnnnnnnnnnnnnnnnn

SEQ ID NO: 129902 - DNA, 557 bp, Arabidopsis thaliana
  unsure (1)..(557): unsure at all n locations
gatgacacttcggccgatgaggataaggagattgatctgccagagtccattcctttatctgacataatgcagaggcagaaagttaagaaaagcaaaaacgtggcagtgtctgtggaaccgactagttcctcaggtgtaagatcctcaagtagaacacttatgaagaaggattgtggcaaaaggttgaataaacaagttgaaaaaacaagagaaggaaagaatctaagatcgttaaaagagttgaatgctgaaactgacaggacagcagaagagcaggaagtgagtctagaagctgaatctgatgacagaagcgaagagcaggaatacgaagatgattgtagcgataagaaagaacaatctcaggacaaaggtgtagaggctgaaactaaggaagaagagaaacantatccaaattcagagggtgagagttaaggagaggactcagagtcagaggaagagccgaattgggngaaacangttngtnttgggggttattnaagnaggagnnggnggagnngtttttccnttttgggggttttgccnangaggggaaaaag

SEQ ID NO: 129903 - DNA, 349 bp, Arabidopsis thaliana
gcgaagctttattcgtttgcttgagctccgaagagtggagacagaaatggaggaagaagagcacgaggtttacggtggagaaatccctgaagtcggcgatactgatgttcccgatccggatatcgatatgtctgcagccgatgaggacgccgttacggagcttgctgagatgaagaggagattaaaggagatggaggaagaagctgctgcgctacgagagatgcaagcaaaagtcgaaaaagaaatgggagctactcaagatcctgctagtatggctgcaaatcaagaaggaaaggaggaggtggatgctcgatcagtttatgttggcaatggttgttctcataaatga

SEQ ID NO: 129904 - DNA, 396 bp, Arabidopsis thaliana
gagtgatattgttaggaactttctccttcatacattacagcttcagagttgggagaaaactgtagactgttacagtcctggacagggtttgatgcctgcaagttttaaagtaagaactgtggcgcttgatgagaacactacggaagaggttttggatccggattttggtgaatcagctattggtcgtgttgctcctgtggattctggtttgtggtggattattctcttgagggcatatggaaagataactggagaattcccgttacaagagaggatagatgttcagacagggataaagcttatcatgaacttgtgtttagcagatggatttgatatgtttccaacacttttggtcactgatggttcttgtatgattgatcgtcgtatgggtatcca

SEQ ID NO: 129905 - DNA, 397 bp, Arabidopsis thaliana
aacggacgcgtgggcgggtcttcttctccaaaacccatttcctcgcaaaatccatctgagaaaaagagcaacaagtttcattttcatggtggtgatgacgaacaaattcttcgaattaatcggcggagctccgtcgtattcttcagtatccgtcgctgttaaaggatccgtcggtgacgccgtaggaggaactgctagtcgtcgtgctcttcgttggacaatcgaaaatttccttcctaaaatcgatagattagttcttgttcatgtcatgcctacagttactactattccatctccttctggatcgaagattccaatagaggaattggatgagagtgttgtgtctatgtataaacgagatttgagaaaagaatttgaacaagtttttgttccgttt

SEQ ID NO: 129906 - DNA, 510 bp, Arabidopsis thaliana
ccagcactaatcgactcatatagggaaagctggtacgcctgcaggtaccggtccggaattcccgtgtcgacccacgcgtccgccttctcaaagttatggtagtgataataagaagaggttggagcgcaagtattcgaaaatttctgatgattactcttctttggagcaggtgacggaggctcttgcacgggcgggtctagaatcttcaaatctcatcgttggtattgatttcactaagagtaacgaatggacaggggccaggtccttcaataggaaaagcttacacttcataggcagtagtcccaatccttatgaacaagcgataactatcataggaagaaccttacccgcctttgacgaggacaacttgattccatgttatggttttggagatgcatcaacacatgatcaagacgtgttcagtttcaattcagaggatagattctggaatggatttgaggaagtactttcccggtataaggagatcgtgcctcaacttaagcttgcagg

SEQ ID NO: 129907 - DNA, 491 bp, Arabidopsis thaliana
  unsure (1)..(491): unsure at all n locations
ttccnnnnnnnnnnnnnnnnnnnnnnnnnnnnnnnnnnnnnnnnnnnnnnnnnnnnnnnnnnnnnnnnnnnnnccacgcgtgcggctttcaggtatattagagaagaagagagtgaagtcctagtcaataaactctcgaaatctgctgagacacgaactatggtagacttgagaaaagctcttttctcttataccgctagtatcgtatgtagactcgcttttggacagaacttccatgagtgcgattttgtcgatatggataaagttgaagatcttgtgctcgaatctgagaccaatcttggctcattcgcgttcactgacttcttccccgcaggtcttgggtgggttatagaccggatctctggccaacattcggagttgcacaaagcctttgctagacttagtaatttctttcacatgtgatcgatgatcacttgaagcccgggcaatctcaagatcattcagacatcattggtggcatggtagatatg

SEQ ID NO: 129908 - DNA, 530 bp, Arabidopsis thaliana
  unsure (1)..(530): unsure at all n locations
nnnnncagctccctacgactcactatagggaaagctggcacgcctgcaggtaccggtccggaattcccgggtcgacccacgcgtccgagatgttttcgtttgattatatataccttagtcatgttatctatttatgatgtagctcgttcttacttgagattgcactagtagtcttgcttaatgacatataaatcttgatttaaactccctctggatattctttcatagagaaaaaattcttatgatgattttattgttgttgttacttgttttctcagcattgatccatctctgctcaatccttacaccaaattttgatggtataagaggattcagtgacaatgcttatattaaaaatggagtttatagtctctctgaactatctatgtccaagttcttgggagttcggaagcaccttacatcgttgacatttgttctaagttttcctatgacaattcttttcgtttgcacattcagagatcagtttgagatccactaaagttgatgtggtctgatactcacttcttatc

SEQ ID NO: 129909 - DNA, 672 bp, Arabidopsis thaliana
  unsure (1)..(672): unsure at all n locations
cannnnnnnnnnnnnnnnnnnnnnnnnnnnnnnnnnnnnnnnnnnnnnnnnnnnnnnnnnnnnnnnnnnccacgcggtccggagtaattaaaattggagtttctgatttctagggcacaaaatctttagattcggtgaagtcattcattacttcattgccaaagcttgtaaccaaaactcccatggccgacgaatcttcttctccggccacgggggatcccaattcacagaaaccagaatccactactccgatttcaattcccaatccaaatcccaatccttcactaacaccaccgccgcctcaacaacattcgcaaccaccagtcgctcctctggttccacctggtccgccttatgctcctccggctcagattcctagctcgcttctccccaccaatctcccgccgccaccaccattccgtcccggtatgcagttcactcccgttgcgaattttcaaaaccctagctctggagttcctcctccaggatctatgcctcaggtatcaaccgcaggcctgggatgaagaccttttcaagcctatggtaatggttatcccggaatttaatggtgttgntcctcctnggngcatgctncctaagggggttttccgggatccttgctnatatccaaaaatgggttgncctggggttaatattgggncggtttagngg

SEQ ID NO: 129910 - DNA, 688 bp, Arabidopsis thaliana
  unsure (1)..(688): unsure at all n locations
nnnnnnnnnnnnnnnnnnnnnnnnnnnnnnnnnnnnnnnnnnnnnnnnnnnnnnnnnnnnnnnnnnnnnnnnnnnnnnnnnnnccacgcgtccggaagaagagtgatactgagaagatctgtgagattattatattcgattttgatcagtttctaaaaagctttcaacaatggattcgtcttcaaatttgaatcctcttcgtgaagatacctcagaggaacatttagaacccatagaagctccggcgtctgtcttcgccgctcgtcctcttcgtcctccttctacgaattcgtcggagaagtattcgcctgtagaatggaaaagctattttgataaagaagatgatatatcaatcactggctctgatgatgtgtttcatgtgtatatggcaggaaatgaaggacctgttgtcttttgtctccatggtggtggctactctgggctctcgttttctatagtagcaagtaaaattaaggagaaagcacgtgtggttgcgatggacttgagagggcacggtaaatcggtttcggagaacgaattggagttatcgcttgagacaatgagcaatgatgttttggctgtcattaaggaattgtatggagactctcctccagctattgtgctagttggtcacagcatgggaggttcggtcgctgtgcaagttgctgcaaacaaaacattgcctagc

SEQ ID NO: 129911 - DNA, 689 bp, Arabidopsis thaliana
  unsure (1)..(689): unsure at all n locations
nnnnnnnnnnnnnnnnnnnnnnnnnnnnnnnnnnnnnnnnnnnnnnnnnnnnnnnnnnnnnnnnnnnnnnnnnnccacgcgtccggggagataaatctagatcacttacaaatgctggataaattcgaatccagtaatggacacaaacattcccctagtgagagagcagagatatgtcaaagagatcagaagggtaacaaaaggaatgttggtgatgcaacatcagtagtttcagtccctaagcgccggagatcatcttctggccatagtccttacaagttctcaaacagtggtcctaaagttcaactgaaagcttctgaagatgagttgcatctagagagtgacatggacaaaaatgtctctttggactcgcccgatgaaaattctgcccaagagaaaatgttagaaagcatctctccccggaagagaaagaaaagcttttcctcaaaattaaagattacagaatctgattgggctctcccccatttggaaaggaagtaggtcaccaggaaggtggtgataccaaattaaagtttgcctttgggtcccaaaaaaaaaaaaaaaaaaaaaaaaaaaaaaaaaaaaaaaaaaaaaaaaaaaaaaaaaaaaannaagggcgaccgctctagaggatccaagcttacgtacgcgtgcatgcgacgtcatagactctctantagtgtgtccta

SEQ ID NO: 129912 - DNA, 712 bp, Arabidopsis thaliana
aatacgactcactttagggaaagctcgtacgcctgcaggtaccggtccggaattcccgggtcgacccacgcgtccgcggacgcgtggggaaggtttagattttcagagccgagctctgcagatgagcaaagttaatctttcttgggatgaagatgaaccgcaccggattaagaccttaaatcagaaattcaatcctgaacagttggcaaatcttgagatgaaggagtttctagcttctgatgagagtgattctgatgaggaagacgacttgggcaatgaagttattaaccagagtaaaaaaaaggacaagaagaaagataagtaccgagctttaatagaagccgaagatgttgattctgataaagacctggaggaggagaatgaccaggatatggaggtaacattcaataccggtttagaagatcttagcaaagagattcttaaaaagaaagacaaccagtcagaatcggtgtgggaaacatatctaaggcagagacgcgagaagaagagagccaggaagaataaacagaaggatgatgattcttctccggatgatgacgacgattataacattgatagaaaggcagtgaaagatgatggagatggcgatttctttatggaggaacctcctcttaagaaaaaaaaaaacaaagggcggccgctctagaggatccaagcttacgtacgcgtgcaggcgacgtcaaaactcttc

SEQ ID NO: 129913 - DNA, 530 bp, Arabidopsis thaliana
atgattctccagctctctacgactcactatagggaaagctggcacgcctgcaggtaccggtccggaattcccgggtcgacccacgcgtccgtgaaattttgagtgattttcagagaagtttgaggatgactgtgtgattctacttctcgaattgaaatagatagttgggtcataatcgcatatccttgtcttctgtcatgtattctctgattcgccatggaagaagtttggtcgagttacagaaatggcgtcatttgagagttttagtgcaaaaggcgtctcctttgtccaattccttctcctctgcttctgctgcgcgtttgagtcctagagttggtcgaaaaggtaagagctttacagtctcttacctcgttgattcattgggtttacccaaaaagctcgctgaatcggtctcaaggaaggttagcttcgaggacaaggacaaccctgactctgttctgaatcttttgagaagtcatgggttcactgattctcagatctccaccatcgttacggattatccacaattg

SEQ ID NO: 129914 - DNA, 614 bp, Arabidopsis thaliana
  unsure (1)..(614): unsure at all n locations
aaaacatcgatatatgcaaatgggtggggatttctgtgtttgcagtccagctactgtcattgctactagccatggttctcagagcgatggtttcaaccccgaaacccgaacttgacgaagaggaagatgatgagaacccaaggagtagaacttgggacccacttcttggtccgcaaggaaaccaagcgcctgctggctcaagcaagattgaaaactggagctcccgaatcagagaaaagtatggtttgaaccagagtccaccggtgaacccgaaaggttgatgaagccaaataatcatgtttctaaaactgcatgtgtccatatggtctctgtgaagctctctttctctatgttttgctctttgcaacttctcgagtgtgcataaacatttactcaaaacagtgctgtattgtgtttacacaaacggcataagcatcttcgtttgtgtgtttgcttgtacaaacaatcctgtgaacagtttgaagttagcatttccactataacgtttcgattcaatttataatgaagaaaacaanncttataaaaaagcaaacataaaataaaagatnnnnnnnnnnnnnnnnnnnnnnnnnnnnnnnnnnnnnnnnnnnnng

SEQ ID NO: 129915 - DNA, 525 bp, Arabidopsis thaliana
atgaactgccggctcccatacgactcactttagggaaagctcgtacgcctgcaggtaccggtccggaattcccgggtcgacccacgcgtccgcccacgcgtccggcaagggaggctgttagaaaatcccttgtgctactgaagaacgggaacaaaaccaatcctatgctcccacttcccaggaagacttcaaagatcctagtcgctggcactcacgctgataatttaggttatcagtgtggtggttggaccataacttggcaaggatttagcggtaataagaacacgagagggactacacttcttagcgctgtaaaatcagctgttgatcaaagcactgaagttgtcttccgcgagaacccggatgctgaattcatcaaatcgaacaactttgcttatgcaatcattgctgttggtgaacctccatatgcagaaacagctggagacagcgacaagctaactatgcttgaccccggccagcgattattagctccacttgtcaggctggcaagggtgggggttgggg

SEQ ID NO: 129916 - DNA, 405 bp, Arabidopsis thaliana
tacgcctgcaggtaccggtccggaattcccgggtctgacccacgcgtccgtgcaagtctgagatggtttcttcagtttctaattataaaagagaatttggttttaatttctctttattgtttatctcgtcctcgatttcaagagtttgatttctgtaactttgagcttccttcaaagcaaatgaaaggtgtcgtcgtgagtatactcgaattgtatttcccatggtgaataaaggataagaaagtgttgtgtcttcatttcaatagataaaacaatctaaacatggcgtattctgttgttcggcttcgaaaggttccagctttggggatttctcgtgttcttcaagctgataaaggaagtttgtggcggtttcactttgaacctgagtttggtgaccttttgaga

SEQ ID NO: 129917 - DNA, 762 bp, Arabidopsis thaliana
  unsure (1)..(762): unsure at all n locations
nnnnnnnnnnnnnnnnnnnnnnnnnnnnnnnnnnnnnnnnnnnnnnnnnnnnnnnnnnnnnnnnnnnnnnnccacgcgtccggatttacttgacatttccagctgacagctccttcacagatgaagatgtctccaattattttggcaattttggaccagtgcaagatgttaggattccataccagcagaaacggatgtttgggtttgtcacttttctccactctgaaactgtgagaatcatattggccagaggaaatcctcatttcatctgtgactcacgtgtgcttgttaaaccgtacaaggagaagggaagaatccttgaaaacaggaggcagcagcaacaactgctgcagcagatggagagaggaaacttttctcctggttcaagtccatctggaatggattccagggatctctttgattctcatctcgcaccaaggatgttttctaacacacaggagatgatgaggagaaaagctgagcaagctgacctgcaacaagcaatagaattccaaaggagaagatttttnagtctgcagttgcccgacatggacagtgaatcgtttctccatcaccagcgtagtctttccattggntcccccgtccattttttccccctcgtgtcaaatcaaaagcatgctcttttcgntcagnaaacaaccagtgattgaaggctttcgnaggcagggtnattggtgattcagggccaacagtcttnangaacccggngnttttnttnagggnatacttgggcantaacat

SEQ ID NO: 129918 - DNA, 501 bp, Arabidopsis thaliana
  unsure (1)..(501): unsure at all n locations
nnnnnnnnnnnnnnnnnnnnnnnnnnnnnnnnnnnnnnnnnnnnnnnnnnnnnnnnnnnnnnnnnccacgcgtccgcaggcgagagagatgagcgcgacggagctgccgacgaaggaggcacacatacttaaaggccacgagggggcggttttagcggcgaggtttaacggtgacggaaactacgctctcacctgtggcaaggatcgaactatccgcctctggaacccgcaccgtggaatcttaatcaagacctacaaatctcatggccgcgaagtccgcgacgttcatgttacttcagacaatgccaaattttgctcatgtggtggtgatcggcaagtttactactgggatgtttcaactggacgtgtaatccgtaaattccgtggtcatgatggagaggtcaatgcagtgaagttcaatgattcgtcgtctgtggttgtatcagctgggttcgatcgttcgctacgtgtatgggactgcagatctcacagtgttgagcc

SEQ ID NO: 129919 - DNA, 224 bp, Arabidopsis thaliana
aatccgacaacatctcaaccgcagagactggccatggatacgaggtcgaagagagtaaaccggagttagagaaatgctaaaagcgccaagctaagaagctattagtaatttggtcttactttgagagattgttttctaggagacaaaaagagtttcaaaggtatttgaattgatttgtagtggtaatgatttgactaactttcgagtttctttcttcttttgtt

SEQ ID NO: 129920 - DNA, 363 bp, Arabidopsis thaliana
acttccaaatctccccactctctctctctctctctctcgctctctctctctctctctctctatctctctctatctctctctatcttctcttttctcctctctccaacttcttcactaatgggagctcaggagaaacggcgccgtttcgagcagatatcaaagtgcgatgttaaggaccggtccaaccataccgtggccgctgatctagacggaacactactaatctctcgtagcgccttcccttactatttcctcgtagccctcgaggcagggagcttgctccgagcgttgatcctacttgtgtccgtaccattcgtgtatcttacgtacttgaccatttccgagacttttaggcatcaaagg

SEQ ID NO: 129921 - DNA, 517 bp, Arabidopsis thaliana
  unsure (1)..(517): unsure at all n locations
nnnnnnnnnnnnnnnnnnnnnnnnnnnnnnnnnnnnnnnnnnnnnnnnnnnnnnnnnnnnnnnnnnnnnnnccacgcgtgcgacttagctccggagctctctatctttggtcatcctcctatcgggatcggcagcgcagggaagagggcagattatgaataatgatacatcaaaaaagctgggaactttggtttctgatgatggaccagtgaatgtatatgtatgggacatggacgagactcttatcttacttagatctctgttaaatggaacttatgctgagtcttttaatggctccaaagatgttaaaagaggtgtagagattgggaggatgtgggagaaacacatacttaagatctgtgacgattttttcttctacgagcaagttgaggaatgcaatgagccatttcttgattcattgagacagtatgatgatggaaaggatctttctcggtatgagttcaaacaagacgactttagtactcctactgatgacttgaacaagaggaaacttgcg

SEQ ID NO: 129922 - DNA, 767 bp, Arabidopsis thaliana
  unsure (1)..(767): unsure at all n locations
caannaatacgactcactttagggaaagctcgtacgcctgcaggtaccggtccggaattcccgggtcgacccacgcgtccggcagtcagagccggtatagtaactgcattggttaagatgctcagtgattccacccgccaccggatggttgatgaagctttgacaattctctcagttcttgcaaataatcaagacgcgaaatccgcgatagtaaaagcgaatactctacccgcgttgataggtattctccaaacggatcaaactagaaaccgagagaacgcagcagcgatattgctttcgctgtgtaaaagagacactgagaaactgatcactatcggtagactcggtgcggttgtcccgttaatggatttatcgaagaatggaacagagagaggcaaaaggaaagccatatctttgttagagcttcttcgtaaagcatgccaataataactagtcttctgacaaaaaaggttcatcaagctctcatttttattgagtttattaaattatgttaatattcttgtttaattgatttgattttttttggaattccatttgtggaatcgaaattgaagatggtgaccgaaaatggtgttcgaaaatcgaactctgttttgccccgctgtgtatttatttgttacatttgtaataatattggagatgaatgaataagtattgaattgaaaaaaaaaaaacaaaaagggcgaccgctctagaggatccaagcttacgtacgcgtgcgtgcgacgtcataactcttctagagt

SEQ ID NO: 129923 - DNA, 1084 bp, Arabidopsis thaliana
aatacgactcactttagggaaagcacgtacgcctgcaggtaccggtccggaattcccgggtcgacccacgcgtccggatctgacctcaaaatcaaacgagtttctttgataatcttcttgctaagtgttcttgttgagttttgctatggagggttcacaagtgaatatgtcagaggaagtgatttaccagatgacatgccactagacagcgatgtttttgaagttcctcctggtcctaattcacctcaacaggttcatgtaacgcaagggaaccatgaaggtaatggagtgatcatttcttgggtgactccggttaagcccggttctaagactgttcaatattggtgtgagaatgagaaatcgaggaaacaagcagaagcaacagttaatacttaccggttctttaattacacgtctggttatattcaccattgcctcatcgatgatttggaatttgatacgaaatactactacgaaattgggagtggcaagtggtccagacggttctggttctttatcccgcctaaatcaggccctgacgtaccttacacatttggattaattggggatctaggacaaacttttggctcaaaattagtacggtaagcccattttttgggatgaatccgggaaaaggacaagcggttctttttgtaggagacttgtcttacgcggatcgctaccctaaccacgacaacaagagatgggatacttggcgaaggttcgttgagcgaagtgttgcttatcaaccttggatatggactgctggcaaccacgaaatcgacttcgttcctgacattggtgaaatagaaccattcaagccttttatgaatcggtatcatacgccacataaggcatcaggaagtatctctccattgtggtattccatcaaaaggtcgtcagcttatattattgttatgtgaggtggctgatgttatgggatatacacacctcaatacaaattgttgtaaaaggagatacatggagtgaaatctacattttctccatggctttttttcatagtgcatagcccgttttacatagctattttcattattcatggaagttaatcatttaaagttat

SEQ ID NO: 129924 - DNA, 488 bp, Arabidopsis thaliana
ggaaagcctggtcgcctgcaggtaccggtccggaatatccgggtcgacccacgcgtccgccttatcgcttccttctcgatacgctctcttctccggctcgactcctgttcgcatcagcaggaggagcaacctctgcttcgccgtctccgccgcacgagcttctcgccgggattctatatcattcccccagcctatcttcctccgccacgtcatctctacccagtcgaatttcgagatcgatcgaaattatagagctcatgcgtcttctatcggatcattcgaggatagctcttcttctaacttactagaagacgccagttccgatggtttcgatttgggcagctttgtttctttcgcggaagcgctttgtattttatcatccgccgtgatttcagtggttctcgcggggaattacgtggtggttggtgaaattgcgaaaaaggtttctgtctttaggctcctgccggattggttggctcagcccgcca

SEQ ID NO: 129925 - DNA, 579 bp, Arabidopsis thaliana
  unsure (1)..(579): unsure at all n locations
nnnnnnnnnnnnnnnnnnnnnnnnnnnnnnnnnnnnnnnnnnnnnnnnnnnnnnnnnnnnnnnnnnnnccacgcgtccgcccacgcgtccgcccaaccaaagtttctcatcattcatttcagatcagccatggaggacgaggtaatcttacatcttttcgtatatatttattataaacacgatttagctctgtttttccgccggagattataatttgccggagacctttattcgagatctgattgatcatttcttatatgcctacattaactttgatacccattagatttctttttgatggaaatcgatttgatgtgaaattagctgctcgttactctggctttttccactcatcctctatagatgatctggtggagtgtttgtatagagaagaaagacatatgagttcattagaattgtagaaaagtgatggaagattttccgtcaaatcgttttctcaaaggcgtggtggtctattgttgctcgactggaattgtataatagagtttctctgtcaaaccattttggcatttttttagtagacttgggaactgaaagagaagaaaagatggatctttg

SEQ ID NO: 129926 - DNA, 535 bp, Arabidopsis thaliana
tacgactcacttttagggaagctggtacgcctgcaggtaccggtccgagattcccgggtcgacccacgcgtccgcccacgcgtacggccacgcgttctcctcgacctcttcccagtcgtacgttctcgtgaccaccgtgctgaattagattcttcaaagcaatcaacttcacagtcagttgtggatcgagaggtaagtgaatggcacgatgcaccgactgttgctgagcctaaagacttgcaatatctgaagactgatcaagacaaattttgggaaaatctgaaagcggctgctgagaagaaggttggtggggttgaagcagagagattttgcaaggctttcgagaaactccacaagaaacttgtgtatgaagaattggatccagaagctgcaaagcgatatttactaaactcttaaacttctgtcttctatatgatgtgcttcccaaagtttggttaatgtggagacacttccaagtcttggcctttttctttatcggaatttatgaatttatgagtgcgcaaaaattatcttt

SEQ ID NO: 129927 - DNA, 1258 bp, Arabidopsis thaliana
  unsure (1)..(1258): unsure at all n locations
ccnnnnnnnnnnnnnnnnnnnnnnnnnnnnnnnnnnnacacagcataaaagtagctctattgactttttttcttcctccaaactctttttacgtcaagcaatggaggatcttgatccaacctacatccaagcaccagagcatagatcagattcgaatttcatccctaaccaaccagaagaaatacccgtgattgatctctcgcgcctcgatgaccccgaagatgtccaaaacgttatctcagagatcggtgatgcttgtgaaaaatggggattttttcaggtgcttaatcatggtgtgccttctgacgcaaggcaacgtgtggagaagactgtgaagatgtttttcgatttgcctatggaagagaagataaaggtgaagagagacgatgtgaatcctgtagggtatcatgatggagaacacaccaagaacgttaaagattggaaagaagtgtttgatatttatttcaaagatccaatggtcattccttcaaccactgatcctgaagatgaaggcttaagacttgtttacaacaagtggcctcaatctccttctgatttcagggaagcatgtgaagtatatgcgagacacgctgaaaaattagcgttcaagctcttggaactgatttcgttaagcttaggcttgccaaaagagcgttttcatgactacttcaaagaacaaatgagttttttcaggataaatcgttatccaccatgtccaagacctgacctagctttaggtgttggtcaccacaaagatgccgacgttattagtctattggctcaagatgatgttggaggattacaagttagtcgtagatcggacggtgtttggtttccgattagacccgtccctaatgctcttgtcatcaatataggcaattgtatggagatatggacgaatgacaagtattggagtgctgaacatagagtggtggtgaacacaacaagagagagatactcgataccattcttcttgttgccttcacacgatgtggaagtgaagccattagaagaacttgtgagtcctgaaaaccctccaaaatacaaaggctataaatggggtaagttctacgtcagtaggaatagaagcgattttcgaaaactggaaatcgaaaacatccaaatcgatgacttcaaagttaaaacttaatatactatgtatcggctttttttttgtttaccaagctatgatattaatcaaataatgtgtgtgggacttaatttgtgtcggaaagaataaatttgattacttttgaat

SEQ ID NO: 129928 - DNA, 516 bp, Arabidopsis thaliana
ttaggtacacactatagaagagctatgacgtcgcctgcacgcgtacgtaagctcggaattcggctcgagggtcattccttcaaccactgatcctgaagatgaaggcttaagacttgtttacaacaagtggcctcaatctccttctgatttcagggaagcatgtgaagtatatgcgagacacgctgaaaaattagcgttcaagctcttggaactgatttcgttaagcttaggcttgccaaaagagcgttttcatgactacttcaaagaacaaatgagttttttcaggataaatcgttatccaccatgtccaagacctgacctagctttaggtgttggtcaccacaaagatgccgacgttattagtctattggctcaagatgatgttggaggattacaagttagtcgtagatcggacggtgtttggtttccgattagacccgtccctaatgctcttgtcatcaatataggcaattgtatggagatatggacgaatgacaagtattggagtgctgaaca

SEQ ID NO: 129929 - DNA, 492 bp, Arabidopsis thaliana
atacgactcactttagggaaagctcgtacgcctgcaggtaccggtccggaattcccgggtcgacccacgcgtccgcgtttttcatgggaaaggctgtgttaccaggaagagaagtgcctgcagtgttcgatcacagagccaaaggatattcattgaccattcgtccagacggtaacccttacaccagctttgtattttgcgttgtggtttcccgtaaccaaaaaagtgataaaaccattcctccctcactattgtggcgtcgcatcatagctcaagatgagggctatcccgttgaggtctggaaccgcataggagatgtcttcaaatatcgaacggaacatctattaatatttcacttcgactttctagaattcgacaacagggatatagtgttcgaattcagcagcgaatcccacgacttcgacattattgaatgtggtgctaaagtcttggccgaaaagagcatcaaagaaagctatgaatctggatccg

SEQ ID NO: 129930 - DNA, 650 bp, Arabidopsis thaliana
  unsure (1)..(650): unsure at all n locations
atgatactgccagcatannnnnnnnnnnnnnnnnnnnnnnnnnnnnnnnnnnnnnnnnnnnnnnnnnnnnnnnnnnnnnnnnnnccacgcgtccgcccacgcgtccgagaaaacaacaaatccttgagatccatgtcgagagagaggatcaaacgtgaattacctcctgttcaagagcatattgataaattgcggaaagtgatagaggaaggcaattactatggagctttgcagatgtataaatctatcagtgcaagatatgtcaccgctcaaagattctctgaagctcttgatatcctcttttcaggggcttgcattgaactagaacacggcctggtgaattgtggggcggacctagctattttgtttgttgacacactagttaaagccaaatctccttgcaacgatgaaactcttgatcgtatcaggtgtattttcaaattgtttcctcgggttcctgtaccacctcatttggtagatgtgagtgacggtggagatgttcaaaatcttcaaggatctcttgggggagccagattcccgggtgggaaacttanntncggtcttnnaggnctgtatnaaatggcttnagnntttgnggccncggcctggnatcctaagttnatntatcttgggggtttcntncncttagg

SEQ ID NO: 129931 - DNA, 746 bp, Arabidopsis thaliana
gactcactttagggaaagcacgtacgcctgcaggtaccggtccggaattcccgggtcgacccacgcgtgcggcctaccggctaagtccggtttgttcttccgacttgtttaagataatttttcgactttgttcggatcttttgtagccttttgcagctttgaaacccagtttttttgaagctgtaaaattccaggagtttagatggattcttgcattgttggatggttgattagtctaccaagagaaggtaaatccccgcttgtcctaatagatcgctaaaagcgtcggttctacttttggttgattcaatcaagtggttgcggttgatggaaacgaaatatgaagatttggagttctcatcgtgttttgatgattctctcaagaatattttggatctggtcaactgaggtcaaatttccggtgagcgagtttaaatccaaccatttcttccggtgatcaatcgcaaaaggcaataggtacaatagaaggctataggagtgaaagcttcatgaagaacctaaacaaattatacgtcggccgattacgaaagtttccgacaaagaactctggttagtgatgagtcggtgaacggcgaagttgacgaagcttcataacccacgttgcataacacatgtttcaaaattgttttccttatcttgtactgttttgcaattagtggaccttattaggcctttctttgtattgactatatgctcgtttggactttataaaatatatatatgtc

SEQ ID NO: 129932 - DNA, 408 bp, Arabidopsis thaliana
  unsure (1)..(408): unsure at all n locations
actcactttagggaaagcacgtacgcctgcaggtaccggtccggaattcccgggtcgacccacgcgtccgggaaggagaacaagaacatttggatacagaagaattgacacaaacaactaccccatgacacaatacacattcttgttgtatcttcttcttttttcacacgagattattcttctatgtaaccatggcgaataattattgtaaagtctatacgcacgcgagctatatcaaaagatataagcagtatctatatctacaagttaccgttaggtttaattaaaaaaaaaaaaaaaaaaaaaaaaaaaaaaaaaaaaaaaaaanaannnnnnaaaaaaaanngggggggcggcccgtttaaaggaaccaagcttaccttcccgtgcaagcgaaattataacttt

SEQ ID NO: 129933 - DNA, 866 bp, Arabidopsis thaliana
acccacaagtccgctttgtcgagaacaagatggtttcagttgacaggatcaaacagttcactgatattccctcagaatccgagtgggagagcgaaggaacccttccaacctgcgaactggcccttccatggcaatgttcttctcgaagacctcaaggtgcgctacagaccgaacactccacttgtgctcaaggggatcactctcgacatcaaaggaggagagaaggttggtgtggttggacggacgggaagcgggaaatccacattgatccaagtcttgttcaggctcgtagaaccatcaggagggaagataatcatagacgggattgagtataagcactctagggctacatgatctaaggtcaagattcggaatcattccgcaagaacctgtcctcttagaaggaaccgagagaagcaacatcgacccgacagagcaatactctgacaaagaactctggaagagcctggagcggcgtcaactcaagggtgttgtagctaccaagcctgagaacgctcgatactttggaggttgacaatggggagaactggaacgtatggcagaggccgcttttatgcttacgcagggttatgcagtaacgcagcagacttccttttctagacaaaacaactgcatcccttgattcccaaagcgaccccgtgattcaaaagattattttatgaagactttggcgtcgtgcacccaaaattaggcttggcccacccgggatttcctaccagtgatggtacgggtgaacccaggccccttgggcatttggttgcccgggtaaacgcccaaacagaaatatccgataagcccccgggctcacgctttgtttggaataagggccccgcccttcttttttt

SEQ ID NO: 129934 - DNA, 543 bp, Arabidopsis thaliana
  unsure (1)..(543): unsure at all n locations
agtagtacggaagataaatctgctcttcggcgcgtagtatcgccgnnnnnnnnnnnnnnnnnnnnnnnnnnnnnnnnnnnnnnnnnnnnnnnnnnnnnnnnnnnnnnnnnnnnccacgcgtccgcggacgcgtgggaatataatggaacatatggtagaatgttgagtttggctactgatgctttggcagagaacaaacttgagaccaaagacttatggcaggagccgaaggaacaagcttcggcgtggaagccttgtgcggatcaacgttctttgactcctgacgatggcaaaaatggatatattatggtaactgcaaacggagggattaatcagcaaagagttgctgtatgtaacattgttgttgtagctcgattgctcaatgcggctctcgtcattcccaaattcatgttaagtgacgtttggacagatgcaagtttggagatatctaccaagaggaacattttatggagtacttgtcgcccgatattcggatagtaaaggaactaccaaaaagagcttcattctgttaatcttgaagaa

SEQ ID NO: 129935 - DNA, 659 bp, Arabidopsis thaliana
  unsure (1)..(659): unsure at all n locations
ccagctctctacgactcatatagggaaagctggcacgcctgcaggtaccggtccggaattcccgggtccacccccgcgtgcccggaaacaagttctatggaaccataccggagattgtatgcgagattgcttgtctccaaaacgtttctctctcgaataattacttcactcaggttggtccgaaatgtagaaaactcatcaagagaaaaattatggacgttagtatgaattgtatacttgatcttccaaaccagaaaacgccatcggagtgtgctaagttcttcatgcggaaacagacttgtcctaattccaagtctttgtttactgtcccttgtgataagaatccaaaccggggtaaaccggatcaagaacgattggaggaggaaaaagctcaagtttctcatccggtaacttacaacacacttaacccggaccggcttcggaatctataaccttggccgttttttcttatcaagtaacgatatatatatatatatatatatagccaaagccaagttgtttataatttgaggtgtctaatgcaatataagtgaataaatgtattgtagttgtgtactttcggatcatcactatatgtattttcattgatgtataatccatccttctgttttttcttnnnnnnnnnnnnnnnnnnnnnn

SEQ ID NO: 129936 - DNA, 498 bp, Arabidopsis thaliana
acgcctgcatgtaccggtccggaattcccgggttgacccacgcgtccgtaccgcgcgaaaagacgacagaaggaggggatccatcactgctctttacctcaccttcgccaacaacaggttcacgggtccaattcccgaaagcataggcaacatcaagtacctacaagaagtccttttcctgaataacaagttaaccggatgcttaccgtaccaaatcggaaacctaacccgagccactgttttcgatgttgggttcaaccaattaaccggtccaataccgtactctttcggttgcttagaaacgatggaacaactcaatttagccggaaacaagttctatggaaccataccggagattgtatgcgagattgcttgtctccaaaacgtttctctctcgaataattacttcactcaggttggttcgaaatgtagaaaactcatcaagagacaaattatggacgttagtatgaatgtgtctgcttgattctctcaaacgca

SEQ ID NO: 129937 - DNA, 431 bp, Arabidopsis thaliana
  unsure (1)..(431): unsure at all n locations
cacaggagatttcccaactagtgtcttgaaaggaaacaatctcacgtttcttgatctcaggttcaattctttctcaggctctgttcctcctcaggtctttaatctcgacctcgacgtcttgttcatcaacaacaacaatcttgttcagaagcttccactcaatcttggatccatcactgctctttacctcaccttcgccaacaacaggttcacggggtccaattcccgaaagcattaggcaaccatcaaagtaccctacaagaaggtccttttcctggaataacaaagttaacccggatgcttaccgtacccaaatcggggaaaccttaacccgaggccactngttttcggatgttggggttcaaccaatttaaccggtcccaataccgtacttcttttcgggttggctttggaaaacgnttgggaaccaa

SEQ ID NO: 129938 - DNA, 725 bp, Arabidopsis thaliana
accactcactttagggaaagctcgtacgcctgcaggtaccggtccggaattcccgggtcgacccacgcgtgcggccggggagttttttattttgtttcttcccaccttataatcgccgtgttgaatcttcaatttcgtttttttgtctaatttcgagctcgattttgacgattcgttttgtttgtgatctgattttgagttgtttctccattacgcttggatttcgccgtcgcagatctcaaaaggaagtacgatcatggaggaaggttgcaactgtgtttactcaaggatggcctcaaaattcagcattggtttattgattattttggcgatcgttcttctaatggttcgtgtactgtatgttatataccgatgtggcaaaccacttccaaaaggagcttcacagtcttttactactcttattgttcttggttctgggggacacacagcagagatgttgagtctcctctctgttttgcggaaggatagatttacaccaaggttttacattgctgctgctacagataacatgagtctccagaaagctcgtagttttgaagattctctagctgagaagcctgctgttaaggaagcatcatcacagttcatgcaaatttaccggagtcgtgaagttggtcagtcttatgtgacttctgtttggactaccattgctgctattcttcacgctctgtggctaatgatccggatcagaccacaagtgattc

SEQ ID NO: 129939 - DNA, 516 bp, Arabidopsis thaliana
ccagctcctatcgactcacttagggaaagctggtacgcctgcaggtaccggtccggaattcccgggtcgacccacgcgtccgcccacgcgtccgcggacgcgtgggatttgttgtgttcccggcgacttctacttttcacctttcttctcggcgtcgtctaatttctagggttcccctgtatttcaccgtcaagagcaaatccaacatgtcgtcgctgcgtaatgctattccacggcctgctcataaggagcgatctcaaccggaagcgaggaagaggtttggcatcctcgagaagcataaggattatattatccgagctaatgcttatcacaaaaagcaggaaactttaaagatacttaggcagaaggctgcattcaagaatccagatgaattcaactttaagatgattaatagtaaaacagttgatggacgtcatagaccaaaagatgaggtaaataaatactctgcggaagagcttatgattatgaagactcaagatattggatatgtgttcc

SEQ ID NO: 129940 - DNA, 506 bp, Arabidopsis thaliana
gaccatattggaatgttgacgcctgatgtaccggtccggaattcccgggtcgacccacgcgtgcgtcattcacacacactcatggcttcttcttcttcttcttcttcctccatcacaatcatcaccaccttcctcttccttctcctccacacaaccgccaaaaaaacctacatcatccgcgtcaatcactccgataaaccggaatcattcctcactcaccacgattggtacacatctcaactcaattcagaatcatctcttctctacacttacacaacctccttccatggcttctccgcttacctcgactccaccgaagccgattctctcctctcctcctcaaactcaatcctcgatatcttcgaagatcctctctacacacttcacactacgcgtactcctgagtttctcggtctcaattccgaattccggtgttcacgatctcggttcttcttctaacggcgttatcatcggagttttagatactggcggttaggccggaatct

SEQ ID NO: 129941 - DNA, 311 bp, Arabidopsis thaliana
ggtcgacggcaaaagttgaaaataaaacaataaacagtcgaaattctccggcgaagatgagaaccggaaaaggaaatcaagaggaagaagattacggagaagaagactttaactctaaacgtgaaggtccttcttccaacactactgttcatagcaacagagattcaaaggaaaatgataaagctagtgcgatacgttctaaacattcggtcactgagcaacgtagaagaagcaaaatcaatgaaagatttcagatattgagagacctaattcccaacagtgaacaaaaacgtgacactgcttcattcctt

SEQ ID NO: 129942 - DNA, 734 bp, Arabidopsis thaliana
  unsure (1)..(734): unsure at all n locations
gctctcnnnnnnnnnnnnnnnnnnnnnnnnnnnnnnnnnnnnnnnnnnnnnnnnnnnnnnnnnnnnnnnccacgcgtgcgatgtcttgctagaaggaacactcttgaaacctaacatggttactccaggatcagagagtgcgaaggttgcaccagaggtgattgctgagcacactgtccgtgctcttcagaggacagttccagctgctgttccagccatagtgttcttgtctggtggacagagcgaggaagaggcgacaagaaaccttaacgcgatgaaccagttgaagacaaagaagccttggtcgttgtctttctcctttggaagggcgttgcagcagagcactttgaagacttggggaggaaaagaggagaatgtgaagaaggctcaagaagcgttcttggtcagatgcaaagctaactctgaagcaacacttggtgcttacaagggtgatgctaagctcggtgaaggtgcagctgagagccttcacgttaaggattacaagtactgaagaaagaggctgaggatcgtagtttttatatcatcgtttatgttcttgctttcactttctctgttttttgtttggtgttttgtttagaagagtggtggcaccaaagaaccccgtttattcttttttatgaggtctttgtgttcttaaaaaaaaaaaaaaagggcggccgctctagaggatccaagcttacgtacgcgtgcatgcgacgtcaaagtncttctat

SEQ ID NO: 129943 - DNA, 445 bp, Arabidopsis thaliana
gagagaaagaaagcgaacaagggttgttgtctgagacgacgaaagctatgggtctagaggatgctggagatttggttctccacatcgtcttatccaaaatcggccctgaaaacaccgcgagagtggcttgtgtcagtaaacgccttaaggtctccgcctccgaggaatctctctggtctatcttctgctccaatgatcttaatatctctactcctctcgatccccatggagatcctgctccttccttcaagagagcatatcaattgtggagggagtcatttagaatgtatcccttggaatctggttaaaagagttagactttgttggggcaacctcaaaacaatggttgaccttaaacttccctgaagcaaaaggcaacacttgaggaaaggtgtcacagaagatgatcttcaagaattcgagacttctctcaaagtgaaacttc

SEQ ID NO: 129944 - DNA, 527 bp, Arabidopsis thaliana
aatacgactcactttagggaaagctcgtacgcctgcaggtaccggtccggaattcccgggtcgacccacgcgtccgacaaaatggcggcaatcagaacgatgacgaacatgattctacgcgagttcatccatcatccacttctccttcactcttcatcgaaatcgtgtcaatctcttttaccatgtctccgtctcactcccctaatttctccaattcactctaattcccggctcgtatccgtccgatgtgcggcatcgacctccggtggaagcggtggtgatcggaaggtctcttcacggttgtcgcaggtgcaacagatgcttcatgaagccgaagagagagctagttccgctggcaatgagcctactcctcaaatcactctagacaatgttacacttaactttgctagaagtggtggtcctggaggccagagtgtgaacaaattgaataccaaagtagatatgcgcttcaatgttaagaacgcgtattggctgagtgacaggatcagagagaaaatcttactgac

SEQ ID NO: 129945 - DNA, 618 bp, Arabidopsis thaliana
atacgactcactttagggaaagctcgtacgcctgcaggtaccggtccggaattcccgggtcgacccacgcgtccgtgggtttggtgtgtatcgatttgctaatggacactgttatgaaggagcatggcatgaaggtcgtaagcaagggtttggtgcttactcgtttagaaatggtgatgctaaatctggtgaatgggattcaggggttcttgtgacttcacttcctcttacgagtgagccagtttcaagagctgttcaggcggctcgagaaacagcgaataaggcagtgaatcggagacgagtagatgagcaggtgagccgagctgtggctgcagctaataaggctgctacggctgcaagagtggctgctgtgagagccgttcagaatcaaatggatggtaaattttgtcaaagttgaaaaaaggaaaatgtaaaaaatctttttttttaccggtttctctgtaaccctgaatcgaaagtttgtttcagaggtttgtaacagagagttaattttcgatctttttactaatgtaacaaaactgtaaatagttgaagaagaagctttgtttttgttgtaaaatcaacggcttgaaatggagcttattttggttttgatcg

SEQ ID NO: 129946 - DNA, 354 bp, Arabidopsis thaliana
  unsure (1)..(354): unsure at all n locations
cttctgtctgggtgctagctttttcttntgtttctgtgtcagaaatggagataagtatgcaggagagtactttggagacaagattcatgggtttggtgtgtatcgatttgctaatggacactgttatgaaggagcatggcatgaaggtcgtaagcaagggtttggtgcttactcgtttagaaatggtgatgctaaatctggtgaatgggattcaggggttcttgtgacttcacttcctcttacgagtgagccagtttcaagagctgttcaggtaatatttgttctcacccgaggtggttggaatcgcaattgccaaaaagtggagaactttaacttgaaaataatgcaggcggc

SEQ ID NO: 129947 - DNA, 532 bp, Arabidopsis thaliana
  unsure (1)..(532): unsure at all n locations
cannnnnnnnnnnnnnnnnnnnnnnnnnnnnnnnnnnnnnnnnnnnnnnnnnnnnnnnnnnnnnnnnnnccacgcgtccgacttcttcctctatgctgctgcttcggaacttctctacggtgggaagagttgctcaatctgttcgtgtgacttcgaggatcttcttctccaccggagaattgattagggttcttccttatactcgttctaaaagattgatctgttctactcgtgctgctcataatgaagaagccgccgcgaaagctgcggcttctgttgctgacaccggagctccgaccatatttgacaagattatagcaaaagagattccctcagatattgtctatgaagatgaaaacgttttggcattcagagacattaaccctcaggctcctgttcatgttttggtcattcccaagttgagagatggcttgacctcgcttggcagggctgtaccaagacacgcacaggttcctggccaacttctacctgcatcgaagattgttgctgaaaaagagggaattccttgtga

SEQ ID NO: 129948 - DNA, 517 bp, Arabidopsis thaliana
acgactcactatagggaaagctggcacgcctgcaggtaccggtccggaattcccgggtcgacccacgcgtgcgcgaacaaagagagaacaaaagaaacagaacaacaatggcgaaattaaatcgttccaacattggtctctcactgttactatctatgttcctcgcaaactttatcaccgatcttgaagcttcttctcatcaagatctcaaccaaccgtaccggaccggttatcactttcaacctctcaaaaattggatgaacgatcctaatggaccaatgatatacaaaggaatataccatcttttttaccaatataacccatacggtgccgtttgggatgtgagaatcgtgtggggacactccacgtcagttgacttagtcaactggatttcacaacctccagcttttaatccatctcagccgtcagatatcaacggttgttggtcaggctccgtcacgattctaccaaacggcaaacctgtgatcctctacaccggcattgaccaaaacaaagg

SEQ ID NO: 129949 - DNA, 698 bp, Arabidopsis thaliana
attcccggcccagacccacccgtccgaaacaaatcaaaaaatggatttttgttcaagaatgaaatcttattggaggtgtccatatccggttcatgcttccgaaccatatcacatcccagatctgatgaaataggatgaattgagacggtattttgtaaatacgtaattatcttgaatatattaactatttctttattttccgatcgcctggaagggacaaaagaaacatcttgttctttcttcaacaatttctgatccctagtggacctctcagtaggattcgaacccagatgaagttctgaccatctgtcagagaaaaaagaacgaatggctcttgtaggattcccaagaaattcttcgctttcttccggaagcagatgattattcattcgcttctcacgttccgtgaatagccggggcattgaggaatagccagaaaggtatttagggaatcggtctgattctatctctcttccttccgtttgaataaaggaaggatccaaaagaatcgatctttcttttagttgttgaatctctctttgattgatcaatgtgtgatagtgatattccgaatcctcattactaatggaatcgaaaggatctatgaattgatcagaagatccgttcaattggctagaatccgttccttgaacgaaactagatcttgtagaatcaaattgaatatttgacgatacgtt

SEQ ID NO: 129950 - DNA, 504 bp, Arabidopsis thaliana
ctacaattgtctcaaaaaatccaatatacatacattattggaccttttgaataacagtcaagaagaccttatcaaaattgaacattttcacgtagaagatgtaaaaaagatattagacattctagaaaaaaaatagaaaaaacatttcaaaaaaaattgactaagactaaaaagtcaatttgaaattgaaatggattttcaaatttcaacgtaatttctattttccagtcgaacccattttaattaattaattaaattaattagaattagatatgtatctagggagaattcatttggaaatgactactccctagatacctccctagatacccacgtcgtttattttacaattgaataaattgaattaaaaaagacctaaagttagagatttatcaatcgggaatgttgctccaatacctaaccaccagggccggcgggtgccaatcaaaaaagacggtgtcgctactggacgacgaatatggattttgaaacttattaacattt

SEQ ID NO: 129951 - DNA, 725 bp, Arabidopsis thaliana
acttcttagttcttacagtataaatacgttattttctttaataaaagagagatacgttgatgagttcactatggttaagaaataaagagttggttccactaaattccatcaattaaatatgatcgtcactttctttgtccccaagttgcgtatacctataaatacatctctttaccttctcctctgtttcctactcatctttcctttttccacatcaagttagaaaaacaaaagtagaagaaattatctccaaaacacacaagtccagagagaaacaaaaagagattacacacaacaacaacaaaaatgagaccattgagcgtacaatcgaagtttgaagatgtggcaacgtcaacctccgttaatcaccacggagtgacgccgcaatcaccgtggcactcgccggttccttacctcttcggcggtttagcggcgatgctaggactaatcgcctttgctcttctcatcctcgcttgctcttactggcgcctgtcttcctccggcgaagaagatggtcaaaacgtagatgaagagaaagagagccggtctggagataaggcggcgaacggagcttacgaggagaagtttcttgtcataatggccggagaagatttgccgaggtatctggcgacaccggcgatgaataagtgtacgtgtggggtcacgagggtaaaatggggatttctcaagaagaagtgttgccaaagaggaagagaagatgagag

SEQ ID NO: 129952 - DNA, 507 bp, Arabidopsis thaliana
ggcggcacggtttcacagccaccatttacaatgtctccgcctcctcttttaggtggtggcgcggcgggaaccacagattcacctcctccgcctcttttaggcagtggcgctccgggaatcactggttcccctcctcctcctcttttaggcggtggagctccgggaatcactggttcacctcctcctcctcttttaggcggcggtgctccgggaatcactggttcaccccctcctcctcttttaggcggcggagctccgggaatcactggttcaccccctcctcctcttttaggcggcggagctccgggaatcactggttcacctcctcctcctcttttaggcggtggagctccgggaatcactggttcacctcctcctcctctttttggcggcggagctccgggaatcactggttcacctcctccacctctttttggcggcggagctccaggaatcgctggttcaccccctcctcctcttataggcggtggtgctccgggaatcacc

SEQ ID NO: 129953 - DNA, 628 bp, Arabidopsis thaliana
aacaaacaaacatttagaaacacaacttaacaatgtaaaaaacaaaaaaaaaaggaaaattcttatttcttttcatagattaacctgaagcaatgcttttagatttggtaaaagaactgccattgacaagctcctcatgcttctttcgcaatgcagattgtctctttcaaaacaatcaaaacacagtaccaattggaatcatcaagattggaattttgcagagctcaatgaaacagaacataatgaatttgctttaccaagaaacgtatgcgatttcgatcttcctcactgagaacaaactgcattttcaattgaacatttccatagccattgaatgaaagtttctcttccaagaaaccactctctattatcattcttggctctatctctacctccaaaaaccctcaaattcagaaaatctaataaaaccactaatttgatctctagagttgtaaaaagaacacacctttctgtaatatttggtttccattaacatctaacagagtaacaatcaaattctctcggagcctcgtaactggactgtgccacattgaatccaagaagaaacaataaactgtcaaaatttctcaaaaagttccaaactttagaaattcaaaaggatcagtag

SEQ ID NO: 129954 - DNA, 631 bp, Arabidopsis thaliana
  unsure (1)..(631): unsure at all n locations
atcgatattcttgtttactactcagtaaacgtctatcaacaagctaaaaagtgaatttttttgggggggaagttcaaattagactagacaaacaaaaaaaagttcattttcctcccttgcttgcatatgtatagataattcaaatatagatagatgcagatctatagagagtcttccatctttttgcatttcccgaaaattccctgttgttagatcagattctaatcaattttgtagaaatttgtaatggaagaaaaatttttctttattaatgactattaactattataagatattaagacaaaaagaataataaatctaacaaggggattatgatacatctagttgtagttgattttgaaagatgaataagtccatttatttagtttggctttttttgtacctatttttttattctatttctatttctattcggnnctattctatatattnctatcaggttggatatcaatattagatatattattacttaaagatacttagtataattatatattagatataatagaaataatttaaattcaagatattcttagatttttttagaattcaaaatttttcattatcaggtacaaatattaaaatgtggttcccattttttgacaacctt

SEQ ID NO: 129955 - DNA, 518 bp, Arabidopsis thaliana
agccatttcgaatgtgaaagtgcctttctctctataagaacggtgcgttccggggtgtgaagtggaatgatttcataattggggttttgaataagacaaccttttcatttttcatttttttttcaatatgaaaaagtaataagaatgagaggtgttaagcttttcatcatcctggcgtcgagctatttttccgcaggacctcccctacagtatcgtcaccgcagtagagtttaaccaccaagttcgggatggatcggtgttgttcctctacgcctaggacaccagaatatcgaaccatgaacgaagaaaggcatgcgagaaaagcatattggctagtgatcgtgaggctccaattcttgactggagtggacaccaaaggcctctgcccccccatcctttggatagaagggcagaatattaggtgttttcatgtcgacaaagatgtgaacaatggttgtttcttgccggcaaagtggtgaactatgaaaatagatcgcgagtgcctgttcgaattgatc

SEQ ID NO: 129956 - DNA, 499 bp, Arabidopsis thaliana
cggcacgagcggcacgagcggcacgagcaaaaacaaaatttgcttcgccgttttcggctccggcgtgattcttgagaagaactgaagtggagagagagatctgaaatctcaatctccgatttaacttgcgacaatgcttcaaattcgtcttcggagggattccccgacggaaactggaaatggtgcgaggccttctccgacggagacggttactgtagcctgtcccgaccatctcgtcctcgccgatcttcctgttgcgaaaggaatcggttccgtgactcccaccaccgtaatcaagcccgtcggtcgtcgttctcgccgtcagctaggcgagagagttcacttctgcgttcgttgcgattttccgattgcaatctatggtcgtctgattccttgtgatcatgccttttgccttgaatgtgctcgcagtgattccatctgctatctatgtgatgagcggattcaagagattcaaacaatcaagatgatggaagggatc

SEQ ID NO: 129957 - DNA, 505 bp, Arabidopsis thaliana
cgccacgcgtcacgcagacggagacagctcacggtttgatgatgctcctgaagagatggattgtggtgactctagttttggggattcgagtagttctttacctgctcatgtgaggaaggagattttagagttagggtatcctgatgatggttataattacttggagcatttgagagagattaagaatactggtggtggttctaatttctatgtgaatcctaaatatgaggttgctcagttacctcgtgatgttaaggcttatgatgcgtctcgtgttaagatctctggtatggtgaatgaagaaggtaatgataataagttgatgtatagtgttgcgtccaagactgtctaacgttcaggtgcagaaagctattgatcctgaagttgctgcgttgcttgaaaacagtgatgggtctgagtttggttctgatgttgaggatttggaagaagatttgttgttcaagctaatcttactcaaaagggtgaatcttctggtgtgagcaat

SEQ ID NO: 129958 - DNA, 521 bp, Arabidopsis thaliana
gctaagtgctcatccaccaccttcctcctcctccttcttccctcaccttttgtgtttctttcgtctcgtggcttttcattaattagggtttcgcattttcaatcaccatcatcccaccacgttttcgttaatgaactgagagcatttcctagggatctcaatggcaatggagaaagatctcagtccaaattctccacggattagaaagctaagggatactagttaccctactacaccaacgtctcgaatgaatactaataaccagagagataaccattatcctaacattcctaattcaccaagggattacaattatactcctagctctccaacagctcgcattcgacaccgcaggcgatcaagcgagaatttagctgaggtgaacagaagcaatgtaagcagagtaagcaatttgttacttggtgataagaacaagtacagatcaatgtggataaggacatgctcatctctctggatgctcgggtggagtgtgttataatctacatgggtcatctctacat

SEQ ID NO: 129959 - DNA, 411 bp, Arabidopsis thaliana
tagacccacgcgtacggtctctctctcagtctctctctaaacgcataatcttacaataaaatggtgaaactcgcgacggcgcgtgagattagaacgtacggccctcggcttgggaggagcagagccgagtacatcaacgcaggtctatacttgtttgcaaccgtggtgctcatcggcggtttcacagcgacaggattctcatgggaaccaagatccggcctcgtccttattctcttagctctcgttcttataaccgccgtgaatgttcatgatcttgtggctcatctagctggaatcgattaccggttaaggttaatggagtatgatttgcaactggggctagtggaatttgcagtccctctggttcagatagcgggttcggtagtgttttttcttgggaatcttttttcg

SEQ ID NO: 129960 - DNA, 803 bp, Arabidopsis thaliana
aaccggggattaacacaatttttccaccccaggggaaaccaagcgtattgccccattggctttaccccccaggtcttttaaatacggccctccaccaataagggaaaacctggtaccgccctccaggtaccgggtccggaaattcccggggtcgaccccagggtccgcggttttaaaaatgtggaatgtgcatggtcctataagtacggcatgtcggtttcaagcccaagccccagcaattgaaaatttgtactgcatgcagccaatatttaaggtaagggagacatttttttactgttctgaactagttagaaattagaagtgttgattacttttgagttgtgcctattttgctagtttttcttagtcttggttacgaaattaagctggtctactggtgttctgtgcttgattgcgaatattgcatgcaaaatggatcccataaacatgtgtcgttcttaggttacttaatttcatatgacctctcaagccgctacttcagaatttctttgtcatgtaagacatcattagaactatagatgtacttgttggtttccatatctctggtctctatggcagttgaaggaaagagagcctcagattctaaattctctgttcgtgggactgcgtttttgctggcttctgatgctacacagtttctttgtttctgtaatagattttagataaacttttgttgatacttgctcttctgttaattttgaatgaagcgccaaaaaaaaaatataaaaaaaaaaggccaagggcggccgctctataggatccaagcttacgtacgcgtgcat

SEQ ID NO: 129961 - DNA, 503 bp, Arabidopsis thaliana
  unsure (1)..(503): unsure at all n locations
ttttcttagtcttggttacgaaatttagctggtctactggtgttctgtgcttgattgcgaatattgcatgcaaaatggatcccataaacatgtgtcgttcttaggttacttaatttcatatgacctctcaagccgctacttcagaatttctttgtcatgtaagacatcattagaactatagatgtacttgttggtttccatatctctggtctctatggcagttgaaggaaagagagcctcagattctaaattctctgttcgtgggactgcgtttttgctggcttctgatgctacacagtttctttgtttctgtaatagattttagataaacttttgttgagacttgctttctgttaattttgaatgaagcgccagaaaacttttataaagggaatgtaatgttaagtttcaacacaaaaaaaaaaaaaaaaagagnnnnnnnnnnnnnnnnnnnnnnnnnnnnnnnnnnnnnnnnnnnnnnnnnnnnnnnnnnnnnnntgtcc

SEQ ID NO: 129962 - DNA, 737 bp, Arabidopsis thaliana
ataagataaataaatcaattttttttttagggaggggctccctgtatttcgatttcaaaaatcggttactactcctgaattgtagaaaagaaaaagagagaaaaaactggggatattgtgtgatttgtttagttgggatccaaaactaaaatataaaatttaagtaaataagtaaaaaaaaaggggggtcttgaatcaaaataatttaaagttcttatttctgtcagagggcaatatgaatgttttatcatgttccatcaacacactaataaaagaagggttatatgagatatctcgtgtccaagtaggccaacatttctattggcaaatagggggtttccaggtccatccccaagttcttattacttcttgggttgtaattgctatcttattaggttccgcagttctagcgattcgcaatccacaaacaattccaactgacggccaaaatttctttgaatttgtccttgaattcattcgagacgtgagtaaaacccagattggagaagaatatggtccatgggttccctttattggaaccctgtttttatttatttttgtttctaactggtcaggagcccttttaccgtggaaaattatccagttacctcaaggggagttagcagcaccaacgaatgatataaatacgacggttgctttagctttactcacatcagtagcctatttttatgcggggcttagccaaaaagggattagggttttcagtaaatacattc

SEQ ID NO: 129963 - DNA, 438 bp, Arabidopsis thaliana
gataattattagaggaaaaagactaagcttgtcctacacaaatagacaacaaagctgtctcgtgtccttaagaatatacactgcaaagcgattttcattaaaagatgtgggaatcacaaataaagctttataagataatgaaagcattcaattagaatctctggacccagatcccaacctttatctaatttactactatatgttttgactttagtttatactattagtactttgttttaaggtaaactccattaataagctgttttctcttttgtttacaaagggacaaataaattataaaactgcataaaattaacgtgaaaaacatatataatcgttgattctgaaaatatgatggttcataacgtgtaaagaattaaaagatttgacgacttgattatcaatttatgaacatcaaagcacaatttgtttttttca
